United States Patent Application Publication US 2005/0228172 A9 - sequence listing, part 208

SEQ ID NO: 942245 - DNA, 813 bp, Homo sapiens
ttctatgataacaaggctttcttctggaagaactcctgaaagaccttcccgacgctgttttatagttaattatttttcatgagtagaagtactacactctaaaatatgaataaaatgtatagtattgtaaatactgttgayccttgaacagtgcaagggttaggggaccagctcctgtgcagttgaaaatccatatataactctgggctatccccaaacttaactactaatagcctattcttaactgcaagctttgctgatcaaataaacaattaatgcataatttgttaattatatactgtattcttaaagaaagagaaaagaaaattctattaagaaaatcataaggaggagaaaatatgtttactattcattaagtgaaagtggatcatcataaaggtcttcgtctgcatattcatgttgagcagcctgaggaagagaagaggagaagttgatcctgttgtctcaggggtgggagaaacagaaggaaatttgcatataagtgaacttgtgcatttcaaatccatgctgttcaaggagcaactgtacataaactagtcacatggtcatttattatcattaacaagtatgacatatggtacataattagatgtgctaacctttaatgccactgacaaatgtagtgggtttgcttataccagcctcactgcaaacacatgagtaatgcgttgtgctatgatgtcatcatggccacagtgttactagatggtaagaatttttcagctctgttatcttaagcgaccaccattgtatgcagtgtagcatttaccaaaaaaccattatgccacacag

SEQ ID NO: 942246 - DNA, 604 bp, Homo sapiens
tatataactctgggctatccccaaacttaactactaatagcctattcttaactgcaagctttgctgatcaaataaacaattaatgcataatttgttaattatatactgtattcttaaagaaagagaaaagaaaattctattaagaaaatcataaggaggagaaaatatgtttactattcattaagtgaaagtggatcatcataaaggtcttcgtctgcatattcatgttgagcagcctgaggaagagaagaggakaagttgatcctgttgtctcaggggtgggagaaacagaaggaaatttgcatataagtgaacttgtgcatttcaaatccatgctgttcaaggagcaactgtacataaactagtcacatggtcatttattatcattaacaagtatgacatatggtacataattagatgtgctaacctttaatgccactgacaaatgtagtgggtttgcttataccagcctcactgcaaacacatgagtaatgcgttgtgctatgatgtcatcatggccacagtgttactagatggtaagaatttttcagctctgttatcttaagcgaccaccattgtatgcagtgtagcatttaccaaaaaa

SEQ ID NO: 942247 - DNA, 764 bp, Homo sapiens; identical to SEQ ID NO: 939278

SEQ ID NO: 942248 - DNA, 627 bp, Homo sapiens
ggggtgtgttcttaccacatgcgtaggtcacagtgaggtattttttcacgcctggcaaacaggggcttccaaaatggtgattgttgacgatgattttgcatctctgcttcccatagcaccttcgggataggacttgcaaagctgagtaagacaagcaatctgaaaggcaggaaacacccagaacttcaggttgcatcccacacagggccaccacayagcctacagcattctctgtaaataaatatgctgagctggattcaaatcaaatggagagtttctctgcttattttctgtctcattaaagcacccaagatgggcagagccagcatcatgatcctgtcctagaagtcccagagctggttttaatgctctgctggcgccatcttgaatttttttttttttttgaaactgattcttgttctgtcgcccaggctggagtgcaatggcacgatctcagtcactgcaacctctgcctccctgcttcaagcaattctcctgcctcagcctccccagtagctgggactacaggcgcatgccactatgcccagctaatttttgtatttttagtagagatggggtttcaccatgttggcaaggctggtctcaaactcctgacctccagtgatt

SEQ ID NO: 942249 - DNA, 575 bp, Homo sapiens
tctgcaggtctttcctggcggggacaggtagaagtgggggctgcccagtcactgctgggcatgctgaaagtccttactctctgctaggcttcctctgacaccccagtgggggcaggaggagtgtactgtcactgcccaggagaggaacatcctgcctccctacttggccttctctcatgccaccccaacaggggatttggggctcctcyttccagcctggcaggggtgggagtctaggctccacctttgctggtgtggctgggagtggggcacagtgaagtgtttggctgaagtatcgccgctcttggctcacagttttctgtcttgctaggcagccctttttccattcttttttgttagagagaacaggcttttgttccggcctttgtgtgtgtgagagcctgtcgatgtttccaggttgctgacttgagttctaagtctaggacaaatgaggcaagaagacaacccaggaacgcactcccttgttctttgggtctcaaggtctctgactggtctgctttctttctaccttccagaatcatcttatatttgttctacatatgatgctcagtatt

SEQ ID NO: 942250 - DNA, 575 bp, Homo sapiens
tctgcaggtctttcctggcggggacaggtagaagtgggggctgcccagtcactgctgggcatgctgaaagtccttactctctgctaggcttcctctgacaccccagtgggggcaggaggagtgtactgtcactgcccaggagaggaacatcctgcctccctacttggccttctctcatgccaccccaacaggggatttggggctcctctttccagcctggcagggktgggagtctaggctccacctttgctggtgtggctgggagtggggcacagtgaagtgtttggctgaagtatcgccgctcttggctcacagttttctgtcttgctaggcagccctttttccattcttttttgttagagagaacaggcttttgttccggcctttgtgtgtgtgagagcctgtcgatgtttccaggttgctgacttgagttctaagtctaggacaaatgaggcaagaagacaacccaggaacgcactcccttgttctttgggtctcaaggtctctgactggtctgctttctttctaccttccagaatcatcttatatttgttctacatatgatgctcagtatt

SEQ ID NO: 942251 - DNA, 575 bp, Homo sapiens
tctgcaggtctttcctggcggggacaggtagaagtgggggctgcccagtcactgctgggcatgctgaaagtccttactctctgctaggcttcctctgacaccccagtgggggcaggaggagtgtactgtcactgcccaggagaggaacatcctgcctccctacttggccttctctcatgccaccccaacaggggatttggggctcctctttccagcctggcaggggtgggagtctaggctccacctttgctggtgtggctgggagtggggcacagtgaagtgtttggctgaagtatcgccgctmttggctcacagttttctgtcttgctaggcagccctttttccattcttttttgttagagagaacaggcttttgttccggcctttgtgtgtgtgagagcctgtcgatgtttccaggttgctgacttgagttctaagtctaggacaaatgaggcaagaagacaacccaggaacgcactcccttgttctttgggtctcaaggtctctgactggtctgctttctttctaccttccagaatcatcttatatttgttctacatatgatgctcagtatt

SEQ ID NO: 942252 - DNA, 767 bp, Homo sapiens
ggatgcacaacttgaacaccccaaacatgtcatcctttccccaaaagaggatacacaaatcttcctcttatccatctttgtgtgatactcatttctcttctagctgggtccctttttgaaattactaatcatgatgacagtctttgttttcttcaactggccacatggtcatggctgacattcatcacttacttcttccccacccagtccatattttctttgtttgtagcaagcacctcagcagccatgctttcatcattcctgaaagytctgtgccactggcaatcctgtctgagctggcttgttgtcgtttcctgctaacttttgtcacaggacatgggagtgctaagaggtgcccaagaggatctcctatggttcagacatccgctcatctgccctcatgtgaggtcaccacccagtttccacttgagagtcaggatggagcaccccagtcagtgcagtaagctctttctccacttgttggttcatggcacgagaaacacaaaggagccaggtggcagtctcagcttccagtttaatagaaccactgttgtgtcttctgtcagaatcaaacacctctagacaagcagaacccaaaataatggggacaaaaagcaaaaactttgcttgtgaattattaagggactagtaagagaaatcactcccttttccaccccttgattcccggacatcttaattcgggctttgagagaaacatcagccaatatggagttagagcaagtatcacattctggaggcccataaat

SEQ ID NO: 942253 - DNA, 636 bp, Homo sapiens
tatttatttattttttttgagaaagagtctcactctgttgcccaggctggagtgcagtggcacaatctcagctcactgcaacctccgcctcctgggttcaagtgattctcctgcctcagcctcctgcgtagctgggactacagatgtgcgcaactatgccyggctaatttttgtatttttagtagagatgggggtttcactatgttggtaaggctggtctcgaactcctgacctcgtgatctgtctccctcggcctcccaaagtgcctggattacaggcatgagccaccgtgcccagccaataatttgaactctttatgccaggttagcaacccatatgtcacaatgtaattggcaactgtatcttgtagcctgcctaacatccattcccccttctagttgcctccatctcattttcttttaactatactaccttcccatgtgcctctgaaaaagtgagctctcccttctactcctgaatgggccctgattggtgaatccaatcagcacatcccatccaactggccacagtgactggctcaatgaaaaataacatgaatccagccaatggaaggttaggagaggtttactgggaacttagcaggaataaaagtgcttgatcttctcataaaactgt

SEQ ID NO: 942254 - DNA, 597 bp, Homo sapiens
gctgagactccgctacttgttacaagagcaaattacagtctgtttacacatctaggtaggctacagttcatgatgtacaaagaagcctttaggccagacttaaaatatgtaaggaggtagctttaggctaaatttaatttaacaagaagaaaagtaaatcaatagaaatagtagatagatttggtagattgggacattaaaacggttattgaaaccatattttatatgttcaagaagatgaaagaaagcattagtatattaaggaaagacatgaaatatatttttaaaagactaaatccaacttctagagatgaagagtacaatgtctgagatkaaaaatatactgaattcagattaatagctgattagacactgtagaagaaaagagcagtgatattgaagacatagtgatagaaactattcaaaatgaaagacacaggggaaaggacaagaaaaaatgaaagaatagcatcgaacacaactttaaggagtctaataagtgtgcattttgaaggagagtaaagcgaggataagaaaaaaattgaaagaatggccaatagttttccaagcttgatgaaaactataaacccatcgatc

SEQ ID NO: 942255 - DNA, 810 bp, Homo sapiens
tccgaacctcttcttggtttgctcaaattgctaatttatctaaagtttttctttaacataactatggagaccttttaagaaaatcagtgacagcagcccacccttcttacagtcagggataaaatgagtttaaaacacactttccggctgggcacagtggctcacgcctgtaataccagcactttgggaggctgaggtgggtggatcacctgaggtcaggaattcgagaccagcctgaccaatatggtgaaaccccatctctactaaaaatacaaaaattatctgggcgtggtggcatgcacctgcagtcccagctacttaggaggctgagaaaggagaattgcttgaacctgggaggcagaggttgcagtgagccgagatcacgccactgcactccagcctgggcgacagagcaaggttctgtctcaaaaaaacactttcctataagattccatgtgtatgaaatagatacagacagaaagtacattagtggctgcctagggctaggggaaggagtaatggggagtgactgctaatgggtatggcagtgataaaaatattctcaaattggattrtgatgatggtagcataattctgtgaaaatactaaaaacactgaactgcatattttaaatggctgaattatatggtatgcaaattatatctcaatgaagctatctttaaaaaagcattttccttcagatatgcttcataccagaattatgtgctctagtagtatttttaattaactaaaaaacacattttagatacagttggtgaccaatgttatttaagccaaccactgtcctct

SEQ ID NO: 942256 - DNA, 503 bp, Homo sapiens
gtagctgggactacaggcattggccaccatgcccagctaatgattctattttttttgtagagacaaggactcaccatgttgcccaggctggtctcaaactcctgagctcaagcgatctgcccgccttaacctcccaaagtgctgggattacaggkgtgagccaccacgcctggccagaagcctctcatttggtttctaattttcttcttttcacttaacctttcctttggtctcattcattctttttgcccattttttctctctgtttctgtatacacatgtgcttgtgcctgtacacacatacatacatgcatgtatgcacacacatacaccattcactagggtttcccaaaatgaccagcgagaatgtgtctccctcatccactcctcctgtggtttcttccctctcataagctgcaaaggccatcaccacctgagggagtcaccatgactggttcctccacggccccatctcctgtccaccttcagtgttggtgtgggat

SEQ ID NO: 942257 - DNA, 635 bp, Homo sapiens
ttacaacgcaaattgagctcccagcctcacagggtaaaagtgagggcattgattaagaaagaatgggatcctgtaaattgggataggaaggtgcgggaagaccttgatgaagctggggacactgagcccctaaattctgattattttgcttcgcaagtggcagatgtctccccatctccagtggaattgacctccttacccccagcagaaatggcctcctcaaacccagtggccatggccttcccactctcaggtaatggcatcatcatcccagtggtatcagcctgtccacttgggtctcaggaggattaaccctgcattgcctgaggaaattgtaatgacttcacttgaggcagytgccttggaagacaatgctgattctcttcaggacccactcccaccatccctctttgcttccagacctataacttgacttaagttctaacaggcccctaaaggtgagccatgtgtgacccaagagagtacttatagtcagaagaactgcttgagtttttaaattaatgtaggcagaagtccatggaacatgtgtagggctgtatactaaaagtgtgggataattgtggaaggaacataaaattgggtcaggctgaatttattgacatgggctcactaag

SEQ ID NO: 942258 - DNA, 829 bp, Homo sapiens
tccacagatctctggggcagggacaaaatgctgccagtctctgcacagcaagagtgatctttactccagtttccaacaagttcttcatcttcatctgagaccacctcagcctggactttattgtccatatcactatcagcattttggtcaaagccattcaacaagtctctaggaagttccagactttctgacattttcctatcttcttctgagccctccaaactgttccaacctctgcctgttagcagtttcaaagttgcttccacatgttcgggtatctttatagcagcaccccactctactggtaacaatttactgcattagtctgttctctagctgctaataaagacatgcccaaggctaggtaatttataaaggaaagaggtttaactgactcacagttccacatgctgaggaggcctcacagtcttggcagaaagggaaggaggaacaaagtcacatcttacatggtggcaggcaagagagcatgtgcaggggaactccccttaataaaaccatcagatctcctaagacttattcactatcacaagaacaacatgggaaagacctgccccatgattcaactacctcccaccagatycctcccacaacacgtgggaattatgggagctacaattcaagatgagatttggatgaggacacagctaaaccatatcattggctctgaatggagagacctcaaacttctgtatggattatcaaggtcgagtgatcaatggagttttaactcaggtccatcttccactgggttgagtaggcctcttaatccatcctgtggttattccccgagttccagaattcactggaa

SEQ ID NO: 942259 - DNA, 829 bp, Homo sapiens
tccacagatctctggggcagggacaaaatgctgccagtctctgcacagcaagagtgatctttactccagtttccaacaagttcttcatcttcatctgagaccacctcagcctggactttattgtccatatcactatcagcattttggtcaaagccattcaacaagtctctaggaagttccagactttctgacattttcctatcttcttctgagccctccaaactgttccaacctctgcctgttagcagtttcaaagttgcttccacatgttcgggtatctttatagcagcaccccactctactggtaacaatttactgcattagtctgttctctagctgctaataaagacatgcccaaggctaggtaatttataaaggaaagaggtttaactgactcacagttccacatgctgaggaggcctcacagtcttggcagaaagggaaggaggaacaaagtcacatcttacatggtggcaggcaagagagcatgtgcaggggaactccccttaataaaaccatcagatctcctaagacttattcactatcacaagaacaacatgggaaagacctgccccatgattcaactacctcccaccagattcctcccacaacacgtgggaattatgggagctacaattcamgatgagatttggatgaggacacagctaaaccatatcattggctctgaatggagagacctcaaacttctgtatggattatcaaggtcgagtgatcaatggagttttaactcaggtccatcttccactgggttgagtaggcctcttaatccatcctgtggttattccccgagttccagaattcactggaa

SEQ ID NO: 942260 - DNA, 617 bp, Homo sapiens
aatgaaactcaagttaaatatgtattgcaacttgtgctatcaattaaagctggtgtgaagtgaacactatttgtaaaacattgaaaaatgtgttatctagaatatgaaagtaaatttttataatttgaatgtttagagccattcattaatcattttcaatccagcactttgccacaatcacaataaatttgatgatcactgtttgaagcctgtattgaaaaagatttcttatttaatagtaaaatgtgaaaagctatatgctatgaaggaaatgcttggtttttttttcttttttttttttttctttttagaaggaggcttgctctgttgcccaggctggagtgcattggtgccgtcttggcttaccacaacctccgcctcctgggttcaagcgattctccctcctcagcctcttgagtagctggkattacaggcacacgccaccccacccagctaatttttgtatttttagtagggatgggttttcaccatgttggttggccaggctggtcttgaaatcctgacctcaggtgatctgcctgcctcggcctcccaaagtgctgtgattacaggcgtgagccacctcgcccagccaacacttgttatttctgttgtag

SEQ ID NO: 942261 - DNA, 654 bp, Homo sapiens
acaacacccctctgaggtgagtgagacctcatccattcactgcaaccttcttctgctttttcctctctacagagctgaagagacagaaactatttcccagcctgccttgcaaacagggctccacatatgatttggaagctgctgattaggtgcagccatgagagagctgactttggaactgaattaagtgcgaagggagtggcagtaagggtcatatatattttwgttggtgcagatctagtcggtgtggaggggccatgggggtaaacattgtcatggtagcccctgatctccatcacagttgaggtgttacatcactggaagcaaaggttgattcagaggtcctggggctgtgccacttcctgattctagagttttgtgcttgagttaaaagaggtggcttccctggtgggttagtcctgcagtattgttttatgagtctttcctgcaggcctcttctctagcctgcttctttgacccatgtgaaggttttgtgagcacactactcctatatgaaatccatttctgcttaaaatagttagagtggttcctgtgactgcaagggaaccttgcctgaaacagatggaactatcaagcccatcatacagatgcatacctgaaaaaatgaatggctactcaaggtcatagaggttg

SEQ ID NO: 942262 - DNA, 652 bp, Homo sapiens
tggctgggctgtgtctccagccttccctcatcacctccctgctggtcccctcagccttcaccagactgcgctgtgtgctgtctcctgcccatggctcaggtctgggaggtttctgtagctcagccctataagtcagagctaaattgttactggagacaagggtctagttaattcttttagtattatcctcctcccatgcttcagtcacctgtactcccacttttgaaatatgatctctgaactaayagtaatagctaacactgctctgtttattatcaatactttacacacagcatgatatggtttggctgtatccccatccacatctcatcttgaattgtagctctcataattcccttgtgttgtgggatggagccagtgggagataattgaatcatgggggcaatttcacccatactgttctcatggtagtgaatacgtctcatgagatctgatggctttgtaaggggaaaccccttccactgggctctctttctcttctcctgtctgccgccatgtgagacatgcctttcaccttccaccatgattgtgacttctttcttttgtaaattgcccagtctcgggtatgtctttatcagcagcgtgaaaatggaccaatatgtaacacatataagtaggtcatttaattgtc

SEQ ID NO: 942263 - DNA, 652 bp, Homo sapiens
tggctgggctgtgtctccagccttccctcatcacctccctgctggtcccctcagccttcaccagactgcgctgtgtgctgtctcctgcccatggctcaggtctgggaggtttctgtagctcagccctataagtcagagctaaattgttactggagacaagggtctagttaattcttttagtattatcctcctcccatgcttcagtcacctgtactcccacttttgaaatatgatctctgaactaatagtaatagctaacactgctctgtttattatcaatactttacacacagcatgatatggtttggctgtatccccatccacatctcatcttgaattgtagctctcataattcccttgtgttgtgggatggasccagtgggagataattgaatcatgggggcaatttcacccatactgttctcatggtagtgaatacgtctcatgagatctgatggctttgtaaggggaaaccccttccactgggctctctttctcttctcctgtctgccgccatgtgagacatgcctttcaccttccaccatgattgtgacttctttcttttgtaaattgcccagtctcgggtatgtctttatcagcagcgtgaaaatggaccaatatgtaacacatataagtaggtcatttaattgtc

SEQ ID NO: 942264 - DNA, 787 bp, Homo sapiens
gttttgtctggcccattaagtaggaatggtgaacactctcgattgatttgatgagagaatactacctctgagccccaatgaagtgagattttatcccctctaaaaaaagaattcatttttttctcattagttgaactgtatttttttaatatccttgmtttttaataatattgtcatattttaattttcattaataaaaaagtatggaaatgtgctttcactctttttatggaagtaactgctgcagggcatcgtggctcatgcgtgtaatcccagcactctgggaggccgaggcaggtggatcacctaatatcaggagttcaagaccagcctggccaacatggtgaaaccctgtctctactaaaaatacaaaaattagctgggtgtgatggtaggcacctgtaatctcagctactcgggaggctgaggcaggagaatcacttgaacccgggcagggaagattgcagtgagctgagattgcaccgttgcactccagcctaggtgacagagtgaggatctgtctcaaaaaaaaaaaataataataagtaactgcatagtaggtttgattttgcctcttgccctacaacacctgaagtatgcactatctggctcttcaccaaaaagggctactgagctctccctggtctaggtgttggtggagaaaatggatgggttcggatgtattttggagtgagagccagtaggactttaattttaatgctggcagaacatagactatgctgcagggtgggacagagtcacttgatccctaagacaagtctaagac

SEQ ID NO: 942265 - DNA, 539 bp, Homo sapiens
gcctggctaatttttgtattttttagtagagacggggttttggtatgttacccatgttggtctcgaactcctggtctcaagtgatccaaccgcctggtcctcccaaagtgctgggattacaggcatgagccaccacgcctggcctccttatgttttctytgatacaatggttgttcttaattccagctacacattagaatcatttggtgatgtctgggccacattccctgatattctgataacattggtctggggtaaggcccccacaaggagatttttttttttttttttgagtcgggttctcattctgccgctaaggctggagttcagtggtctcattatagctcactgcagccttgatttcttgggctcaaacagtcctcccacctcagcctcttgagtagccgggactacagacatgcaccaccacacttggctaatttgtaatttttttgtagagatagggtcttgctttgttgcccaggctggtcttgaactcctggtctcaagtgatccttcctctgcctcccaaagtgctg

SEQ ID NO: 942266 - DNA, 686 bp, Homo sapiens
tataaacttcatgcagatctctggtgaccctgaatcaagcatgtatggagtacaatccaagaagctcagctaaagatagaagaattgaactaagatttgagttgacacccaagagacagtttgcaatctgagtctaacaaagctaattacccactataacaacamcaacaacaacaacaacaactcaacactcttctgtgaaatataacagaatccggagtacccacaacacaacattcacaatgtccagaatataatccaaaaatattcaacacagaaagatccaggaaaatgtgagctattttcaacagaaaacactatcactgaagactgatccctacttggtctgaatgttggaatacatagataagatttcaaagtagttattatatgtactcattaacatcagagaaaatatgattgaaataaatttaaaaaaatctcagtagagacactattaaaaaaacaaatagagctgataagtagaatatctgaagtgaagattcacttaacggatttaaaagcagaatggagatgaagcagaaagactcagtaaacttgaagatagagcaataaaaagtatgcaatcctaagaatagaacaacaacaacaaaaaatcccaaacaaataacaaatgaatagaatctcagatacctgtgagacaaaatagaaatatctaacatatg

SEQ ID NO: 942267 - DNA, 686 bp, Homo sapiens
tataaacttcatgcagatctctggtgaccctgaatcaagcatgtatggagtacaatccaagaagctcagctaaagatagaagaattgaactaagatttgagttgacacccaagagacagtttgcaatctgagtctaacaaagctaattacccactataacaacaccaacaacaacaacaacaactcaacactcttctgtgaaatataacagaatccggagtamccacaacacaacattcacaatgtccagaatataatccaaaaatattcaacacagaaagatccaggaaaatgtgagctattttcaacagaaaacactatcactgaagactgatccctacttggtctgaatgttggaatacatagataagatttcaaagtagttattatatgtactcattaacatcagagaaaatatgattgaaataaatttaaaaaaatctcagtagagacactattaaaaaaacaaatagagctgataagtagaatatctgaagtgaagattcacttaacggatttaaaagcagaatggagatgaagcagaaagactcagtaaacttgaagatagagcaataaaaagtatgcaatcctaagaatagaacaacaacaacaaaaaatcccaaacaaataacaaatgaatagaatctcagatacctgtgagacaaaatagaaatatctaacatatg

SEQ ID NO: 942268 - DNA, 820 bp, Homo sapiens
aagagacctagacttgggtgtatatagctgcgccctagaagcttcttttcctggaagatggcctaatgcctagttgtctgacctgtgaccaggagtcttgcacacagggaactcatttatactggcagacacccttgtggcttttgtctaatctgtgtccattttatgcttgctctggtggtagaagtcaaacttcgtgttctccttggtgttccaggaaaaacacagcctggggtagccccttgttcttcaaatagaaggtgcaaattcaatacaccaccacaacaggtgttcaaagattttttacttacagattctggacagggaaggtgcaatgggtagagagggcagtcctccttccccagatgacacaaggcagtaatacacagagtcaggaaagagtgagagagagagagagataaagagagagagagagrgagagagagagagagagagagagagagagagagagagagagagagagagaggcaaccagcagtatagaaaagaaaatagggtgtgagtaattttaagtttgtgggcaaatgccttaatattccctttaaaggaagtgacagcccagtctgctagatgagagagttgcctgcaaattcttatttctggctactggcttgaaccatttggatgtggtgtagaactagagacaatgtcaagggtgacacagttctggtgtgagaaagttaaaactggattcaaaatgtatccaacagaaaattgtatgaattcactacaccgtttacctagcaactacatatctatatatttattctacagaaacagtctcatgaatttgcaaagg

SEQ ID NO: 942269 - DNA, 550 bp, Homo sapiens
ctctgttgtgtctttactggagcaaatcagcaaaactgctggcatttggtatgtagtaattgatgtggctcatgctatttttttctccataccaatttgaagggaccactagtcacagtttgcttttacccagcagtgccaatagtatatcttcacagtgtggcctcagagctgtgtcaattctcctgctctctgccacagatagtctgcagagttcttgattatcttggcattccacaaaacgttcactgatggcagtatgctgactagatcttgggcaagaaagtagaaagtattttatttttaaaattcatttagtatttctttaaaattctttttaaaatattaatttcagttttagattcagggagtwcatgtgcatgtttgtttcaagggtatatagtgtggtgctgaggtttgagcctctactgatcctgtcacccagacagtgaacatagtacccaagaggaagtttttcagcccttgccatccactctccttccctccatttcgagtctgcactgtctgttgtttccatctttatgtctgt

SEQ ID NO: 942270 - DNA, 658 bp, Homo sapiens
ataaaacctaatggtcaataccagatcatgtaaataagtttttcccctctggagtgttttccataaactagccaattcacagcccccttagggaagcctgaagggtaatacccatgggctttgatgaaggtggccccgacaggctcactgacttgctcagtgggtgatctccctgctgtctccagacttsacactggcctgccttgggcaccaagtctctctgacctgtgaataatacatttcttctgtttcatgcattttagtttcacctccttattgtgtcttacctgatacacacataaacctaactttcccctctgtcagcagtctcctgcagagtggctatcttggcttatggccactcttaagagagagacacctcaagacaaattagaacaaaccataaccatagaaatcacaacagccgtgaacattttgggagctgagaagatgtgcactggagggcttaatgttctgtgtgtcaatttcccctctctttaataattggttcattatgttttcagcaactgctgttgtcctcggtgtcagaccctgtctggctcaatctctacttagagcagtagttcccagactttagcttgcatcagaatcatctagagagggcttattgaaacacagattggtgagccccatttta

SEQ ID NO: 942271 - DNA, 791 bp, Homo sapiens
catagagattgttatattgtccgatataataatatacaattcattatgctaggaatccaaggggtagaaatccagggagcagatttgcaaaataaaattctgaacagaacacaaaaatataaagtcacacagactgctggactgataacaaggtctttaagtgaagaaagatcagaggggcccttgtcacctaaggagagccctagagcttagctgagatctctctggttttcaggcaggaccacccgtcacacaggaccaggctttcctcctccagcttctccataattcataaacacgtagcagtgaaatccacctggcctctaatatttgatgcttctagtttgactgtcaaggcatggagattttgactgggtaacagaccaaactgctcaaaattttacaagtattgctgctcaaagctagtttggaktgtgttcttattgtctggaaatacttaggtggctatatttctgcaagcaatagttcactgcttgctgctgctgggtaatgtatgcttcgaggaattgtcttacattccaatgcctgaagaagtgtttcttttttttttacctagccaggaaagacatgagttactaaagcaaatatatagaaccaatgcctctgaattgctttgacttttttttttttttttggtggagggacctaaaattaaaacctaaataaacttatacaccatagcttaaaaaacaaagactaaaccagcttctttaaaatgattgcaaagttttcagctagtgtaagatgtaatataatgggagaatgtgaac

SEQ ID NO: 942272 - DNA, 655 bp, Homo sapiens
atccatagtgtgtaatgcatggttcatagtgtgtgtgcatgtgtgtaagtgtgtgtgtgtgtgtgtgtgtgtgtgtgtgtgtgtagtgaaaagggcacctgatttggatcaagtgtcaaagtgtcaccatctttgcaaatttaaatttggtaattatggccagatgcggtggctcacgtctgtaatcccagcactttgggaggccgaggcaggcagatcacctgaggtcaggagtttgaggccagcctggccaacatggtgaaacccccctccctaataaaaatacaaaaaaattagccaggtggggtggtgggtgcctgtaatcccagctactcgggaggmtgaggcaggagaagcgcttgaacccgggaggtggaggttgcagtgagccgagatcatgccggtgcactccagcatgggtgacagagtgagactccgtcttaaaaaaaaaatggtaattattctcggttagtgagttatttggtgatgggtggacatgtgactaggcaaagcccttcgtagcttggtagcagttcagtgttcagaacttggaaggtagggaactttgaagcaatgatacccttcacagtaattaagatagtactctccttgtacttgatggtttgataaggataaaaaacagtaactatttttt

SEQ ID NO: 942273 - DNA, 760 bp, Homo sapiens
cttttttattctttattattatcattattatactttaagttttaggatacatgtgcacaacgtgcaggtttgttacctatgtatacatgtgccatgttggtgtgctgcacccattaactcgttatttagcattaggtatatctcccaatgctatccctccccactctccgtaccccacaacagtcccctggtgtgtgatgttccccttcctgtgtccatgtgtcctcattgttcaattcccacctatgagtgagaacatgtggtgtttggttttttgtccttgcgatagtttgctgagaatgatggtttccagcttcatccatgtccctacaaaggacatgaactcatcattttttatggctgcatagtattccatggtgtatatgtgccacattttcttaatacagtctatcattgttggacatttgggttggttccaagtctttgctattgtgaatagtgccacatgcacacgtatgtttrttggtctcattcttaaagatgcttacaagagaggagtcagtgacctgcagtatagtcactcctgctgcaagggatcctaaagttgtgactgattctcactagccccttcctgctctgcccaatctagagttacctcctgcttgactggcaccttggccagtctaggtagttggcttgatgggatgattcagatccttatccccgagggatctaaagcaagggtcactgtagtagcttctgtgtgtatacagaccagattgcctttttagaagtgaag

SEQ ID NO: 942274 - DNA, 760 bp, Homo sapiens
cttttttattctttattattatcattattatactttaagttttaggatacatgtgcacaacgtgcaggtttgttacctatgtatacatgtgccatgttggtgtgctgcacccattaactcgttatttagcattaggtatatctcccaatgctatccctccccactctccgtaccccacaacagtcccctggtgtgtgatgttccccttcctgtgtccatgtgtcctcattgttcaattcccacctatgagtgagaacatgtggtgtttggttttttgtccttgcgatagtttgctgagaatgatggtttccagcttcatccatgtccctacaaaggacatgaactcatcattttttatggctgcatagtattccatggtgtatatgtgccacattttcttaatacagtctatcattgttggacatttgggttggttccaagtctttgctattgtgaatagtgccacatgcacacgtatgtttgttggtctcattcttaaagaygcttacaagagaggagtcagtgacctgcagtatagtcactcctgctgcaagggatcctaaagttgtgactgattctcactagccccttcctgctctgcccaatctagagttacctcctgcttgactggcaccttggccagtctaggtagttggcttgatgggatgattcagatccttatccccgagggatctaaagcaagggtcactgtagtagcttctgtgtgtatacagaccagattgcctttttagaagtgaag

SEQ ID NO: 942275 - DNA, 593 bp, Homo sapiens
gctacaaaggacatgatctcattcttttgtatggctgcatagtattccatggtgtatttgtaccacattttatttatccagtttactgttgatgggcacctaggttgattccatgtctttgctattgcaaatagtgctgtgatgaatctacatgggcatgcatttttatggtagaaacatttatattcctttgggtatatacccagtaataggagtcatgggccagatggtaattctgtgttatgttctttgagaaatctacaaattgctttccacaatggctgaactactttacattcccaccagcaatgtacaagtgttccataaaaggagaattttagaaggactaaagatataatcacagagttaagcactaaagtattaatgatcatatttggatatwacagaaattaaatcagtgttatggaaatcaaacttgaaaatatttcagaattgaggaaagagatcaaaatgaaatcctgatgatattcattgaagaaaaagaataagggtctaacatatagataattgatgtgtctgctgaagagaacaaatcaaacagggttatttaaaatgtgataaacaaaatattt

SEQ ID NO: 942276 - DNA, 711 bp, Homo sapiens
aaggccagcaatatgcctttactgtcctacctcaggggtatatcaactctccagctttgtgtcataatcttatttggagagaccctgattgctttttgcttccacaagatatcacgctggtcccttacattgatgacattatgctgattggatccagtgagcaagaagtagcaaacagactggacttattggtgagacgtgcatgccagaggatgggaaataaattcaactaagattcaggggatcttctacttcagtagaatttctagcggwccagtgatgtagggcctgtcaagatattctttctaaggtgaaggataagttgctgcatttgacctctcctacaaccaagaaagagccgcaatgcctagtaggcctatttggattttggaggcaacacattcctcatttgggtgtgttactccagtccatttattgaatgatccgaaaggctgccagttttgagtggggctcagaacaggagaaggctgtgcaataggtccaggctgctgtgcaggctgctctgccacttgggccatatgaccctgtagattcaattgtgcttgaggtgtcagtggcagatagggatgctgtttggagcctttggcaggcccccataggtgaatcacagtggaggcctctaggattttggagcaaggccctcacatcttctgtagataactactctcctttggagagatagcccttggc

SEQ ID NO: 942277 - DNA, 571 bp, Homo sapiens
ctggctccgagggtcctacacccacggagtctcactcattgcaagcacagcagtccgagatcaaactgcaaggcggcagcgaggctgggggaggggcgcccaccattgccaagttagttgtttgattaggaaaacaaagcggccgggaagctccaactgggtggagcccaccacagctcaaggaggcctgcctgcctctgtaggctccacctctgggggcagggcacaaataaaaagacagcagtaacctctgcagacttaaatgtccctctctgacagctttgaagagagcagtggttctcccagcacgcagcttgagatctgagatcgggcagactgcctccttaagtggkcccctgacccccgagtagcctaactgggaggcaccccccagtaggggcggactgacacctcacatggccgggtactcctctgagacaaaacttccagaggaactatcaggcagcagcatctgctgttcaccaatagccactgttctgcaaccaccactgcagatacccgggcaaacagagtctggagtggacctctagcaaactccaacagacctgca

SEQ ID NO: 942278 - DNA, 571 bp, Homo sapiens
ctggctccgagggtcctacacccacggagtctcactcattgcaagcacagcagtccgagatcaaactgcaaggcggcagcgaggctgggggaggggcgcccaccattgccaagttagttgtttgattaggaaaacaaagcggccgggaagctccaactgggtggagcccaccacagctcaaggaggcctgcctgcctctgtaggctccacctctgggggcagggcacaaataaaaagacagcagtaacctctgcagacttaaatgtccctctctgacagctttgaagagagcagtggttctcccagcacgcagcttgagatctgagatcgggcagactgcctccttaagtggtyccctgacccccgagtagcctaactgggaggcaccccccagtaggggcggactgacacctcacatggccgggtactcctctgagacaaaacttccagaggaactatcaggcagcagcatctgctgttcaccaatagccactgttctgcaaccaccactgcagatacccgggcaaacagagtctggagtggacctctagcaaactccaacagacctgca

SEQ ID NO: 942279 - DNA, 572 bp, Homo sapiens
ttgttcaagtagcatctcctattcaggggaatcaaaaaaataggccattttcccaatggcaagatcttcttgaatttttggttcattggattgtatgatgttctccttattttctagcatctttccaagtgtccagagttatccaatcaaaggatcatcttgaacaaccaccgatctgatgcatggattttcctttatgatatagtccagcttctggttaaagtgtccaaagggatttgaaactcactgcctcctatggtattgaatgtggctccagatattagattctttccttctactgacctgaaatctgtcwcctgtaagttccatccttcggtcctaagttatgccttgttgttgcatagtttaactcccccacagaaggcagtctttgagcacacacaccttaactctcaattcactcctccaagtttgttcctcatacctcctgattcttttttttttttttttttgggatggagtttcgctcttgtcacccagactggagtgcagtggcgcgagcttggctcactgcagcctctgcctcccaggttcaagcgattctcctgcct

SEQ ID NO: 942280 - DNA, 768 bp, Homo sapiens
acatttggatgagcacatatcgctcgcagagcattaaaagatctctatcattatcctcactaggtaaatacttgcggacattattaccagcatactgatgttcaggacttcagttatttaccatcttgtcgctaayattactgatttcagtggctatgatttcactaaattagagcatgtggctaacgtttgcattctattggccttttccaaggtggctgataagctcgattttcatacagtgatcgctgtattttgctgcttctttatctaggagccaccctgctatataaatcaatgttttctaatttttatttcatttaaacggtaacattaagaagtccaattcagtatacacaaggaccacagggtatattctcagagctattgtaaatcactgtactgctaatcgattgggaaggtggttactagcctggatataaattcatataatgtttgagtagtatttacttgacaatactaatgtggacaggaggcagggaaatactgggtagaagagggtggttccctggcaaaggatccaccctcaagcctggaaacctgtggtccaaaatgggaacaggcattcctattttcatgcccaaatgttgccttttggcctgccacacccctgtatcctgtacctatataaactccaagccccaggctccatgagccgaagaacagaggagcagaggaacagaggaacagagaagcagaagagcagcacagcagagaaggagacaagagaaggagtgtctgaacgta

SEQ ID NO: 942281 - DNA, 622 bp, Homo sapiens
gtttttgaagccaagactgaccattgtaaaagtcctagggcgcttaagaattattctaaatctactgtgcccatgctctataaatggaacaaaactgggatgacagcacatctcttaacagcatggtttactgaatattttaaacccactgttgagacctactgctcagaaaagactcatttcaaaatattmctgctcactaacaaagcacctagtcacccaagagctctgaaggacaggtacagggagattactgttgttttcatgcctgctaacacaacatccattctgcagcctgtggatcaactttcaagtcttattatttcagcctcttattatttcaaaatatatttcaaatatattttgtagggctattcactgccatagatagcgattcctctaatggatctgggcaaagtaaactgcaaaccttctaaaaaggattcaccattccagatgccattaagaacatctgtgatccatgggagatcaaaacatcagcaataacgggagtttggaagacaatgattccaactctcatgggtgactttgaggagttcaagacttcagtaaaggatgtcacagcagatgtggtggaaataacaagagaactagaattaga

SEQ ID NO: 942282 - DNA, 622 bp, Homo sapiens
gtttttgaagccaagactgaccattgtaaaagtcctagggcgcttaagaattattctaaatctactgtgcccatgctctataaatggaacaaaactgggatgacagcacatctcttaacagcatggtttactgaatattttaaacccactgttgagacctactgctcagaaaagactcatttcaaaatattactgctcactaacaaagcacctagtcacccaagagctctgaaggacaggtacagggagattactgttgttttcatgcctgctaacacaacatccattctgcagcctgtggatcaactttcaagtcttattatttcagcctcttattatttcaaaatatatttcaaatatattttgtakggctattcactgccatagatagcgattcctctaatggatctgggcaaagtaaactgcaaaccttctaaaaaggattcaccattccagatgccattaagaacatctgtgatccatgggagatcaaaacatcagcaataacgggagtttggaagacaatgattccaactctcatgggtgactttgaggagttcaagacttcagtaaaggatgtcacagcagatgtggtggaaataacaagagaactagaattaga

SEQ ID NO: 942283 - DNA, 694 bp, Homo sapiens
tcatcttccaccatgattgtaagtttcctgaggcttccccagccatgcagaactgtgagtcaattaaacctcttttccttataaattacccggtcttgggtagtttattatagcagtgtggaaatggactaatacagaaaattgataccaggatagtrgagtactgctataaagataacctggaagtgtgaaagtgactttgcaactgggtaacaggcagaagttgaaacagtttggtgagcttggaagaagacaggaaaatgtgggaaagttttaaatttcctggagacttgttaattggctttgaccaaaatgcagatagtgatatatggacgatgaagtccaggctgaagtggtcctagatggagatgaagaacttattgggaactggagtaaaggtgactcttgctatgctttagcaaagagactggtggcattttgcccctgccctagagatctgtggaactttgaacttgagatgatttagcgtacctggtggaagaaatttctaagcagcaaagcattcaagaggcgatctggctttttctaaaagcatacagtcagtcgtatgcattcacaaatagatggtttgaaattggaagttaggtttaaaagggaagcagagcatacaggtttggaaaatttgcagcctgaccatgaggttgaaaagaaaaacccattttctggggaagga

SEQ ID NO: 942284 - DNA, 734 bp, Homo sapiens
tcatggccctgaatttccaggtcatggtttcaggtggggaaacccacacagagcctagaggactcgtggagtggaggacatgaagtgtgtggagagatcaaggtagttgtaattcacaggacagggtattggtgaggagagagttgctccaaaagagaatccagagatgtgcagagtgatccctgagaatatagctgagtaatgatgggtacatgcatgtgaaagaaactgaagccagggggaaaatcaccaaaaagaattagcattaacagtgcttggtgttcacacagggacaggaataatgcctcttcccacgagtcaggtgagaaaacttaacattcatggtagatgactgagaagggtcttgcctcactagtaaggaataactagtcctaggctgataactgcttctatcccacctaacaaatctaaaaatgcaamgctcaaaaggatcaaactgtttccaagtaactcaactatgtgacagaaaaaagctcaagaatattacaaaaacacctagcattcaacaggtttaaattcagcgtccgacatttaataaaaaattatgaggcataaaatgatacagggaaatgccacatgtaataataagcaatcaaaattgattcaaagttgacagagatgttagaattagcaaacatggatatttaaacagttttcatataataactgtattccataggttcaaaagttaagatacagacgatattatgggt

SEQ ID NO: 942285 - DNA, 773 bp, Homo sapiens
tgttatggcaaccctggtaaactgatatacccacaaacccaggtgtggaaataatgaagccccttcacggagaacaaacaggctgtttattcagagcttgctgtagcaagggagttggccaccatcacttgcatggggcagagactcaaaggcaggcagaggagtgggaaagtgtcattgggggaaaagggaaggcttcaactaggatctgactggaggttgttggcacagggaaactggaggtggcctaattagcagtaggacattgtattagttcattctcacactgctataaagaactacctgagactgggtaatttataaagaaaagaggtttaagtggctcgtggttccacaggctgtccaggaagcatgattctggcatctgctcagcttytggggaagcctcgggaaactgacaatcatggtggaaggtgaagaggaagcaggcttgtctttcatgactggagtaggaggaagagagcaatgggagagctgctacacacttttaaacagccagatctagtgataattcactcactatcatgagaacagcaccaaaggggaaaccctcccccatgatccaaccacctcccactgggccccgcttctaacactggagcttataatttgacatgagatttaggctaggacacagacccaaaccatatcagacattttatgtgattttggttttggcgaaatatttgactttttttctgagatgaaaatcagggcaaaagtaggaaagctggcagtcgttgaccaagtcc

SEQ ID NO: 942286 - DNA, 541 bp, Homo sapiens
caacatttatgggcctccagaatgtgatacttgctctaactccatattggctgatgtttctctcaaagcccgaattaagatgtccgggaatcaaggggtggaaaagggagtgatttctcttactagtcccttaataattcacaagcaaagtttttgctttttgtccccattattttgggttctgcttgtctagaggtgtttgattctgacagaagacacaacagtggttctattaaactggaagctgagactgccacctggctcctttgtgtttctcgtgccatgaaccaacaagtggagaaagagcttactgcactgactggggtgctccatcctgactctcaagtggaaactgggtggtgacctcacatgagggcagatgagcggatgtctgaaccataggagatcctcttgggcacctcttagcactcccatgtcctgtgacaaaagttagcaggaaacgacaacaagccagctcagacaggattgccagtggcacagarctttcaggaatgatgaaagcatggctgctgaggtgctt

SEQ ID NO: 942287 - DNA, 732 bp, Homo sapiens
gcctgattcctgccacacctctttattcaggcagtggtcaacagtttttaatgccctcttcaaaatgacagaaataagggataaggctgtgtgcctcactgaggtgctgtccaactgggaagaaaaagagttaaatgcacacatgtctctaggatacacagatttgctaagctatgggcttggctggcatttgcccctcctcaggtcactcacagggaaagctgcatgaaactgctggtctctacgctctgagaagaggcgacctgggtacctcgccctcctgacatcctctgggtctgacttcagcaattgccaggaaatgaccactaatggtggcatccagcagtagtttcatttttatcatctgctctttggtaagccttgagacaaccactcagctaccatgaaagttctccattaacaacagatctcaccagaacccactctgccactattttttttttgagtcagggtctcactctgtcgcccaggctggagtgcaatggtgcgatcatagctcaccgcagcctcaagctcctgggctcaggcaatcctcccgcctcatcctcccaagtagccaggactayaggcacctactgcttctggctttctttttttttttaagagatgagacttagtatgttgcccaggccggcctcaaccttctggcctcaagccaatcctcctgcctcagcctcccaaagcactgggattatgagtgtgaaccactgt

SEQ ID NO: 942288 - DNA, 636 bp, Homo sapiens; identical to SEQ ID NO: 942253

SEQ ID NO: 942289 - DNA, 585 bp, Homo sapiens
gctgagactccgctacttgttacaagagcaaattacagtctgtttacacatctaggtaggctacagttcatgatgtacaaagaagcctttaggccagacttaaaatatgtaaggaggtagctttaggctaaatttaatttaacaagaagaaaagtaaatcaatagaaatagtagatagatttggtagattgggacattaaaacggttattgaaaccatattttatatgttcaagaagatgaaagaaagcattagtatattaaggaaagacatgaaatatatttttaaaagactaaatccaacttctagagatgaagagtacaatgtctgagatkaaaaatatactgaattcagattaatagctgattagacactgtagaagaaaagagcagtgatattgaagacatagtgatagaaactattcaaaatgaaagacacaggggaaaggacaagaaaaaatgaaagaatagcatcgaacacaactttaaggagtctaataagtgtgcattttgaaggagagtaaagcgaggataagaaaaaaattgaaagaatggccaatagttttccaagcttgatgaaaactata

SEQ ID NO: 942290 - DNA, 810 bp, Homo sapiens; identical to SEQ ID NO: 942255

SEQ ID NO: 942291 - DNA, 502 bp, Homo sapiens
tagctgggactacaggcattggccaccatgcccagctaatgattctattttttttgtagagacaaggactcaccatgttgcccaggctggtctcaaactcctgagctcaagcgatctgcccgccttaacctcccaaagtgctgggattacaggkgtgagccaccacgcctggccagaagcctctcatttggtttctaattttcttcttttcacttaacctttcctttggtctcattcattctttttgcccattttttctctctgtttctgtatacacatgtgcttgtgcctgtacacacatacatacatgcatgtatgcacacacatacaccattcactagggtttcccaaaatgaccagcgagaatgtgtctccctcatccactcctcctgtggtttcttccctctcataagctgcaaaggccatcaccacctgagggagtcaccatgactggttcctccacggccccatctcctgtccaccttcagtgttggtgtgggat

SEQ ID NO: 942292 - DNA, 619 bp, Homo sapiens
acaatgaaactcaagttaaatatgtattgcaacttgtgctatcaattaaagctggtgtgaagtgaacactatttgtaaaacattgaaaaatgtgttatctagaatatgaaagtaaatttttataatttgaatgtttagagccattcattaatcattttcaatccagcactttgccacaatcacaataaatttgatgatcactgtttgaagcctgtattgaaaaagatttcttatttaatagtaaaatgtgaaaagctatatgctatgaaggaaatgcttggtttttttttcttttttttttttttctttttagaaggaggcttgctctgttgcccaggctggagtgcattggtgccgtcttggcttaccacaacctccgcctcctgggttcaagcgattctccctcctcagcctcttgagtagctggkattacaggcacacgccaccccacccagctaatttttgtatttttagtagggatgggttttcaccatgttggttggccaggctggtcttgaaatcctgacctcaggtgatctgcctgcctcggcctcccaaagtgctgtgattacaggcgtgagccacctcgcccagccaacacttgttatttctgttgtag

SEQ ID NO: 942293 - DNA, 625 bp, Homo sapiens
ttacaacgcaaattgagctcccagcctcacagggtaaaagtgagggcattgattaagaaagaatgggatcctgtaaattgggataggaaggtgcgggaagaccttgatgaagctggggacactgagcccctaaattctgattattttgcttcgcaagtggcagatgtctccccatctccagtggaattgacctccttacccccagcagaaatggcctcctcaaacccagtggccatggccttcccactctcaggtaatggcatcatcatcccagtggtatcagcctgtccacttgggtctcaggaggattaaccctgcattgcctgaggaaattgtaatgacttcacttgaggcagytgccttggaagacaatgctgattctcttcaggacccactcccaccatccctctttgcttccagacctataacttgacttaagttctaacaggcccctaaaggtgagccatgtgtgacccaagagagtacttatagtcagaagaactgcttgagtttttaaattaatgtaggcagaagtccatggaacatgtgtagggctgtatactaaaagtgtgggataattgtggaaggaacataaaattgggtcaggctgaatttattgacatgg

SEQ ID NO: 942294 - DNA, 839 bp, Homo sapiens
aattcaaagttccacagatctctggggcagggacaaaatgctgccagtctctgcacagcaagagtgatctttactccagtttccaacaagttcttcatcttcatctgagaccacctcagcctggactttattgtccatatcactatcagcattttggtcaaagccattcaacaagtctctaggaagttccagactttctgacattttcctatcttcttctgagccctccaaactgttccaacctctgcctgttagcagtttcaaagttgcttccacatgttcgggtatctttatagcagcaccccactctactggtaacaatttactgcattagtctgttctctagctgctaataaagacatgcccaaggctaggtaatttataaaggaaagaggtttaactgactcacagttccacatgctgaggaggcctcacagtcttggcagaaagggaaggaggaacaaagtcacatcttacatggtggcaggcaagagagcatgtgcaggggaactccccttaataaaaccatcagatctcctaagacttattcactatcacaagaacaacatgggaaagacctgccccatgattcaactacctcccaccagatycctcccacaacacgtgggaattatgggagctacaattcaagatgagatttggatgaggacacagctaaaccatatcattggctctgaatggagagacctcaaacttctgtatggattatcaaggtcgagtgatcaatggagttttaactcaggtccatcttccactgggttgagtaggcctcttaatccatcctgtggttattccccgagttccagaattcactggaa

SEQ ID NO: 942295 - DNA, 839 bp, Homo sapiens
aattcaaagttccacagatctctggggcagggacaaaatgctgccagtctctgcacagcaagagtgatctttactccagtttccaacaagttcttcatcttcatctgagaccacctcagcctggactttattgtccatatcactatcagcattttggtcaaagccattcaacaagtctctaggaagttccagactttctgacattttcctatcttcttctgagccctccaaactgttccaacctctgcctgttagcagtttcaaagttgcttccacatgttcgggtatctttatagcagcaccccactctactggtaacaatttactgcattagtctgttctctagctgctaataaagacatgcccaaggctaggtaatttataaaggaaagaggtttaactgactcacagttccacatgctgaggaggcctcacagtcttggcagaaagggaaggaggaacaaagtcacatcttacatggtggcaggcaagagagcatgtgcaggggaactccccttaataaaaccatcagatctcctaagacttattcactatcacaagaacaacatgggaaagacctgccccatgattcaactacctcccaccagattcctcccacaacacgtgggaattatgggagctacaattcamgatgagatttggatgaggacacagctaaaccatatcattggctctgaatggagagacctcaaacttctgtatggattatcaaggtcgagtgatcaatggagttttaactcaggtccatcttccactgggttgagtaggcctcttaatccatcctgtggttattccccgagttccagaattcactggaa

SEQ ID NO: 942296 - DNA, 587 bp, Homo sapiens
agagctgaagagacagaaactatttcccagcctgccttgcaaacagggctccacatatgatttggaagctgctgattaggtgcagccatgagagagctgactttggaactgaattaagtgcgaagggagtggcagtaagggtcatatatattttwgttggtgcagatctagtcggtgtggaggggccatgggggtaaacattgtcatggtagcccctgatctccatcacagttgaggtgttacatcactggaagcaaaggttgattcagaggtcctggggctgtgccacttcctgattctagagttttgtgcttgagttaaaagaggtggcttccctggtgggttagtcctgcagtattgttttatgagtctttcctgcaggcctcttctctagcctgcttctttgacccatgtgaaggttttgtgagcacactactcctatatgaaatccatttctgcttaaaatagttagagtggttcctgtgactgcaagggaaccttgcctgaaacagatggaactatcaagcccatcatacagatgcatacctgaaaaaatgaatggctactcaaggtcatagaggttgtga

SEQ ID NO: 942297 - DNA, 650 bp, Homo sapiens
tggctgggctgtgtctccagccttccctcatcacctccctgctggtcccctcagccttcaccagactgcgctgtgtgctgtctcctgcccatggctcaggtctgggaggtttctgtagctcagccctataagtcagagctaaattgttactggagacaagggtctagttaattcttttagtattatcctcctcccatgcttcagtcacctgtactcccacttttgaaatatgatctctgaactaayagtaatagctaacactgctctgtttattatcaatactttacacacagcatgatatggtttggctgtatccccatccacatctcatcttgaattgtagctctcataattcccttgtgttgtgggatggagccagtgggagataattgaatcatgggggcaatttcacccatactgttctcatggtagtgaatacgtctcatgagatctgatggctttgtaaggggaaaccccttccactgggctctctttctcttctcctgtctgccgccatgtgagacatgcctttcaccttccaccatgattgtgacttctttcttttgtaaattgcccagtctcgggtatgtctttatcagcagcgtgaaaatggaccaatatgtaacacatataagtaggtcatttaattg

SEQ ID NO: 942298 - DNA, 650 bp, Homo sapiens
tggctgggctgtgtctccagccttccctcatcacctccctgctggtcccctcagccttcaccagactgcgctgtgtgctgtctcctgcccatggctcaggtctgggaggtttctgtagctcagccctataagtcagagctaaattgttactggagacaagggtctagttaattcttttagtattatcctcctcccatgcttcagtcacctgtactcccacttttgaaatatgatctctgaactaatagtaatagctaacactgctctgtttattatcaatactttacacacagcatgatatggtttggctgtatccccatccacatctcatcttgaattgtagctctcataattcccttgtgttgtgggatggasccagtgggagataattgaatcatgggggcaatttcacccatactgttctcatggtagtgaatacgtctcatgagatctgatggctttgtaaggggaaaccccttccactgggctctctttctcttctcctgtctgccgccatgtgagacatgcctttcaccttccaccatgattgtgacttctttcttttgtaaattgcccagtctcgggtatgtctttatcagcagcgtgaaaatggaccaatatgtaacacatataagtaggtcatttaattg

SEQ ID NO: 942299 - DNA, 785 bp, Homo sapiens
gttttgtctggcccattaagtaggaatggtgaacactctcgattgatttgatgagagaatactacctctgagccccaatgaagtgagattttatcccctctaaaaaaagaattcatttttttctcattagttgaactgtatttttttaatatccttgmtttttaataatattgtcatattttaattttcattaataaaaaagtatggaaatgtgctttcactctttttatggaagtaactgctgcagggcatcgtggctcatgcgtgtaatcccagcactctgggaggccgaggcaggtggatcacctaatatcaggagttcaagaccagcctggccaacatggtgaaaccctgtctctactaaaaatacaaaaattagctgggtgtgatggtaggcacctgtaatctcagctactcgggaggctgaggcaggagaatcacttgaacccgggcagggaagattgcagtgagctgagattgcaccgttgcactccagcctaggtgacagagtgaggatctgtctcaaaaaaaaaaaataataataagtaactgcatagtaggtttgattttgcctcttgccctacaacacctgaagtatgcactatctggctcttcaccaaaaagggctactgagctctccctggtctaggtgttggtggagaaaatggatgggttcggatgtattttggagtgagagccagtaggactttaattttaatgctggcagaacatagactatgctgcagggtgggacagagtcacttgatccctaagacaagtctaag

SEQ ID NO: 942300 - DNA, 630 bp, Homo sapiens
gcacgatctcagctcactgcaatctccacctcccaagttcgggtgattctattgcctcagcctcctgagtagctgggattacaggcatctgccaccacacccagctaattttttctatttttagtagacacggtttcaccatgttggccaggctggtcccgaactcctgacctcaggtgatccacccgccttggccccccaaagtgctgggattacaggcccagcctctcatttttatttgtatttgcccttacagtacttggaaacccctacacttgagaggttttcatggaagacaatttaggtgatgctccagtgaacaaggtggagaattatggagacaagaagagaagggacaagggatccgatgaaactatcctgtgttgtctgttrtacaactttagcttttcttgtaagatgaggagtcattacagagttttgcccagaggaacgataggatttggcttacatgttagagtcactcattattcataagtatctattagcaactctattcctgggactgttcttggtgctaaagaaggtacacaagaaacagagctttgttgtaaggttttttactctcctgatggggaaataacagggaaaagcagccactagtaacacagg

SEQ ID NO: 942301 - DNA, 694 bp, Homo sapiens; identical to SEQ ID NO: 942283

SEQ ID NO: 942302 - DNA, 614 bp, Homo sapiens
gtttttgaagccaagactgaccattgtaaaagtcctagggcgcttaagaattattctaaatctactgtgcccatgctctataaatggaacaaaactgggatgacagcacatctcttaacagcatggtttactgaatattttaaacccactgttgagacctactgctcagaaaagactcatttcaaaatattmctgctcactaacaaagcacctagtcacccaagagctctgaaggacaggtacagggagattactgttgttttcatgcctgctaacacaacatccattctgcagcctgtggatcaactttcaagtcttattatttcagcctcttattatttcaaaatatatttcaaatatattttgtagggctattcactgccatagatagcgattcctctaatggatctgggcaaagtaaactgcaaaccttctaaaaaggattcaccattccagatgccattaagaacatctgtgatccatgggagatcaaaacatcagcaataacgggagtttggaagacaatgattccaactctcatgggtgactttgaggagttcaagacttcagtaaaggatgtcacagcagatgtggtggaaataacaagagaacta

SEQ ID NO: 942303 - DNA, 614 bp, Homo sapiens
gtttttgaagccaagactgaccattgtaaaagtcctagggcgcttaagaattattctaaatctactgtgcccatgctctataaatggaacaaaactgggatgacagcacatctcttaacagcatggtttactgaatattttaaacccactgttgagacctactgctcagaaaagactcatttcaaaatattactgctcactaacaaagcacctagtcacccaagagctctgaaggacaggtacagggagattactgttgttttcatgcctgctaacacaacatccattctgcagcctgtggatcaactttcaagtcttattatttcagcctcttattatttcaaaatatatttcaaatatattttgtakggctattcactgccatagatagcgattcctctaatggatctgggcaaagtaaactgcaaaccttctaaaaaggattcaccattccagatgccattaagaacatctgtgatccatgggagatcaaaacatcagcaataacgggagtttggaagacaatgattccaactctcatgggtgactttgaggagttcaagacttcagtaaaggatgtcacagcagatgtggtggaaataacaagagaacta

SEQ ID NO: 942304 - DNA, 606 bp, Homo sapiens
taaaatggaggaattgtaaggagagtttataggctttaaaaggccatgctgtaacaggtgagtgataacaggctttaatccttttaaagcgtgctgtgggatgggatattggtactgagcggggtaagggtgattaggttttaatgagatggtaaggggtggattataggtcgctaaggagggagtagaggtatcttatacttgtgggttaaggtggggagatataaggggaggatgtgaaggaggctttgaactgggggaaaaggtggcaatgaggtgtgtctgtagcccaggaatagtcagggaagcagataatttagttaaaatatctcggcctaataagggaactgggcaggtggrgataactaaaaggattgcttaaaagagtattgtctaagttggcaccagagctggggagttttaagaggtttagaaacctggctgtcaatacaacagttatggaggcaagggaaacaggcctttgaaaagaaggtaatgtggagtgggtagcctccgtattgattaagaaggggatggacttaccttccactgtgagagttacctagagcgtctgtgatggtcttgtaggcttctgaggcaatccgg

SEQ ID NO: 942305 - DNA, 570 bp, Homo sapiens
tcaaaacactgaacgcaaatgctggtgaggatgtggtgtaacagggatgctcattcattcatttctggtcagaatgcaaagtggtacagccacttttcaagatagtttagtagtttttcacaaacctaaatgtacttttatcatacagcctagcagttgtgctcttggtatttatagaaatgaattgaaaacttatatccacacaaaagcatgtacacagatgtttttagcaagtttcttcataattaccaaaacttggtagcaaataattttttttttgacagagtctcgctctgtcacccaggatagagtacagtggtgcgatctcagctcactgcaatttccatctcccaggttcaagcarttctgcctcagcctcccaagtagcttggattacaggagcacgccaccatgcctgctaatttttgtatttttagtggagatggggtttcaccatgttggccagcctggtctcaaactcttgacctcaggtgatccacctgcctcagcctcacaaagtgctgagattacaagcgtgagccaccatgccccagccccaagtgtttttta

SEQ ID NO: 942306 - DNA, 634 bp, Homo sapiens
ctctccgaaccctgtttaagagatttttatccaggtttcattatgtcattggccattagtgattgaattcaacctccagcccctttcccttcccgcaagaggagtagggacatgttggagctgaatgaaagttacaaccctctgatcacatggtgtgttgcaccagccccaccctgaatccatcctagagcccgcaattagccacctcattagyagaaactgtgatttgactaagggagtcattatgaataacaaaaacactcctattgcctaggaaattccaaggggtttaggagttctgtgtcaggaactggggacaaagaccaaatagattttttataccaaactccctaaaccaataacccagtttaatcgtgagaaaaacatcagacaaatcccagcagagggacattgtacaaaatagccaacctaaaatcggtcaaggttgtgaatgtggtcagaatcaaaatggtggagtcatttgtgttaaaagagagagaaaaaaaaaatgacaaatagagctggggaaagccatgaagaggattcttgttcctaaatgcgtgatgtcacaaatgctcataaaagatcaacactgtccacagaggccatgtcagccttcccaaaagaagattcc

SEQ ID NO: 942307 - DNA, 652 bp, Homo sapiens
aacgaacttaaaaaaaaaaaaaaagccaacataacaatgacagcaaaataagacaaaagtctacacactcagagagagagacaggagagagaagagagaaaactagattattctcatttgtaaataccagtgcaaaggtcctaaataaaatattagcaaatgcaatccagtagcaacttaaaacaacactayacataaccaagtagaattcagtcaaggaatataagcatagtttaataatgagaaaactggtaatacaactcatattaatagctattaagagaaaaattatatatagtcatctccatagatgctgaaaaggcatttgaaaaaatttatgcattcttgataaaattcttagtaaaataatagaaggatgaccaaatatatctaccttaccccaaagccagcatcaaacttaatgagaaaacaagatatcatccatttaagtcaggaataaaagaaggatgtccactatcaccacaattaacgttctgcaagtactagttaatacaataaaactagagagagaaagaggtaattcaaaggcaggaggtaaaatgatcactacttgcacaatgagtgtatacctgaagaaacccaagggaatccactgaaaaactactatcaacatgaagagagtttcagaaaa

SEQ ID NO: 942308 - DNA, 652 bp, Homo sapiens
aacgaacttaaaaaaaaaaaaaaagccaacataacaatgacagcaaaataagacaaaagtctacacactcagagagagagacaggagagagaagagagaaaactagattattctcatttgtaaataccagtgcaaaggtcctaaataaaatattagcaaatgcaatccagtagcaacttaaaacaacactatacataaccaagtagaattcagtcaaggaatataagcatagtttaataatgagaaaactggtaatacaactcatattaatagctattaaragaaaaattatatatagtcatctccatagatgctgaaaaggcatttgaaaaaatttatgcattcttgataaaattcttagtaaaataatagaaggatgaccaaatatatctaccttaccccaaagccagcatcaaacttaatgagaaaacaagatatcatccatttaagtcaggaataaaagaaggatgtccactatcaccacaattaacgttctgcaagtactagttaatacaataaaactagagagagaaagaggtaattcaaaggcaggaggtaaaatgatcactacttgcacaatgagtgtatacctgaagaaacccaagggaatccactgaaaaactactatcaacatgaagagagtttcagaaaa

SEQ ID NO: 942309 - DNA, 620 bp, Homo sapiens
gctaatactataaagtttcttttttttttctaatcttatattttttattttttttgagatgaagtctcactctgtcatccatgctggtgtgcaatagagccatctcggctcactgcaacctccgcctcccaggttcawgcaattctcctgcctcagcctcccaagtagctggaactacaggtgcctgccaccacacccagctaatttttgtatttttagtagagatgggatttcaccatcttggccaggctggttttgaactcccatagtgctgggattacaggcatgagccaccacgcctggcccttatgtttggtttttgctcttctcacagatatgcattatttcaaaactatttgccagtaaatgaaagtatttactattcaagttaaaaatatttcctattgaatttaaaaaaagtgaaaggaaattgacaagagcagcattagcattatttcaactgcaagagccagaaaccaatttattttttattttattttgttattactattatttttgagacagggtctttctctgtcacccaggctggagtgcattggcacaaacaaggctcaatgcagcctcagcctcctgggctcaagtgatcctcctgcttcagt

SEQ ID NO: 942310 - DNA, 708 bp, Homo sapiens
ggaacataaccacattcatttgcaagttgtccacggccactttggtgctactgtggcagaattgagtagttgctgcagagaccgtatgatgagaatatgtggcattctcatcattttgccctgccgctctgtgcaatgtaaattgcagtgacacagttataactcagcagcattttgaatgccacttgtattccatgctacaacattttattttttattaccaatatatacaagaaaagtggatttcaaatatcattgtgcttttaaggtacaatggagtatgaattgttactgaattaggcagcaaagtgcaatgacatggtagctgtcctaaggaacacaatacaaccaggtgcagtggctcatgsctgtaatcccaacgatttgggtggctgaggtgggagaatcacttgaacccaggatttggagaccagcttgggtggtatagtgagaccccccatctccacaaaaagtaaaaaaaaaccaaaatacatgttgttacttcccatcttagcactcatcaagatatttctaattcacaagaaagcaatggtcagaaaaattagaaaatttaaaattgaatatctcatcacagaatttattcacaaaaataaaaaatgaaaatgaagctacaaccaaagtaagtttcagatggctcatttgttagccaagcaaggaaagtcacttatggtgaattaattaaatcat

SEQ ID NO: 942311 - DNA, 577 bp, Homo sapiens
tgggatcaagtgatcctcccacctcagcctcctgagtagctgggaccacagttgcacaccaccatgctcagctaatttcttattttttgtagagatgaggtcttgttttgttgtctaggctagtctcaaactcttggagtcaagcaatcctctctccttggtctcctaaagtgctgggattaaaggtatgagccactggccaataaatcattttaaaaaatcattttttccctttctgttatggactgaatgtttgtgacccaacccccraattcatatgttgaaaccccaatccctaatgtggtggcatttggaggcggggtctttgggaggtaattgggtttgaatgaatctcgaggtggagccggtgaagggattggtgcttttataaggaggtgaagggaccagagctctctctgtcatgtgaggatatggcaaggaagcagctatctgcaagcttgggaccaaagctaagaaaagactatgctgccactctgatctcagactttgagccttgagaactgtgagaaatacagagttatcgctgaagccaccctgtctgtggcattctgttgta

SEQ ID NO: 942312 - DNA, 673 bp, Homo sapiens
agctgtctgtatttttgagctcatgaataggatccatcctgaaaccatggtccctttgttgctgggttcccaagcaagcacaatgatggttggggaggttggtgattgacagtcataggtagcagggccttaatacaaatgatcgggacccttctccgcagtaaagacttattggtgagcatttgcgtggaccacaggtattcgcacacccagcgctcattcctaagggtcttctttctgaatttattgacgccaatcatccaactgtgcttcttccaagaccctggctgcccagtcmaaccaatagtcactgcctatgttctggtctagctatttcttcccctaggcaaagtagacaatgagagaacccttgaagttatgtctactaaaaatatttaccttctccaccatctttcagaatcatctctggtttgttttgggaaatgtttaacaacaggctctctggaaaaatagaagctgtaatttgtagtatttgccaatttctgtggtataaatattcccacagtcaccagtctcaagctactggcttgacgtcactgactgcagagttgggaagagaggtgccattgtcttccattagatagcatttccaccaggcatatacaatagatgtcagtgacctcaagaacagagataatagtgaaatacataa

SEQ ID NO: 942313 - DNA, 513 bp, Homo sapiens
tataaagagaaaatagcagaaggattatgtgaagacgtaatgactggaaagtctttagttcaatgaaaaccattaatctatacatctaaaaaacttaacaaaccacaagtaaggtgaacccaaagagattcacactgagacacatcataatcaaactgttgaaacatgacgatgaaggtagaatcttgaaggcagcaaaagataaacaactcattacatgcaagtgattttcaatgatattaatagcttattcctcattagaaaccatggaagccagaaggcmatgagaagacattattaaaagcactgaaagaaaaagactggcaaccaagattccatatccagcaaaattatccttcacaaatgaaggagaaatgaagccattccatgaacaaaaatggagagactttgttgctagcagacttgtactccaagaaataataaacggagtccttcagactaaaataaaaagacactagatagtaactcagatgagaacaggtgtgttcaggg

SEQ ID NO: 942314 - DNA, 633 bp, Homo sapiens
attttcttttcttttttttttttttttgagacggagtctcgctctgtcgcccaggccggactgcggactgcagtggcgcaatctcggctcactgcaagctccgcttcccgggttcacgccattctcctgcctcagcctcccgagtagctgggactacaggcgcccgccaccgcgcccggctaattttttgtatttttagtagagacggggtttcaccttgttagccaggatggtctcgatctcctgacctcatgatccacccgcctcggcctcccaaagtgctgggattacaggcgtgagccaccgygcccggccgagaaaacattttctagtcatacatctgataagggactgggatccagaatatataaagaactcttacaccttaacaaaaaataaacaacccattcagaaatgggcaaaggacttgaatagacatctctccaaagaagatatccaaatggccaataaacaaatgaaaagaaattcttcattgctagtcattagaaaaatgcaaatcaaagccataatgagataccacttcacatctattagatggttattattttaaaaaaagaaaatagcaagtgttggcaggatgtagagaaattggaatgctggtatatcactggt

SEQ ID NO: 942315 - DNA, 721 bp, Homo sapiens
ggagctgtctcttcaaaggcacttgctcctagcaaacttatgcctttccaaagtctcctctaaaaatgagtagaggacactttgttttacttttactgaagtgaaaacaccaaggcatgctttaggggtctctagcacttctgtgggtacatcagtccccattctccccatctgtctctctctctytttttttttttttttgagactgggtcttgttgtattgcccaggctggtcttgaaatttggggctcaagtgatcctcttgccttggactcccaaagtgctgggattacaggcatgagtcactgtgcctggcccagaaaaagatgttctctatgcccatgaggcttcaagagaagctggtttccttatcttcactatttagagctagatcccaagtacctccaggattgagccctaatcctgaccccaaacataatttgtgtacagaaactccgtgtaggagtgttagaaaagctggaggccctattgataggtgattcagatatgctgggaataatgtaaagtgtgtgtctggtggaaagagctgtatttttaacgtgatgctgaaatcaccaagaaatactctacttcacttgatacgaaaaacagaagttaccattatacagaaaaaaagtggaggaggccttatgcaaatattttcagataaccgtatatactgtttttttgcccagtcgtgtcccatcatgtccacccccag

SEQ ID NO: 942316 - DNA, 712 bp, Homo sapiens
cactcttgcaaagtgttggtggagaccaccacgtgagaagtagtaatgaggtgccccctcctatcccagccaggatggtgttgctggagacccagtagggatcctgagccttcattaccatccagcagtaaaaaggatgacaccttactagtgagcaatgaggtggttccctccttaactcaccagagtgatgtcagaggagtcctgctataatacaagatttcaataagatccagaatcttatartaacaccaaaaatgcttaggtttcagtaaaaaattacctgtcataccaacagaaagagctaaaactgaatgactaaagacaaatatcaacactgatatgacccagattttataattatataaggaacctaatgcagcctgaaacaaatgaagaaaagtgctaacaaacaaatagtaagcctcagcaaaaaatcagcacttatggagaagaactggaaaaaaattcagaactaaaaattttaataactgaaataaaaaactcaatcgatgggctgaacagcagggtgggtaagacagagcaaagaaacagtgaacttgttgatagaacaatagaaattatataatctggacactagagagaaaatagacttaaaaaaatgaacagagccttgggaacatgtggggttgtaacaaaagatcaaacatttatgacacagaatatcaggaggagaagaaaaagaagatga

SEQ ID NO: 942317 - DNA, 463 bp, Homo sapiens
tttctgtggcttattaccctagttgaaatacacacctggcattctacaaaaggaatcgaagtattgtctcaaaagactatcttcataattaatcaaggcccactgagccatagggcctccagcctttccctaactgagggatacttctgctaatggtgaagcttggtgttaaaaataatgtttagacctgttttgtgatattctgaatgtagaacagccaaagccatttagattagtgtcatttgttctcataaatgtgaataaaatgctttgtgggactaycaaattctttaaaacacgttacataaaatgtgcagataatcttaagagattccttttagagttggtgtgtttcattcaataaacttgttttatcaaatcacataacatttatttaattgtcaccaatcattcttttatttcatcatatagagtattgcatatttgtcttatttattttttt

SEQ ID NO: 942318 - DNA, 591 bp, Homo sapiens
gctggccaacatgatgaaaccctgtctctactaaaaatacaaaaagttagctgggtgtggtggtgtgcacctgcaatctcagctactcaggaggctgagacaagagaatcgcttgaacccgggagggggaggctgcagtgagctgagatcgcgccayggcactctagcctgggcaacaagagaaaaactccatcaaaaaaaaaaaaaaaagaagaagaagaatcactttttcttcccagtaggcttctttccttctttggagatgagcaaaaagtataaaaacatctgtggaaacctcctgtttgtatgttttacattggaatgggtgcaaaaaatacactcactattcctttacatccttctaagagggctgtttctactcttgacactcaatacttgtttttgtttctctaatcactgttatacgttactcacgaatattcatcaaaacccttttccttattttttatctagttttaaataattcatttgagataaaaagaagtttttctttgctttttttaatcactcagtggaggatgaacatgaagctgtaccaatggataggagaccgtctggtagagcacggga

SEQ ID NO: 942319 - DNA, 591 bp, Homo sapiens
gctggccaacatgatgaaaccctgtctctactaaaaatacaaaaagttagctgggtgtggtggtgtgcacctgcaatctcagctactcaggaggctgagacaagagaatcgcttgaacccgggagggggaggctgcagtgagctgagatcgcgccacggcactctagcctgggcaacaagagaaaaactccatcaaaaaaaaaaaaaaaagaagaagaagaatcactttttcttcccagtaggcttctttccttctttggagatgagcaaaaagtataaaaacatctgtggaaacctcctgtttgtatgttttacattggaatgggtgcaaaaaatacactcactattcctttacatccttctaagagggctgtttctactcttgacactcaatacttgtttttgtttctctaatcactgtyatacgttactcacgaatattcatcaaaacccttttccttattttttatctagttttaaataattcatttgagataaaaagaagtttttctttgctttttttaatcactcagtggaggatgaacatgaagctgtaccaatggataggagaccgtctggtagagcacggga

SEQ ID NO: 942320 - DNA, 591 bp, Homo sapiens
gctggccaacatgatgaaaccctgtctctactaaaaatacaaaaagttagctgggtgtggtggtgtgcacctgcaatctcagctactcaggaggctgagacaagagaatcgcttgaacccgggagggggaggctgcagtgagctgagatcgcgccacggcactctagcctgggcaacaagagaaaaactccatcaaaaaaaaaaaaaaaagaagaagaagaatcactttttcttcccagtaggcttctttccttctttggagatgagcaaaaagtataaaaacatctgtggaaacctcctgtttgtatgttttacattggaatgggtgcaaaaaatacactcactattcctttacatccttctaagagggctgtttctactcttgacactcaatacttgtttttgtttctctaatcactgttatacgttactcacgaatattcawcaaaacccttttccttattttttatctagttttaaataattcatttgagataaaaagaagtttttctttgctttttttaatcactcagtggaggatgaacatgaagctgtaccaatggataggagaccgtctggtagagcacggga

SEQ ID NO: 942321 - DNA, 627 bp, Homo sapiens
ttacaacgcaaattgagctcccagcctcacagggtaaaagtgagggcattgattaagaaagaatgggatcctgtaaattgggataggaaggtgcgggaagaccttgatgaagctggggacactgagcccctaaattctgattattttgcttcgcaagtggcagatgtctccccatctccagtggaattgacctccttacccccagcagaaatggcctcctcaaacccagtggccatggccttcccactctcaggtaatggcatcatcatcccagtggtatcagcctgtccacttgggtctcaggaggattaaccctgcattgcctgaggaaattgtaatgacttcacttgaggcagytgccttggaagacaatgctgattctcttcaggacccactcccaccatccctctttgcttccagacctataacttgacttaagttctaacaggcccctaaaggtgagccatgtgtgacccaagagagtacttatagtcagaagaactgcttgagtttttaaattaatgtaggcagaagtccatggaacatgtgtagggctgtatactaaaagtgtgggataattgtggaaggaacataaaattgggtcaggctgaatttattgacatgggc

SEQ ID NO: 942322 - DNA, 613 bp, Homo sapiens
aaactcaagttaaatatgtattgcaacttgtgctatcaattaaagctggtgtgaagtgaacactatttgtaaaacattgaaaaatgtgttatctagaatatgaaagtaaatttttataatttgaatgtttagagccattcattaatcattttcaatccagcactttgccacaatcacaataaatttgatgatcactgtttgaagcctgtattgaaaaagatttcttatttaatagtaaaatgtgaaaagctatatgctatgaaggaaatgcttggtttttttttcttttttttttttttctttttagaaggaggcttgctctgttgcccaggctggagtgcattggtgccgtcttggcttaccacaacctccgcctcctgggttcaagcgattctccctcctcagcctcttgagtagctggkattacaggcacacgccaccccacccagctaatttttgtatttttagtagggatgggttttcaccatgttggttggccaggctggtcttgaaatcctgacctcaggtgatctgcctgcctcggcctcccaaagtgctgtgattacaggcgtgagccacctcgcccagccaacacttgttatttctgttgtag

SEQ ID NO: 942323 - DNA, 650 bp, Homo sapiens
cacccctctgaggtgagtgagacctcatccattcactgcaaccttcttctgctttttcctctctacagagctgaagagacagaaactatttcccagcctgccttgcaaacagggctccacatatgatttggaagctgctgattaggtgcagccatgagagagctgactttggaactgaattaagtgcgaagggagtggcagtaagggtcatatatattttwgttggtgcagatctagtcggtgtggaggggccatgggggtaaacattgtcatggtagcccctgatctccatcacagttgaggtgttacatcactggaagcaaaggttgattcagaggtcctggggctgtgccacttcctgattctagagttttgtgcttgagttaaaagaggtggcttccctggtgggttagtcctgcagtattgttttatgagtctttcctgcaggcctcttctctagcctgcttctttgacccatgtgaaggttttgtgagcacactactcctatatgaaatccatttctgcttaaaatagttagagtggttcctgtgactgcaagggaaccttgcctgaaacagatggaactatcaagcccatcatacagatgcatacctgaaaaaatgaatggctactcaaggtcatagaggttg

SEQ ID NO: 942324 - DNA, 650 bp, Homo sapiens; identical to SEQ ID NO: 942297

SEQ ID NO: 942325 - DNA, 650 bp, Homo sapiens; identical to SEQ ID NO: 942298

SEQ ID NO: 942326 - DNA, 785 bp, Homo sapiens; identical to SEQ ID NO: 942299

SEQ ID NO: 942327 - DNA, 773 bp, Homo sapiens; identical to SEQ ID NO: 942285

SEQ ID NO: 942328 - DNA, 541 bp, Homo sapiens; identical to SEQ ID NO: 942286

SEQ ID NO: 942329 - DNA, 732 bp, Homo sapiens; identical to SEQ ID NO: 942287

SEQ ID NO: 942330 - DNA, 636 bp, Homo sapiens; identical to SEQ ID NO: 942253

SEQ ID NO: 942331 - DNA, 585 bp, Homo sapiens; identical to SEQ ID NO: 942289

SEQ ID NO: 942332 - DNA, 810 bp, Homo sapiens; identical to SEQ ID NO: 942255

SEQ ID NO: 942333 - DNA, 593 bp, Homo sapiens
gaggttccaatttctccatgtcctcatcaatggttgtcttttttataatagccatcataataggtatgagatggtatctcattgtggttttgatttgcattcccctgataattagtgatgttgagcatcttttcatgtacctgttggtcatttatatctcttctctggagaaatgcctgttaaggtcttttgcccatttttaattatttgtttgggtttttttaatttagttattagsttgtatatattgtgattgttaatctcttaacatatatatgatttgaaaatattgcctctgactgcataagttacctttcaatgttgttggttatttcccttgctgtgaagaagctctttagtttgatatagtaccacttgtctattatgctttttttgcttatgcttttggtgtcatatccaaggtatcatagccaagaccaatgatgtcatgaagcttttctcctatgttttcttctacatgttttacagtttcaggtcttaggttagtctttaatccattttgagttgattttcatatataatataaattaagggtctgatgttattctttttcatgtagctatccagttctt

SEQ ID NO: 942334 - DNA, 631 bp, Homo sapiens
agcacgatctcagctcactgcaatctccacctcccaagttcgggtgattctattgcctcagcctcctgagtagctgggattacaggcatctgccaccacacccagctaattttttctatttttagtagacacggtttcaccatgttggccaggctggtcccgaactcctgacctcaggtgatccacccgccttggccccccaaagtgctgggattacaggcccagcctctcatttttatttgtatttgcccttacagtacttggaaacccctacacttgagaggttttcatggaagacaatttaggtgatgctccagtgaacaaggtggagaattatggagacaagaagagaagggacaagggatccgatgaaactatcctgtgttgtctgttrtacaactttagcttttcttgtaagatgaggagtcattacagagttttgcccagaggaacgataggatttggcttacatgttagagtcactcattattcataagtatctattagcaactctattcctgggactgttcttggtgctaaagaaggtacacaagaaacagagctttgttgtaaggttttttactctcctgatggggaaataacagggaaaagcagccactagtaacacagg

SEQ ID NO: 942335 - DNA, 616 bp, Homo sapiens
accttccacaacttgctcaaaccttcagcattattctatccaactgaaaataatcctttaaccctttaatctaggcaaaaaaaaatccacattcccatgacttcttacaatctttttaccaaaaacacatttcactttcygtgcacatttcacacttgcaggtagaactgcttttcccatagtcccatagtctcaagtgcatgttacattgttaaccgaagaagcagtttatgaccgtaaagcatttagcaaacctaatatctgacctgtctaatttagaccaaatgcctaaatttttgaagatatttttattttaccaatagtctttaaaactgtctttatttcccaaaggttacttaagtcacatgaactaaaaggcattacagttttaatttttctgacaagatatttggtttaaggtcttagtatttttaaaccagttaatcaaagctctttcatatataaacatcacacacataacatgtaaatagacagaagatccaggagacgtaagattttccattttccagtttctaagtttcttaactggattactggcttcagggtggagctctttgctaaacagggctagggaaacatgcagtttctggagcct

SEQ ID NO: 942336 - DNA, 616 bp, Homo sapiens
accttccacaacttgctcaaaccttcagcattattctatccaactgaaaataatcctttaaccctttaatctaggcaaaaaaaaatccacattcccatgacttcttacaatctttttaccaaaaacacatttcactttccgtgcacatttcacacttgcaggtagaactgcttttcccatagtcccatagtctcaagtrcatgttacattgttaaccgaagaagcagtttatgaccgtaaagcatttagcaaacctaatatctgacctgtctaatttagaccaaatgcctaaatttttgaagatatttttattttaccaatagtctttaaaactgtctttatttcccaaaggttacttaagtcacatgaactaaaaggcattacagttttaatttttctgacaagatatttggtttaaggtcttagtatttttaaaccagttaatcaaagctctttcatatataaacatcacacacataacatgtaaatagacagaagatccaggagacgtaagattttccattttccagtttctaagtttcttaactggattactggcttcagggtggagctctttgctaaacagggctagggaaacatgcagtttctggagcct

SEQ ID NO: 942337 - DNA, 576 bp, Homo sapiens
tccttctggtcctgggttttttttggttggtaggctatttcttactgcctcaatttcaggacttattattggtttattcagagattcaacttctttgtggttcagtcttaggagggtctttgtattcaggaatttatcartttcttctacattttctagttcatgtgcatagagatgtttatagtattctctgatggttgtttgtatttccgtagggtcagtggtgatattctctttatcattttcattgtgtccatttgattcttttcacttttctttgtctagctagcagtctatctattttattaatttttttcaaaaagccagctcctggattcgttgattttttttgaagggtttttcacgtctctgtttccttcagttctgctctgatcttggttatttcttgtcttctgctagctttggggtttgtttgctcttggttctctagttcttttagttgtgatgttaggatgtcaattggagatcctcctagctttttgaagtgggcatttagtgctataaattttcctcttaatgctgctttagctgcatcccagagattctggtatattg

SEQ ID NO: 942338 - DNA, 576 bp, Homo sapiens
tccttctggtcctgggttttttttggttggtaggctatttcttactgcctcaatttcaggacttattattggtttattcagagattcaacttctttgtggttcagtcttaggagggtctttgtattcaggaatttatcagtttcttctacattttctagttcatgtgcatagagatgtttatagtattctctgatggttgtttgtatttccgtagggtcagtggtgatattctctttatcattttcattgtgtccatttgattcttytcacttttctttgtctagctagcagtctatctattttattaatttttttcaaaaagccagctcctggattcgttgattttttttgaagggtttttcacgtctctgtttccttcagttctgctctgatcttggttatttcttgtcttctgctagctttggggtttgtttgctcttggttctctagttcttttagttgtgatgttaggatgtcaattggagatcctcctagctttttgaagtgggcatttagtgctataaattttcctcttaatgctgctttagctgcatcccagagattctggtatattg

SEQ ID NO: 942339 - DNA, 583 bp, Homo sapiens
ctgtgcccttgctggagaggtgtttcagtcattcgaaggagaagaggcactctggctttttgagttttcagcgtttttgcattgatttttttctcatctttgtgagcttgtctacctttgatctttgaggctgctgacctttggatggggttttgtggggtctttttttgttgatgttgttgttgctttctttcttttaacagctaggcccctcttctgtagggttgctgcagtttgctgggggtctactccagaccctrttcacctggatccctcctgcacctggaagtgtcaccagtggaggctgtagaacaccaaagatggctgcctgatccttcctctgggagctcaatctcagagggacaccaacctgatgctggtgggaacgctcccgtataagattcctgacaacccatgttgggggatctcacccagtcaggaggcttgggatccgaggcctgcttaaagaagcagtctggctgccccttggtggagtgggtgcactgcactggagggactcctctttgtccaaactgcccagcctcttcagaaccagcaggcaggaaagattatgtctactgag

SEQ ID NO: 942340 - DNA, 696 bp, Homo sapiens
tttcatcttccaccatgattgtaagtttcctgaggcttccccagccatgcagaactgtgagtcaattaaacctcttttccttataaattacccggtcttgggtagtttattatagcagtgtggaaatggactaatacagaaaattgataccaggatagtrgagtactgctataaagataacctggaagtgtgaaagtgactttgcaactgggtaacaggcagaagttgaaacagtttggtgagcttggaagaagacaggaaaatgtgggaaagttttaaatttcctggagacttgttaattggctttgaccaaaatgcagatagtgatatatggacgatgaagtccaggctgaagtggtcctagatggagatgaagaacttattgggaactggagtaaaggtgactcttgctatgctttagcaaagagactggtggcattttgcccctgccctagagatctgtggaactttgaacttgagatgatttagcgtacctggtggaagaaatttctaagcagcaaagcattcaagaggcgatctggctttttctaaaagcatacagtcagtcgtatgcattcacaaatagatggtttgaaattggaagttaggtttaaaagggaagcagagcatacaggtttggaaaatttgcagcctgaccatgaggttgaaaagaaaaacccattttctggggaagga

SEQ ID NO: 942341 - DNA, 605 bp, Homo sapiens
aaaatggaggaattgtaaggagagtttataggctttaaaaggccatgctgtaacaggtgagtgataacaggctttaatccttttaaagcgtgctgtgggatgggatattggtactgagcggggtaagggtgattaggttttaatgagatggtaaggggtggattataggtcgctaaggagggagtagaggtatcttatacttgtgggttaaggtggggagatataaggggaggatgtgaaggaggctttgaactgggggaaaaggtggcaatgaggtgtgtctgtagcccaggaatagtcagggaagcagataatttagttaaaatatctcggcctaataagggaactgggcaggtggrgataactaaaaggattgcttaaaagagtattgtctaagttggcaccagagctggggagttttaagaggtttagaaacctggctgtcaatacaacagttatggaggcaagggaaacaggcctttgaaaagaaggtaatgtggagtgggtagcctccgtattgattaagaaggggatggacttaccttccactgtgagagttacctagagcgtctgtgatggtcttgtaggcttctgaggcaatccgg

SEQ ID NO: 942342 - DNA, 563 bp, Homo sapiens
actgaacgcaaatgctggtgaggatgtggtgtaacagggatgctcattcattcatttctggtcagaatgcaaagtggtacagccacttttcaagatagtttagtagtttttcacaaacctaaatgtacttttatcatacagcctagcagttgtgctcttggtatttatagaaatgaattgaaaacttatatccacacaaaagcatgtacacagatgtttttagcaagtttcttcataattaccaaaacttggtagcaaataattttttttttgacagagtctcgctctgtcacccaggatagagtacagtggtgcgatctcagctcactgcaatttccatctcccaggttcaagcarttctgcctcagcctcccaagtagcttggattacaggagcacgccaccatgcctgctaatttttgtatttttagtggagatggggtttcaccatgttggccagcctggtctcaaactcttgacctcaggtgatccacctgcctcagcctcacaaagtgctgagattacaagcgtgagccaccatgccccagccccaagtgtttttta

SEQ ID NO: 942343 - DNA, 561 bp, Homo sapiens
cttggctgacaggttcgcactaccacgcccagctaatttttgtatttttagtagagacggaagtttcaccatgttggccaggatggtctcgaactcctgacttagtgatccacccgcctgggcctcccaaagtgctgggattgcaggcatgagccactgctcctggccacaatagttaaagtatagaaacagtgaaactgctgagaagtaacttataaaagaaatagaagatggcaggagagaggcaggaaggcaaaatagaaaaatgatgggaagaagaaggaaaaggacaatgagagtgaagaaaagagcggagagctaagaattatacctctagcaagccttaaaattataaagaagaggaaaatggttcattaaaggacagagaaatggagaagataaagtatcaaaaaggcagaawgaagaagagccagtaaaataaagtgttgagaagagagtaggaggtcgattaaacaaggtcaagttcacaattttatgccatactgttactcaaatatatatgaaatcttgacatgtgtatttgaataaggatgggatata

SEQ ID NO: 942344 - DNA, 599 bp, Homo sapiens
gtgtacagaggttccaatttctccatgtcctcatcaatggttgtcttttttataatagccatcataataggtatgagatggtatctcattgtggttttgatttgcattcccctgataattagtgatgttgagcatcttttcatgtacctgttggtcatttatatctcttctctggagaaatgcctgttaaggtcttttgcccatttttaattatttgtttgggtttttttaatttagttattagsttgtatatattgtgattgttaatctcttaacatatatatgatttgaaaatattgcctctgactgcataagttacctttcaatgttgttggttatttcccttgctgtgaagaagctctttagtttgatatagtaccacttgtctattatgctttttttgcttatgcttttggtgtcatatccaaggtatcatagccaagaccaatgatgtcatgaagcttttctcctatgttttcttctacatgttttacagtttcaggtcttaggttagtctttaatccattttgagttgattttcatatataatataaattaagggtctgatgttattctttttcatgtagctatccagttct

SEQ ID NO: 942345 - DNA, 629 bp, Homo sapiens
cacgatctcagctcactgcaatctccacctcccaagttcgggtgattctattgcctcagcctcctgagtagctgggattacaggcatctgccaccacacccagctaattttttctatttttagtagacacggtttcaccatgttggccaggctggtcccgaactcctgacctcaggtgatccacccgccttggccccccaaagtgctgggattacaggcccagcctctcatttttatttgtatttgcccttacagtacttggaaacccctacacttgagaggttttcatggaagacaatttaggtgatgctccagtgaacaaggtggagaattatggagacaagaagagaagggacaagggatccgatgaaactatcctgtgttgtctgttrtacaactttagcttttcttgtaagatgaggagtcattacagagttttgcccagaggaacgataggatttggcttacatgttagagtcactcattattcataagtatctattagcaactctattcctgggactgttcttggtgctaaagaaggtacacaagaaacagagctttgttgtaaggttttttactctcctgatggggaaataacagggaaaagcagccactagtaacacagg

SEQ ID NO: 942346 - DNA, 734 bp, Homo sapiens
tcttctttgagctatgttatgaattgttatggctttcatttgggtggtggtagtggggagcagtgtgtacatgtgtgtttgtgtgtgtgtgtgtgtgcactgttttttgtttatttttatttttatttttttgagagacagagtctcactctgtcacccaggctggagtgcaatggcacgatcttggctcactgcagcctccacctcccggattcaagtgattctccttcctcagccacctgagtagctgggactacaggcgtgtgccaccatgattggctatttttgtatttttactagagacagggtttcgccacgttggccaggctggtctcgaactcctgacctcaggtgatccacccgcctcggcctcccaaagtggtgggattacaggtatgagccactgcacccagccgtgtgctgttttaaaataaagcaaacaagcaagatctatgttctatgcagtggttcaataaaataagttattctttccagctcattttcttggtttctctgttcgtgtttttgagtagtcttactgcacagataaaagaactgaggccctgcagggggcagtgatctactcagggtcacctggccctttrctggcagcgatagtaacacaaagtaggtgacctgactctgcgcccagggctctccccacactgcaacctgcctgcaggccttcctggggtgagacttgatgttgcaatttactggactgccaaacattt

SEQ ID NO: 942347 - DNA, 775 bp, Homo sapiens
tttgttatggcaaccctggtaaactgatatacccacaaacccaggtgtggaaataatgaagccccttcacggagaacaaacaggctgtttattcagagcttgctgtagcaagggagttggccaccatcacttgcatggggcagagactcaaaggcaggcagaggagtgggaaagtgtcattgggggaaaagggaaggcttcaactaggatctgactggaggttgttggcacagggaaactggaggtggcctaattagcagtaggacattgtattagttcattctcacactgctataaagaactacctgagactgggtaatttataaagaaaagaggtttaagtggctcgtggttccacaggctgtccaggaagcatgattctggcatctgctcagcttytggggaagcctcgggaaactgacaatcatggtggaaggtgaagaggaagcaggcttgtctttcatgactggagtaggaggaagagagcaatgggagagctgctacacacttttaaacagccagatctagtgataattcactcactatcatgagaacagcaccaaaggggaaaccctcccccatgatccaaccacctcccactgggccccgcttctaacactggagcttataatttgacatgagatttaggctaggacacagacccaaaccatatcagacattttatgtgattttggttttggcgaaatatttgactttttttctgagatgaaaatcagggcaaaagtaggaaagctggcagtcgttgaccaagtcc

SEQ ID NO: 942348 - DNA, 560 bp, Homo sapiens
caacatttatgggcctccagaatgtgatacttgctctaactccatattggctgatgtttctctcaaagcccgaattaagatgtccgggaatcaaggggtggaaaagggagtgatttctcttactagtcccttaataattcacaagcaaagtttttgctttttgtccccattattttgggttctgcttgtctagaggtgtttgattctgacagaagacacaacagtggttctattaaactggaagctgagactgccacctggctcctttgtgtttctcgtgccatgaaccaacaagtggagaaagagcttactgcactgactggggtgctccatcctgactctcaagtggaaactgggtggtgacctcacatgagggcagatgagcggatgtctgaaccataggagatcctcttgggcacctcttagcactcccatgtcctgtgacaaaagttagcaggaaacgacaacaagccagctcagacaggattgccagtggcacagarctttcaggaatgatgaaagcatggctgctgaggtgcttgctacaaacaaagaaaata

SEQ ID NO: 942349 - DNA, 580 bp, Homo sapiens
aactaaaaatactgagcatcatatgtagaacaaatataagatgattctggaaggtagaaagaaagcagaccagtcagagaccttgagacccaaagaacaagggagtgcgttcctgggttgtcttcttgcctcatttgtcctagacttagaactcaagtcagcaacctggaaacatcgacaggctctcacacacacaaaggccggaacaaaagcctgttctctctaacaaaaaagaatggaaaaagggctgcctagcaagacagaaaactgtgagccaakagcggcgatacttcagccaaacacttcactgtgccccactcccagccacaccagcaaaggtggagcctagactcccacccctgccaggctggaaagaggagccccaaatcccctgttggggtggcatgagagaaggccaagtagggaggcaggatgttcctctcctgggcagtgacagtacactcctcctgcccccactggggtgtcagaggaagcctagcagagagtaaggactttcagcatgcccagcagtgactgggcagcccccacttctacctgtccccgccaggaaagacctgca

SEQ ID NO: 942350 - DNA, 580 bp, Homo sapiens
aactaaaaatactgagcatcatatgtagaacaaatataagatgattctggaaggtagaaagaaagcagaccagtcagagaccttgagacccaaagaacaagggagtgcgttcctgggttgtcttcttgcctcatttgtcctagacttagaactcaagtcagcaacctggaaacatcgacaggctctcacacacacaaaggccggaacaaaagcctgttctctctaacaaaaaagaatggaaaaagggctgcctagcaagacagaaaactgtgagccaagagcggcgatacttcagccaaacacttcactgtgccccactcccagccacaccagcaaaggtggagcctagactcccamccctgccaggctggaaagaggagccccaaatcccctgttggggtggcatgagagaaggccaagtagggaggcaggatgttcctctcctgggcagtgacagtacactcctcctgcccccactggggtgtcagaggaagcctagcagagagtaaggactttcagcatgcccagcagtgactgggcagcccccacttctacctgtccccgccaggaaagacctgca

SEQ ID NO: 942351 - DNA, 580 bp, Homo sapiens
aactaaaaatactgagcatcatatgtagaacaaatataagatgattctggaaggtagaaagaaagcagaccagtcagagaccttgagacccaaagaacaagggagtgcgttcctgggttgtcttcttgcctcatttgtcctagacttagaactcaagtcagcaacctggaaacatcgacaggctctcacacacacaaaggccggaacaaaagcctgttctctctaacaaaaaagaatggaaaaagggctgcctagcaagacagaaaactgtgagccaagagcggcgatacttcagccaaacacttcactgtgccccactcccagccacaccagcaaaggtggagcctagactcccacccctgccaggctggaargaggagccccaaatcccctgttggggtggcatgagagaaggccaagtagggaggcaggatgttcctctcctgggcagtgacagtacactcctcctgcccccactggggtgtcagaggaagcctagcagagagtaaggactttcagcatgcccagcagtgactgggcagcccccacttctacctgtccccgccaggaaagacctgca

SEQ ID NO: 942352 - DNA, 729 bp, Homo sapiens
gcctgattcctgccacacctctttattcaggcagtggtcaacagtttttaatgccctcttcaaaatgacagaaataagggataaggctgtgtgcctcactgaggtgctgtccaactgggaagaaaaagagttaaatgcacacatgtctctaggatacacagatttgctaagctatgggcttggctggcatttgcccctcctcaggtcactcacagggaaagctgcatgaaactgctggtctctacgctctgagaagaggcgacctgggtacctcgccctcctgacatcctctgggtctgacttcagcaattgccaggaaatgaccactaatggtggcatccagcagtagtttcatttttatcatctgctctttggtaagccttgagacaaccactcagctaccatgaaagttctccattaacaacagatctcaccagaacccactctgccactattttttttttgagtcagggtctcactctgtcgcccaggctggagtgcaatggtgcgatcatagctcaccgcagcctcaagctcctgggctcaggcaatcctcccgcctcatcctcccaagtagccaggactayaggcacctactgcttctggctttctttttttttttaagagatgagacttagtatgttgcccaggccggcctcaaccttctggcctcaagccaatcctcctgcctcagcctcccaaagcactgggattatgagtgtgaaccac

SEQ ID NO: 942353 - DNA, 627 bp, Homo sapiens
ggcaaatcactggaggtcaggagtttgagaccagccttgccaacatggtgaaaccccatctctactaaaaatacaaaaattagctgggcatagtggcatgcgcctgtagtcccagctactggggaggctgaggcaggagaattgcttgaagcagggaggcagaggttgcagtgactgagatcgtgccattgcactccagcctgggcgacagaacaagaatcagtttcaaaaaaaaaaaaaaattcaagatggcgccagcagagcattaaaaccagctctgggacttctaggacaggatcatgatgctggctctgcccatcttgggtgctttaatgagacagaaaataagcagagaaactctccatttgatttgaatccagctcagcatatttatttacagagaatgctgtaggctrtgtggtggccctgtgtgggatgcaacctgaagttctgggtgtttcctgcctttcagattgcttgtcttactcagctttgcaagtcctatcccgaaggtgctatgggaagcagagatgcaaaatcatcgtcaacaatcaccattttggaagcccctgtttgccaggcgtgaaaaaatacctcactgtgacctacgcatgtggtaagaacaca

SEQ ID NO: 942354 - DNA, 650 bp, Homo sapiens
atttgaaatctctttatttatttattttttttgagaaagagtctcactctgttgcccaggctggagtgcagtggcacaatctcagctcactgcaacctccgcctcctgggttcaagtgattctcctgcctcagcctcctgcgtagctgggactacagatgtgcgcaactatgccyggctaatttttgtatttttagtagagatgggggtttcactatgttggtaaggctggtctcgaactcctgacctcgtgatctgtctccctcggcctcccaaagtgcctggattacaggcatgagccaccgtgcccagccaataatttgaactctttatgccaggttagcaacccatatgtcacaatgtaattggcaactgtatcttgtagcctgcctaacatccattcccccttctagttgcctccatctcattttcttttaactatactaccttcccatgtgcctctgaaaaagtgagctctcccttctactcctgaatgggccctgattggtgaatccaatcagcacatcccatccaactggccacagtgactggctcaatgaaaaataacatgaatccagccaatggaaggttaggagaggtttactgggaacttagcaggaataaaagtgcttgatcttctcataaaactgt

SEQ ID NO: 942355 - DNA, 585 bp, Homo sapiens; identical to SEQ ID NO: 942289

SEQ ID NO: 942356 - DNA, 814 bp, Homo sapiens
tccgaacctcttcttggtttgctcaaattgctaatttatctaaagtttttctttaacataactatggagaccttttaagaaaatcagtgacagcagcccacccttcttacagtcagggataaaatgagtttaaaacacactttccggctgggcacagtggctcacgcctgtaataccagcactttgggaggctgaggtgggtggatcacctgaggtcaggaattcgagaccagcctgaccaatatggtgaaaccccatctctactaaaaatacaaaaattatctgggcgtggtggcatgcacctgcagtcccagctacttaggaggctgagaaaggagaattgcttgaacctgggaggcagaggttgcagtgagccgagatcacgccactgcactccagcctgggcgacagagcaaggttctgtctcaaaaaaacactttcctataagattccatgtgtatgaaatagatacagacagaaagtacattagtggctgcctagggctaggggaaggagtaatggggagtgactgctaatgggtatggcagtgataaaaatattctcaaattggattrtgatgatggtagcataattctgtgaaaatactaaaaacactgaactgcatattttaaatggctgaattatatggtatgcaaattatatctcaatgaagctatctttaaaaaagcattttccttcagatatgcttcataccagaattatgtgctctagtagtatttttaattaactaaaaaacacattttagatacagttggtgaccaatgttatttaagccaaccactgtcctcttgta

SEQ ID NO: 942357 - DNA, 623 bp, Homo sapiens
ttacaacgcaaattgagctcccagcctcacagggtaaaagtgagggcattgattaagaaagaatgggatcctgtaaattgggataggaaggtgcgggaagaccttgatgaagctggggacactgagcccctaaattctgattattttgcttcgcaagtggcagatgtctccccatctccagtggaattgacctccttacccccagcagaaatggcctcctcaaacccagtggccatggccttcccactctcaggtaatggcatcatcatcccagtggtatcagcctgtccacttgggtctcaggaggattaaccctgcattgcctgaggaaattgtaatgacttcacttgaggcagytgccttggaagacaatgctgattctcttcaggacccactcccaccatccctctttgcttccagacctataacttgacttaagttctaacaggcccctaaaggtgagccatgtgtgacccaagagagtacttatagtcagaagaactgcttgagtttttaaattaatgtaggcagaagtccatggaacatgtgtagggctgtatactaaaagtgtgggataattgtggaaggaacataaaattgggtcaggctgaatttattgacat

SEQ ID NO: 942358 - DNA, 617 bp, Homo sapiens; identical to SEQ ID NO: 942260

SEQ ID NO: 942359 - DNA, 649 bp, Homo sapiens
acccctctgaggtgagtgagacctcatccattcactgcaaccttcttctgctttttcctctctacagagctgaagagacagaaactatttcccagcctgccttgcaaacagggctccacatatgatttggaagctgctgattaggtgcagccatgagagagctgactttggaactgaattaagtgcgaagggagtggcagtaagggtcatatatattttwgttggtgcagatctagtcggtgtggaggggccatgggggtaaacattgtcatggtagcccctgatctccatcacagttgaggtgttacatcactggaagcaaaggttgattcagaggtcctggggctgtgccacttcctgattctagagttttgtgcttgagttaaaagaggtggcttccctggtgggttagtcctgcagtattgttttatgagtctttcctgcaggcctcttctctagcctgcttctttgacccatgtgaaggttttgtgagcacactactcctatatgaaatccatttctgcttaaaatagttagagtggttcctgtgactgcaagggaaccttgcctgaaacagatggaactatcaagcccatcatacagatgcatacctgaaaaaatgaatggctactcaaggtcatagaggttg

SEQ ID NO: 942360 - DNA, 658 bp, Homo sapiens
tggctgggctgtgtctccagccttccctcatcacctccctgctggtcccctcagccttcaccagactgcgctgtgtgctgtctcctgcccatggctcaggtctgggaggtttctgtagctcagccctataagtcagagctaaattgttactggagacaagggtctagttaattcttttagtattatcctcctcccatgcttcagtcacctgtactcccacttttgaaatatgatctctgaactaayagtaatagctaacactgctctgtttattatcaatactttacacacagcatgatatggtttggctgtatccccatccacatctcatcttgaattgtagctctcataattcccttgtgttgtgggatggagccagtgggagataattgaatcatgggggcaatttcacccatactgttctcatggtagtgaatacgtctcatgagatctgatggctttgtaaggggaaaccccttccactgggctctctttctcttctcctgtctgccgccatgtgagacatgcctttcaccttccaccatgattgtgacttctttcttttgtaaattgcccagtctcgggtatgtctttatcagcagcgtgaaaatggaccaatatgtaacacatataagtaggtcatttaattgtcaaaaca

SEQ ID NO: 942361 - DNA, 658 bp, Homo sapiens
tggctgggctgtgtctccagccttccctcatcacctccctgctggtcccctcagccttcaccagactgcgctgtgtgctgtctcctgcccatggctcaggtctgggaggtttctgtagctcagccctataagtcagagctaaattgttactggagacaagggtctagttaattcttttagtattatcctcctcccatgcttcagtcacctgtactcccacttttgaaatatgatctctgaactaatagtaatagctaacactgctctgtttattatcaatactttacacacagcatgatatggtttggctgtatccccatccacatctcatcttgaattgtagctctcataattcccttgtgttgtgggatggasccagtgggagataattgaatcatgggggcaatttcacccatactgttctcatggtagtgaatacgtctcatgagatctgatggctttgtaaggggaaaccccttccactgggctctctttctcttctcctgtctgccgccatgtgagacatgcctttcaccttccaccatgattgtgacttctttcttttgtaaattgcccagtctcgggtatgtctttatcagcagcgtgaaaatggaccaatatgtaacacatataagtaggtcatttaattgtcaaaaca

SEQ ID NO: 942362 - DNA, 793 bp, Homo sapiens
gttttgtctggcccattaagtaggaatggtgaacactctcgattgatttgatgagagaatactacctctgagccccaatgaagtgagattttatcccctctaaaaaaagaattcatttttttctcattagttgaactgtatttttttaatatccttgmtttttaataatattgtcatattttaattttcattaataaaaaagtatggaaatgtgctttcactctttttatggaagtaactgctgcagggcatcgtggctcatgcgtgtaatcccagcactctgggaggccgaggcaggtggatcacctaatatcaggagttcaagaccagcctggccaacatggtgaaaccctgtctctactaaaaatacaaaaattagctgggtgtgatggtaggcacctgtaatctcagctactcgggaggctgaggcaggagaatcacttgaacccgggcagggaagattgcagtgagctgagattgcaccgttgcactccagcctaggtgacagagtgaggatctgtctcaaaaaaaaaaaataataataagtaactgcatagtaggtttgattttgcctcttgccctacaacacctgaagtatgcactatctggctcttcaccaaaaagggctactgagctctccctggtctaggtgttggtggagaaaatggatgggttcggatgtattttggagtgagagccagtaggactttaattttaatgctggcagaacatagactatgctgcagggtgggacagagtcacttgatccctaagacaagtctaagactatgag

SEQ ID NO: 942363 - DNA, 642 bp, Homo sapiens
tcttttacaagattaatttttcacaaaccttccacaacttgctcaaaccttcagcattattctatccaactgaaaataatcctttaaccctttaatctaggcaaaaaaaaatccacattcccatgacttcttacaatctttttaccaaaaacacatttcactttcygtgcacatttcacacttgcaggtagaactgcttttcccatagtcccatagtctcaagtgcatgttacattgttaaccgaagaagcagtttatgaccgtaaagcatttagcaaacctaatatctgacctgtctaatttagaccaaatgcctaaatttttgaagatatttttattttaccaatagtctttaaaactgtctttatttcccaaaggttacttaagtcacatgaactaaaaggcattacagttttaatttttctgacaagatatttggtttaaggtcttagtatttttaaaccagttaatcaaagctctttcatatataaacatcacacacataacatgtaaatagacagaagatccaggagacgtaagattttccattttccagtttctaagtttcttaactggattactggcttcagggtggagctctttgctaaacagggctagggaaacatgcagtttctggagcct

SEQ ID NO: 942364 - DNA, 642 bp, Homo sapiens
tcttttacaagattaatttttcacaaaccttccacaacttgctcaaaccttcagcattattctatccaactgaaaataatcctttaaccctttaatctaggcaaaaaaaaatccacattcccatgacttcttacaatctttttaccaaaaacacatttcactttccgtgcacatttcacacttgcaggtagaactgcttttcccatagtcccatagtctcaagtrcatgttacattgttaaccgaagaagcagtttatgaccgtaaagcatttagcaaacctaatatctgacctgtctaatttagaccaaatgcctaaatttttgaagatatttttattttaccaatagtctttaaaactgtctttatttcccaaaggttacttaagtcacatgaactaaaaggcattacagttttaatttttctgacaagatatttggtttaaggtcttagtatttttaaaccagttaatcaaagctctttcatatataaacatcacacacataacatgtaaatagacagaagatccaggagacgtaagattttccattttccagtttctaagtttcttaactggattactggcttcagggtggagctctttgctaaacagggctagggaaacatgcagtttctggagcct

SEQ ID NO: 942365 - DNA, 570 bp, Homo sapiens
tccttctggtcctgggttttttttggttggtaggctatttcttactgcctcaatttcaggacttattattggtttattcagagattcaacttctttgtggttcagtcttaggagggtctttgtattcaggaatttatcartttcttctacattttctagttcatgtgcatagagatgtttatagtattctctgatggttgtttgtatttccgtagggtcagtggtgatattctctttatcattttcattgtgtccatttgattcttttcacttttctttgtctagctagcagtctatctattttattaatttttttcaaaaagccagctcctggattcgttgattttttttgaagggtttttcacgtctctgtttccttcagttctgctctgatcttggttatttcttgtcttctgctagctttggggtttgtttgctcttggttctctagttcttttagttgtgatgttaggatgtcaattggagatcctcctagctttttgaagtgggcatttagtgctataaattttcctcttaatgctgctttagctgcatcccagagattctggt

SEQ ID NO: 942366 - DNA, 570 bp, Homo sapiens
tccttctggtcctgggttttttttggttggtaggctatttcttactgcctcaatttcaggacttattattggtttattcagagattcaacttctttgtggttcagtcttaggagggtctttgtattcaggaatttatcagtttcttctacattttctagttcatgtgcatagagatgtttatagtattctctgatggttgtttgtatttccgtagggtcagtggtgatattctctttatcattttcattgtgtccatttgattcttytcacttttctttgtctagctagcagtctatctattttattaatttttttcaaaaagccagctcctggattcgttgattttttttgaagggtttttcacgtctctgtttccttcagttctgctctgatcttggttatttcttgtcttctgctagctttggggtttgtttgctcttggttctctagttcttttagttgtgatgttaggatgtcaattggagatcctcctagctttttgaagtgggcatttagtgctataaattttcctcttaatgctgctttagctgcatcccagagattctggt

SEQ ID NO: 942367 - DNA, 581 bp, Homo sapiens
gtgcccttgctggagaggtgtttcagtcattcgaaggagaagaggcactctggctttttgagttttcagcgtttttgcattgatttttttctcatctttgtgagcttgtctacctttgatctttgaggctgctgacctttggatggggttttgtggggtctttttttgttgatgttgttgttgctttctttcttttaacagctaggcccctcttctgtagggttgctgcagtttgctgggggtctactccagaccctrttcacctggatccctcctgcacctggaagtgtcaccagtggaggctgtagaacaccaaagatggctgcctgatccttcctctgggagctcaatctcagagggacaccaacctgatgctggtgggaacgctcccgtataagattcctgacaacccatgttgggggatctcacccagtcaggaggcttgggatccgaggcctgcttaaagaagcagtctggctgccccttggtggagtgggtgcactgcactggagggactcctctttgtccaaactgcccagcctcttcagaaccagcaggcaggaaagattatgtctactgag

SEQ ID NO: 942368 - DNA, 637 bp, Homo sapiens
cgcaggccctgcaggacagagactggcagcgcaccgtcatcgccatgaatggggtacgtgtccgtgggactctcctggtgcccacttcccccagaaggatagggtggcctctgttcatttcaaatcagtcagaggtggctgagcctgaggcagcatctgagagggagcctggttggagaagggagggcccccaagagcagaatcaccatgcacgggaatcgtcattcattggctggaatgcagttgccagccaggccctgagcatccctcctcaaacaaaggtctcatggcaccaccaggacaggtggggcctccactcagggacctgggggctgcccatagaaatggagacccctgatttgtctttaggtaccccagaaaggtttagaccttaaaagcaatgacacacccaaaaaggcccgggtataaatggtaaaatgttaatatttgagattcttggctttttcttacattattctgtctttcctwcttaatttttaattgttactaagaaagagaaagccaggcacagtgcacctatagtctcagctactctggagtctgaggcaggagaatcactggagcccaagagtttgattacagcctgggcaacattgcaagctcctatatctaaaaa

SEQ ID NO: 942369 - DNA, 614 bp, Homo sapiens
tactcctatttcatatattttgatactgtgaatttcagcttccagttattcattgctaatatataaaaatacacttggtttttgtatattaatcttgtatcctgagaccttaatgtaatttgttttcaaagcttttttgtggattccattggctattctgtcaatgttgtctgtgaataaagacagttgtacttttttcttcccactctgaatgccttttatttatttttgcttcctttactgcactggctagaacttctaagtacataatgaatagaagtgtaactgcccaatgagttcaccttgcccattgcctagacagagccgattcaccaagacgggaattgyaatagagaaagagtaattcaggcagagcctgctgggtgggagaccggagttttattattgctcaaatcagtctccctgagcatttgaggagcagagtttttaaggacagcttggtgggtggggggaagccagtgggccaggagtgctgattggtcaggggtgaaatcaaaaggagttgaagctttcttcttgagctgagtccgttcctgggtgggggccacaaggtcagatgagccagtttattgatctggatggtgccagctgat

SEQ ID NO: 942370 - DNA, 668 bp, Homo sapiens
tttttaggaatgtgaacatattctttatgagaacataatggtgaacataatgttatacatatttcaaacttcacatgtatgtgtaacagaaagaatgaacattatgcaaatgatagacttcagataataatgtcaatattttctcattacttttagcaaatgtaccacattaatgtaagatgttatgttaataatagatgaaattaggaagtcagggtgaggggacagaatgatatgggaactttgtgtattatatgctcawttttttttttttttttttttttttgagatggagtttcacttttgttgcccagggtggagtgcaatggcgccatctcggctcactgcaacatccgcctcctgggttcaagcaattctcctgcctcagcctcctgagtagctgggattacaggcgcctgccaccacactctgttatttttttgtatttttagtagagatggggtttcaccatgttggccaggctggtttccaactcctgacctcaggtgatctgcccgccttgggctcctaaagtgttgggattataagcatgagccaccacacctggccatatgctcagtttttatgtcaatttaaaactctctagttaaagaaatatattaatttaaaaataataatatagcaccactctttcagggagatctatg

SEQ ID NO: 942371 - DNA, 743 bp, Homo sapiens
atcctcatgaaaattctgagttaggtattgttcatataaataaggaaaccaaggcaaaggggttaaacaatccacccaaagccacacgagtagcaagtggtgaagccacaactcaaccccaggcagcctggctccagagcccaggccctccacctctcagtaagcatgagtgagcaacacagcatgctagagggtgagtgccccggaaaaatggagagtaaagcagagtaaagggaatccggagcacggagggaaggagacacactgacattttaaactgggaggcatgaggattcccagaggagctgacatctgagcaaaggcatgcaatgcaagggttgagggagtctgcatgcaatattgcaggaaagagtgtttcagggagggggagtctgtcccacagtcctgaggcagggtgtgcctggagcatgggaggaaggtccsgccagggaggggacagcccctgccttttgtgcagcagaatgcccgagcgtgctgcgtgcccaattccctgcctccctggtgggccgtgctgctctttcagtactcaccttgacttccaaagtgaacagtgaacttagagaacagagcccatgacctctactccctctgcttgtccctggtactttcaagctgatgtttgctggatctgtctgccttgccttgtggattccacaaaactacaaggtccaggaggatgagcaggtcctgccagggaagcttctgacacctctgtcactggt

SEQ ID NO: 942372 - DNA, 743 bp, Homo sapiens
atcctcatgaaaattctgagttaggtattgttcatataaataaggaaaccaaggcaaaggggttaaacaatccacccaaagccacacgagtagcaagtggtgaagccacaactcaaccccaggcagcctggctccagagcccaggccctccacctctcagtaagcatgagtgagcaacacagcatgctagagggtgagtgccccggaaaaatggagagtaaagcagagtaaagggaatccggagcacggagggaaggagacacactgacattttaaactgggaggcatgaggattcccagaggagctgacatctgagcaaaggcatgcaatgcaagggttgagggagtctgcatgcaatattgcaggaaagagtgtttcagggagggggagtctgtcccacagtcctgaggcagggtgtgcctggagcatgggaggaaggtccggccagggaggggacagcccctgccttttgtgcagcagaatgcccgagcgtgctgcgtgcccrattccctgcctccctggtgggccgtgctgctctttcagtactcaccttgacttccaaagtgaacagtgaacttagagaacagagcccatgacctctactccctctgcttgtccctggtactttcaagctgatgtttgctggatctgtctgccttgccttgtggattccacaaaactacaaggtccaggaggatgagcaggtcctgccagggaagcttctgacacctctgtcactggt

SEQ ID NO: 942373 - DNA, 645 bp, Homo sapiens
atgaggatgatgatgtacctaccattatttacggccagggtgatgtttaattttatgtgtcaacttggcagggccacagtgccagatatttggtcaaatattattctgatgtttctgtggcattattttgtgggtgggattaacatttaaattttacatttcacaaacttgtgaaaattaaacaacagtcttttttttgagacagggtctcactctgttgcccaggctggaatgtaatggtgcaatcatagctcactgcagcctcaacctccagggctcaaggaatccctcccacctcagcctcccaaagggctgggatttaagttaccartttccctctatgtgctgatttatctgtatcctacaaatttttatgtggtggtctcatcattgttcagtttaaaatgttacctaattttgtttcttgagttccccaactgttggcttattcagcagtttcttttctctctttcttttttttcctctctctctccttcctttcccttctttctctccttccttccctcctttctgttttagagacagggtcttgctgtgtcagccaagctggagtgcagtggtgcaatcagggctgactgcagcctccaactcttaggctcaagcgatcttcccacttcagcctcc

SEQ ID NO: 942374 - DNA, 658 bp, Homo sapiens
gtctcccaaagtgctgggattacaggtgggagccactgcacccagccagccctttgatatttggggacacattcttttttgttttgagatggagtctcgttctgtcacccaggctggagtgcagtggcacaatctcagctcattgcaacctctgcctcccaggttcaagtgattctcccgcctcagcctcccaagtaactgggattacaggtgtgcaccaccacgcccggatatataaatatagatatctatttagatayctatatatctagagatgggggttcaccatgttggccaggctggtcttgaactcctgacctaaagggatccgctcaccctgccttggcctcccaaagtgctaggactacaggcgtgagccactgggcccagcagggtacatgttctttatagcctggcatatgtgcgcttttgttccatatctgcttgaaaagaatgtgccctgcactcggagcatgctctgctccgtggatggcataaggctgtctactgtcttcctcaaaccttctctagccgttctcactcatggcccacttattccactaattacagagatgtgtaagaatctgggagcatctctacatctataggcatcccacagctggaacggggctcccctagacagttctggccttcaggc

SEQ ID NO: 942375 - DNA, 721 bp, Homo sapiens
ctcagaaatgttccctctctaaattttcctcgcagcacctgaagctcccccagcccaaggaaaactggtgggtgacaggaaggagaagcatgacctccagtgcacactgagtcccagcagggccagctcacccaggagctgagcgggagggtctctctgccctgtagacactgggttcaggatcaggagctgagaccccagatcagacagacctagaccctggctcttcctcttagcagctrtgtgagtctccatctctccagttatagtgggaatgatatggggaaccatgtctccatcttattgtaaagatttataaaataacctatgtaaggtgcttgtggggagaaatggctcaaaggacagtgcctgctccaatgacgactacgactattgcttttttttttttttttttgagaaggagtcccgctctgtcacccaggctggagtgcagtggcgcatctccgctcactgcaagctccgcctcccaggttcacgccattctcctgcctcagcctcctgcatagctgggactacaggcacccgcccccacacctggctatttttttgtattttttttagtagagacggagtttcactgtgttagccaggatggtctcaatctcctgacctcctgatccgtcttcctcggcctcccaaagtgctgggattacaggcgtgagccaccacgcccagcagattattgcttttctaatccatg

SEQ ID NO: 942376 - DNA, 709 bp, Homo sapiens
agtgctgggattacaggcgtgagccaccacgcccagcagattattgcttttctaatccatgccacagatcttgacgttctgcctcctgcgcacacctcccagcaggcaacatcctcccatccagcagttggcactctaggcctgttctgagcccctaagactgggcaggtcccctgcacgccctacgcactctggctttctcctttctagcactttccaaaatcatgatgaattcattatttgggtggagtgctgccctccaggcaaggaatctcgtgacagcagggactgtgattatttcatttgttgccatagaactcgggcccagtgaagggcgtggtgtggcagggaatcayggtgaatgctgtagaatgggtcgttcattcacctagccattcattcatttacgcagggctagaggaatttcactctccacctccgtcatttactttctgggtgatctagagcagcatccttcttctcttagcctcagttgcctcatctgtaaaatggggctagcactgccctcttagagtatggcaaggagtcattgagataatggggctatgacacagagatattttgagcacctggcatctagcgattgttcaatagccactggctgtagtaagagtcttatttggccaattgttattgttaatgggctccctgaaactacaacaggagtttgctctgtcctttcatgtca

SEQ ID NO: 942377 - DNA, 709 bp, Homo sapiens
agtgctgggattacaggcgtgagccaccacgcccagcagattattgcttttctaatccatgccacagatcttgacgttctgcctcctgcgcacacctcccagcaggcaacatcctcccatccagcagttggcactctaggcctgttctgagcccctaagactgggcaggtcccctgcacgccctacgcactctggctttctcctttctagcactttccaaaatcatgatgaattcattatttgggtggagtgctgccctccaggcaaggaatctcgtgacagcagggactgtgattatttcatttgttgccatagaactcgggcccagtgaagggcgtggtgtggcagggaatcatsgtgaatgctgtagaatgggtcgttcattcacctagccattcattcatttacgcagggctagaggaatttcactctccacctccgtcatttactttctgggtgatctagagcagcatccttcttctcttagcctcagttgcctcatctgtaaaatggggctagcactgccctcttagagtatggcaaggagtcattgagataatggggctatgacacagagatattttgagcacctggcatctagcgattgttcaatagccactggctgtagtaagagtcttatttggccaattgttattgttaatgggctccctgaaactacaacaggagtttgctctgtcctttcatgtca

SEQ ID NO: 942378 - DNA, 558 bp, Homo sapiens
atgtaacaaacctgcacattatgcacatgtaccctaaaacttaaagtataataataataataaaaataaataaaataaaaataaaatgaaataaaacttcaaaaaaaaatgttttgtagagacaggggtcttgctatgttgcccaggctggccttgaaatcctggcctcaggcaatcctcccaaagtgctggcatttgtcatgagccaccgaatcattcattcattcattcatgcacagtgaatccacaaacgttttccaagtgccctccaggggccgggcccaggactaggtgctgtggttggaagcagaaaggagagtcctgggctgagaggaagccatcagtttatcctctgtgccaagggaagtggctgagccctctacccrcatcctgtcacccccacccctgcactggctgatctgtctctgtccttttcctgaacctctttcaccctggcctgggcagggggctcggcacccccaccccaccattcagccctttcctgcccttctgtcatctgcttcctttgatccttttgtcagaagactcttggaagcc

SEQ ID NO: 942379 - DNA, 558 bp, Homo sapiens
atgtaacaaacctgcacattatgcacatgtaccctaaaacttaaagtataataataataataaaaataaataaaataaaaataaaatgaaataaaacttcaaaaaaaaatgttttgtagagacaggggtcttgctatgttgcccaggctggccttgaaatcctggcctcaggcaatcctcccaaagtgctggcatttgtcatgagccaccgaatcattcattcattcattcatgcacagtgaatccacaaacgttttccaagtgccctccaggggccgggcccaggactaggtgctgtggttggaagcagaaaggagagtcctgggctgagaggaagccatcagtttatcctctgtgccaagggaagtggctgagccctctacccgcatcctgtcacccccacccctgcactggctgatctgtctctgtccttttcctgaacctctttcaycctggcctgggcagggggctcggcacccccaccccaccattcagccctttcctgcccttctgtcatctgcttcctttgatccttttgtcagaagactcttggaagcc

SEQ ID NO: 942380 - DNA, 670 bp, Homo sapiens
taccctaaaacttaaagtataataataataataaaaataaataaaataaaaataaaatgaaataaaacttcaaaaaaaaatgttttgtagagacaggggtcttgctatgttgcccaggctggccttgaaatcctggcctcaggcaatcctcccaaagtgctggcatttgtcatgagccaccgaatcattcattcattcattcatgcacagtgaatccacaaacgttttccaagtgccctccaggggccgggcccaggactaggtgctgtggttggaagcagaaaggagagtcctgggctgagaggaagccatcagtttatcctctgtgccaagggaagtggctgagccctctacccgcatcctgtcacccccacccctgcactggctgatctgtctctgtccttttcctgaacctctttcaccctggcctgggcagggggctcggcacccccaccccaccrttcagccctttcctgcccttctgtcatctgcttcctttgatccttttgtcagaagactcttggaagcctctaagccattggcaaccccgtctgctgggctggggctggtgaccccacaggggctgggaccaaagtgggcttctcttgggatcctgctctgggaggcagatggattctggccacattcattcattcgctcattcactttt

SEQ ID NO: 942381 - DNA, 558 bp, Homo sapiens
atgtaacaaacctgcacattatgcacatgtaccctaaaacttaaagtataataataataataaaaataaataaaataaaaataaaatgaaataaaacttcaaaaaaaaatgttttgtagagacaggggtcttgctatgttgcccaggctggccttgaaatcctggcctcaggcaatcctcccaaagtgctggcatttgtcatgagccaccgaatcattcattcattcattcatgcacagtgaatccacaaacgttttccaagtgccctccaggggccgggcccaggactaggtgctgtggttggaagcagaaaggagagtcctgggctgagaggaagccatcagtttatcctctgtgccaagggaagtggctgagccctctacccgcatcctgtcacccccacccctgcactggctgatctgtctctgtccttttcctgaacctctttcaccctggcctgggcagggggctcggcacccccaccccaccattcagccmtttcctgcccttctgtcatctgcttcctttgatccttttgtcagaagactcttggaagcc

SEQ ID NO: 942382 - DNA, 825 bp, Homo sapiens
agtctctcattccacctgatgagaaacacccagaggtgtggaggggcaggccaccccttcagggtagggtcccctccatgcagaccatagagcacaggtgtgccccaaagaggagcagagagaaggagggagagggcccacgagagacttggaaatgaatggcaggattttaggcgctggacttgggttcggggcacctggcctttccttgtgtatttctcctactgtctgcctaactatttaatacaataaaagaaaaccagcccctggttcttgtggtgtttccaccctcccgggtccccgctggctgcctggcttcctcccgcagctcctgctgtgtgtgtatgtgtgtgtgtgtgcacatctgtggggcgtatgtgtgttcgtctttgtaattgaggctgcagagtggagagagcaggggttttctctggggacccwgagagaaggaggcgttttcaccacagccgaacagggcaggaccccagcacccgggacccagcgggactttgccaaggggatggacctggctgggccacgcggctgtttgtgtagggaaaagaaagagagatcacactgttactgtgtctatgtagaaaaggaagacataaactccattttgagctgtactaagaaaaattattttgccttgacctgctgttaacctgtaactgtagccccaaccctgtgctcaaagaaacatgtgctgtatggaatcaaggtttaagggatcaagggctgtacaggatgtgccttgttaacaatgtgtttacaggcagtatgcttggtaaaagtcatcgccattctccattctccattaatcag

SEQ ID NO: 942383 - DNA, 629 bp, Homo sapiens
agtgcaccttgaaaatgaacagaataacagtgattttagggaacaaaggaagacaaccataaggtctgactgcctgaggggtcgggcaaaaagccatatttttcttcttgcagagagcctataaatggacgtgcaagtaggagagatattgctaaattcttttcctagcaaggaatataatactaagaccctagggaaagaattgcattcctggggggaggtctataaacggccgctctgggagtgtctgtcctatgtggttgagataaggactgagatacgccctggtckcctgcagtaccctcaggcttactaggattgggaaaccccagtcctggtaaatttgaggtcaggccggttctttgctctgaaccctgttttctgttaagatgtttatcaagacaatacatgcaccgctgaacatagacccttatcaggagtttctgattttgctctggtcctgtttcttcagaagcatgtcatctttgctctgccttctgccctttgaagcatgtgatctttgtgacctactccctgttcatacacccctccccttttaaaatccctaataaaaacttgctggttttgtggctcaggggggcatcatggacctaccaatacgtgatgtc

SEQ ID NO: 942384 - DNA, 629 bp, Homo sapiens
agtgcaccttgaaaatgaacagaataacagtgattttagggaacaaaggaagacaaccataaggtctgactgcctgaggggtcgggcaaaaagccatatttttcttcttgcagagagcctataaatggacgtgcaagtaggagagatattgctaaattcttttcctagcaaggaatataatactaagaccctagggaaagaattgcattcctggggggaggtctataaacggccgctctgggagtgtctgtcctatgtggttgagataaggactgagatacgccctggtctcctgcagtaccctcaggcttactaggattgggaaaccccagtcctggtaaatttgaggtcaggccggttctttgctctgaaccctgttttctgttaagatgtttatcaagacaatacrtgcaccgctgaacatagacccttatcaggagtttctgattttgctctggtcctgtttcttcagaagcatgtcatctttgctctgccttctgccctttgaagcatgtgatctttgtgacctactccctgttcatacacccctccccttttaaaatccctaataaaaacttgctggttttgtggctcaggggggcatcatggacctaccaatacgtgatgtc

SEQ ID NO: 942385 - DNA, 567 bp, Homo sapiens
aaaataaaaaacaatttttttagagagatgcggtctcactatgttgcccaggctagtctcacacttctgacctcaggatcttcccaccttagcctccgaaagtgctaggatgtgataccatgcctggccccaataaaccaatactgatacattattatcaactaaggttcatcttgattcagatttctttactatttcccctaatctccttttcctgtcccaggatctcatccaggacaccatactatgtttagttcttaagtgtcctcaggattgctggagtgcagtgactccatctcggctcactgcaacctccgaccactgagttcaagcgactctcctgcctcagcctcctgagttactgggattacaggcacctgccaccatgcccggctaatttgtttttttgtttktttgtttgttttttttttgagagggagtctccctgtcgcccaggctggagtgcagtagggcgatcttggctcactgcaacctccacctctggggttcaaatgattctcctgcctcagcctcccgagtagctgggattacaggtgtgtgccacca

SEQ ID NO: 942386 - DNA, 603 bp, Homo sapiens
tcaaaaaaaaaaaaaaaaaagggtctgggagccaagatggccgaataggaacagctccagtctacagctcccagcatgagtgacgcagaagacagtgatttctgcatttccaactgaggtaccgggttcatctcactggggagtgccagasagtgggtgcaggacagtgggtgcaggacagtgggtgcagcgcactgtgcgtgagctgaagcagggcgaggcatcgcctcacctgggaagtgcaagcggtcagggaattccctttcttagtcaaagaaaggggtgacaggcggcacctggaaaatcgggtcactcccacccaatactgtgcttttccaacgggcttaacaaacggcacaccaggagattatatcccgcacatggctcggagggtcctacgcccacggagcctcgctcattgctagcacagcagtctgagatcaaactgcaaggcggcagcgaggctgggggagaggcacccaccattgctgaggcttgagtaggtaaacaaagcagccgggaagctcgaactgggtgaggcccaccacagctcaaggaggcctacctgcctctgtaggctccacctcttggggcagggcacag

SEQ ID NO: 942387 - DNA, 784 bp, Homo sapiens
cccccactgagacagcctgagatacggcctcgtgggaagggaaagacctgaccgtcccccagcccgacacccgtaaagggtctgtgctgaggaggattagtaaaaggggaaggcctcttgcagttgagataagaggaaggcctccgtctcctgcatgtccttgggaatggaatgtcttggtgtaaaacccgatagtacattccttctattctgagagaagaaaaccaccctgtggctggaggtgagatatgctagcggcaatgctgctctgttactctttgctacactgagatgtttgggtggagagaagcataaatctggcctatgtgcacatctgggcacagaacctccccttgaacttgtgacacagattcctttgttcacatgttttcctgctgaccttctccccactatcgccctgttctcccaccgcattccccttgctgagatagtgaaaatagtaatctgtagataccaagggaactcagagaccatggccggtgcacatcctccgtacgctgagcgctggtcccctgggcccaytgttctttctctatactttgtctctgtgtcttatttctttcctcagtctctcatccctcctgacaagaaatacccacaggtgtggaggggctggcccccttcatctgatgcccaatgtgggtgcctttctctagggtgaaggtactctacagtgtggtcattgaggacaagttgacgagagagtcccaagtacgtccacggtcagccttgcggtaagcttgtgtgcttagaggaacccagg

SEQ ID NO: 942388 - DNA, 784 bp, Homo sapiens
cccccactgagacagcctgagatacggcctcgtgggaagggaaagacctgaccgtcccccagcccgacacccgtaaagggtctgtgctgaggaggattagtaaaaggggaaggcctcttgcagttgagataagaggaaggcctccgtctcctgcatgtccttgggaatggaatgtcttggtgtaaaacccgatagtacattccttctattctgagagaagaaaaccaccctgtggctggaggtgagatatgctagcggcaatgctgctctgttactctttgctacactgagatgtttgggtggagagaagcataaatctggcctatgtgcacatctgggcacagaacctccccttgaacttgtgacacagattcctttgttcacatgttttcctgctgaccttctccccactatcgccctgttctcccaccgcattccccttgctgagatagtgaaaatagtaatctgtagataccaagggaactcagagaccatggccggtgcacatcctccgtacgctgagcgctggtcccctgggcccactgttctttctctatactttgtctctgtgtcttatttctttcctcagtctctcatccctcctgacragaaatacccacaggtgtggaggggctggcccccttcatctgatgcccaatgtgggtgcctttctctagggtgaaggtactctacagtgtggtcattgaggacaagttgacgagagagtcccaagtacgtccacggtcagccttgcggtaagcttgtgtgcttagaggaacccagg

SEQ ID NO: 942389 - DNA, 633 bp, Homo sapiens
aatcagtgcaccttgaaaatgaacagaataacagtgattttagggaacaaaggaagacaaccataaggtctgactgcctgaggggtcgggcaaaaagccatatttttcttcttgcagagagcctataaatggacgtgcaagtaggagagatattgctaaattcttttcctagcaaggaatataatactaagaccctagggaaagaattgcattcctggggggaggtctataaacggccgctctgggagtgtctgtcctatgtggttgagataaggactgagatacgccctggtckcctgcagtaccctcaggcttactaggattgggaaaccccagtcctggtaaatttgaggtcaggccggttctttgctctgaaccctgttttctgttaagatgtttatcaagacaatacatgcaccgctgaacatagacccttatcaggagtttctgattttgctctggtcctgtttcttcagaagcatgtcatctttgctctgccttctgccctttgaagcatgtgatctttgtgacctactccctgttcatacacccctccccttttaaaatccctaataaaaacttgctggttttgtggctcaggggggcatcatggacctaccaatacgtgatgtc

SEQ ID NO: 942390 - DNA, 633 bp, Homo sapiens
aatcagtgcaccttgaaaatgaacagaataacagtgattttagggaacaaaggaagacaaccataaggtctgactgcctgaggggtcgggcaaaaagccatatttttcttcttgcagagagcctataaatggacgtgcaagtaggagagatattgctaaattcttttcctagcaaggaatataatactaagaccctagggaaagaattgcattcctggggggaggtctataaacggccgctctgggagtgtctgtcctatgtggttgagataaggactgagatacgccctggtctcctgcagtaccctcaggcttactaggattgggaaaccccagtcctggtaaatttgaggtcaggccggttctttgctctgaaccctgttttctgttaagatgtttatcaagacaatacrtgcaccgctgaacatagacccttatcaggagtttctgattttgctctggtcctgtttcttcagaagcatgtcatctttgctctgccttctgccctttgaagcatgtgatctttgtgacctactccctgttcatacacccctccccttttaaaatccctaataaaaacttgctggttttgtggctcaggggggcatcatggacctaccaatacgtgatgtc

SEQ ID NO: 942391 - DNA, 582 bp, Homo sapiens
ctgtccacctcacttggcctcattttaagggcctctgaaatctgccacaagtgtccccagtcaaggaggctgacttcctccctggaccaggacattgggtcattcctgactcaagaggagagtcctctgcttttatatctacccatggagatgcagctcagtctcactttgttcatgaagccttttctgatcattcattccatccgtccgtccatccatctgtccatctgtccatctatgcatctgtccatctattcatctgtctttgcatccatctatcatctgtccattcgtccatccatctacctgtccgtccatccataaatccatcctgtctaccaggcactgtgtgctggggacatggtgtggtcccccaggctctcacccccatctctcccaggccatggycaacaaggccctcctcatggtcatgtccaaggtccttctgctgtacctggtgtctccgctggatgcgacacagggctggcccctctttccagtgactcttttccccttggggtctgagactcccctttcctcttcccctggcatctgtttctccatggcccatgcctggctgct

SEQ ID NO: 942392 - DNA, 703 bp, Homo sapiens
ccaggcttaagaggagaaaaggacaggaagtagggagagagctgataagcaccatcagtatgcataacaggcaagagaaagtcacttgttcacacagcaagtgctactgggtggcctactccacagcctcttcaggggcagagcccacccctccagggcccagtctgcacagtgggaaaggaagatgggcagagagaggctgatattgggcacctctggggcgggccactaatagaagggagaggcttcaagctttaagataagacttccagccaggtggctcacacctgtaatcccagcactttgggagcctgaggcaggcagatcacctgaggtcaggagtttgagaccagcctggccaacatggtgaaaccctgtctctattaaaartacacacacacacacacacacacacacacacacacacacacacacaaaattagctggcatgatggcacacacctgtaatcccagctactcgggaggctgaggcaggagaattccttgaacccgggaggtggaggttgcagtgagccatgatcgtgtcactgcactccagcctggcaacagagtgaggcttcacctcaaaaaaaagaaaaaaaaaacgaaattattcctgaagaaacacaggtatcagacttgctagacaaagaccttaaaaccatcttaaatacgctcaaacagttaaaggaaaacatggaca

SEQ ID NO: 942393 - DNA, 569 bp, Homo sapiens
aaaataaaaaacaatttttttagagagatgcggtctcactatgttgcccaggctagtctcacacttctgacctcaggatcttcccaccttagcctccgaaagtgctaggatgtgataccatgcctggccccaataaaccaatactgatacattattatcaactaaggttcatcttgattcagatttctttactatttcccctaatctccttttcctgtcccaggatctcatccaggacaccatactatgtttagttcttaagtgtcctcaggattgctggagtgcagtgactccatctcggctcactgcaacctccgaccactgagttcaagcgactctcctgcctcagcctcctgagttactgggattacaggcacctgccaccatgcccggctaatttgtttttttgtttktttgtttgttttttttttgagagggagtctccctgtcgcccaggctggagtgcagtagggcgatcttggctcactgcaacctccacctctggggttcaaatgattctcctgcctcagcctcccgagtagctgggattacaggtgtgtgccaccaca

SEQ ID NO: 942394 - DNA, 614 bp, Homo sapiens
cttccaagttctctttcttgatatctttagattgcaactcttcctccgcccacccattaagtcctggtgttctcaaacttccctccgtagaggttttccattcccactatatagcccctacaccctgaagtctccactcagaaaaaagttggcaaccctttatctgtctcccacaacatgataagtgtttttggaccgaaaatgcaaagatctggaactccatgcttcccacctctgtcggggccttctccgggtcctcctgcatctgtcatcccatcctccagagagtccctagggcctgggcaccctgcaaactcttagtgcagtcaaggtttcctggctgggggcccaagagttgccacggacccgcacacgctgcccaggcggcgacgtggcgcccctacaggcttccccgcgattggggacacgcacacccagggccaccggagggacaggtggtcaggcggactcagrtcacaccggcggacgcggggccactcacctgggccggggcggggcagctcacctgggccggggcggggccgcaggcgggcggggcggggccgcacctgagctgctccaacccgcggccgacgcggccgacgctgcctggc

SEQ ID NO: 942395 - DNA, 708 bp, Homo sapiens
tgtgggcaggtagcccagagtgtgtctggaacatcctgtttattggtcggcagtgacatctactgtcacatttgagaactgcatccacagccacatgacctcctgtgaagacctcagggcaaactggggaaacctgcccttcttggaaggtgatrctaggggggatgagcaacacctttcttggaggtttgaattcttcagggcccctccagcatcttggtcttcctaattcctcccttgatcccccagccctaggggtggtagcttcttgcagtgtttacctccgtgttaatctggattctctctgtcttcggagttctctaatgcctggttaccaattctttatatcaagttctctccgttaaaatcattgtggtggggtccatcccatggatatacatggaggtctgtgtgacaatgtataatcttactatttgcagttattacaaaactgtcctagaagacatgaatgcttgttaaaagaaatcttttaagtttcctagacttcaaagaccgttgctatgccctgtgaaacatcgcctatatcctttaacagtttgcaattcgaattggttacttacttaacattttgttgccctggtgatacaattatgttgactcgttattgtgaggttactttgttattaaccatgatgaggattactagcacatacttttactccatatgtataacacaacaatgtagta

SEQ ID NO: 942396 - DNA, 775 bp, Homo sapiens
taaccttaagcaaaaaactgggaaggatctcggtaaaagatacgtcagaaggaagtaatgtcctttaagatgttcttagaaacccatcagacaggtggggtgtggtggttcacgcctgtaatccctgtactttgggaggcagagatgggcggatcagttgaggtcaggagtttgagaccagcctgggcaacacggtgaagccccgtctctactaaaaatacaaaaattagctgggtgcggtggcacactcgggaggctgagacaggagaatcacttgaaccttggaggcagaggtttcagtgagctgagatcataccactgcactccagccgggccactgagcgagactgtctcaaaacaaacaaacgaacaaacaaaaagaagagaaactcatcagacgaagacacaggaaaaaaatgagygaaggaaatcagcagaggtttcattgaaggacaaagagaaatggtcaatacatggatgaaaacatgtttaacttcagtaataatcaaggaagcacacaccaacacaacatgcacatactgtttttatttatcaaaggcacacatatttttgaaatgagtactcctaattaatatgtacagagcacttacccagtgcccagcacaggggtggcaccctgtgtgtgagacagcatgaaacaggtagacacgcgccctgctgaaagtaagggaccgcctctctggaggatccatcgggcaataaggaggtttccacaccttaactgtgtctgccttgacctctggggcctgggagc

SEQ ID NO: 942397 - DNA, 646 bp, Homo sapiens
gaggcaggcggtgacttccccactcggggcggagccgcagcctcgcgggggcggggcctggcgccggcggtggcgtcacaaaaggcgggaccacagtggtgtccgagaagtcaggcacgtagctcagcggcggccgcggcgcgtgcgtctgtgcctctgcgcgggtctcctggtccttctgccatcatgccgatgttcatcgtaaacaccaacgtgccccgcgcctccgtgccggacgggttcctctccgagctcacccagcagctggcgcaggccaccggcaagcccccccaggtttgccgggaggggacaggaagaggggggtgcccaccggacgaggggtyccgcgctgggagctggggaggcgactcctgaacggagctggggggcggggcggggggaggacggtggctcgggcccgaagtggacgttcggggcccgacgaggtcgctggggcgggctgaccgcgccctttcctcgcagtacatcgcggtgcacgtggtcccggaccagctcatggccttcggcggctccagcgagccgtgcgcgctctgcagcctgcacagcatcggcaagatcggcggcgcgcagaaccgctcctacagcaagctgctgtgcggcctgctggccgagcgcctgcgcatca

SEQ ID NO: 942398 - DNA, 712 bp, Homo sapiens
ggttttactacattgttgtgttatacatatggagtaaaagtatgtgctagtaatcctcatcatggttaataacaaagtaacctcacaataacgagtaaacataattgtatcaccagggcaacaaaatgttaagtaagtaaccaattcgaattgcaaactgttaaaggatataggcgatgtttcacagggcatagcaacggtctttgaagtctaggaaacttaaaagatttcttttaacaagcattcatgtcttctaggacagttttgtaataactgcaaatagtaagattatacattgtcacacagacctycatgtatatccatgggatggaccccaccacaatgattttaacggagagaacttgatataaagaattggtaaccaggcattagagaactccgaagacagagagaatccagattaacacggaggtaaacactgcaagaagctaccacccctagggctgggggatcaagggaggaattaggaagaccaagatgctggaggggccctgaagaattcaaacctccaagaaaggtgttgctcatcccccctagcatcaccttccaagaagggcaggtttccccagtttgccctgaggtcttcacaggaggccatgtggctgtggatgcagttctcaaatgtgacagtagatgtcactgccgaccaataaacaggatgttccagacacacactgcgctacctgcccac

SEQ ID NO: 942399 - DNA, 824 bp, Homo sapiens
caatgtgactgcacagcccagccttccccaagcttatctccagccctgcccaggctagtgttggatcctgcctgagcccctatgggagtcacttttgcacatgtgcttttggagacaggcctgcccctcctggagcacaggccccatcacctaagtgagcagacagtgtgagaatgacaggagagtgacgttagaggacatgcctgtgaaggacagaacagggccaggcttctgagcagaagatgcagcatgaggcacagtgtggggcacagacagtgccacatgcacatcagggagggcctcgcagagttgcatgctatacgcagtggkgggtggccagctggccaccactggaccctgttttcctgggccaggtgcagtttggtctttctcacaaagaaagggggactgaattgaggagcgtcttccaggtgttgcactagctgccctgaatgcactggaggggctgggctggggctggggctggggcagaggcagcaggagcactgtcaacccaccattcctcagggctccaaagtgctgtgtttggcacttctacatacaatggcttgttgaattctcataattcatgagatgtaggtagtgccattgtccctgcctcgcaaattaagaaaacgagacaggcacacagcaagtttgcacctgagccaggatttaggtgttctgagccaggacccagactgcctgtggactgatgggatgaggggaagcggagtacaagagggccgaggaggtgggcttgggggacctggtgctcagccctggcactctgatgctcagatctgtcgtcccgtgtgtctctg

SEQ ID NO: 942400 - DNA, 824 bp, Homo sapiens
caatgtgactgcacagcccagccttccccaagcttatctccagccctgcccaggctagtgttggatcctgcctgagcccctatgggagtcacttttgcacatgtgcttttggagacaggcctgcccctcctggagcacaggccccatcacctaagtgagcagacagtgtgagaatgacaggagagtgacgttagaggacatgcctgtgaaggacagaacagggccaggcttctgagcagaagatgcagcatgaggcacagtgtggggcacagacagtgccacatgcacatcagggagggcctcgcagagttgcatgctatacgcagtggtkggtggccagctggccaccactggaccctgttttcctgggccaggtgcagtttggtctttctcacaaagaaagggggactgaattgaggagcgtcttccaggtgttgcactagctgccctgaatgcactggaggggctgggctggggctggggctggggcagaggcagcaggagcactgtcaacccaccattcctcagggctccaaagtgctgtgtttggcacttctacatacaatggcttgttgaattctcataattcatgagatgtaggtagtgccattgtccctgcctcgcaaattaagaaaacgagacaggcacacagcaagtttgcacctgagccaggatttaggtgttctgagccaggacccagactgcctgtggactgatgggatgaggggaagcggagtacaagagggccgaggaggtgggcttgggggacctggtgctcagccctggcactctgatgctcagatctgtcgtcccgtgtgtctctg

SEQ ID NO: 942401 - DNA, 576 bp, Homo sapiens
ccagctaatttttgtatttttagtagagacggggttttgccatgttggccaggctggtctcgaactcctgacctcagggtgatctgccagccttggcctcccaaagtgctgggattacaggcatgagccaccgcacccggcctggcttttctcttcttcctgacctgtacgtggaggtgtggcccagagctcaacacagggcctttgttctttgtcctcactttctttgttattgtatcctgtctcatgactttaaatactatttttgtgctgaggactgtcagatttgcatctctcgcctgttcttctctggactctaggttcgtgtatmcagttgcctacttgacatcttcccattttgatattgaatattctcagacaatgtctccaggacaagatttcccccactttccaaacttgttctacatgtaatctgccttctccatctccattcatggcagtttcatccttagaaaccttggagtcatccttaactcccgtcttcatcttagacttgttcagttgtttaggaaatcccattgactctactttcaaaatatgtccagaataagagca

SEQ ID NO: 942402 - DNA, 760 bp, Homo sapiens
gcagagcagcccttgggcaactcctgccaccaccccctccccagggagcccaaggcaggggaggctcagcatggaatgaaacaggggagtgagggacacaaggaggtgggaagtgggagggtcccagccccaccaagtacgcagagacccccttgtcgtcctggacaccacaggggcacctgcaggctgggagaccaggtcctctgtgcatgggcccgggaggcagacctgccccaagggtgatgcagaggccacaggtgctgcacgctccagcgcccactctagacatcagcctccaggttgactaagggtcaggtcatgtttgaaaccatgcttggctggaccgggacccatggcaagagcacctgggcaccagtgtttagccctggtctgcaggaaggaggacagcagactttaggaccccacagcatggcagtgctgaccatttcacccacttggcctccttgaggaatagggatggggagccctctggggatgagcaaggccttccaggacaggctcggttctggtcccctgctttttgaggttgggttaaaatgccgaccatggcagaggggtcacagctcaggttcccacacctcrcttttcacagcctccaagggcagcagtgcacatggaggagacgtctcccacgaggccaaggcctccaatgctcaccgatgccctctgcgaagctggggtagaactcgtcagtgaagaggggctcaggcagctcacggaagtacagcttcagcgtgcc

SEQ ID NO: 942403 - DNA, 661 bp, Homo sapiens
ccgtgaaggcaggagtagtcaggcagtgctgaccaggccaggccagcctcctgccaccttgaggagggctgtcactccatagcccattctgcactgtgggccttagaactggcaagaaacaccaaccctgtgcactccagggcatggtttaatgtttcatccagatagttccttggggacagggtcagggaagaagccctacccagagggccactggagaggatccaggcccgcagcccccaccccagtcccctgcttcccccatgtcagcccccagccctgcagrcaaccctcgaagatccctgtgggggaagctcatttgatgagtgttcctaactagcttttgggggtgcgtgttcaggtgccacagcattggtgcggcagaagtaggattcttcaggagtgaggaaagaacgggtgttggtgggtcactgcagcaggtcaggaggggagggtggccgggcctagtgcagggtacttggtgcagatgcagaagctcaggctcccagcataggtttgttgtggcaccaggtagaggtgagtgtcgtccttcagatgcatctgtcccaggcagttgtggaggccacgtgactttctctgtgccttgttcatgcactgcagtgacacagtttcttttacagagaaggaacttcatgctggc

SEQ ID NO: 942404 - DNA, 568 bp, Homo sapiens
tgccaccaaacctggataatttttgtattttttttagagacagggtcttgcccagactggtctcaaactcccgggatcaaactatcttcccacctcagcctcccaaagcgctgggattacaggtgtgtttttttttttgagacagagtctcgctctgttgcccaggctggagtgcagtggcgctatctcggctcactgyaagctccgcctcctgggttcacgccattctcctgcctcagcctcccgagtagctgggattacaggcgcccgccacaccgcccagctaattttttgtatttttagtagagagggggtttcaccgtgatcgcgatctcctgacctcgtgatccgcctgcctcggcctcccaaagtgctgggattacaggcatgagccaccgtgcctggcctgttttgttgatttttaaagcccagggcagtagtcttggaaaatgtcccacatcgtggatttgcctttctgtttccttgagggcagattcagacagaacacctttccctgggattggtcaactaatccgtggggtgttgctgaaactttattttattttat

SEQ ID NO: 942405 - DNA, 568 bp, Homo sapiens
tgccaccaaacctggataatttttgtattttttttagagacagggtcttgcccagactggtctcaaactcccgggatcaaactatcttcccacctcagcctcccaaagcgctgggattacaggtgtgtttttttttttgagacagagtctcgctctgttgcccaggctggagtgcagtggcgctatctcggctcactgtaagctccgcctcctgggttcacgccattctcctgcctcagcctcccgagtagctgggaytacaggcgcccgccacaccgcccagctaattttttgtatttttagtagagagggggtttcaccgtgatcgcgatctcctgacctcgtgatccgcctgcctcggcctcccaaagtgctgggattacaggcatgagccaccgtgcctggcctgttttgttgatttttaaagcccagggcagtagtcttggaaaatgtcccacatcgtggatttgcctttctgtttccttgagggcagattcagacagaacacctttccctgggattggtcaactaatccgtggggtgttgctgaaactttattttattttat

SEQ ID NO: 942406 - DNA, 716 bp, Homo sapiens
agtgtgtcaaggcaattcaataggggaaagaatagtcttttcaataatgttgctgggacaactgaacatccacctgcttcttcctcatgcaattcacacaattccagtttaactcaaaaaccaactcaatagacctagatgtaagaactaaaagcataacattcttagaaaatataggactgaatctttttgactttgagctagggaaaccttagataagccactcaaagcagaagtgatarcaaaagaaacatagatacattgggcttcaccaaattaaaaacttattcaaactatactatcaaaattgtgaaaacacaactggaaaaactggggaaaatgtttgcaaatcacataagtaacctgtatctagaatatacaaacaatacttgagagacaacataatttttaaaatggacaaaagatctgattagatacttctccagatatatttcttaaaatgtacaaatgatcaatagatgcgtgaaaacgtttaacatcagtagccatcatggaaatgcaagtgaaaaccacaatgagatatcatttcacacccactaggatggttaaaattagatattgacaagtgttggcaaggatgtggaaagatcagaagcaactctctcgtatgctgcttgtaggaatattaaatggtatggcttctttgtaaaacagtctggcactttcttaaaatgctaacgatatgcattactgaa

SEQ ID NO: 942407 - DNA, 594 bp, Homo sapiens
cccaaggccctcacattctacctgggtattattgctggttcttcagggtccaagggctctttagtcagtaggtgatgaaacctgcctgggctgggtccttcccttcaaagcaacaggtttcccttctggcccagggtatgtctagaaatgtcatctaagagctagggtccagaatgggagcctcacaaccgtgactgttgtcctgtcctactgtagctgcgctggtatccaagatacaagacaaagtcttcactcttccttcttttctcctgaagcagaaagaagggctctcttttggagctttgagctgtgctgccrttgagttgggggagggatgatgcaagcactctcttagctaccctggctggtgcctcagtagatcctgtcccctacccctccacccctagtttatgagctctgagctcagatcagcattaggacttgcctagggattgcagtctttgtggcctaaactgtttctcaggttcacttagggccacagagcaccccagcccatggtgctgaggctttccagaactcgagctctgaccactgggctgggaaattcccctttggctagggccagaatcaaat

SEQ ID NO: 942408 - DNA, 594 bp, Homo sapiens
cccaaggccctcacattctacctgggtattattgctggttcttcagggtccaagggctctttagtcagtaggtgatgaaacctgcctgggctgggtccttcccttcaaagcaacaggtttcccttctggcccagggtatgtctagaaatgtcatctaagagctagggtccagaatgggagcctcacaaccgtgactgttgtcctgtcctactgtagctgcgctggtatccaagatacaagacaaagtcttcactcttccttcttttctcctgaagcagaaagaagggctctcttttggagctttgagctgtgctgccattgagttgggggagggatgatgcaagcactctcttagctaccctggctggtgcctcagtagatcmtgtcccctacccctccacccctagtttatgagctctgagctcagatcagcattaggacttgcctagggattgcagtctttgtggcctaaactgtttctcaggttcacttagggccacagagcaccccagcccatggtgctgaggctttccagaactcgagctctgaccactgggctgggaaattcccctttggctagggccagaatcaaat

SEQ ID NO: 942409 - DNA, 805 bp, Homo sapiens
ggcgcctgtagtcccaggtactcaggaagctgaggcaggagaatagcgtgaacccaggaggcagagcttgcagtgagacaagatcgcgccactgcactccagcctgggtgacagagtgagaccctgtctcaaaaaaaaaaaaaaaaaaaaaaaaaaaaaaaaaaaaaaaaaaacaagaaatgatcttgtatggtaaatacttgtctcaaagagaatgcttggttgtttaaaacatggatgttaaggacaagtcactagcttcaagcatgttgtagatggatcatggaagtaatgaaaggattaaaaggatgataaatacttgtccttaaatgaagagttggttgtttaaaaagaagggtctttaggacaagtcagaaagtttaagcatgtcttagatggtctgtggaagtcatgaggggattaataattgcaggaaagatttagccaaagttaacactgaagttactgtagccacccaaattcaatgccacttattctaaaaaagaaygttacttttatattaatgtttcagcagcatctggtggaaggaaaccagtatcacaacccattggaatgactgacagcaatcaaactccaaatggtgctgcagatcaagccacacatggacacatctttcttccaaggacccttagatcaacccaggaggagtcctagctgctgttacccacatgatggcccctttcagcaggaagtagccagaaagagtcatcatccaatttccccaacagcaattagggttaacactccagagcggggagtgatacaggaggtaagaagaaatcac

SEQ ID NO: 942410 - DNA, 651 bp, Homo sapiens
caagttataggtatatttaaaagacctttatatttttctcttcttaaatttttctgggaaaagggtttttttctccatcaactgaattatttttctccattctttgtcttgacacttttaacacatgcacaagaggccctaagataacttctggtaacatgggattccttgggaaaaacagagaccacagactccattttgggggggaaaaccctctgttttcctcataaaaccccaggaattaaaagcagatagttccctctcaaaatcaaaggctctgtactattttgcrttgtgttatctgacagttttaagtttgaggggcatcaaattactgcacattacagagacctttggtgtctaataaccaggtaaggaaaacactttaagggatggctaatagtagttataaatcagagaagcatgttattggccacctgaaagatatggaaatatccccaccccccactgagagatgaggctcctgtgggaaatgggctgattacaaaataagccaattgtctttgggttgccttgcaatgaaatgcatagtagaggcactgcacactgtcttctcccatagaatctccctccttttggggatccaagatccagaataaaatggcacccttaattttgaggatctgcctt

SEQ ID NO: 942411 - DNA, 655 bp, Homo sapiens; identical to SEQ ID NO: 917091

SEQ ID NO: 942412 - DNA, 706 bp, Homo sapiens
gaatctgtctcatgtagtaaatcaacagaaactatccctgagaaagaccagatggtagctttactaaagaaagactttaaaacaactgtcttaaaaattctcaaagagctaaaagaagctgtagacaaaatcaagaaaatgatgtatgaacagaatggaaatttcaataaagaaattgaaatcataaaaaggaaccaaaaaagttctggatattattgtaatcttagtttgtggcttcactttttgttttctacatgatttaagagactaatgcattaaaatttatatatgtctatgtttttgaayacacaatgtataaagatgtgatttttatgacatcaataactgaaagagtgtggggatagagttgtataagagcagagttttgtctgttaccgaagttgagctggtataaattcaaagtagagagttataactttacgatgttaaatgtaatccccatggtaaccataaagaaaatagctatagaatatacacaaaagaatggaaaagggagttaaaatgtttcactacaaaaaaaaaaaaaaatcaaccaaacacaaagggtgacaacatggatgaaccttgaagacattatgctaagcagaataagccagtcccaatacgaaaaatgtataattccactcaaaagaggtgcttagagtagtctcatccacagagacagaaagcaaaatggcggtttcca

SEQ ID NO: 942413 - DNA, 744 bp, Homo sapiens
ttacaaagctgttaattatgacaagcttaaagaaactacccgaggtaaagacgaaaacccagcccaggtcatggcccacttagcagcaaccattagatgctatactgccctagacccagaggggccagaaggccgccttattcttaatatgcatttttatcacccaatccactcctgacattaggaaaaaacttcaaaaattagaatctggccttcaaacccagcaggaattaatcaaccttgccttcaaggtgtacaataatagagaggaagcagccagacggcaacgcatttckgagttacaattacttgcctctgctgtgagacaaaacccagccacacctcctgcatacaggaacttcaaaatgcctaagacgcagcaatcagacactcctacaagacttcatcaggatcttgcttcaagtgccagaaatctggccactgggccaaggaatgcccacagcccaggattcctcccaagccatgtcccatctgtgcaggcacccactggaaatcagactgcccagctcgcccgacagccactcctggagcccctaaagctctagcccaaggctctctgactccttcccagatctattcggcttagcgactgaagattgacgctgcccgatcgcctcggaagtcccctggaccatcacagaagccgagcttcgggtaactctcacagtggagggtaagtccatcccctgtttaatcgatacgggggctacccactccacgttg

SEQ ID NO: 942414 - DNA, 744 bp, Homo sapiens
ttacaaagctgttaattatgacaagcttaaagaaactacccgaggtaaagacgaaaacccagcccaggtcatggcccacttagcagcaaccattagatgctatactgccctagacccagaggggccagaaggccgccttattcttaatatgcatttttatcacccaatccactcctgacattaggaaaaaacttcaaaaattagaatctggccttcaaacccagcaggaattaatcaaccttgccttcaaggtgtacaataatagagaggaagcagccagacggcaacgcatttcggagttacaattacttgcctctgctgtgagacaaaacccagccacacctcctgcatacaggaacttcaaaatgcctaagmcgcagcaatcagacactcctacaagacttcatcaggatcttgcttcaagtgccagaaatctggccactgggccaaggaatgcccacagcccaggattcctcccaagccatgtcccatctgtgcaggcacccactggaaatcagactgcccagctcgcccgacagccactcctggagcccctaaagctctagcccaaggctctctgactccttcccagatctattcggcttagcgactgaagattgacgctgcccgatcgcctcggaagtcccctggaccatcacagaagccgagcttcgggtaactctcacagtggagggtaagtccatcccctgtttaatcgatacgggggctacccactccacgttg

SEQ ID NO: 942415 - DNA, 646 bp, Homo sapiens
aaataatttgacttcttcttttgctatttagatgcctattctttctttctcctgcttgagttctctaggtaggacttccagtgctatgttgaataggagtgatgagagtcagcatcattgtcttgctccatttctcatggggattggttccaacttgtgcccattcagtaggttggtggctgtgagtttgtcrtagatggctcctattattttgaggtatgttcccttgatgccgagtctgttgaggtttttaatgtgaagggatgttggattttatcagaagttgtttctgcatctattcagatgatgatatgatttttcttttagttctgtttatgtggtgaatcacatttagtgatttgggtatgttgaaccagccttgcatccctgtactgaagccttgattgtggtggattaacttactgatgtgctgctggattctgtttcctagtatttggttgagaatttttgtgtctatgttaatcagagtaattggcctgaagttttctttttgtgtgtttctctgccagattttggtattaggctgatgctggcttcatagactgagttagggaggagcccctcatcctcagttctttggaatagtttcaatagaactagtaccagttcttttgtacatctggta

SEQ ID NO: 942416 - DNA, 661 bp, Homo sapiens
atcagtgaagagaaataatttgacttcttcttttgctatttagatgcctattctttctttctcctgcttgagttctctaggtaggacttccagtgctatgttgaataggagtgatgagagtcagcatcattgtcttgctccatttctcatggggattggttccaacttgtgcccattcagtaggttggtggctgtgagtttgtcgtagatggctcctattattttgaggtatgttcccttgatgccgagtctgttgaggtttttaatgtgaagggatgttggattttatcagaagttgtttctgcatctattcagatgatgatatgatttttcttttagttctgtttatgtggtgaatcacatttagtgatttgggtrtgttgaaccagccttgcatccctgtactgaagccttgattgtggtggattaacttactgatgtgctgctggattctgtttcctagtatttggttgagaatttttgtgtctatgttaatcagagtaattggcctgaagttttctttttgtgtgtttctctgccagattttggtattaggctgatgctggcttcatagactgagttagggaggagcccctcatcctcagttctttggaatagtttcaatagaactagtaccagttcttttgtacatctggtagaa

SEQ ID NO: 942417 - DNA, 638 bp, Homo sapiens
ttgggtttccaacttccattgctgatgatcaagttaaaatacgaatgtgctggattaaatgctttattcagcttatctgcatctaggttatctaaattacacacccacttaaaacattctgtcacctcttctcttggaataattaattattttaatgtaattcagatctcattttatcctagcccagcagtacctgggagagaatgactcaatcatagtaaaatcatattaaattatattccactgattcagaattggagataatctggcaattaaagtgagaagtgtgtcattcctctcctggaagaaatgaacagtaatgatgggatcacagagatcatacatataagggcccaatacaggttcaaaacatgcccatcggcaactgccttacatacctggctcccaaccatactgttacaatttctatctttcaaactcactgtaaattacaaatgtggtacccaaatacctgtatgcacataaatakgaaaaggtaaactcttttttttttttttttttttaggtggattcttgctctgtcacccaggctggagcgtaatggcacaatcttcgctcacttcaacctctgccttctgggttcgagcaattctcctgcctcagcctcctgagtaact

SEQ ID NO: 942418 - DNA, 522 bp, Homo sapiens
ggcctgttaggaaacaggtggcacatcaggcacatcaggaggtgagccgcaggtgagtacgcattacccactgagctctgagctccacctcctgtcagatcagcgggggcattagattctcattggaggaggaaccctattgtgagctgcacatgtgagggatccaggtcgcatgctccttatgagaatctaattaatgcctgatgatctgaggtggaacagtttcatcccaaaaccatccctcacccacgtctgtctgtggaaaaactgccttccatgaaaccasttcctggtaccaaaaaggttggggaccactgttctaagcaatctgtggtataatacactttctgaaggcaaacattttaggaggcatttgctttccacttgtagactgaatgtttatgtatccctgcccccacttcctatgttgaagccctaatccccaatgtgatgatatttggaggtggggcctttgggaggtaatcacatttatctgaggacatatgagcagggggcctcatg

SEQ ID NO: 942419 - DNA, 618 bp, Homo sapiens
tctttgttgctgtatctaaaaaggcatggccataccctaggtaatcttggttttctcctatgttatctcctagaaactttatagttttatacattaaacaacgttaatgtctataatctattttaacttagtcactgtgaataatgtaaggcactgtgtctacaaaartgtatatttttttgcctgtggatgtccaaatgtcccagcaccatttattgagatgatttttttaactttattgttttgattcctttgtcaaagatcaattaactatatttatgtaggtttattttgggtggattgatctatttgtctattctttttcacaaccacactgtattgattgccatagctttatagtatgccttaaaatcaggtagtttcagtcttcctaatttgttctactccttcaatatcaagttggctattctaggtcttttgcctcttcatattaactttaatatcagtttgccaatatccacaaaatagcttcttaaattattactgggggtggattgaatctatacagcaaattggaaaaactgacatagtgacaatcttgatttttcctatccataaatttggaatatctctcaatttatttagtactttaatttc

SEQ ID NO: 942420 - DNA, 513 bp, Homo sapiens
aggagcccaagggctggggtgggccgtgaaagcctgcaccaagggctgggcgcggtgtctcacgcctgtaatcccagcactttgggaggccgaggcgggtggatcacaaggtcaggagatggagaccatcctggctaacacggtgaaaccccgtctctactaaaaatacaaaaaattagccaggcatggtggcgggtgcctatagtcccagctactcgggaggctgaggcaggagaatggcgtgaacctgggaggcggagcttgcagtgagccgagaccccgccactgcactccagcctgggcaacagagcaagactcygtctcaaaaaaaaaaaagcctgcaccaaggacccgggcctcccaggagtcgtgtcgccttcctgggctccccagatgggtgtgttatgtaaggtttccctgcactgaccaggatgtggcctcccccagccctgctctgggaggaagtgaagcgccgcagtgttgttggtgtctaatgctttgtgtttgaaccct

SEQ ID NO: 942421 - DNA, 758 bp, Homo sapiens
tcaaacactggagatcaggtggtgtgggacctcatctctgatatctgagaagaaaatcatatgaggtaagccctatggctatttagcttactgtatggagtttccaaggcatatcttaggaaggagaaacaggcagagtctagtagtttccctgatttgagaagacaagcaaggagttttgggaggccaagatgactggagcttgtatgacagagtactagggagaagacagccacaggagcacacagtatsagagatctgcagtgggtatcccttgagatttcagcttggtcaatgcatgagtggaacgaaactgttgaaaaggaacaggaaaagaagtacccaaaagaagcagatgtaacaatttctgaggctcatacaggactgtgtataatttcaattcccaaaaatccgactagaaaacttcataattcatgaagtatcagggagactactctgcaaggtatttcttccgcagtaggacaaaattagccctagttctgctcccacctaataaataaaagcaagcttcgaaagtataaaatggtttccatgtaaaatatgaacatactagaacaaagctcaagaatattgataggaatgtaaaaatttctggcacccaaagttgtgaaattaacaaagcttgatatctaataaaaaaatcagcaggcacttaaaaagtggataaatatgacccataatgactagaaatatcagtgaatagagacaggtccagaagtgagagagaagatagaact

SEQ ID NO: 942422 - DNA, 575 bp, Homo sapiens
cttcccagtggagttgtatagatagtgctatttctcccagccacaatgtgtgacaatacacatgaagtatcatcagccagggaagctcacctgagcttcagtgtcagggtttttactgggggctattcatgtagatatggctgaccttagtctccagatcctccagaagtggtgctgataatgtgtggtccaagtccaccactataaatattaaayaaaatagacttcagatcagagaaaattaccagagacagagagtgctattatataataataaaaggattgatcacctaaaagacacagtaattacaggtgtgcaagcacaaaacaacaaagtgacaaaatatgttaagcaaatcctgatataactaaaaggataataggcaaatccacaattatagttagagaactcaacatcctcctctctcaacaacttatagaacaactatacagaaaatcagcctggatatggaagaacggaacaacatgataaaccaacagggtctactggtcatttatagaacacttcatccaacagtagagtacacattcttttcaagcacccacagagtgaa

SEQ ID NO: 942423 - DNA, 786 bp, Homo sapiens
tgcctttatgagctgtaacactcatgcgaaggtctgcagcttcgctcccgaagccagccagaccacgaacccaccaggaggaacaaacaactccagacgcgctgccttaagagctctaatactcaccgcgaagatctgcagcttcactcctgagccagcgagaccacgaacccaccagaaggaagaaaacgccgaacacatccgaacatcagaaggaacaaactccggacacgccacctttaagaactgtaacactcaccgcgagggtccgcggcttcattcttgaagtcagaccaagaacccaccaattccrgacacacatgcaccactacacctggctaatttttgtatttttagtagagatggggtttcaccacgttgcccagtctggtctggaactcctgagctcaagcgatcttcttgcctaggcctcccaaagtgttgggattacaggcactaggttatttttttttattttttttctgagaaagagtctcgctctgtcgcccaggcttgagtgcaatggcgcgatctcagctcactgcaacctctgcctctcaggttcaagtgattctcctgcctcagcctcctgagtagtcgggattacaggcacgcaccaccatgcccgactaatttttgtatttttttgtttagtagagacggggtttcgccatattggtcaggctggtctcgaactcctgacctcatgtgatctgcctgcctcggcttcccatagtgctgagattacaggcgtgagccactgcacccggcctacaggcactaggt

SEQ ID NO: 942424 - DNA, 739 bp, Homo sapiens
cacactgcctttatgagctgtaacactcatgcgaaggtctgcagcttcgctcccgaagccagccagaccacgaacccaccaggaggaacaaacaactccagacgcgctgccttaagagctctaatactcaccgcgaagatctgcagcttcactcctgagccagcgagaccacgaacccaccagaaggaagaaaacgccgaacacatccgaacatcagaaggaacaaactccggacacgccacctttaagaactgtaacactcaccgcgagggtccgcggcttcattcttgaagtcagaccaagaacccaccaattccggacacacatgcaccactacacctggctaatttttgtatttttagtagagatggggtttcaccacgttgcccagtctggtctggaactcctgagctcaagcgatcttcttgcctaggcctcccaaagtgytgggattacaggcactaggttatttttttttattttttttctgagaaagagtctcgctctgtcgcccaggcttgagtgcaatggcgcgatctcagctcactgcaacctctgcctctcaggttcaagtgattctcctgcctcagcctcctgagtagtcgggattacaggcacgcaccaccatgcccgactaatttttgtatttttttgtttagtagagacggggtttcgccatattggtcaggctggtctcgaactcctgacctcatgtgatctgcctgcctcggcttcccat

SEQ ID NO: 942425 - DNA, 636 bp, Homo sapiens
tctcgctctgtcgcccaggcttgagtgcaatggcgcgatctcagctcactgcaacctctgcctctcaggttcaagtgattctcctgcctcagcctcctgagtagtcgggattacaggcacgcaccaccatgcccgactaatttttgtatttttttgtttagtagagacrgggtttcgccatattggtcaggctggtctcgaactcctgacctcatgtgatctgcctgcctcggcttcccatagtgctgagattacaggcgtgagccactgcacccggcctacaggcactaggtttttaactcattttactccctaagtttccctagattcgtctaatgtgactaaagtacacttagttctcaatttcatccttaactacataccctaattttggtctcagggaatggtaatagagaaagacccacatacaaaaaagacattaaggcattgaaatctcaaagaaagatcaaacaaactcaggtgtaacagagaagccaagtctgattatgagaaaggtaatcgcaggtttgagatttgatactgggtagccccccacaaatcttattcactctgagaagtacaaagaggcggtcattagcttcggttgttagaaatcaagattatgtgaaacgcagc

SEQ ID NO: 942426 - DNA, 636 bp, Homo sapiens
tctcgctctgtcgcccaggcttgagtgcaatggcgcgatctcagctcactgcaacctctgcctctcaggttcaagtgattctcctgcctcagcctcctgagtagtcgggattacaggcacgcaccaccatgcccgactaatttttgtatttttttgtttagtagagacggggtttygccatattggtcaggctggtctcgaactcctgacctcatgtgatctgcctgcctcggcttcccatagtgctgagattacaggcgtgagccactgcacccggcctacaggcactaggtttttaactcattttactccctaagtttccctagattcgtctaatgtgactaaagtacacttagttctcaatttcatccttaactacataccctaattttggtctcagggaatggtaatagagaaagacccacatacaaaaaagacattaaggcattgaaatctcaaagaaagatcaaacaaactcaggtgtaacagagaagccaagtctgattatgagaaaggtaatcgcaggtttgagatttgatactgggtagccccccacaaatcttattcactctgagaagtacaaagaggcggtcattagcttcggttgttagaaatcaagattatgtgaaacgcagc

SEQ ID NO: 942427 - DNA, 539 bp, Homo sapiens
atttgtagtttttccacaaaataaattttatcttctatgataaacattttatctgaatttaccatactatttgtaataatgctattttaaaaaagctttgctttgagtacataaattgaatttaaaaatttaattattattgagatttactttctctcaaagcatctacatgtactgatatgtaaccaacattatttgtttgtcaagttcttctgctaatggagcaaacacattaacaactatactttctgtacaagaaaacttggaagtgaaatgaatgaaattarcttaagaaagagtcatttgatctaaatcagagaaaggctgtggtccatgggccacttattttgcaaataaagttttattggcacacagttacaatcactcattcatgtattgtctaaggctgcttttgtgttgcagtggcagaggtaagtagttgcaacagggaccatatgtctgtatagctgaaaatgtttactagatggttctttacataaaagtttaccaatccctgatcaaaatgaaaatatattaat

SEQ ID NO: 942428 - DNA, 636 bp, Homo sapiens
aattctatatccagcaaaaaattactgaacttgaagacacagtgatagaaaatgaaggcaaagtaaagccattttcagatatacgaaagctgaaagaattcatcaccaacaaacctgcactatgagagatcttcaaaaagtccttggagtcgccacaggtaagtttaaattagaaaaaaaaaaaacaaaaaacaagtagtccttcaggcagatggaaaaggataccagacggaacacagacctacatgaatagaacatggtaactacatgagtactgaaaatggtaactacataaagtaaatatgtgagattctaagattctaagtatataaatctttagtacataattaaatagatgttttgattgagttagatataaaaayagatatttttgttgaagaaaaaataataataaagtgtaggctttagagcatacgtaaaacactcagtgtggtggcttacacctgtagtctcagctattcagggggctgaggcaggaggattccttgagcccaggagttcaaggctacagcgagccatgatcataccactgcactccagcctaggcaaaagagcaagacccgactcaaccaaaaaacaaaagtaaaagtaaaatgtgtgataaaaattacatac

SEQ ID NO: 942429 - DNA, 623 bp, Homo sapiens
cctctgatatgacacagacagggttcagtttcaaagccataaacggaaatgagcagagttggctttcccagacagggtacattttctcatcacttctcttgtcttgtggactcttagttgcccaaaaaagccattacttccaatcattatttctagccctatcttatccctgaaacttcgagcttataaaacctatgatctatttaaacttctacttggatatttaaaagatatctcaaatttaatgttgccaacagggagctcaacatttctccccaaatatgtccccttttccctcctggtttcctgtatctcagcaaacagtttcgccatccacgcaatggcttaagccaaaaacccaggtgctattcttgattctttattcgttcagcccgtacctataacctagcaaaacgttttattggttctacttccaaaaggaatcctaaatgyacccactgctctccagccctagtcccactgaccttccccaaaccatctcttgcttggactaaccactcactttgtgactgttgtgcctactctactgccctctataaccaagccatgctgcagcagtggggtgatcttttaaaatcacaaatcagactgcatctctcccc

SEQ ID NO: 942430 - DNA, 617 bp, Homo sapiens
tgcctaatcaagcctgggcaattgcaggtgcccctcccccagcttgcaggtgcccctcccccagcatcgctgccgccttgcagtttgatctcagactgctgtgctagcaatcagcgagactccatgcgcgtaggaccctccgagccasgtgcgggatataatctcctggtgtgccattttttaagcccattggaaaagcacagtattagggtgggattttccaggtgccgtctgtcacccctttctttgactaggaaagggaactccctgaccccttgcgcttcccgagtgaggcaatgcctcgccctgcttcagcttgcgcagggtgcactgcacctactgtcctgcacccactgtctggcactccctagtgagatgaacccggtacctcagatggaaatacagaaatcaaccgtcgtctgcattgctcatgctgggagctgtagaccggagctgttcctatgtagccatcttggctccaccccccttggtgccttttcaccatcctcttcctctttcttgctgcttctggctgatcagaggccccactatagaattcctgagtccccaaagtttccagatcactatccttttgcaccccacctcctatgagggca

SEQ ID NO: 942431 - DNA, 617 bp, Homo sapiens
tgcctaatcaagcctgggcaattgcaggtgcccctcccccagcttgcaggtgcccctcccccagcatcgctgccgccttgcagtttgatctcagactgctgtgctagcaatcagcgagactccatgcgcgtaggaccctccgagccacgtgcgggatataatctcctggtgtgccattttttaagcccattggaaaagcacagtattagggtgggattttccaggtgccgtctgtcacccctttctttgactaggaaagggaactccctgaccccttgcgcttcccgagtgaggcaatgcctcgccctgcttcagcttgcgcagggtgcactgcacctactgtcctgcacccactgtctggcactccctagtgagatgaacccggtacctcagatggaaatacagaaatcaaccgtygtctgcattgctcatgctgggagctgtagaccggagctgttcctatgtagccatcttggctccaccccccttggtgccttttcaccatcctcttcctctttcttgctgcttctggctgatcagaggccccactatagaattcctgagtccccaaagtttccagatcactatccttttgcaccccacctcctatgagggca

SEQ ID NO: 942432 - DNA, 566 bp, Homo sapiens
gtcacaaaactgcaggtggctgtggcaggctacagacgggttctcttgaccacagtgcaaatcccattacaacaaacaggaaaaaaataaaatttctcaataacaaagtactcaagcctatgcagatggcgggcatatttaacatggtgaactgactcattaaaagtccatgcagcacttcgggaggccaaggcggccggatcacaaggtcaagagatcgagaccatcctggccaacattgtgaaaccccgtctctactaaaaatacaaaaattagctgggcgtggtggcrcacacctatagtcccagctacttgggaggctgaggcaggagaatcacttgaacccaggaggtggaggttgcagtgagctgagatcacgccactgcactttagcctggcaacagagcaagactttgtcaaaaaaaaaaaaaaaaaaaaaaaaaaaaaaaaaaaaattctgtactgctggcagactgaggcaagaggatagcttgagctcaggagtttgagacctgggcaacatattgagacctcgtctctataaaacattagacagattagccaga

SEQ ID NO: 942433 - DNA, 566 bp, Homo sapiens
gtcacaaaactgcaggtggctgtggcaggctacagacgggttctcttgaccacagtgcaaatcccattacaacaaacaggaaaaaaataaaatttctcaataacaaagtactcaagcctatgcagatggcgggcatatttaacatggtgaactgactcattaaaagtccatgcagcacttcgggaggccaaggcggccggatcacaaggtcaagagatcgagaccatcctggccaacattgtgaaaccccgtctctactaaaaatacaaaaattagctgggcgtggtggcacacacctatagtcccagctacttgggaggctgaggcaggagaatcacttgaacccagraggtggaggttgcagtgagctgagatcacgccactgcactttagcctggcaacagagcaagactttgtcaaaaaaaaaaaaaaaaaaaaaaaaaaaaaaaaaaaaattctgtactgctggcagactgaggcaagaggatagcttgagctcaggagtttgagacctgggcaacatattgagacctcgtctctataaaacattagacagattagccaga

SEQ ID NO: 942434 - DNA, 617 bp, Homo sapiens
agagacttaaaagtcataaaaatcaagtatgagaagcagctcttgtttggatcttgacctgaacaaaccaaaaaggcaattatcaggcaatgggaattttgagacaactgaatatggactgggatttggcgatattaaggaagtattgttgtcaggtgcggtgactcacgcctgtaatcccagaactttgggagcccaaggcaggcgaatcacctgtggtcaggagttccagaccagcctggccaaaatggtgaaaccccatctctactaaaaacacaaaattagccaggcacagtggcatgcgcctgtagtcccagctactcgggaggctgaggtgggagaatcacttgaacccaggaggcagaggttgcagtgagtcgagatcacaccactgcamtccaacctgggggacagagcgagactctgtctcaaaaaaaaaaaaaaaaaagtattgttaattcagttaggggtgataatgattttgagcttatgtaataaaatgtccttttttattttttagacacacaaatcagaattagttagaggttaactaatatgatgacatgacagggatttaaatactattgcaatctgaaaaaaaaaagaaaaggaaagag

SEQ ID NO: 942435 - DNA, 662 bp, Homo sapiens
cagctgcaccattttacattcccaccatcagtgcacagggtttccaatttctccacactctcaccagcatttgttattttctaatttttggataatggccattctaatagttaggaggtgatatctcactgtggtttttgatttgcatttctccaatgattagtgacattgagcatcttttcatttgcttgttggtcctttgtatatcttctttagagaaatgtctattcaagtcctttgctcacttttaaatcacgtttttgtgtttttttgatgttgagttgtaggagttcttatatattctagatattaaccccttatcagatatatcatttgcaaatattttctcccattctttttttttttctttttctcccattcttcaggatgcctttttactttactagttgtttcctttgctgcacaggagtttttaaatttgatatagtcccatttgtctatttttccttttatcacttggggttaycaggtcatatccaagaaatcattgccaaatacatgatcacaaagcttctgccttatgttttcttatagttagtcgttttatagtttcagatcttatggttaggtggttaatccatttcgaattgatttttatatatgttatagggtatccaacatttttcttttgcaattggatg

SEQ ID NO: 942436 - DNA, 624 bp, Homo sapiens
gcggaggggctcctcacttctcagacggggtggttgccaggcagagggtctcctcacttctcagacggggtctcggccgggcagaggcgctcctcacatcccagatggggcggcggggcagaggcactccccacatctcagatgatgggcggccgggcagagacgctcctcacttcctagatgtgatggcggctgggaagaggcgctcctcacttcctagatgggatggcggccgggcggagacgctcctcactttccagactgggcagccaggcagaggggctcctcacatcccagacgatgggcggccaggcagagacactcctcacttcccagacggggtggcggccgggcagaggctgcaatctcggcactttgggaggccaaggcaggcggctgctccttgccctcgggccccgcggggcccgtccgctcctccagccgctgcctccygggcggccgaggtgaaatatttctacaaggaaaactacaaaatattgatgaaagaaattgtagacgacacaagcaaatggaaaactatcttatttaatggatcagaagaattagtatcattaaaatgaccataatgcccaaaacaatctacagatttaatgcaatttccat

SEQ ID NO: 942437 - DNA, 585 bp, Homo sapiens
ctaaactatgacaccagtttcttttttcttttttttttttttttgagacagagtctcgcactttcgtccaggctagagtgcagtggcgggatctcggctcactgcaagctctgcctcccaggttcacgccattctcctgcctcagcctcccgagtagctgggtctacaggtgcccgccaccrcgcccggctaatttttgtatgttttttttagtagagacagggtttcaccgtgttagccaggatggtctcgatctcctgacctcgtgatccacccgcctcggcctcccaaagtgctgggattacaggcgtgagccaccgcacccggccgacaccagtttctaaatgctttgctgcatttccccctatttttttttttaataattcatcctcctgaaacataaaccccaaaatgtcatccacttgctgaaaaccttggtttgcataactctctgtttgcaacaactgttttctctggggttgtccatattttgggttaagaccttcactaatggccaggactcagcccacagaaaagggagtgtcagggtttggcagatcgttaggccccagtcaagtaattaag

SEQ ID NO: 942438 - DNA, 657 bp, Homo sapiens
gattgtgcatacccagattgggagtgagtctgcctttcccagtccactgactcaaatgttaatcttctttggcaacaccctcatagacacacccaggaacaatactttgcatccttcaatccaatcgagtcaaccttcaatgcatcacaccctccattccccaaagttccccagaatatttagyctttttcttcttttcttttttgtgtatctatagttggaattttatccacctataaaagccaatgaagtactaatacatgctacaatttagacacaaaaatatgaacctaggtgaaagaaaccagacacaaaggtcacagatggtgtgatcacatttatatgaaacattcagaagctggaaatgcagagacagaaagcaggttgatggttgtcaggggcttgcatgaggaaggagtggagagtgattgctccatggaactcagttccttgttggcatgatgagagtcctttggactagatagaggtggttgttgcaacactgaaaatgtactaaatgccaccgaattatatactttaaaagagggatttcctaagtcccaggccatggaccagtactagtctgtggcctgttaggaactgggtcgctcagtaggaggtgaggaaggggccagcaagcattaccacctgagctct

SEQ ID NO: 942439 - DNA, 657 bp, Homo sapiens
gattgtgcatacccagattgggagtgagtctgcctttcccagtccactgactcaaatgttaatcttctttggcaacaccctcatagacacacccaggaacaatactttgcatccttcaatccaatcgagtcaaccttcaatgcatcacaccctccattccccaaagttccccagaatatttagtctttttcttcttttcttttttgtgtatctatagttggaattttatccacctataaaagccaatgaagtactaatacatgctacaatttagacacaaaaatatgaacctaggtgaaagaaaccagacacaaaggtcacagatggygtgatcacatttatatgaaacattcagaagctggaaatgcagagacagaaagcaggttgatggttgtcaggggcttgcatgaggaaggagtggagagtgattgctccatggaactcagttccttgttggcatgatgagagtcctttggactagatagaggtggttgttgcaacactgaaaatgtactaaatgccaccgaattatatactttaaaagagggatttcctaagtcccaggccatggaccagtactagtctgtggcctgttaggaactgggtcgctcagtaggaggtgaggaaggggccagcaagcattaccacctgagctct

SEQ ID NO: 942440 - DNA, 615 bp, Homo sapiens
gctgtgataaatatatgagtgcaggtatctttttcatatgatgatttcttttcttttgggtagatatccagtagtggggttgttggatctaatagtagttctatttttaattctttgagaaatctccatactgttttccatagaggttgtactaatttacattcccaccaacagtgtataagcattctttttctctgcatcctcaccaaaattgactttttaataatagccattctgcctggtgtaagatgatatctcattgtttgcattctttatctgtcattactgactttccattttgggtagggaccattgctggagagctagtgtgatcctttgatagtgtcrtcacatttggatttttcacagctcagaattcttacacttcttccctctcatctggaaagactgacacttctaatattcgtaattattttcatgcagataggattttttgtttgtttctttatatatttttttcttgacatttcctccccttcctagggtgtgtgactgtagaatatgctggatagggtcttaggctatgcactttcctaggcaggttttatattgggctgtgcagtctggcctaaagaccagtagatggtgcttatg

SEQ ID NO: 942441 - DNA, 660 bp, Homo sapiens
gacagtgggtactgtgctaggctctgtgccctcaggagctcatagtttagtgagggagccagataaataagtggagaagtacatggcagtggctgggcacggtggctcatgcctgtaatcctagcactttgggagtccaaggtgggtggatcactggaggtaaggagttcgaaaccagcctagccaacagggtgaaacccagtctctactaaaaatacaaaaattagccaggtgtggtggtgcacgcctgtagtcccagctactggggaggctgaggcaagagaatcgcttgaacctggaggcagaggttgcagtgaactgagattgtgccactgcactttagcctgggcggcagagggagactccttctccaaaaaaaaaaagaaaagaaaagaaagaaagaaatacatggtagggatactactacaaaggcattcactagctttagaatacagggttactgttgatccccgacttttttttttggttggttggtaggtttagggttttkgttttaaagacagaatttccttatgtcgcccaggctgaagtgcagtggcttgatctgggtccattgcagcctccgcctcccaggccgaagtgatcatcccacctcagcctcctgagtagctgggaataatgtaccatagaataaggtgc

SEQ ID NO: 942442 - DNA, 769 bp, Homo sapiens
tcgggaggcggaggcacaagaatcacttgaacccaggaggcggaggttgagatcgtaccactgcactccagccttggtgacagagcgagactctgtctcaaaaaaaaaaaaacaatacctgatactgaaatttaggtctcacaattctggaggctgggaaatccaaaatcaaggtacaggcatctggggagggccttcttgttgcatcctcacatggtggaagagcagaagatggcaaacccactcccacaagctctttttattttatgttttgagatggagtctcactctgtcaccaggctggaatgcagtggcactatctcagctcactgcagcttccgcctcccaagttccgcctcccaaattcttctgcctcagccttccaagtagccgggactacaggcgtgcaccaccatgcccagctatttttgtatttttagcagagacggggtttcaccatgttggccaggatggtctcaatctcttgacctcgtgatcygcccgcctcagcctcccgaagttctgggattacaggcatgagccaccatgcccagccacaagctctttttataagggccccagtccatttgtgaaggaggaaccctcatgacccaatcccctctcagaggccccctttccagtatgtcatcttggtgattaggtttcaatgtggcttttggagggaacaccacatgcaaaccatagcaggtggcttgtccccttctgtctggggaagagaagaaaaaagcacaccttccttagagtttca

SEQ ID NO: 942443 - DNA, 610 bp, Homo sapiens
accacctgagaaacctgaatacttaaccaggtgtccctagggcaagtttgcatcctccctatagaactgcagctaatgtgctcttgaaagtgccacctcctggctggaggccaaccaacacaaaatgagtgcactaaacaaaaacaaccaasgaccctcacagagtccacttcactaccctgccacctccactgaagcaggtgctggtatctatagctgcaagactggaagacagttcacaccagaggactctttgcagacactcctcagtaccaggctggagcctggtagctccactgggtggctagactcagaagagcaaaaacaatcactacagtttggctctcaggaaaccccattcccaggggaagggggagaatgctacatcaaaggagcaccccatgggacgaaagaatatgaacagcagctcttgaatcccagatcttccctctgacatagtctacccaaatgagaaggaaccagaaaaacaattctggtaatatgacaaaacagggttctttaacacccccaaaagattataccagctcaccagcaatggatccaaacaaaggcaaaatccccgaatttccagaaaaagaattcagaggtc

SEQ ID NO: 942444 - DNA, 615 bp, Homo sapiens
aggaaaaataatttagaaggttgattattaagctaatcaaggaggcaccagagaaaggtgaagtccaacttaaattaaaaacatgatacagaatatgaaaggaaaattcttcagtgaaatagatagtataaataaaaaacaatcacaatttctggaaatcaaggatacacttagagaaatgcaaaatgcactggaaaktctcagcaatagaattgaacaagcagaaaaaagaacctcagagctagaagacaaggctttagaattaactcaatccatcaaagacaaaaaggattttaaaaaatgaacaaagccaccaagaagtttgggagtatgctaaatgccccaacctaagaataattggtattcccaaggaagaagagaaatttaaaagtctggaaaacatatttgagggactaatcgaagaaaatttccctggccttgctagagatctagacatccaaatacaagcagctcaaagaacacctgggaaattcatcacagaaagatcattgcctaggcacatagtaatcagattatctaaagtcaagatgaaggaaaaaatcttaagagctgtgaggcaaaggtatcaggtaacctataaaagaaaacttatca

SEQ ID NO: 942445 - DNA, 622 bp, Homo sapiens
gccaagagagcgttgacatcaccccttctctaaccccaggatgcacagctcacagctcgaaaatagtccccatccttccacttgaagagaagagaggaagagtgtgggtgactttgtcttgcattttggatgctagctcagccacagcaggatggggcactagttagagttgtaagtccttygatacaggccttagctcccagaccacatttctagacacggcctgagccagaaaataaatcctctgccttgaagtcaagaaacaagtcctgacaacatttatcacctaactgaagaaccgttgggccctgaacaaccagatctacacccagatactgtcaagggccttgggtgagcctctgaggcttactggctttaggtgagattcaacatattaccagcagtggtggtgaagggatgaaattccttctacttgagaaaagcagaggaaaaagtaaaggagactttgtcttgcacctcaggtactaactcaaccacggcagggtagagcaccaagcaggctcctgggggtgtgggggggggggggtccccgatttcagcactggattctcggacagcatctctggacctgccctgggctggaggggagcttcctgcccta

SEQ ID NO: 942446 - DNA, 622 bp, Homo sapiens
gccaagagagcgttgacatcaccccttctctaaccccaggatgcacagctcacagctcgaaaatagtccccatccttccacttgaagagaagagaggaagagtgtgggtgactttgtcttgcattttggatgctagctcagccacagcaggatggggcactagttagagttgtaagtcctttgatacaggccttagctcccagaccacatttctagacacggcctgagccagaaaataaatcctctgccttgaagtcaagaaacaagtcctgacaacatttatcacctaactgaagaaccgttgggccctgaacaaccagatctacacccagatactgtcaagggccttgggtgagcctctgaggcttactggcttyaggtgagattcaacatattaccagcagtggtggtgaagggatgaaattccttctacttgagaaaagcagaggaaaaagtaaaggagactttgtcttgcacctcaggtactaactcaaccacggcagggtagagcaccaagcaggctcctgggggtgtgggggggggggggtccccgatttcagcactggattctcggacagcatctctggacctgccctgggctggaggggagcttcctgcccta

SEQ ID NO: 942447 - DNA, 606 bp, Homo sapiens
accacataattggaagtaaagcattgctcagcaaatgcaaaagaatggacatcataacaaagagcctctcagaccacagtgcaatcaaattaaaagtcaagattaagaaactcacacaaaattgcacaactacatgaaaactgaacaacctgctcctgaatgactattgggtaaataaaaaaattaaggaagcactttgggaggctgaggccagtgaatcayggggtcaggagatcaagaccatcctggctaacacagtgaaaccacatctctaccaaaaatacaaaaaaaaattagccaggtgtggtggcgggtgcctgtagtcccagctactcaggaggctgaggcaggccaggaggcggagcttgcagtaagccaagattgcatcgccacaccccagcctgggtgacaaagcaagaatcagtctcaaaaaaaaaaaatttaaggaagaaataaagaaggtcattgaagccaacgagaacaaagacaaaatgtaccagaatctctgggacaaagctaaggcagtgtttagagggaaatttatattatgaatgcccacaggagaaagtgggaaagatctaaaattggcaccataacatcaaaatt

SEQ ID NO: 942448 - DNA, 762 bp, Homo sapiens
tctatcagacattcaaagatttgataccaatcctattgaaactatttcaaacgatagagaaagagggactctccctaattatgttatggagccagtgtcaccctactaccaaaaccaggaaataacataacaaaaaaagaaaactagagacaaacgtctctgatgaatgttaatgcaaaaattctcaacaaaatattagctaaccaaatccaacagcatatcaaaaagataatccaccatgatcaagttggtttcataccagsgattcaaagatggtttaatatacctaaatcaataaacatgatacaccacataaacagaatcaaaaagaaaaatcacatgatcatctcaatagattcagaaaagcatttgataaaatccaacattgctttatgattaaaactctcagtaaaactggtgtagaagggacataccttaaagtaataacagatatctatgacagactcacagccaacattatactgaatgtgatagtgttaaaagcattcccctgagaacttcgacaagccaagaatgcccactttcaccacttctattcaacatagtattggaagtcctacccaaggcaatcagagaagagaaaaataaagggtatccaaatcggtaaagatgaagtcaaactgttgctgttcaccaatgatattatcatataactagaaaaccccaaagactcatccaaagagctcctaggtctgataaatgaaagtttcaggatacaaaatcaatgtacataaatcagta

SEQ ID NO: 942449 - DNA, 762 bp, Homo sapiens
tctatcagacattcaaagatttgataccaatcctattgaaactatttcaaacgatagagaaagagggactctccctaattatgttatggagccagtgtcaccctactaccaaaaccaggaaataacataacaaaaaaagaaaactagagacaaacgtctctgatgaatgttaatgcaaaaattctcaacaaaatattagctaaccaaatccaacagcatatcaaaaagataatccaccatgatcaagttggtttcataccagcgattcaaagatggtttaatatacmtaaatcaataaacatgatacaccacataaacagaatcaaaaagaaaaatcacatgatcatctcaatagattcagaaaagcatttgataaaatccaacattgctttatgattaaaactctcagtaaaactggtgtagaagggacataccttaaagtaataacagatatctatgacagactcacagccaacattatactgaatgtgatagtgttaaaagcattcccctgagaacttcgacaagccaagaatgcccactttcaccacttctattcaacatagtattggaagtcctacccaaggcaatcagagaagagaaaaataaagggtatccaaatcggtaaagatgaagtcaaactgttgctgttcaccaatgatattatcatataactagaaaaccccaaagactcatccaaagagctcctaggtctgataaatgaaagtttcaggatacaaaatcaatgtacataaatcagta

SEQ ID NO: 942450 - DNA, 543 bp, Homo sapiens
acctccatgcccatgctgctatctggaaagagagaaactttctcacagctaatgggtctcccattaaataccaacaggaaattaattgactatcatcctcagttttcatcccwtaggaagtagcagtaacacaatgtgaaggcccccaaaaggaatggataaagtaactgagggaaataggttggaagactaagcagctaagtcagcagagagagggcctcagatttctgatccacttgaagccccactggtctgggagggcctcataggagaaataaaacttcagtattctcctatggaaatagaatggggcacctcttggggttacatctttcagtcctcaggatggccacaattggaggatgccaagcttcatctactggctgccaaacaatggaaagttcttaaaagccttcaccaggcctttcacctgggtaaagataaaacctttcaaatggttcagagattgttctcaggtaaaaacctgacacaaatagttaaacaggttgttaatgcttgcaagatttgccttaaaaatcatcc

SEQ ID NO: 942451 - DNA, 587 bp, Homo sapiens
accagcgtccacaaccagagtgagaacttcctcagtgccttttagccaatttaatggtgctttgtccaggcccacttatggaccaatcagcacacactcccccattctgatcccataaaaaccctggactcagccacatattgggactacatgctttcaggtaggggctacccacttcaggtcccctcttgtgtcaagagctgttctgttgtctcttctctgccttgcttattctccagttgtccatgtaacctcattcttcttggacatgggacaagaacccagtacccaccaaatggcaggtgcaaaaaatgctgtaacactgtagccctccaaccctcygctggcaccaggctgttgcttcatgtaacaggaagcagtggcaatggggccaggccagccaagaagctatgagctggaatgtgggcagcaggactgaacaagctgtaaaacaaatgagctgaaacttgctgccctcccacccccattcactgtgctgcaggcagtggaaagaagagagagatgtatcactccttgagggctcagacctcaggactccccaagcaactgtaacaccccttgggctc

SEQ ID NO: 942452 - DNA, 587 bp, Homo sapiens
accagcgtccacaaccagagtgagaacttcctcagtgccttttagccaatttaatggtgctttgtccaggcccacttatggaccaatcagcacacactcccccattctgatcccataaaaaccctggactcagccacatattgggactacatgctttcaggtaggggctacccacttcaggtcccctcttgtgtcaagagctgttctgttgtctcttctctgccttgcttattctccagttgtccatgtaacctcattcttcttggacatgggacaagaacccagtacccaccaaatggcaggtgcaaaaaatgctgtaacactgtagccctccaaccctctgctggcaccaggctgttgctycatgtaacaggaagcagtggcaatggggccaggccagccaagaagctatgagctggaatgtgggcagcaggactgaacaagctgtaaaacaaatgagctgaaacttgctgccctcccacccccattcactgtgctgcaggcagtggaaagaagagagagatgtatcactccttgagggctcagacctcaggactccccaagcaactgtaacaccccttgggctc

SEQ ID NO: 942453 - DNA, 672 bp, Homo sapiens
attatgtcatctgcaaacagaaataatttgactgcctctcttcctgtttgactgccttttatttctttctcttgctgactgcctggccagaagttccaatactatgttgaataggagtggtaaaagagggcatccttgtcttgtgctggctttcaaggggagttcttccagcatttgcccagtcagtatggtgctggttgtgggtttgtcacagatgactctcattattttgaggtatgatccatcactacctagtttattgagagtttttaaaatgaaggaatgttaaattttatcaaaacacttttctgcatctattgagataatcatgtggtttttgtcttagttttttgcctttgtttacgtgatgaatcacatttattgatttgcatatgatgaaccaacctagcatctaggggatgaatcctacttactcatagtgaatacactttttgatgctgaatttggtttgccagtatttttytggattttttgaattgatgttcatcaaggatattggcctgaagttttcttattttgttgtatctctgccaggttggtaccaggatgatgctgatctcatagaatgagttatggatgagtcctcttcttcacttctttggaatagtttcagtagagatggtatcagctcttctttgcacttctggtaaa

SEQ ID NO: 942454 - DNA, 645 bp, Homo sapiens
tgtcttaccctgagctttttaaggttagtaggctatttattactacctcaatttgaaaacacacttttggtctgttcaggaattccatttctacctggttcagtattgggaaggtgtatgtgcccgtgaatttattcatttcttctagattttctagtttgtgtstatagaggtatttataatattctccgatggttgtttgtatttctgtggggtcagtagcaatatctcccttatcatttctgattgtgtttatttgaatcttcccctcttctttattagtctagctggtggtctaactctttcacttatttattcaaaaaaaaagaaaacacctcctgaatttgttggggttttgaatggtctttcatgtctctatctcctccagttcagctctgattttggttacttcttgtcttctgctaagtttgaaatttgtttactctttgttctctagttcttttagatatgatgttgggttgttaagatctttctaattttttgatgtgggcacttaatgctataaattttcatcttaacactgccttagctgtgtcccagagattctggtaggttgtatctttttttctcattagtttcaaataacttcttgctttctgccttaatttcattattttcccaaac

SEQ ID NO: 942455 - DNA, 826 bp, Homo sapiens
aggaagaagttgaatctctgaatagaccaataacaggctctgaaattcaggcaataattaatagcctatcaatcaatcaaaaaaagcccaggacctgatggattcacagccaaatactaccaggggtacaaagaggagctgttaccattccttctgaaactattccaatcaatagaaaaagagggaatccttcctaactcattttatgaggccagcatcatcctgataccaaagcctggcagagacacaacaaaaaaagagaatttcagaccagtatccctgatgaacatcgatgcaaaaatcctcaataaaatactggcaaacagaatctagcagcacatcaaaaagcttatccagcacgatcacgttggcttcatccctgtgatgcaaggctggtttaacatacacaaatcaataaatgtaatctgtcataaaaactgaacaaaaacaaaaaccacatgattatctcaatagatggtgaaaaggcctttgacaaaattcaamaatgcttcatgctaaaaactctcaataatctaggtattgatgggatgtatctcaaaataataagagctatttatgacaaacccacagccaacagcatactaaatgggcaaaaactggaagcattccctttgaaaactggcacaagacagggatgccctctctcaccactcctgttcaacatagtattggaagttctggccagggcaatcaggcaggagaaagaaataaacggtattcagttaggaaaagaggaagtcaagttgtccctgtttgcagataacatgattgtatatttagaaaaccccattgtctcagcccaaat

SEQ ID NO: 942456 - DNA, 622 bp, Homo sapiens
acctttgccttatttgaacatggttcaaacagttggccacatttgattggccaaaacttggtgattggcacaagagtagacgatagtctgtttatactttcatttagtctagagtttgcgatgtacagagaaacgtttaggccaaacttaaaatatgtaaggagggcagggcgcrgtggctcacacctctaatcccagcactttgggagcgcaagtcgggcggatcacgaggtcaggagatggcggccatcgtggctaacacggtgaaaccccatctctactaaaaatataaaaaaaatagcgtgcgcctgtagtcccagctactcaggaagctgaggcaggagaatcgcttgaacctgggaggcagaagttgcagtgagcagagatggtgccactgcattccagcctgggcgacagaacgagactctgtctcaaaaaaaaaaaaaaaaaggaaggagacagctttaaactaaacttgatttaacagtagcattcctaaacgtgaggttaacatcattctcaaagagttgaccaaggattcatttgataaattcggtttttcggaaatagatgattctggtgattcagacaattctgatattagttctgtttagaaataact

SEQ ID NO: 942457 - DNA, 758 bp, Homo sapiens
aaatgtggattgagataggatctggattttaaatatgaaaaaaatgggaggagataattttaatgacagtcagatttgtgatagaaagaacatcattaatagttaatagtacagcattatttttcccctaagttgagatattgctttaaaaaatataattctaacacattgggtttgtttttaatttgcagggagtacatgtgcaggtttgttgcctgggtaaattgcatgtcatgggggtttggtgtacagattatttcatcacscaggtaatgagtaaagtacccaataggtaatttttcattcattaccctcctctcactctctgttctcaagtaggccaaggtgtctattgttctattatttgtgttcatatctactcaatgtttagctctcacttataagtgagaacatgtgacattttatttcctgttcctgtgtttatttgcttaagataatggcccccagctccatgcatgtcactgcaaaggacatgatttccttttttttttggtatggatggatagtatttcatggtgtatatgtaccatattttctttatccattccaccattgatgagtatctaggttgattttgtgtctttgctattatgaaaagtattgtgataaacataagtatgcatgtgtttttataatagaacaagttatactcttttgtatatatactcagtaatgagattgctggattgaatggtagttctgttttaagttctttgagaaatctccaaactgctttc

SEQ ID NO: 942458 - DNA, 580 bp, Homo sapiens
ttcccctctgggacgaagcttccagaggaaggaacaggcagcaatctttgctcttctgcagcctctgctggtgatacccaagcaaacagggtctggagtggacctccagcaaactccagcagacctgcagcagagggccatgactgttagaaggaaaactaacaaacagaaaggaatagcatcaatgtcaacaraaaggatgtccacacagaaatcccatttgaaggcaaccaacatcaaagaccgaaggtagataaatccacgatgatgaggaaaaacctgcacaaaaaggctgaaaattccgaaaaccagaacaccttatctcctccaaaggatcacaactcctcgccagcaagggaacaaaactggacagagaatgagtttgatgaattgacacaagtaggcttcagaaggtgggtaataacaaactcctctgagctaaagaagtgtgttctaacccaatgcaaggaggctaggaaacttgaaaaaaagttagaggaattgctaactagaaaaacccatttagagaagaacataaatgacatgatggagctgaaaaacacagcacgagaacttcgtg

SEQ ID NO: 942459 - DNA, 607 bp, Homo sapiens
agggggagcaacaatgatggggatataaacccaggcatttgagcagggagcggcaacccgctttggatcccctccaatcgcatgggagctctgttttcactctattaaatcttgcaactgtacactcttctggtcagtgttttttacagctctagctgagcttctgcttgcagtccaccactgctgatggttgtcatcgcagacccgcggctgatgtccaccactccagatccggcagggtgtcctctgtgctcctgatccagcgaggcgcccattgccactcccaaccaggctaaaggcttgccattgttgctgcacagctaagtgcccgggctcgtcctgctcgagctgaacactggttgctgggttccacggttctcttctgtgacccayggcttctaatagagctataacactgcatggcccaagattccattccttggaatccgtgaggccaagaaccccaggtcagagaacaaaagacttgctgccatcttgggagcagcctgccccatcttaggagccctaagaacaaagatcgtccagtaacataagcacttttaattcacccatagcttttattataaaatatttaataacataataa

SEQ ID NO: 942460 - DNA, 711 bp, Homo sapiens
ggcttggcatggtactttttttttttttttgagacagagtcttgctctgtcgcccaggctggagtgcagtggcatgatcttggcttactgcaacctccgcctcctgagttcaagcaattctctgcctcagcctcccgagtagckgggattataggcacccaccaccatgcctggctaatttttgtatttttagtagagatggggtttcaccatcttggccaggctgggcttgaacttctgaccttgtgatccacccacctcggcctcccaaagtgctgggatttcaggcgtgagccactgtgcccagcctggcctggtatggtattttttactaaaacagatgaatgtagcctttaggggatgatatgtggccattgttctggtgaatgcgttattttccatcactcttgaaaggaaaaaaactgtttgcattcccttgaccagacaatcgtatgtatttagtcttccctcaggtggtgctaactctcctaccctctgtcatgtgtgatatatagtctgaagagaactggacctcctggacatcctgcagaacggcaccctggtccactgtatcatgcctcatgtcaatcagatatcagatgggtgagcaagatgcagcaagtgtactgaaggccttggaaagacacatgggcttcagatcatgggagacaaaccctaagtttcagaggcccatcacatcagttgtagaag

SEQ ID NO: 942461 - DNA, 640 bp, Homo sapiens
ctcttcattctggacttcttgctgctaccatgtgaagaaggacatgtttgtgtccccttctgccataattgtaagtttcctgaggccttcccagccctgtggaactgtgagtcaattaaacttgttttctttataaattacccaggcttggatatgtccttatagcagcatgagaatggactaatacaataagttggtaccaggtagtgggtgctgctgtaaagatacctgaaaacgtggaagcaactttggaagtgggtaacaggcagaggttggaacagtttggagggctcagaagaagataggaaaatgtgggaaagtttggaacttcttagagacttgttgaatggctttgaccaaaaagctgatagtgatatggacaataaagcccaggctgaggtggyctcaaatggatatgaagaacttgttgggaactggaataaaggtcactcttcctatgcaaagagactggtggcattttgcttctgccttagagatttgtggaactttgaacttgagagagatgatttagggtatctggtagaagaaatttctaaggggcaaagtgttcaagagaaagcagagcataaaagtttgaaaaatttgcaacctgacaatgcaatagaaaagaaaatcccat

SEQ ID NO: 942462 - DNA, 620 bp, Homo sapiens
agttatttctaaacagaactaatatcagaattgtctgaatcaccagaatcatctatttccgaaaaaccgaatttatcaaatgaatccttggtcaactctttgagaatgatgttaacctcacgtttaggaatgctactgttaaatcaagtttagtttaaagctgtctccttcctttttttttttttttttgagacagagtctcgttctgtcgcccaggctggaatgcagtggcaccatctctgctcactgcaacttctgcctcccaggttcaagcgattctcctgcctcagcttcctgagtagctgggactacaggcgcacgctattttttttatatttttagtagagatggggtttcaccgtgttagccacgatggccgccatctcctgacctcgtgatccgcccgacttgcgctcccaaagtgctgggattagaggtgtgagccacygcgccctgccctccttacatattttaagtttggcctaaacgtttctctgtacatcgcaaactctagactaaatgaaagtataaacagactatcgtctactcttgtgccaatcaccaagttttggccaatcaaatgtggccaactgtttgaaccatgttcaaataaggcaaag

SEQ ID NO: 942463 - DNA, 571 bp, Homo sapiens
cccttgaaagggccacctcctggcttgaagccaaccaacacaaaaccagtgcactaaccaaaactacaaccaagaccctcacagagtccacttcactcccctgctacttccaccagagcaggtgctgctatccatggctgagagatctaaacatggatcacaccacaggactcttgcagacactcccaagtaccagagcctagtagctccaccaggtggctagacccagaagagcaaaaacaatcactacagttcagctctcaggaagccctccctagtggaagggtgacagcaccacgtcaaaggaagacatcttgggacaaaagaatctgaacaacagccattgagccccagatctactctctgacatagtctaccaaaaatagaaggaaccagaataacaattctggtaatatgacaaaacaaggttmtttaacagccccaaaagatcacactagctcaccgtcaatgaatccaaaccaagaagaaatttctaagctgccaggaaaagaattcagaaggttgattattaagctactcaaggagacatcagagaaaggtgaataccaac

SEQ ID NO: 942464 - DNA, 626 bp, Homo sapiens
taggacatgacttgcctgggtgtggcaattcttgtggcctagactccctttcaggtttatttggagccacagaccactttagcctgcagtggagagccttacgacaactcaaactctgacctctgggatcagtcattctcctctggctagggctggtttaaatgcaccctcagtggacaggcatcaactgrgtttaatctagttttgctttcttctataaaggagggcagcatggagttcaatggctcaaaattgctgggtctccctctcagggcacaaaatctctctctaaagaaagctgctgctgctggtgggtggggaaagggtggtgtcagtgattcaagtctcctttttctacttcttcagtgcctctttcagtgatacaaagtaaaagccaaggattatgaatggtcacctgattttttggttcttatgaaggtgcttttttgtgtgtaaatagttgttaaattagtgtccttgcaggggatgataggtggagccttctattctgccatcttgcttcattctcaacctatcctcccatttaaaattattatggtcttcatttttggaaacagatgtgacaggaatcaacagatgttaacgggaaacaaggaattttcctg

SEQ ID NO: 942465 - DNA, 579 bp, Homo sapiens
ataaattttggaggtgaaaatagcattttaactataggaaatatattacaataactttaaaatgtgttcaaagagttatataaagcacggtcaaaggactaaaagaaataaggaaagtgtggtataaacacaatgattatgtcaataaagacagagaaattacaaaaaggaacaaaacaaaaattctggtgataaaatataattacttaaatcaagttttattagaatggtacaaaagcagattagaacaaacacaaatcttcaaattaatctttggttggmtgaatataaaaacatttgagttttgagagcagaaaaaaatgaataaaattgaacagaacccaaggaactgtgaaacaccatctagtagaacgaaatacacatcatcagagttccagaaagtaaaccaagagagaaaaagaaagaaagaatgtttaaagaaacaatgacaaaaacctccaaaatttgttgaaagacataaacttacaaatctaagaaattcaataaactccaagtagggaaaaactcagatagacacatactgagacacataatcactctgttggatgacaaagatga

SEQ ID NO: 942466 - DNA, 612 bp, Homo sapiens
aattatctttaacaatgtgctgtataatatgaaaagaattggggtgattttttttccattttactcactagagtttttgccaatttcaagtgtgaattccttaaacatcctctcggtaaacaaggacataaggagatagaagcttaggtatgaaaaataggatagatcacatatacctttaaaatcataccgtattcaaagttttgaaagagaacatttcatattaggataatttttgctgaaaaagaaatctgaaagtttaattttcaaaatcacaatgaaattgactcagtgatcatcttgatgcagagccattggctcttaattgaattttttttttttttttttttttttttagatggagtttcactccaggctggagtacagtggcctggtctcggctcactrcaacttctgcctccggggttcaagagattctcctgtctcagcctcccaagtaggtgggattacaggtgcccaccaccatgcccaactaatttttgtagagagggggtttcaccacgttggtcaggctggtctcaaactcctgacctcaggcaatccaccgcctcggcctcccaaagttctgggattacaggcatgaaccaccat

SEQ ID NO: 942467 - DNA, 635 bp, Homo sapiens
aggggccaaagtacagcttggctgtggcttcagggaatgcaagctccaagctttgtcagctcctacatcgtgttgagtctgcaggcacacaaaagtcaagaattgagatttggaaacctccacttagatttcagaggatgtatggmgatacctggatgtccaggcagaagtttgctacaggggtggggccctcattgaggacctctgctagggcagtgtggaagaggaatgtgggggggttggaggccccccacacagtctcccctgtgacactgcctactggagctgtgagaagagggccaccatcctctagaccccagaatggtagctccaccaacagcttgcaccgtgaacctggagaagctgcagacattcaacgccagcctgtgaaagtggcaggagggtgactgtaccctgcaaagccacaggggtggagcttcccaaggctgtgggagcctacctcttgcatcagcatgacctggatgtgagacatgaagtaaaaataggttattttggatctttaaaatttaatgactgtcctattggattttggacttgcatgggggcctgtagcccctttgttttggccaatttctcccatttggaatgggtatatttactcaatgcctctactc

SEQ ID NO: 942468 - DNA, 635 bp, Homo sapiens
aggggccaaagtacagcttggctgtggcttcagggaatgcaagctccaagctttgtcagctcctacatcgtgttgagtctgcaggcacacaaaagtcaagaattgagatttggaaacctccacttagatttcagaggatgtatggagatacctggatgtccaggcagaagtttgctacaggggtggggccctcattgaggacctctgctagggcagtgtggaagaggaatgtgggggggttggaggccccmcacacagtctcccctgtgacactgcctactggagctgtgagaagagggccaccatcctctagaccccagaatggtagctccaccaacagcttgcaccgtgaacctggagaagctgcagacattcaacgccagcctgtgaaagtggcaggagggtgactgtaccctgcaaagccacaggggtggagcttcccaaggctgtgggagcctacctcttgcatcagcatgacctggatgtgagacatgaagtaaaaataggttattttggatctttaaaatttaatgactgtcctattggattttggacttgcatgggggcctgtagcccctttgttttggccaatttctcccatttggaatgggtatatttactcaatgcctctactc

SEQ ID NO: 942469 - DNA, 619 bp, Homo sapiens
cataggtgtgggcccagtccacaatggtgttggagcatgtcaacctacggccggaaccgcaaaggaggcacaagtattaacaggggtaagtcatgtccctcaggcaaaatacgggccaaattttcatctctggaaaacaacgcagcctccaaggacttcttctgcgacagcttatcagatccctgtgtttttttagggtcttgtaactgtgccaaagtcacaggggagctcatgttagaccacacaggcagtacacatgtcccccggaggagggtcccttccctggctgttcccctatgaatggttaatcgtgaggaccacacattaaatacccaaggagtaacatgtaagtcatactgcaggccctcccctctgggggctatgtcarccaaccatcagcaatggggggcttggagggccaacaccaggttttctgttctgcatttgaggcattggggcaggcaacaacagattaccatttgtccccataactggtcggtggaagtcatccttggtttgtatctgtagctggatgggggcagcggcccagtgtcagtgcctccactgtagctgtgccacctttccatggctgctcattcaagttttggagcgccaggtc

SEQ ID NO: 942470 - DNA, 507 bp, Homo sapiens
agggccaacaccaggttttctgttctgcatttgaggcattggggcaggcaacaacagattaccatttgtccccataactggtcggtggaagtcatccttggtttgtatctgtagctggatgggggcagcggcccagtgtcagtgcctccactgtagctgtgccacctttccatggctgctcattcaagttttggagcgccaggtccaacctggaactccagcaccacaaagactggggagtaagagtaacatgcaaaagtaaaccattcttcaggagtccactatatcgctcaatcatgccagcggcttgtgggttataaggaacgtggracccccattgtatgtccatccgctgtgcccactgttgtacctgctgtccagtgaaatgtgttcccgtcactttcaatggccagggaatggctgtataaggcacctaagtgttacaagtctcgaatggtgtgttgctggtcagccaccctgctaaggtaagcaaacaacaggctggtg

SEQ ID NO: 942471 - DNA, 605 bp, Homo sapiens
cacacattaaatacccaaggagtaacatgtaagtcatactgcaggccctcccctctgggggctatgtcagccaaccatcagcaatggggggcttggagggccaacaccaggttttctgttctgcatttgaggcattggggcaggcaacaacagattaccatttgtccccataactggtcggtggaagtcatccttggtttgtatctgtagctggatgggggcagcggcccagtgtcagtgcctccactgtagctgtgccacctttccatggctgctcattcaagttttggagcgccaggtccaacctggaactccagcaccacaaagactggggagtaagagtaacatgcaaaagtaaaccattcttcaggagtccactatatcgctcaatcatgccagcggcttgtgggttataaggaacgtggaacccccattgtatgtccatccgctstgcccactgttgtacctgctgtccagtgaaatgtgttcccgtcactttcaatggccagggaatggctgtataaggcacctaagtgttacaagtctcgaatggtgtgttgctggtcagccaccctgctaaggtaagcaaacaacaggctggtggc

SEQ ID NO: 942472 - DNA, 453 bp, Homo sapiens
tttgcatctctctaattatcagtgatgttgagcttcttttcatatgcatgtatgtcttctttgggaaattgcttgttcatgtcctttgcccacttttttatggggttgtttctttcttgtaaatttaagtttcttatagatagtagtttgatctttgaagttgctgacctttggatagtctttttttttcttcctttatcctatttggkgaccttaagggtttgattgtggtacagggtggattcagacgactagcttcatttctggaagattttagggggccaatgctcagctcctagttcctggactgtgtggtctaggaaacttgtttcgtgccccaactttgtcttcttggccaaggtgctccctgactactggtcactattctgatgtgtggtgtcagccaaagcatttcatagagtggtggcagtgggatccatcttcatttgcatg

SEQ ID NO: 942473 - DNA, 621 bp, Homo sapiens
agcacatgccaccatgttcagctaattatttttatttttgtagagtcagggtttcaccatgttacccaagctggtctcaaattcctgggctcaaacaatctgcccaccgtggcttcccaaagtgctgattacaggtgtgagccactgcgcccagccagcagctctctttatattaagaaaattaaccttttgtctaggataggagttgcaattttttccctcaatttgatatttgcgatttcattttatgtatagagtggggggattttgttcttttgttttggtttgtgcgacgtagaaattttacaaattttacaaaaacatatgttcatgtgagwacattgctggggtctctcccagggccttggaatgcaacaatccaagtgaggggcttcccagtaagtcggcttctaaaggaaggactcttaggaaacatatttatttagagatttaaataatgagaaagcagtaaattgtgcaaaaatatagagaaaggatgttttggaggagtgacttatcaaagaataaattggagatgtttgaggaattaaaagaaagccattgtgtaaggaatatagcttcactacctacttcacctttcgaacaaactcaagaacacaa

SEQ ID NO: 942474 - DNA, 722 bp, Homo sapiens
ccaggatgaccttgatgagacgtagtcgggcctcaggaggcactcccgctgctatcccgctgccggccagcagcttggccacctggctgcacagcgacgccaccgtcagcttcgccagagggaaggactgcagaatccggccctcctgcggggggcgcttctgaggctctggggacgtcgtcctagtggggaagagcgacagcggacgcagcagccggtggtaaaaccgctggagctcaggctcgggcttcgggggctccatcatagagccggcggccgccaccgtccaggaacagaaagccgaggggttactaaggcaaccaggagcccgacggcccgagtgcgcytgcgcggccgccacccggtggctgacgaagcagggccttgcgtgcgcacgcactaggaggaggagttaagggtggctttagaggctcagtccccgcgacgccgcgctggttggtgctcctgcgccggaggagttctgcgtctcggggtggtgactgggtccagaatggcttcggattcggggaaccaggggaccctctgcacggtgagggtcgaggcttcgtgtggagcctcgccgggcagagagcctcggcccctgggatgatcgttaccttgggaagaggagaaggagtgggcacttgggttggggcctggggccatgggatgaaactagggtgcgagggtagcaggggccctgcgtgagtgttggggggtga

SEQ ID NO: 942475 - DNA, 625 bp, Homo sapiens
tagtgaaataattgctaaataacaagccaggcatggtagcgctgtagtctcagctacttggcagactgaagcggaaggattgtttgagcccgggaattggagatcagcctgggcaacatagcaaaactccatcttggccaggcacagtggctcacccctgtattctcgcactttgggaggccaaggcaaatggatcaccctgaagtcaggagtttgagaccatcctggccaacatggtgaaagcctgtctgtactgaaaacacaaaaatttgctgggcatggtggcgcacgcctgtaatcccagctactcgtgaggctgaggtaggagaatcccttgaacctgggaggcggaggttgcagtgaaccaagattgcaccattgcactccagcctgggtgacaagagagactctgtctctctctctctctctctctctctctctcwcacacacacacacacacacacacacacacaaagagaaaactccatctcaaaaaattcccaaaaccaaccaactaaacaaaaaaatagatgcgggccaggggtgatggcttacacctgtaaccccagcactttgggaggccaaggcaagcagatcatgaggtcaggagttcgagaccagcctg

SEQ ID NO: 942476 - DNA, 625 bp, Homo sapiens
atggagaatggggtatccatcccctcaagcatttatcctttgtgttacaaacaatccaattatagtcttttagttatttttaaatatgcaattgttattattgattacagtcaccctgctgtgctatcaaataataggtcttatttattctatttttttgtacccattaaccatccctccctttccactagccctccactaccctttccagccactggtaaccatccttctattatctatgtccattagttgaattgttttgatttttagatcccacaaataagtgagaacatgcgatgtttatctttctgtscctggcttatttcacttaacataatgacctccagttccatccacgttgttgcaaatgacaggatctcattctttttggtggctgaatagtactccattgtacatgttccatccatgttgttgcaaatgacaggatctcattcttttttgtggctgaatagtactccattgtgcatatacaccacattttctttatcctttcatctgtaaatagacactgtgattgcttccaaatctcagctatcttgaacagtgctgcaacaaacaggagtgcagatatctcttcaatataccaatttcctttcttgtgggt

SEQ ID NO: 942477 - DNA, 605 bp, Homo sapiens
tttcttttcttttttcttcttttttaaactttttatttcaaaatactttctaaaattgtattttaaaattgacacatgattgtacatatttatggggtacatagtgatgttttgatacatataatatatagtgatcagatcagggtaactagcatataygtccacctcaaacatttatcatttctttttgttgggaacatttaatatcctcctagatatttgagttgctctcttattgtatagaaacaaggctgctgtttctatacctcactttcattttctctaagctactttcctttctctgtccataaattatcttcaactaagtggcagtgttggagtgtctcccaatctattctagttctgtggagttgcctgattctcgaattgttctttgctctgtaaaattctgttaaattaaatttgtctaaagtttgtcttttaatactttcattttgggaggggtggtatcagaataatactagcttcataaaaatgaattgggaagttttctaccctcttctattttctgaaacagactgtatagaattggtgttaattcttctttaaaagtttgatagaattgtccagtaaaagcatctagc

SEQ ID NO: 942478 - DNA, 605 bp, Homo sapiens
tttcttttcttttttcttcttttttaaactttttatttcaaaatactttctaaaattgtattttaaaattgacacatgattgtacatatttatggggtacatagtgatgttttgatacatataatatatagtgatcagatcagggtaactagcatatacgtccacctcaaacatttatcatttctttttgttgggaacatttaatatcctcctagatatttgagttgctctcttattgtatagaaacaaggctgctrtttctatacctcactttcattttctctaagctactttcctttctctgtccataaattatcttcaactaagtggcagtgttggagtgtctcccaatctattctagttctgtggagttgcctgattctcgaattgttctttgctctgtaaaattctgttaaattaaatttgtctaaagtttgtcttttaatactttcattttgggaggggtggtatcagaataatactagcttcataaaaatgaattgggaagttttctaccctcttctattttctgaaacagactgtatagaattggtgttaattcttctttaaaagtttgatagaattgtccagtaaaagcatctagc

SEQ ID NO: 942479 - DNA, 605 bp, Homo sapiens
tttcttttcttttttcttcttttttaaactttttatttcaaaatactttctaaaattgtattttaaaattgacacatgattgtacatatttatggggtacatagtgatgttttgatacatataatatatagtgatcagatcagggtaactagcatatacgtccacctcaaacatttatcatttctttttgttgggaacatttaatatcctcctagatatttgagttgctctcttattgtatagaaacaaggctgctgtttctatacctcactttcattttctctaagctactttcctttctctgtccataaattatcttcaactaagtggcagtgttggagtgtctcccaatctattctagttctgkggagttgcctgattctcgaattgttctttgctctgtaaaattctgttaaattaaatttgtctaaagtttgtcttttaatactttcattttgggaggggtggtatcagaataatactagcttcataaaaatgaattgggaagttttctaccctcttctattttctgaaacagactgtatagaattggtgttaattcttctttaaaagtttgatagaattgtccagtaaaagcatctagc

SEQ ID NO: 942480 - DNA, 579 bp, Homo sapiens
gggaaccctcttcatatatccggagttccctctctgtgcaggtctcccaccagggtctgtggcccgtgacctcttgccaccctggtctctccgctttgtctcctcaaatctagaattccaactggctttgtcttgctgcccttccttgcgacactggcctggaatccttcaagttagtctgctagcgtggattgtaggatgcatctcagttgtcactatccttaattgcatgatgtccagttcctcgcaaagcrttgtttcatatattttgcccatttttgttttgttttgctttcagactagggggaaatccagtccctgttcttccattttggccagaaattcaaggtaatgacttttaatatttctgactactagttccatcatctctctcacttctggatctgtctctattcactgatgttcctagtcattatgggtcatatttatccacttcttaaatgcttgctgattgttttattagatatcaagctttgttaatttcacaactttgggtgccagaaatttttaccttcccatcaatattcttgaactttattttagtaccttgatatttta

SEQ ID NO: 942481 - DNA, 559 bp, Homo sapiens
  misc_feature 128: n = A,T,C or G
ctaagagaatatttgaactaaaattaactgctgggattatgggggctactgagtgtaacaggggtcatccatttctctctcttctagatagagtctcaaagaataagctggtaagaagccagtggcgntattaacactcgttggatggctgtagcaggcatggtgttctgtagaaagctatcagttgtttaccctcctaatcctatarctgactgggacctgcagctcactcccactgcccagcatcacaggaagtattgtaccacatattgctaccctgggaaagcttttgaaataaaaaatttgaaatatggtttctactgaatgcatactaccttcacaccattgtgaagtcaaaaaatcgtaggttgaaccattataagttggagaccgtctctatgtcatggttaaaatataaaacaaattaaaatgtgataaaataaccagttataactatcagatgttttttgtaagcctcatggtaaccacaaggcaaaaacctatagtaatacaaaaataaaaataaaaaagcaaagaaccaaaccataccactagagaa

SEQ ID NO: 942482 - DNA, 586 bp, Homo sapiens
tcacttgaccacaaaggaagatagcaagaaaggaagaaaggaacaaaggatctacaaaacaactagaaaacaacaaaattgcagtagtaagtccttacttatcaataattatcttaaatgtaaatggattaaactctccaatcaaagacatggagtggttaaatggatttaaaaaaaaaaacaaaaaacaagacctaactatatgctgcttataagagactcacttcacctgtaaggaccacacataaaatgaaagcaaagggatgaaaaaaattctatgcaaatggaaaccaacacagagcaggagtagactttaagtcaaaaatagactttaartcaaaaactgtaaaaacagacgaagatcattatacaatgataaagggatcagttcagcaagaggacataacaattgtaaatatatatgcacccaacaccagagaaactaaatatataaagcaaatattaatagatcttatgagagagttagattgcagtacattaatattagggaatttcagtaccccactttctgcaatggacagatcatccagacagaaaatcaataaggaaacatcagacttaaact

SEQ ID NO: 942483 - DNA, 639 bp, Homo sapiens
gcttccatttgttctcctcctacatctctgaaactctctccagttaggctttcctcccatcgtgccacttcagcagttcttatcaaggtcaccagtgacctccagaaggctgattccaatggccagttctaattattcccattgttctggcctgtctgccatattggacaaaattgatccttcctttcttgagactgtcctctgtgaccatgtggrtgactcctctctcgattttcctcttccttctctagccatgcttttccagtcttgttggctgacacctcctcatcttcaactcctaaatgtgagtcctcatttctatctatactcatttcctagtgatcgtttctagtctgtcccaaatgtatcctagcccagacccctccttcaactccagactcatgcatccacctgcctcaaaatctcctttaaaacccaataggcatttggattttctctgctgaaccttctcaacccagtctttcccatctcaataaatgacaaacttttctcttctagttattgaatccaaaatccttgaagcagtccttgactcctctttttcctaacacccttcatcaagtccatgaggaaaatctgttggcatgacctttgaaatgtgtccagaatatgacccct

SEQ ID NO: 942484 - DNA, 860 bp, Homo sapiens
tctaaaaaatgaaagacctctggactgtttaaaaaaaaaaagaaaaaagaaaaatccttaacccattgacatagcttcttgtattaatttcttattgctgctgtaacaaattactacaacatttgtggcttaaaacaacacaaatttgttatcttacagttctgaagaacagaagtccaaaatgggccccgctggtaaaaccaaagtatcagggcctgtgttcttgccagaggcccaggggaaaatccacttcttgcctttgccagcctctaagggctgcctgcattctttggctcatggccccttccatcttcaaagccagcaatggtggtccaagtcttaggatgttctctttctgatctgacttctgcctcttccctatataaggactcttgtgagtacaatgtgctcacctggataattcaagataccctctttattttgaggtcgcttgattagcaaccttaattccccctggccacataacattcacaggttccacagatgaggacatggacatctttggggggcctgtcatgctgcctgtcctactccctattcttcctgctccccagccctaggsaaccgctaatctactttctgtctctagagatctactcactttttttattcctctgcatattctgtttcttcctcgagtttcatgttcagctttttcctctccctccttgctcttactggtctctgtgacctccatctttttcctcatttctcaggaaatgattgacttctgaagacagaaaatggagaaatgctagggaaaacaagagaggcaaagttttatagaaccaaatgctgagacagaagaggggtacagttgtgcaagtgatgagctgcag

SEQ ID NO: 942485 - DNA, 693 bp, Homo sapiens
atctggccatgttttcttagccaaccacatctttatcgcaaaagaatgacatttcaagcagtagcttcttagatttccattcagtcttggtccgtttttctggccttctgtgggtgtgctgtggggatgatgtctatgactttttcttaattatccagaaaattctggccaagcaccttttcttgcagaggggagaaggtgaagaggtttcaggagagaaaagtatatgtgtgggggcgtcagaacatggcattctgatgaatgtggtcttatgctgggaagaaacctccagggctgaaatcaccaggaactcaatatctgtttacaaaactggccttgaggattgaagctcagaacacaagactcttgccagttgttctaagaaagcttctgctctttcccagtcattcaaactgcaccaccttatcgacttcccctcacggtgaatgctcaggatctccttggcaacgtgggtgaagatacctgctggctctcttgacagttctcgtctttggcttggccaataaaccccctttakggaagtagaaagatggtggcaacagacagctcctcagctccacctgccttcccttcttcaggggagcttatgaccatcagggtggctgtgatgcttccctggatgtttggctcacagtgaagaagcatgaggacaaatacacagacaataaaaac

SEQ ID NO: 942486 - DNA, 617 bp, Homo sapiens
tttctccccctctattcagctcctctttgtctttttttttttttttccttcgagacaaggtttcactgtgtcattcaggctggagtgcagtggtgcactcacagcttattgcagccttgaactcctgggctcaagcaatcctcccacctcagcctttcagatagctgggactacaggtgcactccacttcaactagccaacttttttagtttttttaaaagatggggtctcactgtgtttcccaggctgatctcaaactcctggcctcaagtgagcctcttgcctcagcctcagcctcccaaagcactgggattatagatgtgagccatcacacccagccccctctgtgtcttctctgtgtcttttgattggggagtttaatccatttgtgcttaattatgataggaaaggacttactattgccattttgttaactgttttctatttatcttacagttcttttgktcttctttcctctctttctgccttcctttgtggttcattaattttttgtagtgacatgctttgattcctttctcattttcttttatctcctataggtatttctttgtggttactatagtgcttacatgaaacattttgtagtaataataatc

SEQ ID NO: 942487 - DNA, 611 bp, Homo sapiens
cagggagcagcagagctatttgggctctggtcagactagaccaaagagggcttcatgtatcttccctccttcccttctgaattgtataccccaccccccaactcaccaaaatttatatgttgaagccctaatgcccaacgtgatgatatttggagataaggcctttggaagataacttggttgagatgaggtcatgagggtggggcacccgcgctgggattagtgcccttacaagaagagatggcagagaacctagtctctctctccccaccatgtgaggacacagcaagaagacagtcatctgccagcaaaggagagagccctcaccaggctctgaccatactggctccctgaccttggacttccagcctccacactgtgagaaaataaattatgctgtttaagccacctaygatattttgttatggcagcccaaagtacctaaaccagcttccatacccaagttgccctggggataaccacagccagtgtccacaagccaggcctggacccactgccaccaaaaggatactgctgtagcttctgacgctggtccatggagcctgagtggtggatgatcttgtgcagccccagcacccagtgctgggcat

SEQ ID NO: 942488 - DNA, 621 bp, Homo sapiens
tgggactgttatatcttcatgatgatttgaccccacttatgaaatgttcctctttttccctgttaatattcactgttctgaacactgtttcctgatattactatagccactccatcatttgttagattagtatttgcatgttatatgtttctttaaatcatttaaattttaatcttcttgaactgtaaacactgtcttttggttagagtgtttagartccatttacataatgtaattattgatgtggtttctttaaatcccacatcttactatttgttttctatttgttccagctgttcattgtcctctcccctttaactgccttcttttgagttatttgagtattttttgttatctcattttatctccactccatatattggttagatctctgtgatggataatgttaaatgctgctcaggttcctcttcaagaagtcattattgtttcccctgctgggagacctgttgacagatagctttctgctgacagacccttcagggattgccacgattgcagagagctaccttgctcaaggtcattcgccttcccaaggtggctaacatccagtgctgaatgcaagaatattaaggtctgaccatctcaatccaactcagcaca

SEQ ID NO: 942489 - DNA, 690 bp, Homo sapiens
gtgttccattaacactccttttttttttgagatggagtctcactctgttgcccaggctggagtgcagtggcgtgatctcggctcactgcaacctctgcttcccaggttcaagcgatcctcctgcctcagcctcccaagtagctgggactacaggcacgtgccaccatgcccggctaatttttgtatttttagtagagacagggtttcaacatgttggccaggctggtctcgaactcttgacctcgtaatctgcctgcctcggccttgcaaagtgctgagattacaggaatgagccactgcgcccagcagtactcttttttattttttttattttttttgagatggagtgtcgctctgttgcccaagctggagtgcagtggcacgatctcagctcactgcaattctctggcctcagcctcccaagtagctgagattacaggcctgcrccaccatacccagctaatttttgtatttttagtagagatggggtttcaccatgttgaccaggctggtctcgaactcctgacctcgagtgatccacccaccttagcctccgaaggtgctaggattacaggcatgagccaccgtgcccggccagcactcctttttgatttattcttcttcctggtgtgctacagcctctgggaaactccagcaggaaaagacccccgtgggaacatctccatagga

SEQ ID NO: 942490 - DNA, 800 bp, Homo sapiens
tccaccccagcaatacttttttttttttttttttttttttgaggcaggggcccactctgtcttccaggctggagtgcagtgtaatcatggctcacagcagccttgacctccaagagctcaggtgattctcccacctcagcctccggagtagctgggactacaggcatgtgccaccatgcctggcttatttttgcattttttgtagagacrggtttcgccatgttgccaggctgttctcaaactcctggactcaagcctctgtctgccttggcctcgcacacttctgggattacaggcatgaaccattgcacccagcctcaataagtttttgttgaatgaacaaattctaattatgttacaaggtgaaactgacagggtttgccaatggcttggatgcagggtttaagagaaaaaaaggaaagttagggatgagcccaagatttttgccctgagcacatgacagagtgaacttgtcatttacaaaagtggggaaaatgtgataagagcaggtttggtgggggatatgaaactatgagttagttttcagacataatatattaaaacatttgttttaattttttgtagagatagggtcccactatcttgcccaggctggtctcaaactcctgggctcaagtgatcctcccacctcagcctcccaaagtacttggattacaggtgtgagccactgtgcccagacagttctttttaacacagtgcattttgttttattttattttttaaatgcaatcttgctctgtcacccaggctggagtgtagcagcacgatctcagctcact

SEQ ID NO: 942491 - DNA, 788 bp, Homo sapiens
agaaatagagtcttcacaatgcctgggaaaggaagagagatgaggctcactagccacagaaaaacaggcagttaatttttaaagggctccagctctttctctttctcaggggggatttgggttttcttacatacaactgagtttctgcttacacattctttaatttcttttaattcctgttccrcttggaccagggccagggcaccactgccctgtaccacccccaggagggtgttccttgcatcctggcccttctagctccagccttggttcaaagggctccagatgagctcaggccatggcctcagagggtgcaaactataagccttggtggcttccatgtggtgttaagcctgcaggtgagcaaagtgcaagagtgaaggaggcttgtcattctctgcctaaatttcagaggatgtatgagaaaggctggatgcccagggagaagcctatgcccggctggagccctcaaagaggacctcttctaggacagtgccaagtggaaatgtggggttggaggccccacacggggtcctgactgggggggcgggggctgcctagtggagctgtgggaggggggctgctgccctccagatcccagaatgatagagccaccagcagctcatgtcttcagtgtagaaaagctgtgggagcagagctgcccaaggccttgggagcccaccctgtgcatcctgggaatgctctatgttcccaggatgtgggacatgctttcaaaggagattattttggaacttcgagatttaatgactgccttgctgggatttgaa

SEQ ID NO: 942492 - DNA, 788 bp, Homo sapiens
agaaatagagtcttcacaatgcctgggaaaggaagagagatgaggctcactagccacagaaaaacaggcagttaatttttaaagggctccagctctttctctttctcaggggggatttgggttttcttacatacaactgagtttctgcttacacattctttaatttcttttaattcctgttccgcttggaccagggccagggcaycactgccctgtaccacccccaggagggtgttccttgcatcctggcccttctagctccagccttggttcaaagggctccagatgagctcaggccatggcctcagagggtgcaaactataagccttggtggcttccatgtggtgttaagcctgcaggtgagcaaagtgcaagagtgaaggaggcttgtcattctctgcctaaatttcagaggatgtatgagaaaggctggatgcccagggagaagcctatgcccggctggagccctcaaagaggacctcttctaggacagtgccaagtggaaatgtggggttggaggccccacacggggtcctgactgggggggcgggggctgcctagtggagctgtgggaggggggctgctgccctccagatcccagaatgatagagccaccagcagctcatgtcttcagtgtagaaaagctgtgggagcagagctgcccaaggccttgggagcccaccctgtgcatcctgggaatgctctatgttcccaggatgtgggacatgctttcaaaggagattattttggaacttcgagatttaatgactgccttgctgggatttgaa

SEQ ID NO: 942493 - DNA, 788 bp, Homo sapiens
agaaatagagtcttcacaatgcctgggaaaggaagagagatgaggctcactagccacagaaaaacaggcagttaatttttaaagggctccagctctttctctttctcaggggggatttgggttttcttacatacaactgagtttctgcttacacattctttaatttcttttaattcctgttccgcttggaccagggccagggcaccactgycctgtaccacccccaggagggtgttccttgcatcctggcccttctagctccagccttggttcaaagggctccagatgagctcaggccatggcctcagagggtgcaaactataagccttggtggcttccatgtggtgttaagcctgcaggtgagcaaagtgcaagagtgaaggaggcttgtcattctctgcctaaatttcagaggatgtatgagaaaggctggatgcccagggagaagcctatgcccggctggagccctcaaagaggacctcttctaggacagtgccaagtggaaatgtggggttggaggccccacacggggtcctgactgggggggcgggggctgcctagtggagctgtgggaggggggctgctgccctccagatcccagaatgatagagccaccagcagctcatgtcttcagtgtagaaaagctgtgggagcagagctgcccaaggccttgggagcccaccctgtgcatcctgggaatgctctatgttcccaggatgtgggacatgctttcaaaggagattattttggaacttcgagatttaatgactgccttgctgggatttgaa

SEQ ID NO: 942494 - DNA, 633 bp, Homo sapiens
tagagtcttcacaatgcctgggaaaggaagagagatgaggctcactagccacagaaaaacaggcagttaatttttaaagggctccagctctttctctttctcaggggggatttgggttttcttacatacaactgagtttctgcttacacattctttaatttcttttaattcctgttccgcttggaccagggccagggcaccactgccctgtaccacccccaggagggwgttccttgcatcctggcccttctagctccagccttggttcaaagggctccagatgagctcaggccatggcctcagagggtgcaaactataagccttggtggcttccatgtggtgttaagcctgcaggtgagcaaagtgcaagagtgaaggaggcttgtcattctctgcctaaatttcagaggatgtatgagaaaggctggatgcccagggagaagcctatgcccggctggagccctcaaagaggacctcttctaggacagtgccaagtggaaatgtggggttggaggccccacacggggtcctgactgggggggcgggggctgcctagtggagctgtgggaggggggctgctgccctccagatcccagaatgatagagccaccagcagctcatgtcttcagtgta

SEQ ID NO: 942495 - DNA, 688 bp, Homo sapiens
accaattgccaatcagggtatgtttaaatctacctatgacctggaagcccccactttgcaccctgagatcaaaccagtgcaaatcttatatgtattgatttgtcaatgaaaacagtcaaagccagtcaggcacagtggctcatgcctgtaatcccagcactttgggaggctgaggcgggtagatcacctgaggtcaggagttcgacamcagcctggccaacatggtgaaaccccgtccctactaaaatacaaaaattagcccagcttggtggtgggcacctgtaatcttagctactgcagagactgaggcaggagaatcgcttgaacccaggaggtggaggttgcagtgacctgagattttgccattgcactccagcctgggcaacagagcaagactctatctcaaaaaacaaacaaacaaacaaacaaacaaacaaactgtcaaaatctgtacagtatgtgaagagatttgttctgaaccaaatatgaatgaccatggtccatgacacagccctcagaagaccctgagaacatgtgcccaaggtggtcacagtgcatcttagttttgtacattttagggagatatgagacttcagtcaaatacatttttaaaaaatacattggttttgtccagaaagccagaaccactcaaagcaggggtttccaggttataagtagatttaaaatt

SEQ ID NO: 942496 - DNA, 709 bp, Homo sapiens
ccaaaatccaacagaaagttggaatccaacaacaaccccataacaacgatcctggatttgaatgacaagatagctatattgaaaaagaaccaagcagagcttcttgaattgaaaaatttactataggaatttcaaaaagagttggcagccttagcaacagactaggccaaatagaagaactaatttaagagctcaaagaccagacctttgaatcaacccagtcagacaaaaataaaaaaggaatttaaaaataatgaaccacacttttgagaaatataggattatgtaaaggaacaaaatctatgacttactattggcatttttttttgagacagaatctcacactgttacccagtctgtagtgaagtggcatgatcttggctcactgaaacctccacctcctgggttcaagcaattcttgtgcctcagcctcccaagtatctgagattacaggcgtatgccaccatgcctggctaatttttgtatttttagtagagatgaggttttgccatkctggccaggtaggtctcaaacttctggtctcgggtgatactcccaccttggcctcccaaagtgctgggatgactggcatgagccactgtgcctggctgacttattggcatttctaacagagaagaagagaaagtaagcaacttggaaaacatttttgaggatataattcaggaaagtgtcctcaatcttgctagag

SEQ ID NO: 942497 - DNA, 709 bp, Homo sapiens
ccaaaatccaacagaaagttggaatccaacaacaaccccataacaacgatcctggatttgaatgacaagatagctatattgaaaaagaaccaagcagagcttcttgaattgaaaaatttactataggaatttcaaaaagagttggcagccttagcaacagactaggccaaatagaagaactaatttaagagctcaaagaccagacctttgaatcaacccagtcagacaaaaataaaaaaggaatttaaaaataatgaaccacacttttgagaaatataggattatgtaaaggaacaaaatctatgacttactattggcatttttttttgagacagaatctcacactgttacccagtctgtagtgaagtggcatgatcttggctcactgaaacctccacctcctgggttcaagcaattcttgtgcctcagcctcccaagtatctgagattacaggcgtatgccaccatgcctggctaatttttgtatttttagtagagatgaggttttgccattctggccaggtaggtctcaaacttctggtctcgggtgatactcccacyttggcctcccaaagtgctgggatgactggcatgagccactgtgcctggctgacttattggcatttctaacagagaagaagagaaagtaagcaacttggaaaacatttttgaggatataattcaggaaagtgtcctcaatcttgctagag

SEQ ID NO: 942498 - DNA, 577 bp, Homo sapiens
agccttttggtcttgctgccatagcaaatactgtgcctttcaagaagatgaacctgttttacttcattttttagcagatttcttaatgaaatatataccatactcttttgtttaacacataagcagacaccctgtcagaagcaaagagacatctactccaccattaccasccatccctctactaatgtggctgctgaagatgttacctagagcagaggactttgggttcaacctaagcactttatatcctttattttcaattgggtaggagataaaataattcagcagcaataaaagtcacacttcttaaagttgcagtctcgccaaggcaacacaatgtagcagtctctcttgtgaggtatcacctggagttcttcatctcaccaccaagatgattaaggaacggggatacacgggtgaggtgggagtgaaagtttaataagcaaaaggaggaagctctctgcagcagacaagggcgtccaagtggattgccgtttttacagttgaatcaaaaagcttttataagaaactcctctcagctatgtataaaaaactgtctgcacaattccctttatat

SEQ ID NO: 942499 - DNA, 577 bp, Homo sapiens
agccttttggtcttgctgccatagcaaatactgtgcctttcaagaagatgaacctgttttacttcattttttagcagatttcttaatgaaatatataccatactcttttgtttaacacataagcagacaccctgtcagaagcaaagagacatctactccaccattaccacccatccctctactaatgtggctgctgaagatgttacctagagcagaggactttgggttcaacctaagcactttatatcctttattttcaattgggtaggagataaaataattcagcagcaataaaagtcacacttcttaaagttgcagtctcgccaaggcaacacaatgtagcagtctctcttgtgaggtatcacctggagttcttcatctcaccaccragatgattaaggaacggggatacacgggtgaggtgggagtgaaagtttaataagcaaaaggaggaagctctctgcagcagacaagggcgtccaagtggattgccgtttttacagttgaatcaaaaagcttttataagaaactcctctcagctatgtataaaaaactgtctgcacaattccctttatat

SEQ ID NO: 942500 - DNA, 605 bp, Homo sapiens
aatgaacacctgggttgaattattcacctagaatttggtattcatttagggcttgagtgtcagccttggacctggtgtccacctgggccttgggtatcaaactagggatttggtgtccagttgagacatcatgtgcacctggggtctgagtgttcacatgaggccagatgaccactgggggcctgaatgtcaacctggtgtcaaattcactggragcctaggtatccacctggggcctgatgtccacctgggactaggtgtcaacgtgtggcctgatgtaaacctctagttcagtgttcaccttgggcctgatgtccactggaggactgatgttcccctttgatctgatgtccacctggaaaccgtgtattcacccatggcctgatggtcacctggggttgaatgtccaactgtggccagatgtgcacccggaacctgggcatccacctggggcctgatgtttagctggggcctggagttcacctgaggcatgatgtctacctgaagcttaatgttcatctgagtgctggatgttcacctggcgcctgatgtccacctggagcctgaggacccttctcaggcctgatgtccacaattggcctggt

SEQ ID NO: 942501 - DNA, 605 bp, Homo sapiens
aatgaacacctgggttgaattattcacctagaatttggtattcatttagggcttgagtgtcagccttggacctggtgtccacctgggccttgggtatcaaactagggatttggtgtccagttgagacatcatgtgcacctggggtctgagtgttcacatgaggccagatgaccactgggggcctgaatgtcaacctggtgtcaaattcactgggagcctaggtatccacctggggcctgatgtccacctgggactaggtgtcaacgtgtggcctgatgtaaacctctagttcagtgttcaccttgggcctgatgtccactggrggactgatgttcccctttgatctgatgtccacctggaaaccgtgtattcacccatggcctgatggtcacctggggttgaatgtccaactgtggccagatgtgcacccggaacctgggcatccacctggggcctgatgtttagctggggcctggagttcacctgaggcatgatgtctacctgaagcttaatgttcatctgagtgctggatgttcacctggcgcctgatgtccacctggagcctgaggacccttctcaggcctgatgtccacaattggcctggt

SEQ ID NO: 942502 - DNA, 605 bp, Homo sapiens
aatgaacacctgggttgaattattcacctagaatttggtattcatttagggcttgagtgtcagccttggacctggtgtccacctgggccttgggtatcaaactagggatttggtgtccagttgagacatcatgtgcacctggggtctgagtgttcacatgaggccagatgaccactgggggcctgaatgtcaacctggtgtcaaattcactgggagcctaggtatccacctggggcctgatgtccacctgggactaggtgtcaacgtgtggcctgatgtaaacctctagttcagtgttcaccttgggcctgatgtccactggaggactgatgttyccctttgatctgatgtccacctggaaaccgtgtattcacccatggcctgatggtcacctggggttgaatgtccaactgtggccagatgtgcacccggaacctgggcatccacctggggcctgatgtttagctggggcctggagttcacctgaggcatgatgtctacctgaagcttaatgttcatctgagtgctggatgttcacctggcgcctgatgtccacctggagcctgaggacccttctcaggcctgatgtccacaattggcctggt

SEQ ID NO: 942503 - DNA, 605 bp, Homo sapiens
aatgaacacctgggttgaattattcacctagaatttggtattcatttagggcttgagtgtcagccttggacctggtgtccacctgggccttgggtatcaaactagggatttggtgtccagttgagacatcatgtgcacctggggtctgagtgttcacatgaggccagatgaccactgggggcctgaatgtcaacctggtgtcaaattcactgggagcctaggtatccacctggggcctgatgtccacctgggactaggtgtcaacgtgtggcctgatgtaaacctctagttcagtgttcaccttgggcctgatgtccactggaggactgatgttcmcctttgatctgatgtccacctggaaaccgtgtattcacccatggcctgatggtcacctggggttgaatgtccaactgtggccagatgtgcacccggaacctgggcatccacctggggcctgatgtttagctggggcctggagttcacctgaggcatgatgtctacctgaagcttaatgttcatctgagtgctggatgttcacctggcgcctgatgtccacctggagcctgaggacccttctcaggcctgatgtccacaattggcctggt

SEQ ID NO: 942504 - DNA, 602 bp, Homo sapiens
aatgaacacctgggttgaattattcacctagaatttggtattcatttagggcttgagtgtcagccttggacctggtgtccacctgggccttgggtatcaaactagggatttggtgtccagttgagacatcatgtgcacctggggtctgagtgttcacatgaggccagatgaccactgggggcctgaatgtcaacctggtgtcaaattcactggragcctaggtatccacctggggcctgatgtccacctgggactaggtgtcaacgtgtggcctgatgtaaacctctagttcagtgttcaccttgggcctgatgtccactggaggactgatgttcccctttgatctgatgtccacctggaaaccgtgtattcacccatggcctgatggtcacctggggttgaatgtccaactgtggccagatgtgcacccggaacctgggcatccacctggggcctgatgtttagctggggcctggagttcacctgaggcatgatgtctacctgaagcttaatgttcatctgagtgctggatgttcacctggcgcctgatgtccacctggagcctgaggacccttctcaggcctgatgtccacaattggcct

SEQ ID NO: 942505 - DNA, 602 bp, Homo sapiens
aatgaacacctgggttgaattattcacctagaatttggtattcatttagggcttgagtgtcagccttggacctggtgtccacctgggccttgggtatcaaactagggatttggtgtccagttgagacatcatgtgcacctggggtctgagtgttcacatgaggccagatgaccactgggggcctgaatgtcaacctggtgtcaaattcactgggagcctaggtatccacctggggcctgatgtccacctgggactaggtgtcaacgtgtggcctgatgtaaacctctagttcagtgttcaccttgggcctgatgtccactggrggactgatgttcccctttgatctgatgtccacctggaaaccgtgtattcacccatggcctgatggtcacctggggttgaatgtccaactgtggccagatgtgcacccggaacctgggcatccacctggggcctgatgtttagctggggcctggagttcacctgaggcatgatgtctacctgaagcttaatgttcatctgagtgctggatgttcacctggcgcctgatgtccacctggagcctgaggacccttctcaggcctgatgtccacaattggcct

SEQ ID NO: 942506 - DNA, 602 bp, Homo sapiens
aatgaacacctgggttgaattattcacctagaatttggtattcatttagggcttgagtgtcagccttggacctggtgtccacctgggccttgggtatcaaactagggatttggtgtccagttgagacatcatgtgcacctggggtctgagtgttcacatgaggccagatgaccactgggggcctgaatgtcaacctggtgtcaaattcactgggagcctaggtatccacctggggcctgatgtccacctgggactaggtgtcaacgtgtggcctgatgtaaacctctagttcagtgttcaccttgggcctgatgtccactggaggactgatgttyccctttgatctgatgtccacctggaaaccgtgtattcacccatggcctgatggtcacctggggttgaatgtccaactgtggccagatgtgcacccggaacctgggcatccacctggggcctgatgtttagctggggcctggagttcacctgaggcatgatgtctacctgaagcttaatgttcatctgagtgctggatgttcacctggcgcctgatgtccacctggagcctgaggacccttctcaggcctgatgtccacaattggcct

SEQ ID NO: 942507 - DNA, 602 bp, Homo sapiens
aatgaacacctgggttgaattattcacctagaatttggtattcatttagggcttgagtgtcagccttggacctggtgtccacctgggccttgggtatcaaactagggatttggtgtccagttgagacatcatgtgcacctggggtctgagtgttcacatgaggccagatgaccactgggggcctgaatgtcaacctggtgtcaaattcactgggagcctaggtatccacctggggcctgatgtccacctgggactaggtgtcaacgtgtggcctgatgtaaacctctagttcagtgttcaccttgggcctgatgtccactggaggactgatgttcmcctttgatctgatgtccacctggaaaccgtgtattcacccatggcctgatggtcacctggggttgaatgtccaactgtggccagatgtgcacccggaacctgggcatccacctggggcctgatgtttagctggggcctggagttcacctgaggcatgatgtctacctgaagcttaatgttcatctgagtgctggatgttcacctggcgcctgatgtccacctggagcctgaggacccttctcaggcctgatgtccacaattggcct

SEQ ID NO: 942508 - DNA, 471 bp, Homo sapiens
acatatgtgtgtgtgtgtgtgcgtatatatatatatatatgacataaaaataaaaagagaaataccaatgcaaaaatacaaaggccaaagagggacttttttaaatgtttttcctttccataacacaatcttcacattaattatttaaattgagttcaataaataaaccaagcttccatacaagacaagtactccttcagaattataaacactttgagtataatgtgtaattctctttcggctccaagtagtttgagacttcacaattcccaatgtgatttaaacagaacctttatatatttccctagccaggtgtactgcacatttmaaactaactcatatatgtgcatgctatatcttacctagagtctttgttcttaagaatcaatgaatgagttcatattaagtgcccattttatagttactgctgtcaaatagcattttaagtatctgttttaatatggatggttt

SEQ ID NO: 942509 - DNA, 601 bp, Homo sapiens
cagccctcagtacctgaatggcaatcgtgcatcttctcatcrgcctggaattgcttcccctttcatctttggctctgcagtattcagtgtcactagtgaaatgtgtgaaatgaatgaatcgacaactgatgcttaatacctaatgagacaagtgaatgaatccttttgttcattttatggccagaaagatagtgtaattaagtaataacaactggcaaaaaagagaaactcaacctatactttgtccttttctcaagtagcatctaaaactttttccctctgattaaaaaattatcactgaaggatctctttgaatgtgtcttgaattttatataagcagatgatcacagctcagcataatattagaagattatatgattttaaaaattggttcatagttttatagtcttggaatatctatctatctgtctgtctgtctgtctgtctgtctgtctgtctgtctatctatctaggtatctatctatctatctacctacctacctacttacctaccaatctgtcatcttcaaatatatttaggctgctttcctgaggctaattttttattccattctttcatctttttcaagatcctcgtatt

SEQ ID NO: 942510 - DNA, 599 bp, Homo sapiens
gagaactgacccaaactcaattttaggactggtcctgaaattcagaaatgcctttcccatattgcctaactgtgcctttttcactggaaagaaagtgctgccttcagggagcacgcctccgcagagatcagtaaaatcaatgagaaatgcaatgtccatttgtcagtaaagacatctgaagtttgatgggtttcttgggactggataactagttaaagattctaaagaaaaattaagtggggcatagaaaccaaaaatctcaagagatctttgaagaargaaacatgaaaaatgaggacaaatttagagaaatgttgctggcatagatgttaacttccagaagaagatggaaatagactaccatgcaaaacaaaaagacagaagagaatattagcactctgttgcaaaggagaataggtatgctctactggtaagtataatgcaaatattccaatatctgaaaaaaatcccaaatccaaaatacttctggttccctgcattttggacaagggatactcaacaggtattttaaaagatcaaaatacagatcacagaatatggatattgaagaatatgagcaaacgagagtaagaaaaaat

SEQ ID NO: 942511 - DNA, 616 bp, Homo sapiens
aagaaattcaaaacctgaaccgaccaataacaaataatgaaatcaaagccttaataaaaactaccaacaaagaaaatcctggaagcaatagcttcactgctgtattttaccaaacacatacagaataactaacaccaatcctactcaaactatcccaaaraatagaggagggaggaatatttcaatgcctgatacttaaaccaaagacaaattaaaagagaaaactacaggccaatatccctatgaaaaattgatgcaaaaatcctcaaggaaatttacaaacaaaacaaatccacaacatattgaaaattattcataatgactaagtggaatttatgccaggaatggaaggatggttcaaaatatgcaaatcaatgtgatcatcatatcaacagaatgaaggacaaaatttatataataatgtcaattgatgcggtaaagcatttgataaaattcaacattttattgtaaaaacccttcaaaaaacagggtatagaagaaacatacctcaacacagtaaaagccatataagacactcccacaagtatagtatcttactgaatggcagaaaaactgaaagcctctcctctaagctctggaacaagagatgctcatt

SEQ ID NO: 942512 - DNA, 829 bp, Homo sapiens
actgtctcttttgctatgcagaagctttttaacttagtgcaatcccaattgtccacttttgctttggttgtctgtgcttgtggggtattgcttaagaaatctttccatagtctaatagcctggagaatttccccaatgtcttcttgtagtagtttaacctaccaagattaaaccatgaagaaattcaaaacctgaaccgaccaataacaaataatgaaatcaaagccttaataaaaactaccaacaaagaaaatcctggaagcaatagcttcactgctgtattttaccaaacacatacagaataactaacaccaatcctactcaaactatcccaaagaatagaggagggaggaatatttcartgcctgatacttaaaccaaagacaaattaaaagagaaaactacaggccaatatccctatgaaaaattgatgcaaaaatcctcaaggaaatttacaaacaaaacaaatccacaacatattgaaaattattcataatgactaagtggaatttatgccaggaatggaaggatggttcaaaatatgcaaatcaatgtgatcatcatatcaacagaatgaaggacaaaatttatataataatgtcaattgatgcggtaaagcatttgataaaattcaacattttattgtaaaaacccttcaaaaaacagggtatagaagaaacatacctcaacacagtaaaagccatataagacactcccacaagtatagtatcttactgaatggcagaaaaactgaaagcctctcctctaagctctggaacaagagatgctcattttcaccactctgcctcctgagttcaagcaattctcc

SEQ ID NO: 942513 - DNA, 616 bp, Homo sapiens
aagaaattcaaaacctgaaccgaccaataacaaataatgaaatcaaagccttaataaaaactaccaacaaagaaaatcctggaagcaatagcttcactgctgtattttaccaaacacatacagaataactaacaccaatcctactcaaactatcccaaagaatagaggagggaggaatatttcaatgcctgatacttaaaccaaagacaaattaaaagagaaaactacaggccaatatccctatgaaaaattgatgcaaaaatcctcaaggaaatttacaaacaaaacaaatccacaacatattgaaaattattcataatgactaagtggaatttatgccaggaatggaaggatggttcaaaataygcaaatcaatgtgatcatcatatcaacagaatgaaggacaaaatttatataataatgtcaattgatgcggtaaagcatttgataaaattcaacattttattgtaaaaacccttcaaaaaacagggtatagaagaaacatacctcaacacagtaaaagccatataagacactcccacaagtatagtatcttactgaatggcagaaaaactgaaagcctctcctctaagctctggaacaagagatgctcatt

SEQ ID NO: 942514 - DNA, 612 bp, Homo sapiens
aagaaattcaaaacctgaaccgaccaataacaaataatgaaatcaaagccttaataaaaactaccaacaaagaaaatcctggaagcaatagcttcactgctgtattttaccaaacacatacagaataactaacaccaatcctactcaaactatcccaaaraatagaggagggaggaatatttcaatgcctgatacttaaaccaaagacaaattaaaagagaaaactacaggccaatatccctatgaaaaattgatgcaaaaatcctcaaggaaatttacaaacaaaacaaatccacaacatattgaaaattattcataatgactaagtggaatttatgccaggaatggaaggatggttcaaaatatgcaaatcaatgtgatcatcatatcaacagaatgaaggacaaaatttatataataatgtcaattgatgcggtaaagcatttgataaaattcaacattttattgtaaaaacccttcaaaaaacagggtatagaagaaacatacctcaacacagtaaaagccatataagacactcccacaagtatagtatcttactgaatggcagaaaaactgaaagcctctcctctaagctctggaacaagagatgct

SEQ ID NO: 942515 - DNA, 612 bp, Homo sapiens
aagaaattcaaaacctgaaccgaccaataacaaataatgaaatcaaagccttaataaaaactaccaacaaagaaaatcctggaagcaatagcttcactgctgtattttaccaaacacatacagaataactaacaccaatcctactcaaactatcccaaagaatagaggagggaggaatatttcaatgcctgatacttaaaccaaagacaaattaaaagagaaaactacaggccaatatccctatgaaaaattgatgcaaaaatcctcaaggaaatttacaaacaaaacaaatccacaacatattgaaaattattcataatgactaagtggaatttatgccaggaatggaaggatggttcaaaataygcaaatcaatgtgatcatcatatcaacagaatgaaggacaaaatttatataataatgtcaattgatgcggtaaagcatttgataaaattcaacattttattgtaaaaacccttcaaaaaacagggtatagaagaaacatacctcaacacagtaaaagccatataagacactcccacaagtatagtatcttactgaatggcagaaaaactgaaagcctctcctctaagctctggaacaagagatgct

SEQ ID NO: 942516 - DNA, 631 bp, Homo sapiens
atgaaaacatgcatctcaaaagaaggtttacagcaaccaacagacaagatatcattgctttacctcaggaatcatcagagaaatgcaaagctaaaggcccatgagatagtatttcacacattctgatgaatgacaattatgacacagtccacaagaatgaacaccagcaaggcagaggaggagrgatgctggtctgctcttggtggaaatgcaaactagttcggacaccatggaaagcaatgtggggatttctcaaataactttctcgacatcactaaacctcacaaaaaaatgtccatgaaaaccacactaagattccgtctcattccactcagaatgagtactaccaaaaacaaaacacaaatttttgaaggtgacatccagtgtagacttacagaaaggtaacctcttaaacactattggtgaggatgtaaattagtatacacactataaaaaacagctagaggtttctgaaaaaattcacagtacaactaccatgtcagctaacagccccaccactggttccacatttaaagcagttgaagtccctaggttgaagagagctatctgccttcccacgggtactaaagcactcttaactgtggccaaggtagagaaccaacctacctgt

SEQ ID NO: 942517 - DNA, 641 bp, Homo sapiens
aaaaaaaaaaaaacaaaacaaaacaaaacaacagaacaattgccagacaaaaactgggcaaataaccggattagatatttttctaaagaagacaggaaactgacccaatgtctacaaaaacgtggttaacattactactcaygagaaaaatgcagatcaaaaccacactcagatcttatctcactccaatagaatgaacattacaaaaagatcaaaatatttaaaaagacaattcctggtatgaatttccagaaaggggaactgtttgtggaaacataaattagtattaacactataaaaaacagttggaggtcttgcaaagaataggaaaaaaagaaataccatatcatctagcagtcccattactgggtataaattcaacctacctgttcatccacagataaagagatcaagaaactctcatatacatacactaggaaatattctccagccatcaaaataatgaagcagtgtcatttagagcaacacagatgaacctggaacacattatgttaaatgtaatgagctaggcctagaagacaaacactgcatgataccactcgtgaaatcttaagatgtttatcttaatgaagtagaaagcacaatattggttaccagagtttgggagatagagggggaat

SEQ ID NO: 942518 - DNA, 641 bp, Homo sapiens
aaaaaaaaaaaaacaaaacaaaacaaaacaacagaacaattgccagacaaaaactgggcaaataaccggattagatatttttctaaagaagacaggaaactgacccaatgtctacaaaaacgtggttaacattactactcatgagaaaaatgcagatcaaaaccacactcagatcttatctcactccaatagaatgaacattacaaaaagatcaaaatatttaaaaagacaattcctggtatgaatttccagaaaggggaactgtttgtggaaacataaattagtattaacactataaaaaacagttggaggtcttgcaaagaataggaaaaaaagaaataccatatcatctagcagtcccattactgggtataaattcaacctacctgttcatccacagataaagagatcaagaaactctcatatacatacactaggaaatattctccagccatcaaaataatgaarcagtgtcatttagagcaacacagatgaacctggaacacattatgttaaatgtaatgagctaggcctagaagacaaacactgcatgataccactcgtgaaatcttaagatgtttatcttaatgaagtagaaagcacaatattggttaccagagtttgggagatagagggggaat

SEQ ID NO: 942519 - DNA, 628 bp, Homo sapiens
aagaaactctcatatacatacactaggaaatattctccagccatcaaaataatgaagcagtgtcatttagagcaacacagatgaacctggaacacattatgttaaatgtaatgagctaggcctagaagacaaacactgcatgataccactcgtgaaatcttaagatgtttatcttaatgaagtagaaagcacaatattggttaccagagtttgggagatagagggggaatggggaaggattgattatggaaacaaagttatcttaacattaaaggaataaatctgaagttctcctcctcagcctggtgactggagtaaacaatatcatatttttctagagcaagaagggagaattttgaatgttctccccmcaaaaaaaaaaaaaaaaaaatgcctggacgagcaaatagagatcctaagtaccctgatttgatcattacccaacctatatgtatgaaaatgtacccctaattatggacctttatgttgtgaaaaaaagttaatagaaataaataggtattgctaaaaatcacagggaaccacaaaagcaatgaatatctaaaggaatcctcagaaatacaaagtgaagacccacaatcctcaatatcaaattacactgccaagttgt

SEQ ID NO: 942520 - DNA, 593 bp, Homo sapiens
tacatacactaggaaatattctccagccatcaaaataatgaagcagtgtcatttagagcaacacagatgaacctggaacacattatgttaaatgtaatgagctaggcctagaagacaaacactgcatgataccactcgtgaaatcttaagatgtttatcttaatgaagtagaaagcacaatattggttaccagagtttgggagatagagggggaatggggaaggattgattatggaaacaaagttatcttaacattaaaggaataaatctgaagttctcctcctcagcctggtgactggagtaaacaatatcatatttttctagagcaagaagggagaattttgaatgttctccccacaaaaaaaaaaaaaaaaaaatgcctggacgagcaaatakagatcctaagtaccctgatttgatcattacccaacctatatgtatgaaaatgtacccctaattatggacctttatgttgtgaaaaaaagttaatagaaataaataggtattgctaaaaatcacagggaaccacaaaagcaatgaatatctaaaggaatcctcagaaatacaaagtgaagacccacaatcctcaatat

SEQ ID NO: 942521 - DNA, 493 bp, Homo sapiens
accactcgtgaaatcttaagatgtttatcttaatgaagtagaaagcacaatattggttaccagagtttgggagatagagggggaatggggaaggattgattatggaaacaaagttatcttaacattaaaggaataaatctgaagttctcctcctcagcctggtgactggagtaaacaatatcatatttttctagagcaagaagggagaattttgaatgttctccccacaaaaaaaaaaaaaaaaaaatgcctggacgagcaaatagagatcctaagtacsctgatttgatcattacccaacctatatgtatgaaaatgtacccctaattatggacctttatgttgtgaaaaaaagttaatagaaataaataggtattgctaaaaatcacagggaaccacaaaagcaatgaatatctaaaggaatcctcagaaatacaaagtgaagacccacaatcctcaatatcaaattacactgccaagttgtagttataca

SEQ ID NO: 942522 - DNA, 781 bp, Homo sapiens
atacttgcataaactatggacaaaaacagggagaacaaaaacatgatcaacacaaatatggacacagtcaactgactttgataaagaacactgcaatgtggaaggcagagaatgagtacctttgagaaaaatgatattcagatgcagaagtgagaaataggaccttattttacacgatgtatgaaaatgaacaccccctcccccaaattgaaggcaaaacaaaagaccataaaccacaaaatgtttttaactaaaacacaggatgagcatatattttgggtcacttgaatctctgctcacctctgcaaagaggaaaataaacaaacaccctagaagaaaaacctcattaacaattaaatgctttgtcactgatatatattttcttatatgggtgacaaaaattacatgcatgaaacgcaaaaataaatatatgggactatgtcaacatgaaaagtttctgcacatcaaagaaaactactttccaaattaaaaagcatcctatagattaggcaaaaatttcaggcaatcatgtaattcacgaggagttgtcatctaacatgtacacaaaamacactacaaagtagcaaaagcatccaatctaatattttgcaaagaacctgaacggacaattctgcacagccataaaatcgaacaacaaataagagataaggtcctcaaaataaactattcattagaaaactgtaattcaaaaccacacacagataatctcacacttattgaatattcctagattttttataaaaaaaataagaggggctgg

SEQ ID NO: 942523 - DNA, 672 bp, Homo sapiens
caggacctcctgcttttcagagcctagatgtgcaggacatagatgcacctcagaggtcctgggtgtgaggtggaaggttgggggacactgggcttcctactgctgtgctcccattgccacatcttctacctggtgggaccaggcagctagcaaaggtgacagattcacccagacactgtgtcctcccacatcctgacctggcacctgagccacactgctggctctgaagttcccaggagcgtgtgtgtgctgtgaccagcggacctatggcatgtgccgtcttcctccctctgtggcatggtatcagttcctctgatggtgtcatgtgaggtctcgtcctgatgggcagaactttctataaaccgtcccgtggcccsggggaaaggcaagctcatccctgcaggtttagttgtttctgttaaatgcaaccctgttcttcccaggatgtcagggcctggtgcagttgtcccagcctggcaggcagtcgtccccttgatggttttgtggagcgcgcagcctgggcctagctcatgaccctggcaaagggcaggtgagccctggggctgaccacctgcactttctgtttggtggtgggagatgtggggcaatatttcttgcctttcctttagagatcatctcccagcctgcacagaccactagacccctaaaaat

SEQ ID NO: 942524 - DNA, 645 bp, Homo sapiens
agtgcacagtgcctgacctttcccgcagcctcctccccactggtcttccatgagaggatcaacccttggagtgtccagagattcctgttaaatgctaaagaccacaggagagtttgggagggggaagatgtttggggagcagcttagttgtcctgaggtgcccatcacccttcaccgtttcagcaatatggatcttccaaggatctgggaatgggaaccaggcataagacagatacatgtggatgagaagaggccagagtctttctctgtgtaggcaccatccagcccaagatgagcattgctccagaaacacatgcactcatgatgctaaacccaatctattgaggacttaatacaaactgcgayttttttaaagcatttaattcttaccacagtcctttgacatcttattatatccattttacagataaagaaacaggcacagagggtttaagtaacttgcacaaggtcacacaatcacaactagtaaagccagaattaaagtccagtcagtctgcattcaaagcctgtgctcctgccccaaagtgacaattagtgacttaaaggcaagaaaaacagaccctcctctacccaccatcctcatacacagccttccagcccaggatctgaaccatttattcattt

SEQ ID NO: 942525 - DNA, 647 bp, Homo sapiens
gaagtgcacagtgcctgacctttcccgcagcctcctccccactggtcttccatgagaggatcaacccttggagtgtccagagattcctgttaaatgctaaagaccacaggagagtttgggagggggaagatgtttggggagcagcttagttgtcctgaggtgcccatcacccttcaccgtttcagcaatatggatcttccaaggatctgggaatgggaaccaggcataagacagatacatgtggatgagaagaggccagagtctttctctgtgtaggcaccatccagcccaagatgagcattgctccagaaacacatgcactcatgatgctaaacccaatctattgaggacttaatacaaactgcgatttttttaaagcatttaattcttaccacagtcctttgacatcttattatatccattttacagataaagaaacaggcacagagggtttaagtaacttkcacaaggtcacacaatcacaactagtaaagccagaattaaagtccagtcagtctgcattcaaagcctgtgctcctgccccaaagtgacaattagtgacttaaaggcaagaaaaacagaccctcctctacccaccatcctcatacacagccttccagcccaggatctgaaccatttattcattt

SEQ ID NO: 942526 - DNA, 653 bp, Homo sapiens
aggtggattgcctgagctcaggagtttgacaccagcctagccaacacggtgaaaccccatctctactaaaatacaaaaaaatagccaggcatggtggggtgtgcctgtattcccagctacttgggaggctgaggcaggagaaatgcttgaatctggaaggtggaggttgtggtaagccgagattgcaccactgcaccccagcctgggcaagagtgagaccttgtctcaaaaaaaaaataattttatcaaaccattttcatctttgaaacattttaggtctcctctttggctttttcacattataaataatactgtgataaacatccttcagcagaaaccttcataggctagcttcctagaagtagaggtattaggtccaaggttgtgaattgttttaaagctattgatttttctggataaaattgcttccagatatattgtcccattgcattgcaatcagtggatctcaccttyagtattttgtgcaaaaaaaaaagaatgtttctccttttaaagattatatttaaaatagctttcaaatattaaaaatttgtatctacaaataagagacagtgaaaaaattaataaaagaaacacaaaagtagaaagtagatgaaaacattaaaattcagatcacagccctctgtcatgga

SEQ ID NO: 942527 - DNA, 703 bp, Homo sapiens
gttcttttatctatccttgatacatttttcttttaattaatttttaccccaacttttagtgctggctgagttgtcgatttgttgctgggatggaaagaagaaatttgcaccttgtcctttgcaggttatgagagccctgtctgtcctcgtggttatgtggatgtcttttagattattgtgaatattgagctttgaaaataacctaacagtcaatcaattgctgagattctattaccagtagtgggacacaatgtacatcatgtagagaggcagactcgtcgctgacaaaagggctgacccctggaaaaccagcacagagccagctcttctgtctgaatccactctctccaaaacataacataagtcatggaaagaaatgagtctcaagaaatgagactcttaccgtgatgagagggggacattgaaaagctactttagtgattagggagagaagtccccttttgcatcccaaatcaagcagaggactggtagtccaaatataattttggaataacctgagtcacctgggccttgaggaatcctggcctcttagtccayatttgcagaaatatcaggaggtcaatcaggaagctgtttaggcatctcaacacagggtcaaaaagctcctaggtacacaaataaatgtgcacactggaaattgagttcagtaatttttccatggcctagagaactatgatgatga

SEQ ID NO: 942528 - DNA, 737 bp, Homo sapiens
ccaaatcaagcagaggactggtagtccaaatataattttggaataacctgagtcacctgggccttgaggaatcctggcctcttagtccacatttgcagaaatatcaggaggtcaatcaggaagctgtttaggcatctcaacacagggtcaaaaagctcctaggtacacaaataaatgtrcacactggaaattgagttcagtaatttttccatggcctagagaactatgatgatgaaaatgttctacatttgtgctggccagttcagtagccactagccacatgtggctattgagtaactgaaatgtggctagtacaactgaccaactaaattgtaaattttgttttatttgaattaattttaattttaatagtcatctgtggctattggctactgtactgggtagcacagagatgagaaataatagaaacctttttgttcggttgtttcaagagctaacattgtcaaaagctcaattcctgttttatgtaaggttttggtttatattttctcaaagaagtgaagtgcagaaaaaagaaaacaaaacaaaaggatgatcaagcagaacttgaagggtgaagcagagatacttaactcagggtggggacaacagcaatgaccttgtttgaaatgcagctcctgtctctgtggctctctgtgctctgctggggcatcagttcctttacttcttagttaaagcagttatttcgatggtgcaacgcttttttggtgcaatga

SEQ ID NO: 942529 - DNA, 788 bp, Homo sapiens
aactcatactagcttttaaataaaaaaaattataaccttgcaaaacaagaagtgcagaggttgggcaagagccagccctggttcattcagcagctcaacaataaatccaaggacttgggtattggttcacctctccacaccaccgtcctcatgggccagcttctacctcctcctgaatactgtgtctttgcctagttttctccctgattttggctcaattgctgcttcctggaggcatcctttcctgcctctgtcttggggtcagtccgccttcacaggctcttgcagcacacctgggtctgctgcactttcccttattacataattttgtgactaatgtcagctctttctgttagattctaagctccactagggaagaarttctgtgcatttttgatcactattgaaccctggagtctaccactcaaatatttgtcaaatgagtaaatggtagctctgtgcagggccaaggaacccaagaaccacaagaaataatctgccaaaatagtcattacagctcactctcctctggtgacatttccctgaggcacattcctgttggtttcttcccctcaagaagcattcttctttctccttcctataaaagccaggtttttctcagatagccacaccatgccccatgcaaagagatttggattattataccatcttgaagcatttctgtggaaactgctatcagccaggtggcccatgacctaagttgacccaagccaactgaagggaggatgtattctatgcaccgtatggaattccacagggtgctggtt

SEQ ID NO: 942530 - DNA, 782 bp, Homo sapiens
tactagcttttaaataaaaaaatttataaccttgcaaaacaagaagtgcagaggttgggcaagagccagccctggttcattcagcagctcaacaataaatccaaggacctgggtattggttcacctctccacaccaccgtcctcatgggccagcttctacctcctcctgaatactgtgtctttgcctagttttctccctgattttggctcaattgctgcttcctggaggcatcctttcctgcctctgtcttggggtcagtccgccttcacaggctcttgcagcacacctgggtctgctgcactttcccttattacataattttgtgactaatgtcagctctttctgttagattctaagctccactagggaagaarttctgtgcatttttgatcactattgaaccctggagtctaccactcaaatatttgtcaaatgagtaaatggtagctctgtgcagggccaaggaacccaagaaccacaagaaataatctgccaaaatagtcattacagctcactctcctctggtgacatttccctgaggcacattcctgttggtttcttcccctcaagaagcattcttctttctccttcctataaaagccaggtttttctcagatagccacaccatgccccatgcaaagagatttggattattataccatcttgaagcatttctgtggaaactgctatcagccaggtggcccatgacctaagttgacccaagccgactgaagggaggatgtattctatgcaccgtatggaattccacagggtgctggtt

SEQ ID NO: 942531 - DNA, 801 bp, Homo sapiens
tattaaaccccatatcaatgtcttacttattaaaaattacacaagtaaagatcattccgttttgggctgggtttatacttttgaaaccccaatgccaaattttgacaccttatagtatttggcaggaatatgtatgaaattggttgatactaaatgtaaacaaaaatgtatgctrccaatttttaagacatttctaatatttttttaccaataattttaaagatagcttatttattaaagattttgcttaagttacataaagttgaaaaagcatttcacaagtctttcttagtatttaacttaagtggttttatttttctttaagccgattagagcttttatatatttttagtagtccaacattctgtacacaatacataaatacatctaaaaatctatcaggcatatctatggaagtactgaaaccacttttgcaaaactgcaactaaggaaattatgacagtgaaagaaatcagacctaaccgactctatcttgcttctaacccttaagctgtccttgttcattccttggtgtaagctcaactaactttgggaaggaatttagttcacggtttgactctgaaagcaaattgataacaaccctttcctgaaaagaaccccttcttgcctggggagcagtctgcctttgcaggactaacatattagctacaagattagaatgtacagtttaggggtcatgcagtctctggcttcgaaagtctgaacctccccaaactgctcctgcaggtaacatcacatcactactgtaaaacctaagatcagggcttgatacgtgttgca

SEQ ID NO: 942532 - DNA, 692 bp, Homo sapiens
atcaatgtcttacttattaaaaattacacaagtaaagatcattccgttttgggctgggtttatacttttgaaaccccaatgccaaattttgacaccttatagtatttggcaggaatatgtatgaaattggttgatactaaatgtaaacaaaaatgtatgctgccaatttttaagacatttctaatatttttttaccaataatkttaaagatagcttatttattaaagattttgcttaagttacataaagttgaaaaagcatttcacaagtctttcttagtatttaacttaagtggttttatttttctttaagccgattagagcttttatatatttttagtagtccaacattctgtacacaatacataaatacatctaaaaatctatcaggcatatctatggaagtactgaaaccacttttgcaaaactgcaactaaggaaattatgacagtgaaagaaatcagacctaaccgactctatcttgcttctaacccttaagctgtccttgttcattccttggtgtaagctcaactaactttgggaaggaatttagttcacggtttgactctgaaagcaaattgataacaaccctttcctgaaaagaaccccttcttgcctggggagcagtctgcctttgcaggactaacatattagctacaagattagaatgtacagtttaggggtcatgcagtc

SEQ ID NO: 942533 - DNA, 754 bp, Homo sapiens
atatcaatgtcttacttattaaaaattacacaagtaaagatcattccgttttgggctgggtttatacttttgaaaccccaatgccaaattttgacaccttatagtatttggcaggaatatgtatgaaattggttgatactaaatgtaaacaaaaatgtatgctgccaatttttaagacatttctaatatttttttaccaataattttaaagatagcttatttattaaagattttgcttaagttacataaagttgaaaaagcatttcacaagtctttcttagtatttaacttaagtggttttatttttctttaagccgattagagcttttayatatttttagtagtccaacattctgtacacaatacataaatacatctaaaaatctatcaggcatatctatggaagtactgaaaccacttttgcaaaactgcaactaaggaaattatgacagtgaaagaaatcagacctaaccgactctatcttgcttctaacccttaagctgtccttgttcattccttggtgtaagctcaactaactttgggaaggaatttagttcacggtttgactctgaaagcaaattgataacaaccctttcctgaaaagaaccccttcttgcctggggagcagtctgcctttgcaggactaacatattagctacaagattagaatgtacagtttaggggtcatgcagtctctggcttcgaaagtctgaacctccccaaactgctcctgcaggtaacatcacatcactac

SEQ ID NO: 942534 - DNA, 704 bp, Homo sapiens
attaaaccccatatcaatgtcttacttattaaaaattacacaagtaaagatcattccgttttgggctgggtttatacttttgaaaccccaatgccaaattttgacaccttatagtatttggcaggaatatgtatgaaattggttgatactaaatgtaaacaaaaatgtatgctgccaatttttaagacatttctaatatttttttaccaataattttaaagatagcttatttattaaagattttgcttaagttacataaagttgaaaaagcatttcacaagtctttcttagtatttaacttaagtggttttatttttctttaagccgattagagcttttatatatttttagtagtccaacattctgtacacaatacataaatacatctaaaaatctatcaggcatatctatggaagtactgaaaccacttttgcaaaactgcaactaaggaaattatgacagtgaaagaaatcagacmtaaccgactctatcttgcttctaacccttaagctgtccttgttcattccttggtgtaagctcaactaactttgggaaggaatttagttcacggtttgactctgaaagcaaattgataacaaccctttcctgaaaagaaccccttcttgcctggggagcagtctgcctttgcaggactaacatattagctacaagattagaatgtacagtttaggggtcatgcagtc

SEQ ID NO: 942535 - DNA, 734 bp, Homo sapiens
tgaaagaaatcagacctaaccgactctatcttgcttctaacccttaagctgtccttgttcattccttggtgtaagctcaactaactttgggaaggaatttagttcacggtttgactctgaaagcaaattgataacaaccctttcctgaaaagaaccccttcttgcctggggagcagtctgcctttgcaggactaacatattagctacaagattagaatgtacagtttaggggtcatgcagtctctggcttcgaaagtctgaacctccccaaactgctcctgcaggtaacatcacatcactactgtaaaacctaagatcagggcttgatacrtgttgcagaccctgcccaggccagtaatctggcccaaccagttgtgccgtcatacccatgaatagaagacagaaagataacctaacttcaaccccctatgattctatctccaacctgactaatcagcactccccacttcccaagcccctacccaccaaatatctttaaaaactctgatccccgaatgctcggggagaccgatttgagtaaaaactttggtctgccatgcagccggctctgcgtgaattactccttctccactgcacttcttctaccttgataaatcggttctgtctaggcagcgggcaaggtgaacgcattgggctgtcacggtacattttatagattgaagacctccccctttttttctctctcagactttcagattcttggtaacttgttt

SEQ ID NO: 942536 - DNA, 772 bp, Homo sapiens
cttttgcaaaactgcaactaaggaaattatgacagtgaaagaaatcagacctaaccgactctatcttgcttctaacccttaagctgtccttgttcattccttggtgtaagctcaactaactttgggaaggaatttagttcacggtttgactctgaaagcaaattgataacaaccctttcctgaaaagaaccccttcttgcctggggagcagtctgcctttgcaggactaacatattagctacaagattagaatgtacagtttaggggtcatgcagtctctggcttcgaaagtctgaacctccccaaactgctcctgcaggtaacatcacatcactactgtaaaacctaagatcagggcttgatacgtgttgcagaccctgcccaggccagtaatctggcccaaccagttgtgccgtcatacccatgaatagaagacagaaagataacctaacttcaaccccctatgattcyatctccaacctgactaatcagcactccccacttcccaagcccctacccaccaaatatctttaaaaactctgatccccgaatgctcggggagaccgatttgagtaaaaactttggtctgccatgcagccggctctgcgtgaattactccttctccactgcacttcttctaccttgataaatcggttctgtctaggcagcgggcaaggtgaacgcattgggctgtcacggtacattttatagattgaagacctccccctttttttctctctcagactttcagattcttggtaacttgtttcac

SEQ ID NO: 942537 - DNA, 678 bp, Homo sapiens
aaacagaattcagtcaactgagaaaaaaaagacaaaaaaaacataaacacagttgctcaacaacaacaaaaagacaaggtcttaggagagtaaaacaaacaaaaaaacaaaaaacatgaaggcctttcaaatacaaacatgcgcacacatgcacacacatctggatgttacccttttaattaagctgacttttacacaattgtgctcctttaaacaaaactcttttaatcttattaccatatttcagcgaggacaaaatgctgctaaactaacaatggtcacacaaattatatgatttctgagcactctgacgtgtaagcagaaattaacaccggctggttgttaaatgttaactttattctttaaaaggaatttgcaagacagaatccaaaactagtttcttacytagtgatggatctcaggctgcaaactactctctactatcctagaagcaggaaaaacacacaaacaaacaaacacacaaaacaaatttgcctaatagaagaagtgagctcaaactctataaagtagttacctgccttccaacatcatggaggtgtgaaaacttgtcttgttggacgcaagtaaaactccaaaaaaaaaaaaaaagaggagttgtacagcaaaataaactttagatcttgaccaaagttttggagatgaaggattctttggagg

SEQ ID NO: 942538 - DNA, 558 bp, Homo sapiens
ttaccaaaaggggaactctgaaaatctgaaacaggtctcagttaatttagaaagtttattttgccaaggttgaggacacactcctgacaaagcctcagaaagtcatgaaaacatgtgcccaaggtggtcagggcacagcttggttttatacattttagcgagacatgagacaacaatcaatgtatgttaagaagtacataggtttgttctggaaaggtggaacaactttaagcaaaggcaggaagactggaagcagggagggagcttcaaggtcayggataagagatacacaaataattacattatttagaggttttggttagcttctccaaaggaggcaatcagatatgcatctatctcagtgagcagaggggtggcttttaacagaatgggagacaggttggccctaagcagtttccagcctgagttttccttagtgattttgggggaccaagatactttcctttaacaacatacgagtaagcacatgtttgaaaacaaccacaaaagtcaccctgggaagggagagtctgtccaatacagtgttcagggaactgg

SEQ ID NO: 942539 - DNA, 558 bp, Homo sapiens
ttaccaaaaggggaactctgaaaatctgaaacaggtctcagttaatttagaaagtttattttgccaaggttgaggacacactcctgacaaagcctcagaaagtcatgaaaacatgtgcccaaggtggtcagggcacagcttggttttatacattttagcgagacatgagacaacaatcaatgtatgttaagaagtacataggtttgttctggaaaggtggaacaactttaagcaaaggcaggaagactggaagcagggagggagcttcaaggtcatggataagagatacacaaataattacattatttagaggttttggttagcttctccaaaggaggcaatcagatatgcatctatctcagtgagcagaggggtgrcttttaacagaatgggagacaggttggccctaagcagtttccagcctgagttttccttagtgattttgggggaccaagatactttcctttaacaacatacgagtaagcacatgtttgaaaacaaccacaaaagtcaccctgggaagggagagtctgtccaatacagtgttcagggaactgg

SEQ ID NO: 942540 - DNA, 558 bp, Homo sapiens
ttaccaaaaggggaactctgaaaatctgaaacaggtctcagttaatttagaaagtttattttgccaaggttgaggacacactcctgacaaagcctcagaaagtcatgaaaacatgtgcccaaggtggtcagggcacagcttggttttatacattttagcgagacatgagacaacaatcaatgtatgttaagaagtacataggtttgttctggaaaggtggaacaactttaagcaaaggcaggaagactggaagcagggagggagcttcaaggtcatggataagagatacacaaataattacattatttagaggttttggttagcttctccaaaggaggcaatcagatatgcatctatctcagtgagcagaggggtggcttttaayagaatgggagacaggttggccctaagcagtttccagcctgagttttccttagtgattttgggggaccaagatactttcctttaacaacatacgagtaagcacatgtttgaaaacaaccacaaaagtcaccctgggaagggagagtctgtccaatacagtgttcagggaactgg

SEQ ID NO: 942541 - DNA, 559 bp, Homo sapiens; identical to SEQ ID NO: 917313

SEQ ID NO: 942542 - DNA, 536 bp, Homo sapiens
aggctgaccaccttgtgtgacaaggttggaacccaactgccacacttccctgtgtgtctccacatgtcctcaggcctgctgggggctcccttttcctggtctttcatgcagaggaaagacgtagtgtgtgttgagagccagcctggtggtgggatgtagtgactgcccagccagtggaagctgctgctcttgcctctttggaccgtccctcccctgtccaggacctcacttcatctaaacacctcaggtcaagcccagcaggaaaatgagattctcttttcctttctttttttcttttttcttttttctttcttttttttttttctcatgtrgagtctcattctgttgtccaggctggagtgcagtggcgagatctcggctcatcgcaacccctgcctcctgggttcaagggattattctgcctcagcctcccagggagctgggattacaggcacctgccaccatgtctggctaatttttgtatttttagtagagacagggtttcaccatgttggccaggctcgtctcgaactcct

SEQ ID NO: 942543 - DNA, 795 bp, Homo sapiens
ttattaaaccccatatcaatgtcttacttattaaaaattacacaagtaaagatcattccgttttgggctgggtttatacttttgaaaccccaatgccaaattttgacaccttatagtatttggcaggaatatgtatgaaattggttgatactaaatgtaaacaaaaatgtatgctrccaatttttaagacatttctaattttttttaccaataattttaaagatagcttatttattaaagattttgcttaagttacataaagttgaaaaagcatttcacaagtctttcttagtatttaacttaagtggttttatttttctttaagccgattagagcttttatatatttttagtagtccaacattctgtacacaatacataaatacatctaaaaatctatcaggcatatctatggaagtactgaaaccacttttgcaaaactgcaactaaggaaattatgacagtgaaagaaatcagacctaaccgactctatcttgcttctaacccttaagctgtccttgttcattccttggtgtaagctcaactaactttgggaaggaatttagttcacggtttgactctgaaagcaaattgataacaaccctttcctgaaaagaaccccttcttgcctggggagcagtctgcctttgcaggactaacatattagctacaagattagaatgtacagtttaggggtcatgcagtctctggcttcgaaagtctgaacctccccaaactgctcctgcaggtaacatcacatcactactgtaaaacctaagatcagggcttgatacgt

SEQ ID NO: 942544 - DNA, 698 bp, Homo sapiens
tatcaatgtcttacttattaaaaattacacaagtaaagatcattccgttttgggctgggtttatacttttgaaaccccaatgccaaattttgacaccttatagtatttggcaggaatatgtatgaaattggttgatactaaatgtaaacaaaaatgtatgctgccaatttttaagacatttctaattttttttaccaataatkttaaagatagcttatttattaaagattttgcttaagttacataaagttgaaaaagcatttcacaagtctttcttagtatttaacttaagtggttttatttttctttaagccgattagagcttttatatatttttagtagtccaacattctgtacacaatacataaatacatctaaaaatctatcaggcatatctatggaagtactgaaaccacttttgcaaaactgcaactaaggaaattatgacagtgaaagaaatcagacctaaccgactctatcttgcttctaacccttaagctgtccttgttcattccttggtgtaagctcaactaactttgggaaggaatttagttcacggtttgactctgaaagcaaattgataacaaccctttcctgaaaagaaccccttcttgcctggggagcagtctgcctttgcaggactaacatattagctacaagattagaatgtacagtttaggggtcatgcagtctctggc

SEQ ID NO: 942545 - DNA, 748 bp, Homo sapiens
catatcaatgtcttacttattaaaaattacacaagtaaagatcattccgttttgggctgggtttatacttttgaaaccccaatgccaaattttgacaccttatagtatttggcaggaatatgtatgaaattggttgatactaaatgtaaacaaaaatgtatgctgccaatttttaagacatttctaattttttttaccaataattttaaagatagcttatttattaaagattttgcttaagttacataaagttgaaaaagcatttcacaagtctttcttagtatttaacttaagtggttttatttttctttaagccgattagagcttttayatatttttagtagtccaacattctgtacacaatacataaatacatctaaaaatctatcaggcatatctatggaagtactgaaaccacttttgcaaaactgcaactaaggaaattatgacagtgaaagaaatcagacctaaccgactctatcttgcttctaacccttaagctgtccttgttcattccttggtgtaagctcaactaactttgggaaggaatttagttcacggtttgactctgaaagcaaattgataacaaccctttcctgaaaagaaccccttcttgcctggggagcagtctgcctttgcaggactaacatattagctacaagattagaatgtacagtttaggggtcatgcagtctctggcttcgaaagtctgaacctccccaaactgctcctgcaggtaacatcacat

SEQ ID NO: 942546 - DNA, 698 bp, Homo sapiens
tattaaaccccatatcaatgtcttacttattaaaaattacacaagtaaagatcattccgttttgggctgggtttatacttttgaaaccccaatgccaaattttgacaccttatagtatttggcaggaatatgtatgaaattggttgatactaaatgtaaacaaaaatgtatgctgccaatttttaagacatttctaattttttttaccaataattttaaagatagcttatttattaaagattttgcttaagttacataaagttgaaaaagcatttcacaagtctttcttagtatttaacttaagtggttttatttttctttaagccgattagagcttttatatatttttagtagtccaacattctgtacacaatacataaatacatctaaaaatctatcaggcatatctatggaagtactgaaaccacttttgcaaaactgcaactaaggaaattatgacagtgaaagaaatcagacmtaaccgactctatcttgcttctaacccttaagctgtccttgttcattccttggtgtaagctcaactaactttgggaaggaatttagttcacggtttgactctgaaagcaaattgataacaaccctttcctgaaaagaaccccttcttgcctggggagcagtctgcctttgcaggactaacatattagctacaagattagaatgtacagtttaggggtcat

SEQ ID NO: 942547 - DNA, 728 bp, Homo sapiens
aaatcagacctaaccgactctatcttgcttctaacccttaagctgtccttgttcattccttggtgtaagctcaactaactttgggaaggaatttagttcacggtttgactctgaaagcaaattgataacaaccctttcctgaaaagaaccccttcttgcctggggagcagtctgcctttgcaggactaacatattagctacaagattagaatgtacagtttaggggtcatgcagtctctggcttcgaaagtctgaacctccccaaactgctcctgcaggtaacatcacatcactactgtaaaacctaagatcagggcttgatacrtgttgcagaccctgcccaggccagtaatctggcccaaccagttgtgccgtcatacccatgaatagaagacagaaagataacctaacttcaaccccctatgattctatctccaacctgactaatcagcactccccacttcccaagcccctacccaccaaatatctttaaaaactctgatccccgaatgctcggggagaccgatttgagtaaaaactttggtctgccatgcagccggctctgcgtgaattactccttctccactgcacttcttctaccttgataaatcggttctgtctaggcagcgggcaaggtgaacgcattgggctgtcacggtacattttatagattgaagacctccccctttttttctctctcagactttcagattcttggtaacttgttt

SEQ ID NO: 942548 - DNA, 785 bp, Homo sapiens
atggaagtactgaaaccacttttgcaaaactgcaactaaggaaattatgacagtgaaagaaatcagacctaaccgactctatcttgcttctaacccttaagctgtccttgttcattccttggtgtaagctcaactaactttgggaaggaatttagttcacggtttgactctgaaagcaaattgataacaaccctttcctgaaaagaaccccttcttgcctggggagcagtctgcctttgcaggactaacatattagctacaagattagaatgtacagtttaggggtcatgcagtctctggcttcgaaagtctgaacctccccaaactgctcctgcaggtaacatcacatcactactgtaaaacctaagatcagggcttgatacgtgttgcagaccctgcccaggccagtaatctggcccaaccagttgtgccgtcatacccatgaatagaagacagaaagataacctaacttcaaccccctatgattcyatctccaacctgactaatcagcactccccacttcccaagcccctacccaccaaatatctttaaaaactctgatccccgaatgctcggggagaccgatttgagtaaaaactttggtctgccatgcagccggctctgcgtgaattactccttctccactgcacttcttctaccttgataaatcggttctgtctaggcagcgggcaaggtgaacgcattgggctgtcacggtacattttatagattgaagacctccccctttttttctctctcagactttcagattcttggtaacttgt

SEQ ID NO: 942549 - DNA, 589 bp, Homo sapiens
gttaccaaaaggggaactctgaaaatctgaaacaggtctcagttaatttagaaagtttattttgccaaggttgaggacacactcctgacaaagcctcagaaagtcatgaaaacatgtgcccaaggtggtcagggcacagcttggttttatacattttagcgagacatgagacaacaatcaatgtatgttaagaagtacataggtttgttctggaaaggtggaacaactttaagcaaaggcaggaagactggaagcagggagggagcttcaaggtcayggataagagatacacaaataattacattatttagaggttttggttagcttctccaaaggaggcaatcagatatgcatctatctcagtgagcagaggggtggcttttaacagaatgggagacaggttggccctaagcagtttccagcctgagttttccttagtgattttgggggaccaagatactttcctttaacaacatacgagtaagcacatgtttgaaaacaaccacaaaagtcaccctgggaagggagagtctgtccaatacagtgttcagggaactggatatccctaagcaaaataacatagggtcct

SEQ ID NO: 942550 - DNA, 589 bp, Homo sapiens
gttaccaaaaggggaactctgaaaatctgaaacaggtctcagttaatttagaaagtttattttgccaaggttgaggacacactcctgacaaagcctcagaaagtcatgaaaacatgtgcccaaggtggtcagggcacagcttggttttatacattttagcgagacatgagacaacaatcaatgtatgttaagaagtacataggtttgttctggaaaggtggaacaactttaagcaaaggcaggaagactggaagcagggagggagcttcaaggtcatggataagagatacacaaataattacattatttagaggttttggttagcttctccaaaggaggcaatcagatatgcatctatctcagtgagcagaggggtgrcttttaacagaatgggagacaggttggccctaagcagtttccagcctgagttttccttagtgattttgggggaccaagatactttcctttaacaacatacgagtaagcacatgtttgaaaacaaccacaaaagtcaccctgggaagggagagtctgtccaatacagtgttcagggaactggatatccctaagcaaaataacatagggtcct

SEQ ID NO: 942551 - DNA, 589 bp, Homo sapiens
gttaccaaaaggggaactctgaaaatctgaaacaggtctcagttaatttagaaagtttattttgccaaggttgaggacacactcctgacaaagcctcagaaagtcatgaaaacatgtgcccaaggtggtcagggcacagcttggttttatacattttagcgagacatgagacaacaatcaatgtatgttaagaagtacataggtttgttctggaaaggtggaacaactttaagcaaaggcaggaagactggaagcagggagggagcttcaaggtcatggataagagatacacaaataattacattatttagaggttttggttagcttctccaaaggaggcaatcagatatgcatctatctcagtgagcagaggggtggcttttaayagaatgggagacaggttggccctaagcagtttccagcctgagttttccttagtgattttgggggaccaagatactttcctttaacaacatacgagtaagcacatgtttgaaaacaaccacaaaagtcaccctgggaagggagagtctgtccaatacagtgttcagggaactggatatccctaagcaaaataacatagggtcct

SEQ ID NO: 942552 - DNA, 558 bp, Homo sapiens
tcagtggaagatgggaaacttgtctaattaggtcattcatatagccttaagaccaagaagtccaaaggactggagcattagggaatcaagaaagtaagaaaattgtgtcgaacctccccgccccgccctttaacaattctaagtaaccccttctcaccttcccatgaaaggcctctctccagctcttatctcagttgctatttctaaattgcctaagataattttaattttcttttttttttttggattttagcattctaatttttttttattattatactttaagttttagggtacatgtgcacaatgtgcaggtttgttacatatgtatacatgtgccatgttggtgtgctgcatccattaactcgtcatttarcattaggtgcatctcctaatgctatccctccccgctgcctccaccccacaacaggccccggtgtgtgatgttccccttcctgtgtccatgtgttctcattgttcaattcccacctatgagtgagaacatgcagtgtttggttattttgtccttgtgatagtttgctgagaatgatggtttcc

SEQ ID NO: 942553 - DNA, 773 bp, Homo sapiens
ggttctggaactggctacactctttgactgtctcttggttttgtgttcagctcctcctcatgattttcatctttctgtatcctttcagcttttgccccagatagtagtcccttcattatctcagtacttgcatgtctaaaattccagaaagaaaatatgattcagctaaaaaatatctctgcttggcaggacctttaatgttaggtgctggccagccagttgatttctggtgtccctatgtccagtatgtgcctcagcctgcygagtagctgggattacagccaccaccacacccagctaattttttgtaatttttagcagagacaggttttcaccatgttgcttagactggtcttgaactcctgacctcaggtgatccgctcacctcagcctcccaaagtgcttggattataggcgtgagccacagggcccagcccacctgaggcttctttttccttcccaagccacatcaccatcctggtggaactctcctgtgaggacagccaaggcctgaactacctgcggtggggagcacctcagggtttgcccaggcaaccagccagccctggtccaaggcatcctggagcgagttgtggatggccccgtgccccaccagacagtgcgcctggaggacctggatgagagcggtgagccccaggctggggagccagtgctgcctggcatcctccgggcatcctacctggctgaggggctgggcctgggcctgccggtgacagccatccctgtccttcctgctgagggggcaggctgtc

SEQ ID NO: 942554 - DNA, 559 bp, Homo sapiens
actgggcgtagtggcatgcctgtaatcctagctactcgggaggctgaggcaggagaatcaccggaatctgggaggcggaggtgcagtgagttgagatcacaccactgcactccagcttgggggacagagtgagactttgtctyaaaaacaaaacaaaaaaaaaagtgcaaggtgaagcagcaagtgctgatgtagaagttgcaacaagttatccagaagatctagctaagatcattgataaaggtggctccactaagcaacagatgttcaatgtagaagaaacagctttttggtggaagaagatgccatttaggacatccctcctagagagaagtcactgcctggcttcagagcttcgaaggacagctgactcttctcaggggctaacacagctggtgactttaaattaaagctgttgtttgtttatcatcccagaaatgctagagcccttaagaattacgttcagtctactctgcttgtgctctgtcaatttaacaacaaagcctggaagacatctgtttacagtgtgttttgctgaatattttaagcccactgtgga

SEQ ID NO: 942555 - DNA, 644 bp, Homo sapiens
agtaaatggaaagccttgtggaaaggagtcaccattctagattccattaagaacattgatgagtgccaggcacggtggctcatgcctgtaatcccagcactttgggaggccgaggtgggcggatcacctgaggtcgggagttcgagaccagcctggccatcatggagaaaacgccatctctactaaaaatacaaaattagcccggtgtggtggcacgtgcctgtaatcccagctacttgggaggctaaggcaggagaatagcttgaacctgggaggcggaggttgcagtgagccgagatggcgtcattgcactccagcctaggcaacaaaagcaaaactctgtctcaaaacaaatacatatatggaagcaaactaagtgwctatagatggatgaatggatgaataaaatgtggtatatatatgcagtggaatgctattcaaccttcaaaagaaggaaatcctgccgtttatgacaatgtggatgaacctggaggacatatgctaagtgaaataaatcagacacagaaagacaaatatcatgtgatctcacttctctgtggaacctgaaaaagtagaattcacagaaacagagtggaagggtggttaccagagggcagggagcgggggaaatgggaagttgttcg

SEQ ID NO: 942556 - DNA, 572 bp, Homo sapiens
attcagtaaatggatgctcttccacatggtaatcttgattggtcaatttctgtactatataaggttttgggaagcagagatggacaatgataagagagagtagacgaaaggaagatgaggttatagggagaatgtgggaaaggaaagaaggggatatcttcatagagcaggaagcaaaattggaagtcaaagtgtccagtggcagtggtgaaaagtgttgaccaacctcgatttggtgaaggtggcgtcacatcaatttaaacttttcatggggaagcagggtatttctcaacctaatgcttatggrgaattggcctctgtatttccctccagactttcacggactactcagcctagcccaaacatgagccagatgccgaatggactgccaatgtgaaaattattcgatttgattaagaaacaatttaatcttattctggtttgtatttaaagcctgctaatatcaaagtacacagaattttcatttttgtatcagcaacttagatgccatttagaagctgtgccaccctgaaattaaaagcacaagtgctagagtcagctttcaccattcc

SEQ ID NO: 942557 - DNA, 765 bp, Homo sapiens
aacagatgatgaaattagtattggtcagtcactaaaataatttgcaagactactcattgcagtagaagaaaagcgaagactgacccaaaacgctaatgatgtattaattgcaccacttgagaaacttcaaaaagaacagataggtgcagcaaaaggtggaaagaagtttgacaaagagagtgaaaaatatttctctatccttgaaaagcatttaaatttatctgcaaagaaaaaggagtctcatttgcaagaggcagatacacaaattgattgagcacatcagaacttctatgaagcatcatcagaatgtctttaaatggctcacgcctgtaatcccagcacttcgggaggctgaggcgggtggatcacctgaggtcaggagttsgagaccagcctgaccaacatggagaaatcccgtctctactaaaaatacaaaattactgggcctggtggcacatgcctgtaaagccagctactcgggaggctgaggcaggagaatcgcttggatccaggaggcagaggttgcagtgagccgagactgcaccattgcactccagcctgggcaacaagagcaaaactccgtctcaaaataaataaataaacaaataaataaaaataaaagaaaaaagaatatgtctttaaaattcaagaggttcaagaaaaacagaagtttgaatttgttgaactgcttttgtcatttcttcaggatttatttacttttttaccccgagggatatgaacttgcccaggaatttgcaccaaata

SEQ ID NO: 942558 - DNA, 632 bp, Homo sapiens
tcctgatttcctttctttcgtatatatacctaccaatggcattgctgggtcatatggtagctctatttttgtttttgttttttttctgagaaacctccaaactgttctccatagtaattgtactaatttacattcccaccaatagtgggttcccttttctccacatcctagccagtatttcttactgcctgtcttttggatataagccatcttaactagggttagatgattcgtcttgtagttttggtttgcatttctctgatgagcaatgatgttgagcactttttcacatgcctgtttgccatttatatgtcttcttttgagcaagatcttttgcccatttttaaattggatgatcagattttttctatagagttgtttgagctccttatatattctrgttgttaatcccttgtcagatggatagtttacaaatattttctcctattttatgattgtcttttcaacatcaattgaaatgatcctgtggtttttgtttttaactttatgtgatgaatcacatttattgatttgcatatgttgaatcatcctagcatttctagaataaaactcaattgatcatggtgaattaaatttttaatgtgctgttggatttatccaacacaatatat

SEQ ID NO: 942559 - DNA, 679 bp, Homo sapiens
ggataattggcgagccacatgtaggggaataaaactggattctcatctctcaccttatacaaaaatctactcaagatggattaagaacttaaacctaattcctgaactataagaattctagaagataacactggataaacccttctagacattggcataggcaaggatttcatgaccaagaaaccaaatgaaaatgcaataaaaacaaagataaatagctggggcttaattaaactaaaaagcttttgcatggcaaagggaacagtcagcagagtaaatagacaacccacagattgggactgctaaccctgactctgacccctgaccctgaccctgaccctgaccctgacccakaacccctgaccctgacccctaacccctgaccataacccctaacccctaaccctaacccttaacccttaaccctaacccctaaccctaaccctaaccctaaaacctaaccccaaccctcatcctcaccctaacccaagcccaacccctaatccctaacccctaacctctcaaccccaactgtaaatgttgactcctaacccctaactctgaccccaacccctatctccaacccctaaccctaaacttaacccctaacccctaaccctaacaccaaccttaaccctaggttccttactacgtttgtattgactaagtgaatgttgat

SEQ ID NO: 942560 - DNA, 632 bp, Homo sapiens
tcctgatttcctttctttcgtatatatacctaccaatggcattgctgggtcatatggtagctctatttttgtttttgttttttttctgagaaacctccaaactgttctccatagtaattgtactaatttacattcccaccaatagtgggttcccttttctccacatcctagccagtatttcttactgcctgtcttttggatataagccatcttaactagggttagatgattcgtcttgtagttttggtttgcmtttctctgatgagcaatgatgttgagcactttttcacatgcctgtttgccatttatatgtcttcttttgagcaagatcttttgcccatttttaaattggatgatcagattttttctatagagttgtttgagctccttatatattctagttgttaatcccttgtcagatggatagtttacaaatattttctcctattttatgattgtcttttcaacatcaattgaaatgatcctgtggtttttgtttttaactttatgtgatgaatcacatttattgatttgcatatgttgaatcatcctagcatttctagaataaaactcaattgatcatggtgaattaaatttttaatgtgctgttggatttatccaacacaatatat

SEQ ID NO: 942561 - DNA, 632 bp, Homo sapiens
tcctgatttcctttctttcgtatatatacctaccaatggcattgctgggtcatatggtagctctatttttgtttttgttttttttctgagaaacctccaaactgttctccatagtaattgtactaatttacattcccaccaatagtgggttcccttttctccacatcctagccagtatttcttactgcctgtcttttggatataagccatcttaactagggttagatgattcgtcttgtagttttggtttgcatttctctgatgagcaatgatgttgagcactttttcacatgcctgtttgccatttatatgtcttcttttgagcaagatcttttgcccatttttaaattggatgatcagattttttctrtagagttgtttgagctccttatatattctagttgttaatcccttgtcagatggatagtttacaaatattttctcctattttatgattgtcttttcaacatcaattgaaatgatcctgtggtttttgtttttaactttatgtgatgaatcacatttattgatttgcatatgttgaatcatcctagcatttctagaataaaactcaattgatcatggtgaattaaatttttaatgtgctgttggatttatccaacacaatatat

SEQ ID NO: 942562 - DNA, 733 bp, Homo sapiens
tttggaatcctttgtgaggataaacaaacaaagccagcagcagtgttctggaatcgtttgtgagggaaaaacattcagatccccgtagtagtgttctggaatcctatgtgagggacaaactctcaaaacccagcaacagtgttctggaatcctatrtgaggaataaaagcacagaacacagcagcagtgttcttcaatcctatgtgagtgacaaatattcaaaacttaatagcagtgttctggaatcttatgtaaaagacaagcactcaaagcacagccactgtgttctggaatcttatctgagggacaaacattcagacactcgtcgaagtgttctggaatcctatgtgagggacaaacattctgaatccagcagcaatgctctgagtcctttttgagggacaaacaaacagaacccaagagcagtgttctggaatcctttctgagagaaaaacataaagaccctcgtaacagtgttatcgaatcctttttgagggacagacactcagaacccagaggcagtgttttggaatgccgtgtgagtgacaaagattcataacttcgtagcagtgttcacgaatccaatgtgagagacaaacactcaaaacccagcagcagtgcccaggaatcatttgggagggacaaacattcagaacccagcagccatgttctggaatcctatgtgaggggcaaacactcagatccctgcagccgtgttctggatcctatgtga

SEQ ID NO: 942563 - DNA, 718 bp, Homo sapiens
ggaatcctttgtgaggataaacaaacaaagccagcagcagtgttctggaatcgtttgtgagggaaaaacattcagatccccgtagtagtgttctggaatcctatgtgagggacaaactctcaaaacccagcaacagtgttctggaatcctatgtgaggaataaaagcacagaacacagcagcagtgttcttcaatcctatgtgagtgacaaatattcaaaacttaatagcagtgttctggaatcttatgtaaaagacaagcactcaaagcacagccactgtgttctggaatcttatctgagggacaaacattcagacactcgtcgaagtgttctggaatcctatgtgagggacaaacattctgaatccagcagcaatgctctgagtcctttttgagggacaaacaaacagaacccaagagcmgtgttctggaatcctttctgagagaaaaacataaagaccctcgtaacagtgttatcgaatcctttttgagggacagacactcagaacccagaggcagtgttttggaatgccgtgtgagtgacaaagattcataacttcgtagcagtgttcacgaatccaatgtgagagacaaacactcaaaacccagcagcagtgcccaggaatcatttgggagggacaaacattcagaacccagcagccatgttctggaatcctatgtgaggggcaaacactcagatccctgcagccgtgttctg

SEQ ID NO: 942564 - DNA, 793 bp, Homo sapiens
ttcttgaattccttgtgagggacaaactttcagaacctcgaagcagtgttctggagtcccacgtgagggacaaacactcagatcccagtagcagtgttctggaatcctttggaatggacaaacattcagatgctcgtagcattgttctggaatcctacgtgagggacaaacactgagttcctagccactgtgttctggaatcctatttaattgacaaacgttcagacactctcaraagctttctgtaatcctatctgagggacaaacactcagaaaccagcagcagttctctggaatcctttgtgagggacactcagaaaccagcggcagttctctggaatcctttgtgagggacaaacactcagaaaccagcggcagttctctggaatcctttgtgagggacaaacactcagaaccccacagaagtgttctggaatcctttgtgatgggcaaacattcagaacctcgtagcagtgttctggaatcctatgtgaggaacaaacactcagaacccagcagcaatcttctggaatacaatgtgagggacaaacgctcagaacccagcagcagtgttttggaatccggtatgatcgacatagactcagaacttcttagcattgttctggaatcccatgtgaggatcaaacactcagaacccagcagcagtgttctgaaatcctatgtgagggagaaacactcagaacccagtagcagtgttctggaatcctatgtgagtgacaaaccctcagaaaccagcagcagtgctctagaatcctctgtgtgggacaaatat

SEQ ID NO: 942565 - DNA, 810 bp, Homo sapiens
ctgtaatcccatgtgagggacaaacactcagaacccagcagcagtgttttggaatcctgagtgagcgacaaagaatccgaacttcgtagcagtgttcacgaaacgcatgtgggggacaaacgctcagaacccagcagcagtgttctgcaatcctgtgggagggacaaatactcagaacccagcagcagtgttatgggatcgtatgcragagacaaacactccgaacccaggagcagtgtcctggaatcctatgtgagcacgaacactcagaacccaacagcagggatctcgaattctgggtgcaggacaaacactcagaacccagcagcagtgttctggaatcctatgtgagggacaaacactcagaagtctgcacagttttctggaatcctatctgagtgacaaacattcagagactcgtagaagtgttgtagaatcctttttgagggacaaacagaaacagcagcagtgttctggaatcctttgtgagagaaaaacattcagaccctcgcaacagtgctctggaatcctatgtgatggacaaatactcacaacccagcagcagtgttctggaatccaatgtgagagacaaacactcagaacccagcagcagtgttctagaattttttgtgagggataaacattcagacaatcgaagcagggttctggaatcctatgtgagggacaaccactcagaaaccagcagaagtgctctgtaatcctttgtaagggacaaacaaacagaacgcagcagcagtgttctggaatcctatgccagggacaaacactcagaaaccagcagtagtgttc

SEQ ID NO: 942566 - DNA, 775 bp, Homo sapiens
ctgtaatcccatgtgagggacaaacactcagaacccagcagcagtgttttggaatcctgagtgagcgacaaagaatccgaacttcgtagcagtgttcacgaaacgcatgtgggggacaaacgctcagaacccagcagcagtgttctgcaatcctgtgggagggacaaatactcagaacccagcagcagtgttatgggatcgtatgcgagagacaaacactccgaacccaggagcagtgtcctggaatcctatgtgagcacgaacactcagaacccaacagcagggatctcgaattctgggtgcaggacaaacactcagaacccagcagcagtgttctggaatcctatgtgagggacaaacactcagaagtctgcacagttttctggaatcctatctgagtgacaaacattcagagactcgtagaagtgttgtagaatcctttttgagggacaaacagaaacagcagcagtgttctggaatcctttgtgagagaaaaacattcagaccctcgcaacagtgctctggaatcctatgtgatggrcaaatactcacaacccagcagcagtgttctggaatccaatgtgagagacaaacactcagaacccagcagcagtgttctagaattttttgtgagggataaacattcagacaatcgaagcagggttctggaatcctatgtgagggacaaccactcagaaaccagcagaagtgctctgtaatcctttgtaagggacaaacaaacagaacgcagcagcagtgttctggaatcctatgc

SEQ ID NO: 942567 - DNA, 615 bp, Homo sapiens
tcctttgtgagggaaaaatattcagaacctcgtagcagtgttttggaatcctacgtgagtgacaaacactcagaagcctgcaacagcgttctagaatcttttgtgagggacaaacactcagaacctcatagcagtgttctgtaatcctatgtgagggacaaacactcaaaatccagccactgtgtactggaatcctgtgtgagatcaaacattcagaagctygtagaattgttctgcaatgctatgtgagggccaaacactaagaaatctgctgcagtgctctggaatcctttgttagggaaaaacaaacagaacccagtagcagtgctctacagtcttttgtgagggaaaaacattcagaccctagtagcagtgttctggaatcctatgtgagggaaaaacattcagaccctcgtagcagtgtcctagaatcctatatgagggacaaacactcagaacccagcagcagtattctgaaatcctttgggagggaaaaacattcacaccatcgtaacagtgttttggaatcctacgtgagagaaaaatattcagactatcgtagcgttgtgctgaaatccagtataaggaataaacactcagaacccagtagcagtg

SEQ ID NO: 942568 - DNA, 597 bp, Homo sapiens
gttctgtaatcctatgtgagggacaaacactcaaaatccagccactgtgtactggaatcctgtgtgagatcaaacattcagaagctcgtagaattgttctgcaatgctatgtgagggccaaacactaagaaatctgctgcagtgctctggaatcctttgttagggaaaaacaaacagaacccagtagcagtgctctacagtcttttgtgagggaaaaacattcagaccctagtagcagtgttctggaatcctatgtgagggaaaaacattcagaccctcgtagcagtgtcctagaatcctatatgagggacaaacactcagaacccagcagcagtattctgaaatcctttgggagggaaaaacattcacaccatcgtaacagtgttttggaatcctacgtgagagaaaaatattcagactatcgtagcgttgtkctgaaatccagtataaggaataaacactcagaacccagtagcagtgttctggaaccctttgtgatggataaacattctgaccctcgtagtagtgttctggaatcctacgtgagggacaaacactcagaacccagcagcactgttctggaatgctatgtgaggg

SEQ ID NO: 942569 - DNA, 556 bp, Homo sapiens
cagcagagttctgttatcctatatgagacaaacactcggaacccagcagaactgttatggaatcctatgtgagggacaaacactcacaaacaagcagctttttactggaatcctatgtgagggagaaatcttcagaacctagcagcagtgttctggaatcgtatgtgtgggactgacactcagaacccagcagcatgttgaggaatgctatgtgagggagaaacacacaaaacccaccagcagtgttctggtttaatatatgcgggacaaacacacagaacccagcagaagygttctgtaatcccatgtgagagacaaacactcacaaaccagcagcaatgttttggaatcctttgtgagggacaaacattcaaaacctcgtagaagtgctctgcaatcctatgtgagggacaacactctgaacccagcagcaatgttttcgaatcccatgaaagggacaaacactcagaactcggcagcatttttctggaatcctatgtgagtgacaaactctcagaacacagcagcggtgttctagaatcctttgtgggggaca

SEQ ID NO: 942570 - DNA, 615 bp, Homo sapiens
gttctggaatcctttgtgatggacatacattcagaccctcgtaggagtgttctggaatcctacgtaagggacaaacactcagaactcagtattagtgttcttgaaagctaagtgaggtacaaacactcagaaaccagcagcagtgttctggaatccttggtgagggactaacactcagaacccaacagcagtgttctggaattatatgtgaaacaaagactcagaactcagaagcagtgttctggaatcgtatgtgaggaacaagcaatcagaacccagcagcagcattatggaatcctatgtgagggacaaacactcaaacccagccactgtgttctggaaacctatctgagtgacaaacattcagacactcgtggaagtgttctggaatcctacgtgagagacgctcagaaaccarcataggtgttctggaatcctttttgtgggagaaacaaacagaacccagcagcagtcttctggaatcctatgtgagggaaaaatatttagaaccccgtagcagtgttctggaattctatgtgagggacaaacacacaggacccagcagcagtgttctggaaccttatgtgatggacaaacactgagaacacaacagca

SEQ ID NO: 942571 - DNA, 642 bp, Homo sapiens
gagggacaaacactcagtacccaaccactgtgttctggaatcctatatgagggacaaacattcagacaatcgtagaagtgttctggaatcctatgtgagggacaacactcagaaaccaccagcagtgctctggaatcttttgtgagggacaaaaatctgaacccagcagcactgttctctaatcctttttagggacaaacgttcagaacctcgtaggagtgttcttgaatcctaagtgagggataaaagcccagaacgcagcagcagtgttctggaatcctgcgtgagtgacaaacactccgaaccccgcaggaatgttcttgaatcctttgtgagggacaaacattcaaaccctcgaagcwgtgttctggaatcctatgtgaggtacaaacagtcataacccagcagaaatcttctggaatcctttgttatggacaaacattcaggcccttgtagcagtgttacggaatcctaatggaggcacaaacactcagaacccagcagcagtgttctggaatcttatgtgagggacaaacactcacaatccagcagaagtgttctggaatcctatctgagggacatacactcagaacccagtagcagtgttctggaattctatgtgatgaacacacactcagaaac

SEQ ID NO: 942572 - DNA, 589 bp, Homo sapiens
agaacaaacactcacaacccagcagccgtgttcttcaatcctgtttgagggacaaacactcagaacccactcactgtgtacaggaatcctatctgtgggcctaacattcagaccctcgtagcagtgttctggaatcctatgtgagggagaaactctaaaaaaccaacagcagtgctctggaatcctttatgagggaaaaacattcagacctttctagcagtgttctggaatcctatgtgagggaaatattttcagagcctcgtagcagtgttctgtaatcatatatgagtgacaaacactcagaaaccagcagcagtgttctggaatcccttgagagggaaaaacatttacaycttcataacagtgttctggaatccttactgtgggaaaaatattcagaccctcgtaacagtgttctggaatcctatatgagggacaaacactcaaaaaccagcagcagtgttctggaatcctatgtgagggaaaaacactcagaacccaactgcagtgttctggagtcctgtgggagtgacaaactttcagaaattcgtagcagtattctggaatcttatgtgagggacaaacacac

SEQ ID NO: 942573 - DNA, 589 bp, Homo sapiens
agaacaaacactcacaacccagcagccgtgttcttcaatcctgtttgagggacaaacactcagaacccactcactgtgtacaggaatcctatctgtgggcctaacattcagaccctcgtagcagtgttctggaatcctatgtgagggagaaactctaaaaaaccaacagcagtgctctggaatcctttatgagggaaaaacattcagacctttctagcagtgttctggaatcctatgtgagggaaatattttcagagcctcgtagcagtgttctgtaatcatatatgagtgacaaacactcagaaaccagcagcagtgttctggaatcccttgagagggaaaaacatttacaccttcataacagtgttctggaatccttactgtgggaaaaatattcagaccctcgtaacartgttctggaatcctatatgagggacaaacactcaaaaaccagcagcagtgttctggaatcctatgtgagggaaaaacactcagaacccaactgcagtgttctggagtcctgtgggagtgacaaactttcagaaattcgtagcagtattctggaatcttatgtgagggacaaacacac

SEQ ID NO: 942574 - DNA, 622 bp, Homo sapiens
tcctttgtgagggaaaaatattcagaacctcgtagcagtgttttggaatcctacgtgagtgacaaacactcagaagcctgcaacagcgttctagaatcttttgtgagggacaaacactcagaacctcatagcagtgttctgtaatcctatgtgagggacaaacactcaaaatccagccactgtgtactggaatcctgtgtgagatcaaacattcagaagctygtagaattgttctgcaatgctatgtgagggccaaacactaagaaatctgctgcagtgctctggaatcctttgttagggaaaaacaaacagaacccagtagcagtgctctacagtcttttgtgagggaaaaacattcagaccctagtagcagtgttctggaatcctatgtgagggaaaaacattcagaccctcgtagcagtgtcctagaatcctatatgagggacaaacactcagaacccagcagcagtattctgaaatcctttgggagggaaaaacattcacaccatcgtaacagtgttttggaatcctacgtgagagaaaaatattcagactatcgtagcgttgtgctgaaatccagtataaggaataaacactcagaacccagtagcagtgttctgga

SEQ ID NO: 942575 - DNA, 602 bp, Homo sapiens
gcagtgttctgtaatcctatgtgagggacaaacactcaaaatccagccactgtgtactggaatcctgtgtgagatcaaacattcagaagctcgtagaattgttctgcaatgctatgtgagggccaaacactaagaaatctgctgcagtgctctggaatcctttgttagggaaaaacaaacagaacccagtagcagtgctctacagtcttttgtgagggaaaaacattcagaccctagtagcagtgttctggaatcctatgtgagggaaaaacattcagaccctcgtagcagtgtcctagaatcctatatgagggacaaacactcagaacccagcagcagtattctgaaatcctttgggagggaaaaacattcacaccatcgtaacagtgttttggaatcctacgtgagagaaaaatattcagactatcgtagcgttgtkctgaaatccagtataaggaataaacactcagaacccagtagcagtgttctggaaccctttgtgatggataaacattctgaccctcgtagtagtgttctggaatcctacgtgagggacaaacactcagaacccagcagcactgttctggaatgctatgtgaggg

SEQ ID NO: 942576 - DNA, 563 bp, Homo sapiens
cagcagagttctgttatcctatatgagacaaacactcggaacccagcagaactgttatggaatcctatgtgagggacaaacactcacaaacaagcagctttttactggaatcctatgtgagggagaaatcttcagaacctagcagcagtgttctggaatcgtatgtgtgggactgacactcagaacccagcagcatgttgaggaatgctatgtgagggagaaacacacaaaacccaccagcagtgttctggtttaatatatgcgggacaaacacacagaacccagcagaagygttctgtaatcccatgtgagagacaaacactcacaaaccagcagcaatgttttggaatcctttgtgagggacaaacattcaaaacctcgtagaagtgctctgcaatcctatgtgagggacaacactctgaacccagcagcaatgttttcgaatcccatgaaagggacaaacactcagaactcggcagcatttttctggaatcctatgtgagtgacaaactctcagaacacagcagcggtgttctagaatcctttgtgggggacaaacattc

SEQ ID NO: 942577 - DNA, 595 bp, Homo sapiens
ttgtccttcaaataggaatcgagaacactgctgctgtgttccgagtgtttgtaattcatgtagatttgcagaattctactgagttctatgggtttgtacctcacataggactccagaacactgctatgaggctctgaatgtttgtccttcacatagcgttccagaacagtgctatgagggtctgaatgcttgtccctctcataggattccagagcactgctggggggttttgagtgtttgtccctcacrtatgattccagaacaatgctgcgaagttctgaatgtttgtccctcacaaaggatttcagaacactgctgctgggttctgagtgtttgtccctcactcaggattccagaacactgcagatgggttctgagtgtttatctctcacctaggatttcagaacagtgctatgagggtctgaatgttagtccctcacaaacgataccagaacactactgttgggttcagagtgtttgtccctgacataggattccagaacactactactgttttctgagtgtttgatcatcacataagattccagaacactgctacgagggtctgaatgtttgttccacacataggattcca

SEQ ID NO: 942578 - DNA, 659 bp, Homo sapiens
tctgaatcattgtccctcacataggattctgtcactcctatgagtgtctgaaagctgagctctcccataggattccagaaaacttctactgggttctcagtgttttttctcacataggatttcagaacactgctgctgcattctgagtgtttgtccctcagataggattccagaacactgctgctgggttctgagtgtttgtccctcatatagaattctagaacaatgctgctgggttctgagggtttgtccctcatatagaattccagaacacagctgatatgttcggagtgtttgttcstcacctaacattccagaacactgttgctgtgttctgagtgtttgtccctcactttgtattccagaactccgccgctaggttctgaggcttatccttcacatcgaattccagaacactgctgctccattctgaggatttgtacctcacataggattccagaacactgctaggagggtctgaatttttgtccctcacatagaattccagtgcagtgctatgaggttctgaacgcttgtccctcacataggattccagaacactgctgcagggttccgtgtgtttgtcctccacataggattacagaacactgctgctgggttctgagtggttgtccctcacattggattgcagaacactc

SEQ ID NO: 942579 - DNA, 578 bp, Homo sapiens
tgtttgtccctcacaaaggattctagagcactgctgctggtttcctgtgtttgtccctcacataggattccagaacacttctacgaatgtctgaatgtttgtccctcagattcgactccagttcacagttactgtgttccgaggggttgtccctcaaataggattccagaacactgctgctgggatctgagtctgtgtccctcacatgrgattccagaatacagcttttgggttctgagtgtttgtccctcattttggattccagaacaatgctacgagggtctgaatgtttttccctcacgtgggattccagaacactgctgctgggttctgagggtttgtccctcatgtaggattccaggacactactacgagggtttgaatgtttttccctaacatcggatcacagaacactgataggaggttttgagtgtttttccctcccaaaggattccagagcactgctgctggtttcttagagtttgtccctcacataggactcccgaacacttctacgagggtgtgaatgtttgtccctcagatagtattccagtacactgtggctgggttttgagtgt

SEQ ID NO: 942580 - DNA, 578 bp, Homo sapiens
tgtttgtccctcacaaaggattctagagcactgctgctggtttcctgtgtttgtccctcacataggattccagaacacttctacgaatgtctgaatgtttgtccctcagattcgactccagttcacagttactgtgttccgaggggttgtccctcaaataggattccagaacactgctgctgggatctgagtctgtgtccctcacatgggattccagaatacagcttttgggttctgagtgtttgtccctcattttggattccagaacaatgctacgagggtctgaatgtttttccctcacgtgggattccagaacactgctgctgggttctgagggtttgtccctcatgtaggattccaggacactactacgagggtttgaatgtttttccctaacatcgratcacagaacactgataggaggttttgagtgtttttccctcccaaaggattccagagcactgctgctggtttcttagagtttgtccctcacataggactcccgaacacttctacgagggtgtgaatgtttgtccctcagatagtattccagtacactgtggctgggttttgagtgt

SEQ ID NO: 942581 - DNA, 578 bp, Homo sapiens
tgtttgtccctcacaaaggattctagagcactgctgctggtttcctgtgtttgtccctcacataggattccagaacacttctacgaatgtctgaatgtttgtccctcagattcgactccagttcacagttactgtgttccgaggggttgtccctcaaataggattccagaacactgctgctgggatctgagtctgtgtccctcacatgggattccagaatacagcttttgggttctgagtgtttgtccctcattttggattccagaacaatgctacgagggtctgaatgtttttccctcacgtgggattccagaacactgctgctgggttctgagggtttgtccctcatgtaggattccaggacactactacgagggtttgaatgtttttccctaacatcggatcacagaacactgataggaggttytgagtgtttttccctcccaaaggattccagagcactgctgctggtttcttagagtttgtccctcacataggactcccgaacacttctacgagggtgtgaatgtttgtccctcagatagtattccagtacactgtggctgggttttgagtgt

SEQ ID NO: 942582 - DNA, 584 bp, Homo sapiens
gattccagaacactgctgctgggtacttagtgtttgtcgctcacataggattccagaacactgctactgatttctgcgtgtttttcctcacatatgattccagaacactgctgcaggtttctgagtgtttgtccctcacttacgattacagaacactgctatgagtgtctgaatgtttgtccctaacaaaggattccagaacaatgcttagaggatatgaatatttgtccgtcacaaatgattccacaacactgctgctgggttcttagtgtttgtccctcacttaggattgcakaacactgctacgaaattctgaatgtttgtccctaagaaaggattccagaacagtgctgctgtgttctgagtgtttgtcactcctgaatgattccagatcactgctgctggtatccgagtgtttgtccctcacataggattacagaacacttctacgagtgtttgaatgtttgtccctcagacaggattctggaacacagtggctgggttctgagtgtttgtcccttgcataggattccaaaacactgctgctgggctctgagtgtttgtcactcacataggattccaga

SEQ ID NO: 942583 - DNA, 720 bp, Homo sapiens
actcagatacgattccagaacactgcttcgagggtctgaaactttgtctctcataaaggattctagaacactgcttctgggttctgagtgtttttcactcataaaggattccagaacatggctatgaagttatgaatctttgttgatcacacggtattccaagacactgctgctgtgttctgagtgttttttcctcacataggattccacaacactgctgctgagttcttgttgtttttccctaacataggattcgaggacacggctacgagggtctgaatgtttgcccatcacaaaggattcctgaacactgctgctgggttctgagtgtttgtccctcacaaaggattggaggacacttctgttgggtactgagtgtttgtcccccacaawtgaatccagagcactgttgttggtttttgagtgtttgtccctcacatagtattccagaacacttctttgagtgactgaatgtttgtccctcacatagtattcgagaacacaggggatgaaaacttagtgtttgtccctcaataggattccagaacgctgctgctgggttctgagtgtttgtccgtcatatacgattccagaacactgcttcaaggttctgaaggtttttccctcacaacggattctagaacactgctgctgggttctgagtgtttttcactcacataggattccaaaacactgccatgaggttctgaacatttgtcc

SEQ ID NO: 942584 - DNA, 702 bp, Homo sapiens
ggtttctgagtgttgatcactgacataggattccagaacacggctgctgggttctgagtttcagtccgtcacatgagattctagaacactgaagccgggttaagaatgtttgtccctcacataggattccagagcactgatacgtggttctcattgtttgtccctcacagaagattccagaacactcctgctggtttctgaaagtttttccatcacataggattccagaacgctgctgctgggttctgttttttcctcacaaataattccagggcaccgytgcttgtttctgagtgtttcttcctcacataggattccagaacacttctacaagtgtctgaatgtttgtccctctgataggattccagaacacattggctgggttctgagtgtttgtcctgcacaaaggattccagaacactgctgctgggttctgagtgtttgtcccttacatgggattccagaacactgccactgggttctgagtggttgtccatcatatagaattccacaatactgctgctgggttctgagtgtttgtccctcacataggattccagaacacctctactagtgtctgaatgtttgtccctcaagtaggatcccagaaaacagtggctgggttctgagtgtttgtctcccacataggattccagaacactgttatgaagttctgaaggtttgtcgctctcataggattcc

SEQ ID NO: 942585 - DNA, 702 bp, Homo sapiens
ggtttctgagtgttgatcactgacataggattccagaacacggctgctgggttctgagtttcagtccgtcacatgagattctagaacactgaagccgggttaagaatgtttgtccctcacataggattccagagcactgatacgtggttctcattgtttgtccctcacagaagattccagaacactcctgctggtttctgaaagtttttccatcacataggattccagaacgctgctgctgggttctgttttttcctcacaaataattccagggcaccgttgcttgtttctgagtgtttcttcctcacataggattccagaacacttctacaagtgtctgaatgtttgtccctctgataggattccagaacacattggctgggttctgagtgtttgtcctgcacaaaggattccagaacactgctgctgggttctgagtgtttgtcccttacatgggattccagaacactgccactgggttctgagtggttgtccrtcatatagaattccacaatactgctgctgggttctgagtgtttgtccctcacataggattccagaacacctctactagtgtctgaatgtttgtccctcaagtaggatcccagaaaacagtggctgggttctgagtgtttgtctcccacataggattccagaacactgttatgaagttctgaaggtttgtcgctctcataggattcc

SEQ ID NO: 942586 - DNA, 702 bp, Homo sapiens
ggtttctgagtgttgatcactgacataggattccagaacacggctgctgggttctgagtttcagtccgtcacatgagattctagaacactgaagccgggttaagaatgtttgtccctcacataggattccagagcactgatacgtggttctcattgtttgtccctcacagaagattccagaacactcctgctggtttctgaaagtttttccatcacataggattccagaacgctgctgctgggttctgttttttcctcacaaataattccagggcaccgttgcttgtttctgagtgtttcttcctcacataggattccagaacacttctacaagtgtctgaatgtttgtccctctgataggattccagaacacattggctgggttctgagtgtttgtcctgcacaaaggattccagaacactgctgctgggttctgagtgtttgtcccttacatgggattccagaacactgccactgggttctgagtggttgtccatcatatagaattccacaatactgctgctgggttctgagtgtttgtccctcacataggattccagaamacctctactagtgtctgaatgtttgtccctcaagtaggatcccagaaaacagtggctgggttctgagtgtttgtctcccacataggattccagaacactgttatgaagttctgaaggtttgtcgctctcataggattcc

SEQ ID NO: 942587 - DNA, 659 bp, Homo sapiens; identical to SEQ ID NO: 942578

SEQ ID NO: 942588 - DNA, 702 bp, Homo sapiens; identical to SEQ ID NO: 942584

SEQ ID NO: 942589 - DNA, 702 bp, Homo sapiens; identical to SEQ ID NO: 942585

SEQ ID NO: 942590 - DNA, 702 bp, Homo sapiens; identical to SEQ ID NO: 942586

SEQ ID NO: 942591 - DNA, 602 bp, Homo sapiens
actgcagctgtgttctgagtgtttttccctcacacagaattccagaacactgctgctgtgttctcagtgtttgtccatcacctatgattccagaacactgctactgcgttctgagtgtttgtccatcacaaaggattcyggaacactgctgctggtttctgtgtgtttgtccctcagaatggattccagaacactgctacaagggtctgaatgtgtgtccatcacaaaggattccagaacactgctgctggtttctgattgtttgcccctcacataggattccagaaaactgcttcgaatgtctgaatgtttgtccctcacagaggattctagaacactgctactgggttctgagtgtttgtcccccacatgtgattccaaaaaactgctggtgggttaaaagtgcttgtgtctcacataggattccagaacactgctacgaggttgtgaatatttgtccctcactatgaattccagcacactgctgctgggttctgagtgtttctccctcacattggattccagaccactgctactaggttctgaatgtttttcactcagaaagattccagaacactgctggtgggttctctttgtttatc

SEQ ID NO: 942592 - DNA, 619 bp, Homo sapiens
ctctcagtgtttatccctcacttaggtttccagaacactgcttcaagtgtctgaagttttgtccctaacaaaggattctagagcactgctgctgggttctaattgtttgtccctcaagtgggattccagaacatcgctgctaggttcttagtrtttgtccctcacatgggtttccagaacactgccacgagaatctgaatgtttttccctcacaaaagattccagaacactgctgcttggttctgtttgtttgtccctcacaaaggattccagagcaccgctgctggtttttgagtgtttgtccctcacatagaattccagagcacttctaagagtgcctgaatgtgtgtccctcagataggattccagaacacagtggctgggttctgactgtttctccctcacataggaatccagaacactgctgctgggatctgagtgtttgtccctcacatagggttccagaacactgcttcaaaggtctgaatttttgtccctcacaaaggattctagaacactgctgctggtttctgagtgtttgtcactcacataggattccagaacaccgctgccaggttttgagagtttgttcttcacataggattccagaacactgcag

SEQ ID NO: 942593 - DNA, 619 bp, Homo sapiens
ctctcagtgtttatccctcacttaggtttccagaacactgcttcaagtgtctgaagttttgtccctaacaaaggattctagagcactgctgctgggttctaattgtttgtccctcaagtgggattccagaacatcgctgctaggttcttagtgtttgtccctcacatgggtttccagaacactgccacgagaatctgaatgtttttccctcacaaaagattccagaacactgctgcttggttctgtttgtttgtccctcacaaaggattccagagcaccgctgctggtttttgagtgtttgtccctcacatagaattccagarcacttctaagagtgcctgaatgtgtgtccctcagataggattccagaacacagtggctgggttctgactgtttctccctcacataggaatccagaacactgctgctgggatctgagtgtttgtccctcacatagggttccagaacactgcttcaaaggtctgaatttttgtccctcacaaaggattctagaacactgctgctggtttctgagtgtttgtcactcacataggattccagaacaccgctgccaggttttgagagtttgttcttcacataggattccagaacactgcag

SEQ ID NO: 942594 - DNA, 592 bp, Homo sapiens
aaactgtgtccctcacataggattctggaacactgctgggttctgagtgcttgtccctcacataggattgcagaacactgctgcgagggtctgaatgtctgtccctcacgtaggattccagaacacagcaacgagggtctaaatgtttgtccctcacataggactacagaacactgctaagaaattctgaatgtttgtccttcacaaagctttccacaacactgctgctgggttctgagagtttaaccatctyataggattccagaacactgctacgaggtcatgaatatttgcccctcgcgtaggattccagaacactgctgcaggattcagagtgtttgtccctcacaaagaattccagaataccgctgctggattctgacagtttgtccctcacataggattcgagaacacggatacgagggtctgaatatctgccctgacataggattccagaacactgctgctgcgttctcagtttttgtacctaacgtaggattccagaacactgctgctgggttctgagtgtttgtccctcacataggattacagaacactgctacgaggttctgaatgtttatccctcacaaaa

SEQ ID NO: 942595 - DNA, 592 bp, Homo sapiens
aaactgtgtccctcacataggattctggaacactgctgggttctgagtgcttgtccctcacataggattgcagaacactgctgcgagggtctgaatgtctgtccctcacgtaggattccagaacacagcaacgagggtctaaatgtttgtccctcacataggactacagaacactgctaagaaattctgaatgtttgtccttcacaaagctttccacaacactgctgctgggttctgagagtttaaccatctcataggattccagaacactgctacgaggtcatgaatatttgyccctcgcgtaggattccagaacactgctgcaggattcagagtgtttgtccctcacaaagaattccagaataccgctgctggattctgacagtttgtccctcacataggattcgagaacacggatacgagggtctgaatatctgccctgacataggattccagaacactgctgctgcgttctcagtttttgtacctaacgtaggattccagaacactgctgctgggttctgagtgtttgtccctcacataggattacagaacactgctacgaggttctgaatgtttatccctcacaaaa

SEQ ID NO: 942596 - DNA, 764 bp, Homo sapiens
gagtgtttattccacacacaggattccagaacactgctacgagggtcagaatgtttttccgtcacaaaagattccagattactgctgctggattctgtttgtttgtccctcacaaaggattccagaacgccactgctggtttctaagtgtttgtcccacacataggatttcagaacacttctacgaagttctgaatgtttgttcctcacaaaggattccagaatactgctgatggtttctcaatgtttgtccctaacataggactccagaacactgctgcttcattcttcttgtttgtccctcacaaaggattccagagcactgctgctagtttctgagtgtctgtccctcacataggattccagaacacttctatgggtttctgaatgtttgaccctcagataggatttcagaacacagtggctgggttctgagtgtttgtccctcacgtagtattctggaacacttctacgaagttctgaatgtttgtcacttaaaaaggattctagaacactgctgctgggttctgagtgtttgtccctcacatgggattcccraacactgctgctgggttcagagggtttgtccctcacatagcattacagaacactgctacgttcgtctgaatggttttccctcacaaaggattccagagcaccactgctgctttctgggtgtttgtccctcacataggattccagaacacttctatgggtgtctgaatatttgtcactcagataggattccagaacacagtggctggg

SEQ ID NO: 942597 - DNA, 578 bp, Homo sapiens; identical to SEQ ID NO: 942579

SEQ ID NO: 942598 - DNA, 578 bp, Homo sapiens; identical to SEQ ID NO: 942580

SEQ ID NO: 942599 - DNA, 578 bp, Homo sapiens; identical to SEQ ID NO: 942581

SEQ ID NO: 942600 - DNA, 584 bp, Homo sapiens; identical to SEQ ID NO: 942582

SEQ ID NO: 942601 - DNA, 720 bp, Homo sapiens; identical to SEQ ID NO: 942583

SEQ ID NO: 942602 - DNA, 619 bp, Homo sapiens
gtctttctttgaaaattatttatatagatcttttgcttatttttcatggttatttgttttttgttgtatagtcctttgagtttcttatatatttttgatattaactgcttttcacgtgtaatttgcaaatattttcttccatttttcagttatgtcattctgctgattgtatctgttggtgtgcagcaacttcttaattttaaggaatctgatttgtctttttccccctaaaattttgaggtgaaacccaagagtcactgcccagaccaatgttatgaggcattcattctatatttcctcatcttagtttyagattttcaggtctcatatttaagtatctaatttgagttaatttttatatatggtgtgagatgaaggtctgattttattattttgcatgtggatatatattttctcaacatcatttataaaagagactgtttttttttaaaaaaattatcatctttatttacaatcagttgtctgtaaatacatgagtttatttctggtctttctcttttgctctgctggcctttgtgtccatttttatgtaagtaacactctgttttgattactgtagctttgttggacatttaaaagtcaggtagagtgattcctt

SEQ ID NO: 942603 - DNA, 619 bp, Homo sapiens
gtctttctttgaaaattatttatatagatcttttgcttatttttcatggttatttgttttttgttgtatagtcctttgagtttcttatatatttttgatattaactgcttttcacgtgtaatttgcaaatattttcttccatttttcagttatgtcattctgctgattgtatctgttggtgtgcagcaacttcttaattttaaggaatctgatttgtctttttccccctaaaattttgaggtgaaacccaagagtcactgcccagaccaatgttatgaggcattcattctatatttcctcatcttagtttcagattttcaggtctcrtatttaagtatctaatttgagttaatttttatatatggtgtgagatgaaggtctgattttattattttgcatgtggatatatattttctcaacatcatttataaaagagactgtttttttttaaaaaaattatcatctttatttacaatcagttgtctgtaaatacatgagtttatttctggtctttctcttttgctctgctggcctttgtgtccatttttatgtaagtaacactctgttttgattactgtagctttgttggacatttaaaagtcaggtagagtgattcctt

SEQ ID NO: 942604 - DNA, 568 bp, Homo sapiens
tgtcacctcaggaccctgtgataactgcgttaactgcacagattgtagagcctgtgtgtttgaacaatatgaaatctggacaccttgaaaaaagaacaggataacagcaattgttcagggaataagagagataaccttagactctgaccactggtgatccaagtggaacagaaccatatttctcttctttcaaaagcaaatgggagaaatatcactgaattatttttctcagcaaggaacatccctgagaaagagaatgcacccctgagggtgggactacaaatggcccccttgggtgtaaccatcttctatggtcaaaactttagggatgaaataaaccccagtctcctgtagaactctcaagcttattaggaagaggaaattcctgcctaataaattttkgtcagacaggttgctctcaaaccctgtctcctgataagatgttgtcaatgacaatggtgtctgaaacttcattagcaattttaattttgccctggtcctgtggtcctgtgatcttgccctgcctccatttgccttgtgatattctattaccttgtgaagtatgtga

SEQ ID NO: 942605 - DNA, 619 bp, Homo sapiens
gtctttctttgaaaattatttatatagatcttttgcttatttttcatggttatttgttttttgttgtatagtcctttgagtttcttatatatttttgatattaactgcttttcacgtgtaatttgcaaatattttcttccatttttcagttatgtcattctgctgattgtatctgttggtgtgcagcaacttcttaattttarggaatctgatttgtctttttccccctaaaattttgaggtgaaacccaagagtcactgcccagaccaatgttatgaggcattcattctatatttcctcatcttagttttagattttcaggtctcatatttaagtatctaatttgagttaatttttatatatggtgtgagatgaaggtctgattttattattttgcatgtggatatatattttctcaacatcatttataaaagagactgttttttttaaaaaaaattatcatctttatttacaatcagttgtctgtaaatacatgaatttatttctggtctttctcttttgctctgctggcctttgtgtccatttttatgtaagtaacactctgttttgattactgtagctttgttggacatttaaaagtcaggtagagtgattcctt

SEQ ID NO: 942606 - DNA, 548 bp, Homo sapiens
ggcttgaatttttccccaaataatgggtttttcttttctatagcattatcaggctgcaaattttcccaaacttttatgctctgcttcccttttaaatgtaagtttcaatttcagatcatctaagttcaaagttccacagctctttagggcagggggaaaatgctgccagtctctgcttaagcatagcaagagtgacctttgctctagttcccaataggtttctcatctccatctccagatccaaagtcgcttttacattgctgggtatctytatagcagtacccaactctatcagcatgaatttactgtaatagtccattctcacactgcaataaaaatcttcccaagactaggtaacttataaaacaaaaaggttaaattgactcacagttcctcatagctggggaggcctcaggaaacttacaatcatggcaaaaggcaaaggagaagcaaactggaccttcttacatggcagcaggagaaagaacatgtgtgtgtgtgcagaaaaaactaccatttataaaaccatcagaattcatgagaattca

SEQ ID NO: 942607 - DNA, 619 bp, Homo sapiens
gtctttctttgaaaattatttatatagatcttttgcttatttttcatggttatttgttttttgttgtatagtcctttgagtttcttatatatttttgatattaactgcttttcacgtgtaatttgcaaatattttcttccatttttcagttatgtcattctgctgattgtatctgttggtgtgcagcaacttcttaattttagggaatctgatttgtctttttccccctaaaattttgaggtgaaacccaagagtcactgcccagaccaatgttatgaggcattcattctatatttcctcatcttagttttagattttcaggtctcrtatttaagtatctaatttgagttaatttttatatatggtgtgagatgaaggtctgattttattattttgcatgtggatatatattttctcaacatcatttataaaagagactgttttttttaaaaaaaattatcatctttatttacaatcagttgtctgtaaatacatgaatttatttctggtctttctcttttgctctgctggcctttgtgtccatttttatgtaagtaacactctgttttgattactgtagctttgttggacatttaaaagtcaggtagagtgattcctt

SEQ ID NO: 942608 - DNA, 618 bp, Homo sapiens
gtccaatcaaaagtttataaccagaatatatgaagatttgtaggaaatttttatatattctggatataaatttttgattggacctaaacattgcagatatattctcccaatttaacttgtcttttctttctcttaatggtgacttcgttaaaaccaatttcttaattttaatgtagttcaatttatcagaatttttctgtgtagttaatgcttatttaatcttgcttaagaaatttctgtctaccccattgtcataaaggtattcttctrtgttacagaagctttttttttaatttttaacctttcagattgagctttataacccacttacgattgatttttgtttgtgatgcaagacaggggttaaagtcttttattcccccatattgatatccaaattatctaccaccatttattgagaagattattatttcctcactgcactgcagtttcacctttgtcataagtcaggtgatggtataagtatgagtttgtttttggtttctctatttgtatgtcctgctaataccatcttattttaattgtaataaagttggagacatctgatggtatacattcttgagatctgttcttcttcagaactttcttggttcttct

SEQ ID NO: 942609 - DNA, 744 bp, Homo sapiens
gaggaagcgggaacgcaggtggcgatggtggtggagcagccgctggcctggccctgcctcttgctcctgctgccctcggcctgggagcacatggcccctcccgcctctgtggcagcctgaatgcccaggacctgtggctggccagcttgagccgttaggatggagttgagctgcaaggaacagaaccggcctccccgcagtagtggytaagatcatctgtgagtttatcctactgagctgttaggtcccaagagagccaggccacagttgccagggctggccctgctctgtgaaggccccaagtctctaggattttctaccatgtcactctgctgtgtgtggcctccattcccaaagtcacctcatgatccaggagggctgctacagccctcacatcacgtcccaggctgtagaatggaggaagtagaagggaaggggcaaaaggtatgtgccttctatcttttaaggaaggttccagaagccaccatattgaatacttacagttatatctcattggccacaacttagtctcatgctcacacctcaccacaagaccacctgggaagcgtaatctctactctgggtggccatataccctgtcgccacttccagccctgggccgctggggaaggcagcatgggcgagaagacaggaggggccacttctgccgcagcgccccggcccaatggagcagccggctcacctgcttgttcaagcagcccactcgagccttgccaaagtgct

SEQ ID NO: 942610 - DNA, 495 bp, Homo sapiens
tttctcatgagaactcagtgtctgctagaaaatatctaagtaaaatattttacttatgcagaaagtgtggatgtttgtgcatcaaaagtttcaagaatccctaaaatgtacaatggagatgaggagaaaatatcagaatttcccagcaccagaaatgaggcaagaaaaaattcagaggagttgtaaatgtgaaaagccaatggctggtcacacagcaacattgataaccttgtgccaggacaactagaataaatacataaacatacagattgaaartatttccaatattagatctccctcatgtgagaactaaattataaagattgaagcatataagaaaataagctaccagaatttaggctaccagaataaattcaattacacataaatttctgacattgaaattgtcacaaatgtttaagttggcagtggaagacaaaggacatataatcttgggagtcctagggccctgcccactgccagtgcctccacact

SEQ ID NO: 942611 - DNA, 603 bp, Homo sapiens
ttcccaaggtcttagcaactagcagacaaggtgattctctcctgtgcctggctcagtgggtcccacacccatggagccttgctcactgctagcgaaacagtctgaaatccatctgcgaggtggcagcctggctgggggaggggcgtccaccattgctgaggcttaagtaggtaaacaaagcggccagggaagcctgaactgggtggagcccaccacagcttgacaaggcccrttgcctctagactccacgtctgtgggtggggatagctgaacaaaaggcagcaacttctgcagacttaaatatccctgtctgacagctctgaagagagcagtggttttcccagcatggcgtttgagttctgagaatggacagactgcctcctcaagtgggtccctgacccctgtgtagcctaactgggacacacctcccagtaggagctgacagacacctcatataggcggctgcccctcttggacgaagcttccagacgaaggatcaggcagcaatatttgctgttctgcaatatttgctgttttgcagcctccactggtgataccgaggcaaacagtgtctggagtggaactccagcaaactccaacaga

SEQ ID NO: 942612 - DNA, 420 bp, Homo sapiens
agccaattcaatcaagtggaagaaagggtatcagtgattgaagatcaaataaatgaaataaagtgagaagacaaggttagagaaacaagagtaaaaagaaatgaagaaagcctccaagaaatatgggaccatgtgmaaagaccaaatatatatttgattggtgtaccagaaagtgatgaggagaatggaaccaagttggaaaacactcttcaggatattatccaggagaacttccccaacctagcaaggcaggccaacattcaacttcaggaaatacagagaacaacacaaagatactctttgagaggagtgattccaagacacataattgtcagattcaccaaggttgaagtgtaggaaaaagtgttaagggcagccagagagaaaggtcaggttagccacaaagggaagcccatcaga

SEQ ID NO: 942613 - DNA, 420 bp, Homo sapiens
agccaattcaatcaagtggaagaaagggtatcagtgattgaagatcaaataaatgaaataaagtgagaagacaaggttagagaaacaagagtaaaaagaaatgaagaaagcctccaagaaatatgggaccatgtgcaaagaccaaatmtatatttgattggtgtaccagaaagtgatgaggagaatggaaccaagttggaaaacactcttcaggatattatccaggagaacttccccaacctagcaaggcaggccaacattcaacttcaggaaatacagagaacaacacaaagatactctttgagaggagtgattccaagacacataattgtcagattcaccaaggttgaagtgtaggaaaaagtgttaagggcagccagagagaaaggtcaggttagccacaaagggaagcccatcaga

SEQ ID NO: 942614 - DNA, 657 bp, Homo sapiens
tggaaagtaaattgatgttggtcaagctcagaaagaagtagaatggcagatggaacttgtgtgcaaatttgaaaagatcaagcagtataggatcatcagataacaaagtgttaacatttatgcaaaaaatcttgatggtattgatgaatgtctctggaaagaactttctccacttggtacaatcaccaatgcaaaggttatgaaggatggttgtcataacaaagggtttgatttgtgtatgtttctcctctccagaggaagcaactaaagcactttcagaaatgaatggtagaattgtgggcactgagccattgtatatatatagtgttaactccatgggaagaaaagcaatgaagagcaccaggctcagctcattaaccagtrcagtatgtgcaaagaatggcaagtgtaaaaactatgctcaacctgggaatcagtccctatcagccagcaccttcttcaattgacttcatggcagttatcccacagagtgagagccatgctgcaaagtattctcctagccaaactgctcaactaagatcaaatcctccctaaattgctcagggtgccagacctcatccattgaaaaatatgtctaagccactcctagctcactacatttagtagtaagagaacagcttcttcacagattccaca

SEQ ID NO: 942615 - DNA, 657 bp, Homo sapiens
tggaaagtaaattgatgttggtcaagctcagaaagaagtagaatggcagatggaacttgtgtgcaaatttgaaaagatcaagcagtataggatcatcagataacaaagtgttaacatttatgcaaaaaatcttgatggtattgatgaatgtctctggaaagaactttctccacttggtacaatcaccaatgcaaaggttatgaaggatggttgtcataacaaagggtttgatttgtgtatgtttctcctctccagaggaagcaactaaagcactttcagaaatgaatggtagaattgtgggcactgagccattgtatatatatagtgttaactccatgggaagaaaagcaatgaagagcaccaggctcagctcattaaccagtacagtatgtgcaaagaatggcaagtgtaaaaactatgctcaacctgggaatcagtycctatcagccagcaccttcttcaattgacttcatggcagttatcccacagagtgagagccatgctgcaaagtattctcctagccaaactgctcaactaagatcaaatcctccctaaattgctcagggtgccagacctcatccattgaaaaatatgtctaagccactcctagctcactacatttagtagtaagagaacagcttcttcacagattccaca

SEQ ID NO: 942616 - DNA, 585 bp, Homo sapiens
cagtgtggcaattcctcaaggatctagaactagaaataccatttcacccagccatcctattactgggcatacacccaaaggattgtaaatcatgctgctataaagacacatgcacacgtatgtttattgcggcactattcacaatagcaaagacttggagccaacctaaatgtccatcaatgatagactggattaagaaaatgtggcacatatacaccatggaatactatgcagccataaaaaggatgagttcatgtcctttgtaaggacatggatgaagctagaaaccatcattctgagaaaactattgcaaggacagaaaactaaacaccacatgttctcactcataggtgggaattgaacaatgagaacatttggacacagggtggggaacatcacaygctggggcctgtcatggagtggggtgagggggggatagcattaggagatatatctaatgtaaaggacgagttaatgggtgcagcacaccaacatgacacatatatacatatgtaacaaaccggcacattgtgcacatgtaccctagaacttaaagtatagtaatagaaaaactatgatactctc

SEQ ID NO: 942617 - DNA, 780 bp, Homo sapiens
aaagattttcagctgttccaaatgggacttattagtggaatgtgttttaaaggatcatatcagatgaatgaaaggtatttgatcctttctttccttaataataaaatgatggtttggaaaaataggctacagtctaaccacagtgctattattaggctttcttgttaaacataggtctaagcctaagtatgtcaatacaaccaatacttactgtttcatttctagtaatgaaaaaaaaaaasaagtctttctggcataaggatgattttcatctggttattttgaaacatttttgtaaaataagtttacatctataaagaacatttttatttgtaaggaggggtatgtctctgtgcactggaagagaaggaggactaaatcactgggaagtcttatgataaagaagccattggcttaaatctgcaaagcaagccatcccttggtttaaggtgtttttcctggccatcctgtcttgactagaactttacctacaccttcctttttggtttaggcaaattatagtatctaaacctgaagtctcggctctgtgtttttgagatacaaatgttctaccatgtcttctctggaacctgataactatctatctctttaaaatgcaagtctagggagatgactcatcagaaaaagaagaaaaaagaggtatttggaaattgtgcaaattaaagcagcccctgatgccaaagtctacacattcctgagtgaatcagttctggccagttctagctggatcaagagagctctctgctgggcaggcctgaa

SEQ ID NO: 942618 - DNA, 633 bp, Homo sapiens
gtctcagctactgtggaggctgaggcaggagaatcacttgaacctgggaggtggaggctgcagtaagccaagattgcaccactgccctccagcctgggtaacagagcgatactctgtctcagaaaacacacacacacacacacacacacacacacacacacacayatacacacacacaaatttgttgggcgtggtggcgcactcctataatcccagctacttgggaggcttaggcatgagaatcgcttgaacttgggaggcggaggttgcagttaactgagattgcaccactgcactccagcctggcaacagagcaaaactccatctctaaatagatatagatagatagatagatagatagatagatagatagatagatagatgatagatagatagatagatagataggaagaaataagtaaaaataacaaccaaacaacaaaacagtggagtttatccaaagaaacagagactcttagaactgagaaaaggggccctgtttggctctagagacccacaccctgctctcggagtcaccgtccccttcccaaaggctactgagagagtccaagcgaagcttgcatgtggggaaactgagtctcagaggggtgaaggtattgctcaggtccactt

SEQ ID NO: 942619 - DNA, 633 bp, Homo sapiens
gtctcagctactgtggaggctgaggcaggagaatcacttgaacctgggaggtggaggctgcagtaagccaagattgcaccactgccctccagcctgggtaacagagcgatactctgtctcagaaaacacacacacacacacacacacacacacacacacacacatatacacacacacaaatttgttgggcgtggtggcgcactcctataatcccagctacttgggaggcttaggcatgagaatcgcttgaacttgggaggcggaggttgcagttaactgarattgcaccactgcactccagcctggcaacagagcaaaactccatctctaaatagatatagatagatagatagatagatagatagatagatagatagatagatgatagatagatagatagatagataggaagaaataagtaaaaataacaaccaaacaacaaaacagtggagtttatccaaagaaacagagactcttagaactgagaaaaggggccctgtttggctctagagacccacaccctgctctcggagtcaccgtccccttcccaaaggctactgagagagtccaagcgaagcttgcatgtggggaaactgagtctcagaggggtgaaggtattgctcaggtccactt

SEQ ID NO: 942620 - DNA, 483 bp, Homo sapiens
agcccctcttcactgacgagttctaccccaacttcgcagagggcatcggtgagcactggaggccttggcctcatgggagacgtctcctccacgtgcactgctgccctcagaggctgtgaaaagtgaggtgtgggaaccygagctgtgcttcctctgccatggtcggaattttaacccaacctcaaaaagcaggggaccaaaactgagcctatcctggaaggccttgcccatccccagagggctccccatccatatttctcaaggaggccaagtgggtgaaatggtcagcactgccgtgctgtggggtcctaaagtctgctgtcctccttcctgcagaccagggctaaacactggtgcccaggtgctcttgccatgggtcctggtccagccaagcatggtttcaaacatgacctgacccttagtcaacctggaggctgatgtctagagtgggcgctggagcgtgcagcacctgtagcctgtgca

SEQ ID NO: 942621 - DNA, 483 bp, Homo sapiens
agcccctcttcactgacgagttctaccccaacttcgcagagggcatcggtgagcactggaggccttggcctcatgggagacgtctcctccacgtgcactgctgccctcagaggctgtgaaaagtgaggtgtgggaacccgagctgtgcttcctctgccatggtcggaattttaacccaacctcaaaaagcaggggaccaaaactgagcctatcctggaaggccttgcccatccccagagggstccccatccatatttctcaaggaggccaagtgggtgaaatggtcagcactgccgtgctgtggggtcctaaagtctgctgtcctccttcctgcagaccagggctaaacactggtgcccaggtgctcttgccatgggtcctggtccagccaagcatggtttcaaacatgacctgacccttagtcaacctggaggctgatgtctagagtgggcgctggagcgtgcagcacctgtagcctgtgca

SEQ ID NO: 942622 - DNA, 576 bp, Homo sapiens
attggtcaggctggtctcgaactcctgacctcaggtgatcgacctgtcttagcctcccaaagtgctaggattacaggtgtacatttatttatttatttgagatggaatcttgctctgtatttattaatttatttatttgagatggagtcttgctccatcgcccaggctagagtgcagyggtgcaatctcggctcattgcaacctctgccttccaggttcaagcgattctcctgcctcagtgtcccaagtagctgggattacaggtgcctgccaccacagctggctaatttttgtatttttagtagagacagtgtttcaccatcttggccaggctggtctcgggctcctgacctcatgaaccacctgcctcagcctcccaaagtgttgggattacaggcctaaggcaccatgctcggccatatttatttatttaattatttagagacaaagtcttgctctgtcacccaggctggagtgcagtggcgccatctcagctcactgcagcctccgcctccgaggtttaagcaattctcatgcctcagcctcctgagtaactgggactacagatacttgcca

SEQ ID NO: 942623 - DNA, 637 bp, Homo sapiens
tactaaaaatacaaaaattagctgggtatggtggtgtgtaatcccagctattgaggaggctgaggcacgagaatcgcttggacccaggaggcagaggttgcagtgagccaagatcgtgccactgcactctagcctgggcaacagggcaagcctctgtctcaaaaaaaaaaaaaaaaaaaaaaagaagaagaagaagaaagaaaacaaagaagaaagaaagaaagaaaaagaaagaaagaaagaaaattaaaagaaggaaatgccataaagcatctggagcaaagaacatccaaagaagagcactgatcactgcagcagacagccrttcagaatgggcagagagcagagctggcaggaagagaggacaaaaggaagaccaggaagggaagccaggaaaagagattttgcattgtgttattatttcaatcagaagacttaggaacattatttaattatcaaatttgtgtgtctgatgatcctttacaacactgcagcatcaaataaagtgttatcagatttctttcttttttttttttttgagactgggtctgattctgtagcccaggctggagtgcaggggtataataatagctcactgcagcttcaaactcctgagtttgtttgtttgtttgtctgt

SEQ ID NO: 942624 - DNA, 724 bp, Homo sapiens
ctgttagggggctgaagggtcctggggagtccaggtctagccaagttgaggcctatcctgctgcattttccagccacctgacccaaatacaccacctgaacccacgaccaggtatgcccacaccccatgggtggccttaacacacacaccctgcccctttctccaagtacaggagcagcagcccagacttccctcggggcaccgcggcctgcttgggactgcacagtgcctgggagggtgcctggggagggtcacaagggacttggtgctagwagcaggaaaagtgtagggaccggaaaagcccccgtgcatcctggaagggacatgggccagtttgagcaggggtgtgggagtccagccctggccttgccaggtggagaggcgcctgggccagacatccgcggcaggaggcgggggaacatgccaagaggcggaaggggcacgcggagacccccagggggcgccggaaggggcgcgccgggcggtcggcggcggccgttggcgagctgaggcctgccaggcgaagtctggagaccagccgggccgcggccgcaatggccaaggactcgcccagccccttgggcgcgtcgcccaagaagccgggctgctccagcccggcggcggcagtgctggagaaccagaggcgggagctggagaagctacgggcggagctggaggcggagcgggcaggctggcgggcggaacggcggcgcttcgctgcccg

SEQ ID NO: 942625 - DNA, 642 bp, Homo sapiens
caacactccagccagggtctttgtggccctctctgattacaaccccctggtgatgtctgccaacctcaaggctgcagaggaggagctggtcttccagaaaaggcagttgctaagagtgtggggctctcaggacacccatgatttctacctcagcgagtgcaacaggcaagtgggcaatatccccgggygcctagtggctgagatggaggtggggacagagcagactgataggaggtggcgttctccggcccaagggcacctgccttctgtggcccacctcgaggactttcaggggctcaccatcccccagggttcctccctggtgctccaggggaactccaagagactcccactgtggactccaaagatcatgatagcagctctggactatgatcctggggatgggcaaatggggggccaggggaagggcaggctggcgctgagggcaggagacgtggtcatggtttacgggcccatggatgaccaaggattctattatggagagttgggcggccacaggggcctggttcctgcccacctgctggatcacatgtccctccatggacactgagcaagcatccttgcccaggtagtggcctctggctgctcacaccctgccagaggagaagcaagcgttcagac

SEQ ID NO: 942626 - DNA, 696 bp, Homo sapiens
tttgtttaatatttaaatatttcattgtgctcccaggctttttctcaccctaatagctctcatccatatcatgtgggtcccattaatacagatacctccgaatgcaccactcttccattatatccagtcaattgctggttaccttgggcctaccaactgggggagggcaggggctgctggccacctcctcatctacagtaagagtcaawgagcagttaaatggatactgaaaaccatttatcctgctggagtgagaaataaatggtttctttcaatagcgtagtaaaatgcatcttttccaaactatttatatgactcaaggcccatctcaatttcagatgtggttagcctcaattcctgattctcaccaaggtgtgtaatgtcatccacggcccagtgcagaggaacacaggtgctgccgtcagactgccagggtccgatcccgcctcctcactcaccccgggagatccctttaagccaggagtcaacagtgaggatggaaacatgagtgctttttaaagtcctgaaagttcagaggcagactgtcaatttctcctccacccctgggcacacaccaggagaactctgtctccaggttggaggaagtgcctgtgagagagttgtgtccctcagattctgttcaccacaggtgacactcgatgcaaccccaaacctcttctgcacaatcccaagggg

SEQ ID NO: 942627 - DNA, 696 bp, Homo sapiens
tttgtttaatatttaaatatttcattgtgctcccaggctttttctcaccctaatagctctcatccatatcatgtgggtcccattaatacagatacctccgaatgcaccactcttccattatatccagtcaattgctggttaccttgggcctaccaactgggggagggcaggggctgctggccacctcctcatctacagtaagagtcaatgrgcagttaaatggatactgaaaaccatttatcctgctggagtgagaaataaatggtttctttcaatagcgtagtaaaatgcatcttttccaaactatttatatgactcaaggcccatctcaatttcagatgtggttagcctcaattcctgattctcaccaaggtgtgtaatgtcatccacggcccagtgcagaggaacacaggtgctgccgtcagactgccagggtccgatcccgcctcctcactcaccccgggagatccctttaagccaggagtcaacagtgaggatggaaacatgagtgctttttaaagtcctgaaagttcagaggcagactgtcaatttctcctccacccctgggcacacaccaggagaactctgtctccaggttggaggaagtgcctgtgagagagttgtgtccctcagattctgttcaccacaggtgacactcgatgcaaccccaaacctcttctgcacaatcccaagggg

SEQ ID NO: 942628 - DNA, 716 bp, Homo sapiens
acttgtacagccataacttgtacagccattcctgatctgttttggttactttttgcacggaatattctccattctctcatttttcaacccatttgtattggatttcaaatgagtctcttgtagacagcatatatagttgaatcccgtttttttaaatccaatcagccratttatgtctttttattgggagtttaacctatgtacatttaatgaaattattgattaggaaggacttactaccaccattttggtcattgttttctgtatgtttagagcctttttgtccttctttcctcccttattgtcttcctttgtgttatagttgattttttgtagtgctatgctctgatttccttctcatttccttttgcatatattctgtaggtattttctttgtggttactatgggaattacatggaacatcttacagttatcttattattttaaacagataacttcaatcacatacaaaacctctactctttacatctttgccccactattaagttactgatgtcacaaattaaactttatatactttgtatccattaacatagatttataattattatgcttttgtcctttaaattccattaaagtattaaaaattgagttattagcaaaaattacaataatacaggttttaatctttatgtatttacctttatattttcatcaggctgagcaactgtctagtatcccttcatatcaactt

SEQ ID NO: 942629 - DNA, 716 bp, Homo sapiens
acttgtacagccataacttgtacagccattcctgatctgttttggttactttttgcacggaatattctccattctctcatttttcaacccatttgtattggatttcaaatgagtctcttgtagacagcatatatagttgaatcccgtttttttaaatccaatcagccgatttatgtctttttattgggagtttaacctatgtacatttaatgaaattattgattaggaaggacttactaccaccattttggtcattgttttctgtatgtttagagcctttttgtccttctttcctcccttattgtcttcctttgtgttatagttgattttttgtagtgctatgctctgatttccttctcatttccttttgcatatattctgtaggtattttctttgtggttactatgggaattacatggaacatcttamagttatcttattattttaaacagataacttcaatcacatacaaaacctctactctttacatctttgccccactattaagttactgatgtcacaaattaaactttatatactttgtatccattaacatagatttataattattatgcttttgtcctttaaattccattaaagtattaaaaattgagttattagcaaaaattacaataatacaggttttaatctttatgtatttacctttatattttcatcaggctgagcaactgtctagtatcccttcatatcaactt

SEQ ID NO: 942630 - DNA, 621 bp, Homo sapiens
actcctgaagccagaataaggcccccaggctgagcctcaggtgctggccatgagcatcctttctgtagaggtaagtgccaaggggatatgggtggggcaccaacagggtagactacatcctatgtattcatccgttctcacactgctataaagatactacctgaggctgggcatggtggctcatgcctttgggaggcagaggcaggyggatcacctgagggcaggagttcgagaccagcctggccaacgtggtgaaaccttgtctctactaaaaatacaaaaattcgctgggagtggccaggcacggtggctcacgcctgtaatcccaccactttgggaggccgaggcgggtggatcacctgaggtcaggcatttgagaccagcctggccaacatggtaaaaccccgtctctactaaaaacacaaaaaattagctgggcttgctggcgggcgcctgtaatcccagctactctggagagtgaggcaggagaatcacttgaacctgggaggcggaagtcacagtgagccgagatcgcaccattgcattccagcctgggtgacaggagagaaactccgtctgaaaacaaaaacaaaaattagctgggagtagtggtgggcacct

SEQ ID NO: 942631 - DNA, 629 bp, Homo sapiens
actgggtaagggactcctgaagccagaataaggcccccaggctgagcctcaggtgctggccatgagcatcctttctgtagaggtaagtgccaaggggatatgggtggggcaccaacagggtagactacatcctatgtattcatccgttctcacactgctataaagatactacctgaggctgggcatggtggctcatgcctttgggaggcagaggcaggtggatcacctgagggcaggagttcgagaccagcctggccaacgtggtgaaaccttgtctctactaaaaatacaaaaattcgctgggagtggccaggcacggtggctcacgcctgtaatcccaccactttgggaggccgaggcgggtggatcacctgaggtcaggcatttgagaccagcctggccaacatggtaaaaccccgtctctactaaaaacacaaaaaattagctgggcttgctggcggkcgcctgtaatcccagctactctggagagtgaggcaggagaatcacttgaacctgggaggcggaagtcacagtgagccgagatcgcaccattgcattccagcctgggtgacaggagagaaactccgtctgaaaacaaaaacaaaaattagctgggagtagtggtgggc

SEQ ID NO: 942632 - DNA, 658 bp, Homo sapiens
agtggctctaggtattgttcatggtgttctttggggccccctcactttcctgttggagggactgcgtgaagaccccataccactgtgtctggctcccactctacctgctccagctgcaaggtaggcactcactggcaccttttgttgcagacaccaagaagacgagaaagaagccaagacagaagaaaccagaacccaacctcttgtgggaccggttgacctccccatgcctgccaccaaccctgctgccacctctgcygctaccaccaccatggtctccgtggtgacctcatcaccccctggcacctggggctgccttgcttgcctaaagccaagtaggtggagccccttggtgccttcaacccccacccaacgccttaaccagagcaaaccccgtttatctgctttgtgcatcaagaccctgtctgcaaagaggggtctgctgcttaaaagcagagggctgagatccacggctacaggcccaggagagcccctgggattgttctgagcagggggcacccaggactgcctggagtgggggaggctcccactgaccgacttgcagggcagtggagggaagggaccaaagaccgtaggcatagtgtagaccagacaggatcctggggctcccaaaggacaggtggaaaaccagggggcc

SEQ ID NO: 942633 - DNA, 659 bp, Homo sapiens
cacaaactggctaggtttaggaagtggccctctcaagggtcaggacaaagacgcatgatggtcaagaacccaggaatctctggttcaaatcctacttccaaggaacacttgtagatatgtgtgcaagacacacaacccttgccgaatcttaagattcctgtggttggctgggcrcgggggctcacgcctgtaatcccagcactttgggaggccaaggcgggcggatcacaaggtcaggagatcgagaccatcctggctaaaacggtgaaaccccgtctctactaaaaatgcaaaaaaaattagccgggcatggtggtgggcgcctgtagtcccagctacttcggaggctgaggcaggagaatggcgtgaacccgagaggcggagcttgcagtgagccgagattgcgccactgcactccagcctgggcgacagagcgagactccgtctcaaaaaaaaaaaaaaaaaaaaaaaaagattcctgtggtctataatataggtaataaatcccactttgcttcctgctcccaaccagccctccccacatagaactcacagacattttctcaaggactttcttgaaactagattaagtcatttggcttttcacccaattagatactgtctgtgctaagaaaagtccagaaggcctggaccacaat

SEQ ID NO: 942634 - DNA, 716 bp, Homo sapiens; identical to SEQ ID NO: 942628

SEQ ID NO: 942635 - DNA, 716 bp, Homo sapiens; identical to SEQ ID NO: 942629

SEQ ID NO: 942636 - DNA, 801 bp, Homo sapiens
tgccagccaggcatgtatgtggctctttttcaagctttttattcattccgccacattttctgagcgcaaagtcagtgcctggcccccttggtttagaccaagtcatgttggcccctgctttctggtgctcacagacttgcctgggcggggtgatagaggcgcttgcagttcagcacgcggcccgttctcctctggaggagggaaggagctgcttttggaagttaagtagcttgctgggggctggagggtaaatgcctttgactccaccgcctgtggaggcccatatagtgtggtgtctggagagatctgagatcgcactagggaggatggggctgaaagccccctccctaagagaggtcctggctcccatttaggggcttctgaaccagcccttccagtttgactctgcctggcaccgccagggttcgcttcctgctgggaggggccttgccctaagggttagggacctgggctgggggagggctctgaggaggggctgggccccgagggactgagggactgcaggcttgcttgccttgagcccagttttagctgggagtggcaaagcgagaaaagctggtggggatgggagctctgtgtgggcccccagtgagcttgataagggaggmgaggctgggagctggttccagcccgccaaagttcaggagggaagggccagactgcctgagaggggtgtggcgggactgagtggggagagggactccaagaaactgcttgggaccctcgggaaggtggccaggctttggggagcccctccttctaactattcaatttattttt

SEQ ID NO: 942637 - DNA, 576 bp, Homo sapiens
gcccatgctgcctggcagaggcctgcctgctggtgctctggttctcaccttgagctatacctgtctctggggtgggcccaaggcactagcttttcctgaagcttttgaagtgaacctgatgtgcagccaagtttgagaaccgctcttctagcaggtgatgcatctttgttgataatagaatccacaggcggagggatgagtagcccgcgcttttacctgcggttctcactaactgctttactccgagggcctggtggggtcagcggttacccagtgaatgagttggcagartcagtcatgcctgttcctgggtagttactgggcacagagggtgaacagcaggaggaacctagcccatgtgcactgctggcttctcctgggaggtcctctggagagctgcctatagccctcagctgtaggcgggtcctactgaccccgtagcacgggcttttggagtctgcctggcctggtttcctggctgcattcttgggctctcgttggcctgtatgtagtctggcgggacctcacatagtgcagtttgggttgagcggaggtggccagtaatgggggcccctg

SEQ ID NO: 942638 - DNA, 576 bp, Homo sapiens
gcccatgctgcctggcagaggcctgcctgctggtgctctggttctcaccttgagctatacctgtctctggggtgggcccaaggcactagcttttcctgaagcttttgaagtgaacctgatgtgcagccaagtttgagaaccgctcttctagcaggtgatgcatctttgttgataatagaatccacaggcggagggatgagtagcccgcgcttttacctgcggttctcactaactgctttactccgagggcctggtggggtcagcggttacccagtgaatgagttggcagagtcagtcatgcctgttcctgggtagttactgggcacagagggtgaacagcaggaggaacctagcccatgtgcactgytggcttctcctgggaggtcctctggagagctgcctatagccctcagctgtaggcgggtcctactgaccccgtagcacgggcttttggagtctgcctggcctggtttcctggctgcattcttgggctctcgttggcctgtatgtagtctggcgggacctcacatagtgcagtttgggttgagcggaggtggccagtaatgggggcccctg

SEQ ID NO: 942639 - DNA, 664 bp, Homo sapiens
tcttggcgtcagctggagggttctcatttcactgttacttttgtttaggctgggaggtggttaaggtgctgctccttgggagtgggctggggggagcttctcctcagtcctccagcatagctccaggcctcctgcaggaagcccctttcttggtagtaaaggatagcttccagggaggaaggtggatgagaaggatcctaggagggctaggcgggatggcctgcttggggtggcgccctttcctggtcttcacccttctccccaggcctccctcctggctgggcgtgagccagaagtttcagtctgaaggcagggttatcatgtggctgagatgagtttgacccccgcctgtgggcctggacrtgggcgtgagatgtgttcctgtctcccagagtcatggcctccagaaggagccatgtggaggcccagcacctggagcagttctgaatgcctggcttcttggaggccaaggttctaggcaaggtgggtatccaggctgggttggggcagtgcctctcagaattggggctggagtttcctgctttctgcctcagcagggatcactttgatctgaaaacctcctctctcctggcctttgaaagatgctgactagagcacactctcctgccctttgctgggtgcttagaagaaaggccttgaggta

SEQ ID NO: 942640 - DNA, 552 bp, Homo sapiens
aattaagtaaaaagtgatggaacaggctaggtgggaagtggtggctcacaccaataatccaagtgctttgaaaggccaagcaggaggatctcttgaggccaggtgtttgagatcagcctgggcaacatagcaagaccctgtctttacaaaaaatgtaaaaattagctggaggctaggctcagtggctcatgcctgtagggaggccaaggtaggtgaattgcttgagccyaggaatttgagaccagcttgggcaacatggcaaaattccatctgtacaaaaaaattgccaggcatggtggctcatgcctgtaatcctaacacttagggaggccaaagtgggcagattacccgaggtcaggagtttgagaccaccctggccaacatggtgaaacctcgtctctactaaaaatacaaaaattagctgggcgtggtggcgcatgcctgtaatcccagctactcgggaggctgaagcaagagaattgcttgagcctgggagacagaggttgcagtgagcctagatcgtgctactgcactccagcctgtgtgacagag

SEQ ID NO: 942641 - DNA, 665 bp, Homo sapiens
caaaaaaattgccaggcatggtggctcatgcctgtaatcctaacacttagggaggccaaagtgggcagattacccgaggtcaggagtttgagaccaccctggccaacatggtgaaacctcgtctctactaaaaatacaaaaattagctgggcgtggtggcgcatgcctgtaatcccagctactcgggaggctgaagcaagagaattgcttgagcctgggagacagaggttgcagtgagcctagatcgtgctactgcactccagcctgtktgacagagcaagactatgtttcaaaaaaaagaaaaattagctaggtgtggtgacatgcacctgtagtcccagttactcaggaggctgaggtgagaggatcacttgagcccaggaagttgaggctatgatcgtgctactgcattccagcctgggtgacagccagattctgtctcaaaaatcaaaacacaacagggcacagtggctcactttggccttccaaagtgctgggattacaggtctgcaccaccatgcctggcctgagagtgcatgaattaaagtttctattctcttgctagtctgtcattgcttccctagtgtgtgggaaccatacttgtccccacttctcagtcagagagcagcctgccaacctccaagtctcttgcccctgacccaaaa

SEQ ID NO: 942642 - DNA, 738 bp, Homo sapiens
catgaccacgtctcctgccctcagcgccagcctgcccttcccctggccccccatttgcccatccccaggatcatagtccagagctgctatcatgatctttggagtccacagtgggagtctcttggagttcccctggagcaccagggaggaaccctgggggatgrtgagcccctgaaagtcctcgaggtgggccacagaaggcaggtgcccttgggccggagaacgccacctcctatcagtctgctctgtccccacctccatctcagccactaggcgcccggggatattgcccacttgcctgttgcactcgctgaggtagaaatcatgggtgtcctgagagccccacactcttagcaactgccttttctggaagaccagctcctcctctgcagccttgaggttggcagacatcaccagggggttgtaatcagagagggccacaaagaccctggctggagtgttggcccccgtccccagctgttgggggccacccctgggcatcttgatgactttggcggatggagctggacacagtgccgagctgggctcatggagctggcaccctctcttcacccccagagcttgtccttgcctgctgtggggctcaggctccctcctctcctctcgcctctctgtgccccgcagatccaagcacagtgcctcctgctcctccttcaaaacgttatggaagtcagatgcatactgttggctggcgcccagctggggaggtgtgaaccc

SEQ ID NO: 942643 - DNA, 563 bp, Homo sapiens
cgggaggctgaggcaggacagtcgcttgaacccgggaggcggaggttgcggtgagccgagattgcaccatggcactctagcctgggcaacaagaggaaaactctgtctcaaaaaaaaaaaaaaaaaaaagtcaattggaccttaggacaacttaaaaacattatcaggtttttatcttttagatagcagagatgagtctgctcttaataaggatttacagtagtctctctgtttcctgtgggctcctggctggcttgtgtgagctccctcctctaggatgggcactccatcctggacattgccgcgttgccagctgtcctgccaatattttgcttcctgtgttkttgttattggttgggggtccaggagaggttgctgcctggactgagtctacttgctgatcaggatgaagttgatctctgcttcccttctgaaggtttctgtgcacgtattgaattcaaggacagcctacgtaagaagtgtgcacagctccaagagttcttcacaaatgattatgcccttgtaactagcatccagagtgcgaaacacaaccctggaagccc

SEQ ID NO: 942644 - DNA, 786 bp, Homo sapiens
agacttgactgtgtgtttgagcccccagggttctggtggttagggctggatggagtctgagcctctgcgtgtctaacaagatccctggtggtgctgctgctgtttcttgggtcatggccagtgagcaagaagagcagggaagtgggctggagaggactgcagaaaccagcacagggcctgttttgcctcctgacatgtgtggatgccagattcctgctttttcctcacctactaggaacagcggctgcacatcctctggtggtcttgcgtgggctcctgctctgtggctgtcagcgagccttttaccccatgctcaggcccctcttagggggcagggtagtgttgggatggagtttggaggtgagcacagcattcgtagtcactatcacaaccttaaattgttattctgcttcttttttttgagacagagtctcactctgtcacccaggctggagtgcagtggcgcgatctcggctcactgcaagctccgcctcccagggtcaagcaattctgcctcagcctccggagtagcggaactacaggcgcgtgccaccacacccagctaattttttgtatttttagtagagatggggtttcacagtgttagccaggatggtcktgatctcctgacctcatgatccacccatgtcagcctcccggagtgctgggattacagaccgcacctggccgttattctgcttcttaaagcaatgttcccctgcctgtctccaatatcctgtctcagaactgtcagccagactgtgccaggcctggggccctccttgg

SEQ ID NO: 942645 - DNA, 790 bp, Homo sapiens
ttcccctgctagtgctggcaccaaggagggccccaggcctggcacagtctggctgacagttctgagacaggatattggagacaggcaggggaacattgctttaagaagcagaataacggccaggtgcggtctgtaatcccagcactccgggaggctgacatgggtggatcatgaggtcaggagatcaagaccatcctggctaacactgtgaaaccccatctctactaaaaatacaaaaaattagctgggtgtggtggcacgcgcctgtagttccgctactccggaggctgaggcagaattgcttgaccctgggaggcggagcttgcagtgagccgagatcgcgccactgcactccagcctgggtgacagagtgagactctgtctcaaaaaaaagaagcagaataacaatttaaggttgtgatagtgactacgaatgctgtgctcacctccaaactccatcccaacactaccctgccccctaagaggggcctgagcatggggtaaaaggctcgctgacagccasagagcaggagcccacgcaagaccaccagaggatgtgcagccgctgttcctagtaggtgaggaaaaagcaggaatctggcatccacacatgtcaggaggcaaaacaggccctgtgctggtttctgcagtcctctccagcccacttccctgctcttcttgctcactggccatgacccaagaaacagcagcagcaccaccagggatcttgttagacacgcagaggctcagactccatccagccctaaccaccagaaccctgggggctcaa

SEQ ID NO: 942646 - DNA, 814 bp, Homo sapiens
acatcaggttcacttcaaaagcttcaggaaaagctagtgccttgggcccaccccagagacaggtatagctcaaggtgagaaccagagcaccagcaggcaggcctctgccaggcagcatgggcaacgtgtgctgggtgaatgtgcggcctgcactcatcacccagaagagccccactgtgtccacacaaggacaggccaccgaagtcccagtccccactctcccttctcayttactttgtgaatgagagctcaccaacagtttaccgtcttccgagtgctgcggcctcaccgcccgacccgcagcaggggtgagggcttgcaaaggccatgcaacagatcctccccctcaaaggggctcaggcctcagtgtggtaatgggagcggccccttcccacacttgtcagagaacccacccacccggtggaatgaagccgaagcccaagccgcagggcaacagcccgggacggcaggggacaagtctgtacagcagccacacccctgccagagccaggagctcttccatttccacagcaggccaactctcacctggaagcacccacctaaccaaacccaatccctgccttcttttagtcacactgggaactgccacaagaaggctggggactccacatactccctcctcaccacaacccatgtgtgatcacccttaaacagaaaacatgcacctaagatcctacgatgcgctgcccacctcacaaaaaaccggtgcctctaggtaagagacacctagctgacccatccctgtgccctctcaccattagaaggacccccaagtccccctgttctaacaccg

SEQ ID NO: 942647 - DNA, 814 bp, Homo sapiens
acatcaggttcacttcaaaagcttcaggaaaagctagtgccttgggcccaccccagagacaggtatagctcaaggtgagaaccagagcaccagcaggcaggcctctgccaggcagcatgggcaacgtgtgctgggtgaatgtgcggcctgcactcatcacccagaagagccccactgtgtccacacaaggacaggccaccgaagtcccagtccccactctcccttctcatttactttgtgaatgagagctcaccaacagtttaccgtcttccgagtgctgcggcctcaccgcccgacccgcagcaggggtgagggcttgcaaaggccatgcaacagatcctccccctcaaaggggctcaggcctcagtgtggtaatgggagcggccccttcccacacttgtcagagaacccacccacccggtggaatgaagccgaagcccaagccgcagggcaacagcccgggacggcaggggacaagtctgtacagcagccacacccctgccagagccaggagctcttccatttccacagcaggccaactctcacctggaagcacccacctaaccaaacccaatccctgccttcttttagtcacactgggaactgccacaagaaggctggggactccacatactccctcctcaccacamcccatgtgtgatcacccttaaacagaaaacatgcacctaagatcctacgatgcgctgcccacctcacaaaaaaccggtgcctctaggtaagagacacctagctgacccatccctgtgccctctcaccattagaaggacccccaagtccccctgttctaacaccg

SEQ ID NO: 942648 - DNA, 665 bp, Homo sapiens
tcttggcgtcagctggagggttctcatttcactgttacttttgtttaggctgggaggtggttaaggtgctgctccttgggagtgggctggggggagcttctcctcagtcctccagcatagctccaggcctcctgcaggaagcccctttcttggtagtaaaggatagcttccagggaggaaggtggatgagaaggatcctaggagggctaggcgggatggcctgcttggggtggcgccctttcctggtcttcacccttctccccaggcctccctcctggctgggcgtgagccagaagtttcagtctgaaggcagggttatcatgtggctgagatgagtttgacccccgcctgtgggcctggaygtgggcgtgagatgtgttcctgtctcccagagtcatggcctccagaaggagccatgtggaggcccagcacctggagcagttctgaatgcctggcttcttggaggccaaggttctaggcaaggtgggtatccaggctgggttggggcagtgcctctcagaattggggctggagtttcctgctttctgcctcagcagggatcactttgatctgaaaacctcctctctcctggcctttgaaagatgctgactagagcacactctcctgccctttgctgggtgcttagaagaaaggccttgaggtaa

SEQ ID NO: 942649 - DNA, 619 bp, Homo sapiens
ctccagcctgggcaacagagggagactcggtctcaaaaaacaacaaaaaagataactaatatatgataatattttttaagtgtcatgtataatagtgaaagaaagcatatacaggcggtggctcacgcctgtaatcccagcactttgggaggctgaggcgggaggatcacctgaggtcaggagtttgagaccagcctggccaacatggtaaaaccccgtctctactgaaaatacaaaattagctgggcatggtggcgtatgcctgtaatcccagctacttgrgaggctgaggcaggagaattgcttgaactccagaggcggaggttgcagtgagctgagatcctgccattgcactccagcctgggcaacagagcaagactccgtatcaaaaaaaaaaaaaagaaaaaagcatatacaaatttctcacaatggggttaaatagtccacataatggaatgtagattaggccaggagtagtggctcatgcctgtaatcccaacactttgggaggccgaggcgggcagatcacctgaggtcgggagttcgagaccagcctgaccattatggtgaaaccccgtccctactaaaaatacgaaaagttagctgggcgtgattgcgc

SEQ ID NO: 942650 - DNA, 646 bp, Homo sapiens
catgggccagatttgggccatgggcccaatcctggttttggtatagcctgtttgctaagagtggtgtttacattttttaatgattgaaaaaaatcaaaacaaggataaaatttcatgacatgttaaaattatatgaaattcagatttcagggtccataaataaaattgtattggaaaaaagccaccatacctatttatgaattgtctatggctgattttgtacaacaatagtaaaattgaatagctgcaacagaaaccatatggtctgcaaagcctaaaacacttattatatggtctttgacagaaaaggtttgctgatcccctggtctagaagatcaaatgttaaagtccctcaaggcctactcctagtttctttcctctcactccctactgtctccctagggatgacttcagatagccactggcccatgamcagtgactcaaaaatttctaactctaatgcagacctctcctctgtattccagaccagtgtatccaactgcctatttgacatttctacctggaggcctcaaaagtaccgccaacatacacatacccaaagcaaattgataaattttttcttcaaattgtatgttctttcattgttcccttagtgaatagcttcatcttccatccagttactcaa

SEQ ID NO: 942651 - DNA, 638 bp, Homo sapiens
tccatttgggaactattatatgaagctgttataaacctttgtgtacaaggctttgtgtgaatatatatgttttaatatttttggaggatgaataatagaagtggagtggcacgttcatataggtgaatgattattattttaaaaagtgtcaagttttttcttagaagtaggtatacatttcatattcctaccagaagtgcatgagaatttaggttgctgcacagacttggcaacacttgggatgtttattttattttatctaattaattaatttattttttagatggagtctccatctgttgcccaggctggagtgyagtggtgcaatctcagctcactgcaacctccgcctcctgggttcaagcgattcttttgcctcagcaccccgagtagctgggactacaggtgcacatcaccatgcctggctaatttttgtatttacagtagagacggggtgtcaccatattggccaggctggtctcgaactcctgacctcaggtgatccacctgcctcggcctcccaaattatttttttaatactagccattctaatggatattttagggctaccacattgtggattttatttgcatttttctaaagactcatgatgctaaacatattttaatgtggttatt

SEQ ID NO: 942652 - DNA, 569 bp, Homo sapiens
gtgtgagatgatatctcattgtcgttttgattttcacttctctaatgatcagtgatgttgagctttctttcatatgatcattggctgcacgtatgttttcttttgaaaagtgttcatgtcctttgctcatattttaatggggttgtttgtttttcttatacatttgtttaagttcctgatagatgctggctattagacttttgttagatgaagtttgctaaaattttctcccattctctaggttatctgtttactctattgatagcttcttttgytgtgcagaaactctttagtttaattacattccattgggaatttttgcttttgttgcaactgcttttggagactgtcatgaaatctttgcccattactatatccaagattgtattgcctaggttgtcttccagagtttttataattttgggttttacttttaagtcttcaatacatcttgcattgatttttgtacatggtgtaaggaaagggtccagtttctattttctgcataagactaacctgttatcccagcaccattatttatacatggagtcctttcctcattgcttgtt

SEQ ID NO: 942653 - DNA, 710 bp, Homo sapiens
cttagaaaacctaaggggttttactcccctgcttggagcgctccaaggaggcgcttgatgcttggagtaaaatctatactcgtccccatcctatctagtccctaatgaccctgcaatgtcatccttccccactgtcccttgtcaccctgctccagccacactggcctctccccatgcaacaagcccactcttgcctcagggccttcccagttactattctgcttttctttttttttttctttttgaggtggagtctcgctctgtcgcccaggctggagtgcagtggaggatctcaactcactggaacctccgcttccagggttcaggcgattcttctgcctcagcctcccgagtagctgggacaacaggcgtgtgccactatgcccagctaatttttgtacttttggtagagayggggtttcaccatgttagtcaggctggtctcaaactcctgatctcaggtgatccacctgcctcggcctcccaaaatgctgggattacaggtgtgagtctctgtgtcaggcatcccagtcactattccttctgccaacacactcttccccagctcttcatgtagctggctgcttcttttcattcatctcacagcttcaatgtcactgcttccaaaggaagacctcccttctaagtggtctttctcatgccaaaatgactgtgtaccccataacttattttaatgtctccatagcatt

SEQ ID NO: 942654 - DNA, 710 bp, Homo sapiens
cttagaaaacctaaggggttttactcccctgcttggagcgctccaaggaggcgcttgatgcttggagtaaaatctatactcgtccccatcctatctagtccctaatgaccctgcaatgtcatccttccccactgtcccttgtcaccctgctccagccacactggcctctccccatgcaacaagcccactcttgcctcagggccttcccagttactattctgcttttctttttttttttctttttgaggtggagtctcgctctgtcgcccaggctggagtgcagtggaggatctcaactcactggaacctccgcttccagggttcaggcgattcttctgcctcagcctcccgagtagctgggacaacaggcgtgtgccactatgcccagctaatttttgtacttttggtagagacggggtttcaccatgttagtcaggctggtctcaaactcctgatctcaggtgatccacctgcctcggcctcccaaaatgctgggattacaggtgtgagtctctgtgycaggcatcccagtcactattccttctgccaacacactcttccccagctcttcatgtagctggctgcttcttttcattcatctcacagcttcaatgtcactgcttccaaaggaagacctcccttctaagtggtctttctcatgccaaaatgactgtgtaccccataacttattttaatgtctccatagcatt

SEQ ID NO: 942655 - DNA, 799 bp, Homo sapiens
gagggtaaaatacacactaaactgtgaatttagtaaaaaaaaaaaaaaaaaaaaagtaaatctcttatattgaatatatttttgatcttttgggttaaattgaatatattacttaaagtaatttttttttttggagactaggtcttactctgtggcctaggctgaagtgcagtggcgtgatcctggctcactgcaacctcaacctcctgagctgaagwgatcctcccacctaagcctcctaggtagctgggaccacaggtgtgtgcaaccgaacccggctaagtttattttttgtgtgtatttttttggagagatggagtttcgccatgttgcccaggctggtcttgaatttctgggctcaagcgatcctcccacctcggcctcccagaatgttgggattacagcaggcctagcctaattttgttaatttttaaatgtggctaccagagaactttaaatgaactatgtggctcacattatgtattgactgaacaatgcatctgtagaggctgtctttggaagtttactatataaccaagacccacgaacactcatgcagttcccaggggtatcatggactgcttaaagtcccatctgtgaaaccctaacatgatgattttaaaggttacttttcatttacattcaaaatgtacataaagaatgtccctgtgagattagatcacttaagggagaaccatgtctgtgtttcactacgcagaaaatggtttcatcgtctttgtcctgaaagccactgcctggaagggctgtgcagcgctcagagtgggagaggcagacctct

SEQ ID NO: 942656 - DNA, 651 bp, Homo sapiens
gacagagttggagaagaggatataattaacacgggtggtaaaggcagagtcaaggaagtagctgtggagtgagctgatgcctggggtcaaagacaggtctgtcctgcggatgacatttctcttgagaagtaaaccgtcagcaatcaggacctaggggtcacctagcatttggtggctcaacacaagctctagtaccaggaggtatggcatctgctacaaaaacaaaatgcagtcgtcacaatttgtgctcatcaaaatgcattarcatagtttctgccatcaaaacctgcttgacattaagaaggggtcctcttgctagggtacccaaccacagagctgctccctcagagggtgaaaatatgcttaacacagggctttctgttctggaaagaaaacaggacttaaactgagctgcttcagagagggttgagagcttctttatggagcaggcaaagcatggatgtcatgaactttcctaacacactaggtgaggggcagccctacagccctgagatagaatggcttttccattggtttttccaatacccgagggagggcatgactatccccattggtgtttttccttcacttgagaagcatctaggccagtgattctcaaagtgtggtccctggaccagcagcagcagtgtc

SEQ ID NO: 942657 - DNA, 632 bp, Homo sapiens
gtggtggcagacaagagaagagagattgtgcaaagaaactctccttttttaaaaccatcagatctcatgagacttattcactatcatgagaaaagcagagaaagacctgcccccataattcaattacctcctaatgggttcctcccacaatatgtgggaattcaagatgagattttgttggggaaacagccaaaccaaatgatctgcccctggccactccaaaatctcatgtcctcacatttcaaaatgaattatgccttcccaacagtcccccaaagtctaactcatttcagcattaacagaaaagtccacagtccaaagtctcatctgagacaagtcaagtcccttgcagctatcagcttgtaaaatcaaaagcaagttagctacttcctagatataatgagagtagaggcattgggtaagtactgccatttgaaagggtagaaattggccaaaacaaaggggttataggcctcaygcaggttcgaaatccagaggggcagtcacatattaaaactccaaaatgatctcctttgactccatgtctcacatccaggtcacgctgatgcaagaggtgggttcccatgttctggcacaactccacccctgtgactttgtagggtacagccttc

SEQ ID NO: 942658 - DNA, 752 bp, Homo sapiens
gtccactctctcactactcctattcaacatagtactggaagtcctagctaatgcagtcaggagaaggaaagaaataaaacgaattcaaataggaaaataagttaaactgtatctctttgtggataatatgattccatacctagacaaccataaaaactctgccaaaaagctcctggatttcataaatgacttaaatcaagtttcacaacacaaaatcaatgtaaaaaattagtagcatttctatatataactattatttaagctaagagccaaatcaagaataaaataatatttacaatagtcacgtcaacaatcaaatacctgggaatacatctaaccaaagaggtgaaaggtctctagaaggcaaactgcaaaccactgctgaaagaaatcatagattatacaaacaaatgagaaaattttcatgctcatggwtttgaagaatcaataccgttaaaatgtctatactgcctagagcaatctacagattcaatggtattcctatcgaactacaaatttaattcttcacagaatttttaaaaagtattctaaaattcatatggaaaaaaaaggatctcaaatagccaaggcaattctatgcaaaaagaacaaagccagaggcatcacattacctgacttcaaactgtcctataaggctacagcaacccaaacaggatggtactgatataaaaacagatacatagaccaatgacacagaataaagaacctagaaataaaactacacacctaca

SEQ ID NO: 942659 - DNA, 752 bp, Homo sapiens
gtccactctctcactactcctattcaacatagtactggaagtcctagctaatgcagtcaggagaaggaaagaaataaaacgaattcaaataggaaaataagttaaactgtatctctttgtggataatatgattccatacctagacaaccataaaaactctgccaaaaagctcctggatttcataaatgacttaaatcaagtttcacaacacaaaatcaatgtaaaaaattagtagcatttctatatataactattatttaagctaagagccaaatcaagaataaaataatatttacaatagtcacgtcaacaatcaaatacctgggaatacatctaaccaaagaggtgaaaggtctctagaaggcaaactgcaaaccactgctgaaagaaatcatagattatacaaacaaatgagaaaattttcatgctcatggatktgaagaatcaataccgttaaaatgtctatactgcctagagcaatctacagattcaatggtattcctatcgaactacaaatttaattcttcacagaatttttaaaaagtattctaaaattcatatggaaaaaaaaggatctcaaatagccaaggcaattctatgcaaaaagaacaaagccagaggcatcacattacctgacttcaaactgtcctataaggctacagcaacccaaacaggatggtactgatataaaaacagatacatagaccaatgacacagaataaagaacctagaaataaaactacacacctaca

SEQ ID NO: 942660 - DNA, 674 bp, Homo sapiens
aatgggattaaacataaaaaagatttattggtgaaaatgccagtgatagataatggggaggtagttggagaggtctgggagagccatactactgtggagtatgtctagcctcagtgaaggacagagggaactaagtttggtctagaagaaacttctttaagaaactccccatcgggcgtggtggctcatgcctgtgatcccagcgctttgggaggccgaggcgggtggatcgcgaggtcaggagatcgagaccaccctggctaacacggtgaaaccccgtctctactaaaaatacaaaaaattagccgggcctggtggcgggtgcctgtagtcccagctactcgggaggctgaggcaggagaatggcgtgaacccgggaggcagagcttgcagtgagccaagacagtgccactgcactccrgcctgggcgacagagcgagactccgtctcaaaaaaaaaaaaagaaaagaaaagaaaagataagaaaaaaaaagaaactcctttagggcaattctaagaaagttttggcaagtcacccatcaaaggagccttacatatcaccaaaatgggcctgccttagcatccttgccaagagtatttactaacaagaatggatgacagcacaaccttggcacagaagtgatggtagattcaaagaccaactgctgtagctg

SEQ ID NO: 942661 - DNA, 831 bp, Homo sapiens
tgcttctgggtgatggagtatttggtaggaccggagaacctcatgaccataaagctattgtcacatttcttttgtcatgaaatggattccttgatcagaagcaatgttgtaccatgatggtgaataagactcacaaagtccacagatgatgatgctggcagaagcattacgagcagggatggcaaacacatctccagagtatgagtcttttccagtgaaaacaaatctccatcccctccataatagaaagggttcaagtaatcaacctgctagcaggctgcctggtgcactggatgcacygtatcaggggctcagtgtcagtctctgctcttggcaggccgggcactcagcagtagcgttatccagaagccctggtgccgagaagtacacattcgccgctgaacccctgcataacctccatctctgccaccatggccacgttgaacatggacacaatgggcaagcactgggctggctggggaaagaggataactgacatccacagagaaattctccctcacgctctcatcattgtgtccacctggctctgaagagctcctctgccgggggtgccctctgcggggcatccgcattggaaacaaacatctttgcattctgtgcccattctcagcgctccacgtatttcctacccacactgcatgtcaccatcttccaattctgtttttcccaaatccctgaccattcagctaagccaggggttagcaaactttttctatcaaatttataaatgttttaggctctgtggaccatttgttctccgttgcaactatgcaactctgctgttgtcgcatgaaagcagcacaaaaagca

SEQ ID NO: 942662 - DNA, 831 bp, Homo sapiens
tgcttctgggtgatggagtatttggtaggaccggagaacctcatgaccataaagctattgtcacatttcttttgtcatgaaatggattccttgatcagaagcaatgttgtaccatgatggtgaataagactcacaaagtccacagatgatgatgctggcagaagcattacgagcagggatggcaaacacatctccagagtatgagtcttttccagtgaaaacaaatctccatcccctccataatagaaagggttcaagtaatcaacctgctagcaggctgcctggtgcactggatgcaccgtatcaggggctcagtgtcagtctctgctcttggcaggccgggcactcagcagtagcgttatccagaagccctggtgccgagaagtacacattsgccgctgaacccctgcataacctccatctctgccaccatggccacgttgaacatggacacaatgggcaagcactgggctggctggggaaagaggataactgacatccacagagaaattctccctcacgctctcatcattgtgtccacctggctctgaagagctcctctgccgggggtgccctctgcggggcatccgcattggaaacaaacatctttgcattctgtgcccattctcagcgctccacgtatttcctacccacactgcatgtcaccatcttccaattctgtttttcccaaatccctgaccattcagctaagccaggggttagcaaactttttctatcaaatttataaatgttttaggctctgtggaccatttgttctccgttgcaactatgcaactctgctgttgtcgcatgaaagcagcacaaaaagca

SEQ ID NO: 942663 - DNA, 607 bp, Homo sapiens
tgattgctcccacaccacaagcctgtatggcaggaagtgctgagtagcagaggcaattggaatagaatggtatttgcgtatctaaatgtatctaatcatagaaaaggtggcacattgcactatgatgatatgatggctatgaatgacatcactagatgagaaaaatttttcagctcccttataatcttttatttttgttatttttcttttctttctttctttctttctttccctycctccctccctccctccctcccttccttccttccttccttccttcctttctttctttcaaaaaataaaagcatacagacaacctcttgctatgttgcccaggctgtagtcaaactcctcgcttcaagcaatcctcctgctttggcctcccaagtcccaaccatgttagccaggctggtatcgaactcctggcctgaagtgatctggccacctcagcttcccaaagtgccaggactataggtgtgagccaccacacccagcctccattataatcctataggaccaccatggaatatatggtcccacactgtccaaaacatcatcatgcagcccatgaaattaaactgtttcaaggagaaaagcaaagaacaca

SEQ ID NO: 942664 - DNA, 772 bp, Homo sapiens
ttctaaatgtttaaaaaaattaaagtatagagtgctagattaagttgcatctggggagtgttatactcttactgtctttttctttttttttgtttcaccaagtgttatacccttactgtctttttcctttttttgtttcaccaattgagctttgagtgttctattagttctttcaactagkgtctgtccttgggaattataagggattcctgttgtatgtgtaatttttcaatgatttaagaatttttgaaatgttttactacagtatcctggcccattatctgttttaatttttcctggaactcccatgacagcaaaacaagataataaacgtcttttaacatgggaagtactttttcctgtctggcaggttgcccatacaaaatgtgaataagtatcaactgtcacatggacaaatgacaattttccaaacgacagtacatgtgtgacatccatttgccataatgcattaggacatagaactctgggattaactcctacctcctgagtgtgcaggtttaggacttgacatgggtccagtgttgtacaatattttttggctgtttttatggatatcaattttactttttaatcctgttgcatttacatgagtcaaggcatgaagttcttatgcttctatgaatgcagatgatactagctagtcagcttgttcatttgcttcagttaaaggccctggtaaattaatatgtgctcaaatatgagtaatataaaatgggaaatttcttttttttacagtgtttttgtaacaaat

SEQ ID NO: 942665 - DNA, 737 bp, Homo sapiens
ctgattctttttaactatttcaatctctttgttaaatttatctgatataattctgaattccttctctgtgttatctctgtgttatcaaagtttctttaagtttcctcattgcagctattttgaactctctttctgaaaggtcacatatccccatttcttcaggattggtccctggtgacttatttagttcattcgctgaggtcatgtttttctcaatggtgttgatgctagtagatgttcttcggtgtctgagcactgaagagttaggtgtttgttgtagtcttcactgtctgggcttatttgtagccatcctttttgggaacgctctgcagatatttgaaaggacataggtatcgtgatttaaactctctactttagggagcatcccaagcccagtaatactgtggtttttgaagactcataaaagtactgcctcaatggccttggacatgattcaggagaattctctggattgccaggcagagactgctctgttttcttcccttaatttcttgaaaaaaaaaaaaawttctctctcttgtctgtgccacctaaaactgggggtggagtgacataagcacttctgtggccaccaccattatgactgcactacatcaggcctgaggcccacagagcactgcatcttgcccaatgcctgctgtaatcacttcttggctactgcctatgtttgctcaaggccctggagatctgcaatcagcaggcagcaaagccggcca

SEQ ID NO: 942666 - DNA, 797 bp, Homo sapiens
caggtataggtaataggcaaagtgagagaattaaaaatgagtaaattatttggcttagccttctgcttccttagcataatgtgtgaggcctgtgctgttcctggaagccacattgttgaggctgtgggtccttagggtttttcctaggctggcttgagttttttttctttccatccttggatgaggatacagtctccaggctggtgctggtgtactggaaattctaggggtggtacctgtgctaagagatctttataatctttaaagagcaggatagtacttcaagaaaaacttgtgcttcattttaatgtctagtttacagaaaaaaactggatacttttttaaatttagccaatatgtttacatatagaattttttacaattaacattttacaacttgcttagactttcaaaacaaaaattatacatttcctgcatgaatcccttttataacattcttcacgactttcacagacaatttttgacatgccttaactttttaactctgttttgtaatcttccttactaagggtgcattcttatattaataacttttwaaatatttccttttccttcttcccactttctttccttagtctttctttttgtgtctctttctgatctgtttcttctagtttctttttaaatcattctttccctttatttctctttctaggggtggacatatgcacacattctttctcatgttaataatttatttggaccacaccatttattactgttcacatttttccataaaactgctggttttatgccttgagaggttttagcaaagt

SEQ ID NO: 942667 - DNA, 609 bp, Homo sapiens
atgtttcttctcacctaaaaaaataaaataccgtgttcagtaactttttaatcaaacacaacattgtaggtgggagactgaaagcctgccattgttggttgttgcttttatttaataactggtagaggtgttctgtgatgttactgtgctggttggttaccctgagtacattatgttttttcactgtattaatggtatgttgtatcttttactgttaagtacttatgtgtgaataagtgtaataaaaatgattattagtaacgtgtaagttcaatcaggaatgatggtgatgccaaacaaccatagattttccacatgggtggctaagatagtgacaccgttgctttctgatggttcagtttacacaaactttgttttgtgcacaaaattattaaaaacattgtttaaaattacctccrggccatgtgtataaggtctttattaaacataaatgaattgtgtgtttagacttaggtcccatctccaggatatctcattgtgtatatgcagataatccaaaattaaaaaggaaacaataaactgaaatttgaaacccttctggtcccaagcattttggatgagggatactcaacctgtacggcctcttca

SEQ ID NO: 942668 - DNA, 776 bp, Homo sapiens
cttgtgccgacagaaatcctcagggaatgcgtccaggctcttgctcagctcctggaagaatttttgcttctcggctggctctttgatctgggggagtgaggacgggacccggggaagagatcagcctggttgcagcccaaacccagccatgggtgaggacaaggagaagtgatgcttatgggccttatgggctctggagcctggctgcctgggttcaaagcccaactgtcccacttacctgccatgtaaaatgggataacagctctaccatctacgggatagttctgggattcaaccagaaaatgcacataaaagctgcagaacaggctggcacacggcagatgctcggtgggttagggactgttgctgccattgcggctacctgacctgttgctgggagagcagccactagggacagcagaggcatcactaagggcatcaggccctttatcagtgttgcctctactgctcgccacccaggatgtgagcacagaggaggaaactgaagatcaaagaggtgaaggggcttacttggtttccctgccctggctggattgggcaggaagttcctggtaggccgtgggaargcaaggattaggtacactttactcccagacctcatcctcccactgagccaaaatggaccagcctgtaagctcaacggtctcctttagtcctcctaacccccctttgaggccataatacccccaattcatatttctggagcacagattatgtgctaaaacctttacacagattatctcagtcctcttcac

SEQ ID NO: 942669 - DNA, 564 bp, Homo sapiens
cagaggggcgggccccccagtgactctgggtggggcctgtgcccacaaatgcacatttctttctttctttctttctttctttttgagatggagtctggctctgtggcccaggctggagtgcagtggcaccatctcggctcgctgcaacctccacctcccaggttcaagtgattctcctgcctcagcctcctgagtagctgggactacaggcatgcgccaccacacccggctaattttttgtatttttggtagagactggttttcaccatgttggtcaagctggtatcgtactcctgacctcaagtgatccacccgccacggcctcccaaagtgctgggattacaggtgtgagccaccgcgcctgggcatgaatgtacatttctgctgaccaagactatttgctgggtgtagacrgggtgctgggcacagatgggcccatttattatcataacaaagccacaagggaggtgcgatggttcccattttacagagaaggagactgaggcttagggagcttcagtcatggggtggcagcagcagaattggaagagtctgtctgactcc

SEQ ID NO: 942670 - DNA, 844 bp, Homo sapiens
ggttctatacttctgttaatgtagccgatgtccttctgagttttttttttctttttgagacgaagtcttgttctgtcacccaggctggaagtgcagtgctgcggtcttggctcactgcaactctctgcctcccgggttcaagcaattctcctgcctcagtttcccaagtagctgggattacaggtatgcgccaccacacctggctaatttttgtatttttaatagagacagggtttcgccatgttggccaggctggtctcaaactcctgacctcaagtgatccacctgcctcagcctcccaaagtgctgggattacaggkatgagccaccgcacccggcccctcttgagctttcttaatgattgcctgttacaaaccacccttgagcctttcccacaggcccgagccactccacaaggacacaggaggggctcgttcaccatctaatcctgtggcaggcacaggtgggggtggatactggagaccctgggtgaaccaggggcacctctggaacccagttggactgcctggccccttggtatgcacgtcccaccttgctgctcagtgcccaggccacttgccttgtgggtgaagttcctgccctgatgcctcatgctattttcagcccaagtaagaccataattttccactcctggccccagaccattgtccagaagtgacgtgaggggatctgcctgccctcaaaatatctcctattaccctccagtattccctgcccccttcacacctccctaacctgacatcacttcctgggctgttgactcatgaaggccactgtgaaagggcacgtgagttgcccatccactgagcagaccccagggatt

SEQ ID NO: 942671 - DNA, 666 bp, Homo sapiens
aagagcagtgggatcctatctggaggccctgccatgggtgtggccctggagacctgcaggggaatccatgggtcgaggccacctgctggctcttgcttcagaccctgtcccctaaagcaggaccggctccatccccacaaggcccactgggcatgtcccactcgcaggcctcttctgcctgtgatcaccggcttttggttaatggcagtgacagtgcggctgagccctggtcaccgtgagggccacactgccctgtcagtcagggtggccccctgagtcacgttcacatttgctgaaggagcctctagtcctcacctctggtgggtgtctctcctccctcagagccgccaccaccaccagctctgcaggaagtggttcttttctctctgtttctcccccctcagtcacacacaraggcttggatggaggtgtcaggccctcagcttcggaggcttagaggctgccttcagtgggcaggtgctgggtctggctggagagagggccctggtgggcttggcccatcggggaagtctctggagcatttaaatttgtttttctaaaatgcatgcacctttactgttttatttactaaaaatattgatatatgctagtcgtaaaattattcatagtggaacaggaatgaaaagaaattaaaaactgtgtaat

SEQ ID NO: 942672 - DNA, 545 bp, Homo sapiens
ggtgagaaggcaggttccagtcccttctatggcaaagcctgtgggtgagccgggaaaggcagacaacaaggaaataaagcagacagcatgagccgcaggcttccagcagggtcccagtgccaccaggcgaggccaaaccaggaggccagcgtgggcaggagcccagggaagggcttcatggaggaggagtctccatgacctcacagagcaccagcaacaagctggcagcatcaggactgaggtgtggtgaggccggagccctgcaaagcccccacctaagcacacaaggcctgckacagcatcatagcatgagggtcaaggctgaggggacttagccgggaagacatcagaaacagtctgaaactcaagagagagccctcgtgaccacctcagccgggactcagaccagcagcctcccaggaagcggcttgaagcacaagctgggccctgctgcagtcacctggtgtccctttcaagctgggccactcgcactttccagtcccagccttgcacagaactctcatccctacaaataacaatttagt

SEQ ID NO: 942673 - DNA, 712 bp, Homo sapiens
aagaaccatcctccaaacaaggaatctggggaccacctggaccaaatctgaactggaacatggaccaacttgttcattctagctgtgatttccatgacagctaagccattatcatcaatttcttggcaacagttggttaaattaaattttccatgtactcctccttctgaggcttttaattcagccttctgagtggaagtcccagaaggtaaggcttgagcctcgactaccgagtgttggatcactactacataccttgcatatcgcaccccatctgttatgaaactgctaccatcagtgaagtattcaacatctggcctctccaagggggtatctctgagatcttccyggctcgagaacacttcgtccaccatatttatgcaacagtggggaaggtcctgccagcagtgaggcaacccactgcccttccaatcgggtttctccacagacagcagggtagctgggttcaaggtatttatagtctctagtgttatctggggattttcacacagaagtccttgatactttagcattctagaattggacagccaacgatgtcctcttggctccattaaggtgactacagcgtgtggcacccgaactattaacttctgacctagggctagcttgttggcatcttctataaggattgtggtagccaccaatgccctgaggcattgggccaacctaaggccatgaaggtccagtaagc

SEQ ID NO: 942674 - DNA, 712 bp, Homo sapiens
aagaaccatcctccaaacaaggaatctggggaccacctggaccaaatctgaactggaacatggaccaacttgttcattctagctgtgatttccatgacagctaagccattatcatcaatttcttggcaacagttggttaaattaaattttccatgtactcctccttctgaggcttttaattcagccttctgagtggaagtcccagaaggtaaggcttgagcctcgactaccgagtgttggatcactactacataccttgcatatcgcaccccatctgttatgaaactgctaccatcagtgaagtattcaacatctggcctctccaagggggtatctctgagatcttcctggctcgagaacacttcgtccaccatatttatgcaacagtggggaaggtcctgccagcagtgaggcaacccactgcccttccaatcgggtttctccacagacagcagggtagctgggttcaaggtatttayagtctctagtgttatctggggattttcacacagaagtccttgatactttagcattctagaattggacagccaacgatgtcctcttggctccattaaggtgactacagcgtgtggcacccgaactattaacttctgacctagggctagcttgttggcatcttctataaggattgtggtagccaccaatgccctgaggcattgggccaacctaaggccatgaaggtccagtaagc

SEQ ID NO: 942675 - DNA, 627 bp, Homo sapiens
tagaaattcatggggcaaggccgggcgcggtggctcacgcctgtaatcccagcactttcggaggctgaggcaggtggatcatctgaggtcaggagttcacgaccagcttgggcaacatcgtgaaaccccgtctctattaaaaatacaaaaaattagctgggtgtggtggtgcatgcctgtaatcccagctactcaggaggctgaggcatgagaattgcttgaacccaggaggcagaggttgcagtgagccgagatcgtgccactgcactccagcctgggtgacagagtgagactctgtctcaaaaaaataaaaaaaaaacacagaaatgcgtggggcatgttcctggcttaaggcccctgtttctcctccagggggaacaaagaggggcctggcgggcgaggattgccgataagaggacatggaggtgagatgctgamtgggcgcagttggccttttctttccccataaatcagaaaccagtgcagtgtgtagctctttggggatcagccaggccacagccttgttctggtggtgaggacagacatgctgtctggcctgctggccttctgaggcatgcacttgggtccatagactagaagggacgggctgacagatgtcctcaaggt

SEQ ID NO: 942676 - DNA, 580 bp, Homo sapiens
aatgggaggagttttcttatcctcctcgcagggcgtgcaacagggatgtggcttgcttctttggtgcctggctgctcaaacccctagggggagcatacagatgggcaggtcatgggcagtttttgggctctgaccccacagcagcgtctaaggttgagtgtttatagctcccgaagtcccagtgggtgtgtgtcacagtgtgctcttttagctttgctgttttgctgtctgtaggcagcttgtgttaatccgcccaattagagcctctgctttatcacaaggacagagggctttctgtatcctgaattattgccctggtgtaccagaaaaattgatcacatgtgggcttggaggatggctgcaaagttttattgattggaagtagctctcagtgaggtgaatggggaggccagrgggggatggaatgggatggtggtgtttccctggagtttgggctgcccagcggcaggcatctcctctgatcactactgaccaaattccacatggtcccaccattgatggcctgtcagcatctgctggtgtctgtcagtgtgctcttctgatcctctgttcctctcga

SEQ ID NO: 942677 - DNA, 615 bp, Homo sapiens
tggccttcagttttcagtggttaaactatgtgtcagcttctatatggtaaattaagtttcttcaagactcacacctgccatatgtaacagctattaattctgggaaaaaagcaaaaaaaaaatacacaaaggcacttgagaatgaatgaaagcaggataattcttgaggggagtgaaaacttgaaagaagagtctcatttgaagtacatttctctttttttgacttttatggaaggacaggccaaaactgccaccaaatcatcagtagaaaactcataacctggccgggtgcggtggctcacacctgtaatcccagcactttgggaggccgaggcgggtggatcacgaggtcaggagatcgagaccatcctggctaacacggtgaaacctgtctcaactaaaaatacaaaaaaaattagccgggygtggtggcaggcgcctgtagtcccagctacttgggaggcagcagaatggtgtgaacccaggaggcggagcttgcagtgagccgagattgcaccactgcactccagtctgggcgacagagcgagactctgtctcaaaaaaaaaaaaagaaaactcataacctttatggcatgtagacgagaggacaaaatt

SEQ ID NO: 942678 - DNA, 748 bp, Homo sapiens
taaagggaggtactgaggataggagagtatatgggtttggcaccatggggtggataggcaaaacaatttggttgataaggctcagatcctgaactaacctgtaagccttgtcgggtttcaggacaggtaaaatgggggaatggtaaggagcatttataggctttaaaaggccatgctgtaacaggcgagtgataacaggctttaatctttttaaagcgtgctatgggatgggatattggcattgagcraggtaagcgtgattaggttttaatgggatggtaaggggtgcatgatcggtcactaaggagggagtagaggtgtcttatacttgtgggttaaggtggggagatacaaggggaggatgtgaaggaggctttgaactgggggaaaaggtggcaatgaggtgtggctgtagcctaggaatagtcagggaagcagataatttagttacagtgtctggtcctaataagggaactgggcaggtggggataactaaaaaggaatgcttaaaagagtattgtctaagttggcaccagagttggggagttttaagaggtttagaagcctggccatcaatatgcacaacagttatggaatcaagggaaacaggcccttgaaaagaaggtaatgtggagtgagtagcctctgtattgattaagaaggggatggacttactttctactgtgagagttacttagagcatctgtgatggtcctgtaggcttctgaggcaatcgggcagtgtcagt

SEQ ID NO: 942679 - DNA, 609 bp, Homo sapiens
atgataataatgcctgcatagggcagtaaccatggaatgccttctgaaggacctgcctgaagcagttttacagttaacttttaaaaaaaaggtacactctaaaataaatgataaaatgtatagtaaatgcataaacagtcatttatcactattatcaagaattatgtactgtacacaattgcatgtgctagactttcgtatggcagcacagtaggtttgyttacaccagcatcatcacaaacacatgggtaatgtattgtactatgacattatgttggctacaatgacaatagctgatgggtgcttatcagctctgtattagtttgttcttgcattgctatcaaaaatacctgagactgggtaacttataaagaaaagagatttaattggttcacggttctgcaggctatatgagaaccatggtggcaccttcttctggggaggcctcaggaaacttacaatcatggcggaaggcaaaagaggagcctgcactttacatggccagagcaggagaagaaagagaggggctaggtgctacacacttttaaacatccagatctcatgataactcactcactcactatgacaagaacatcaccgatgggatgg

SEQ ID NO: 942680 - DNA, 618 bp, Homo sapiens
aacaataatagtgacacaacctatcaaaacttctggaatgcagtgaaagcagtactaagaggaaagttcatagcattaaatgcctatatcaaaaagtctgaaagagcacaaacagacaatctaaggtcacatctcaaggaatcagagaaacaggaaagaaccaaacccaaattcagcagaagaaaagaaataacaaaaatcagagcagaactgaatgaaattgaaacaacaacaatagcaaaaaaaaatacaaaagataaatgaaacaaaaagttggttccttaaaaagctaagcaaaattsatagaccattagcaagataaatcaagaaaagaagagagaagatccaaataatctcaattagaaatgaaatgggagatattacaaccaattccacagaaatacaaaagaacactcaaggctactgtgaaaacctttacacacacaaactagaaaacctagaggagatggataaattcctggaaatatacaactctcatagattaaaacaggaagaaatagaatcactgaatagaccaataagaagcagtgagattgaaatggcaataaaaagattgctaacaacaacaaaaaaagtctaggaccagctagattcaca

SEQ ID NO: 942681 - DNA, 618 bp, Homo sapiens
aacaataatagtgacacaacctatcaaaacttctggaatgcagtgaaagcagtactaagaggaaagttcatagcattaaatgcctatatcaaaaagtctgaaagagcacaaacagacaatctaaggtcacatctcaaggaatcagagaaacaggaaagaaccaaacccaaattcagcagaagaaaagaaataacaaaaatcagagcagaactgaatgaaattgaaacaacaacaatagcaaaaaaaaatacaaaagataaatgaaacaaaaagttggttccttaaaaagctaagcaaaattcatagaccattagcaagataaatcaagaaaagaagagagaagatccaaataatctcaattagaaatgaaatgggagatattacaaccaattccacagaaatacaaaagaacactcaaggctactgtgaamacctttacacacacaaactagaaaacctagaggagatggataaattcctggaaatatacaactctcatagattaaaacaggaagaaatagaatcactgaatagaccaataagaagcagtgagattgaaatggcaataaaaagattgctaacaacaacaaaaaaagtctaggaccagctagattcaca

SEQ ID NO: 942682 - DNA, 684 bp, Homo sapiens
acgtgaagaatgcagaagcctcaggagccgatgcgatcaactggaagaaagggtatcagcgatggaagatgaaatgaatgaaatgaagcgagaagggaagtttagagaaaaaagaataaaaagaaaggagcaaagcctccaagaaatatgggactatgtgaaaagaccaaatctacgtctgatttgtgtacctgaaagtgacggggagaacggaaccaagttcgaaaacactctgcaggatattatccaggagaacttccccaatctagcagggcaggccaacrttcagattcaggaaatacagagaacgccataaagatactccttgagaagagcaactccaagacacataattgtcagattcaccaaagttgaaaggaaggaaaaaatgttaagggcagccagagagaaaggtcggattaccctcaaagggaagcccatcagattaacagcagatctctcggcagaaaccctacaagccagaagagagtgggggccaatattcaacattcttaaagaaaagaattttcaacccagaatttcatatccagccaaactaagcttcataagtgaaggagaaataaaatactttacagacaagcaaatgctgagagattttgttaccaccaggcctgctctaaaagagttcctgaaggaagtgctaaacatggaaaggaacaaccg

SEQ ID NO: 942683 - DNA, 735 bp, Homo sapiens
aaaatgacgtggacatatgtggagtcgttttaaggaggagggagtttaacaagcaagaaggaagggggaagaaagaaagaagaacctcctctgtacagagacttaggaaggggggctccaaagccgagagagggaaccatacctgccagggttaccagccaggtatatacacagaggctggaggaggcggtgtctgatttgcatagggctcaggggattggtttgaataggcatgtcattcacatagtccgtgaaaaagctggccgtcccaccctggccttttaatatgcaaatgaagggcgmcaggatgttctacactctggggaaatgtgggggcggccacgtgcggcaagggcaagaaggcagcagtaatcgcaatgtttgggtggacccagtttctaatggcctgcatttgcatatcaaaggttgccagcctggctctaagagccagggctttacaaaaaacgtttctggagcagctttaaaaatgaaacttcccaaggaccccttttcctctctgtctgcctaaaataatttcttaataactcctacaacattatcatttaaacggtaccctaaatgtcttccgaagttagcttggcccagtagcccaggaataattaagggaaaggcaagataggggttgggttagcttagcttactaagtttctcactgatacaacttttgcaagggtggtttcattcacatagctgccgtgccatttcttgtcagtt

SEQ ID NO: 942684 - DNA, 627 bp, Homo sapiens
gtccacactgcctttatgagctgtaacactcatgcgaaggtctgcagcttcgctcccgaagccagccagaccacgaacccaccaggaggaacaaacaactccagacgcgctgccttaagagctctaatactcaccgcgaagatctgcagcttcactcctgagccagcgagacacgaaccaccagaaggagaaaacgccgaacacatccgaacatcagaaggaacaaactccggacacgccacctttaagaactgtaacactcaccgcgagggtccgcggcttcattcttgaagtcagaccaagaacccaccaattccrgacacacatgcaccactacacctggctaatttttgtatttttagtagagatggggtttcaccacgttgcccagtctggtctggaactcctgagctcaagcgatcttcttgcctaggcctcccaaagtgttgggattacaggcactaggttatttttttttattttttttctgagaaagagtctcgctctgtcgcccaggcttgagtgcaatggcgcgatctcagctcactgcaacctctgcctctcaggttcaagtgattctcctgcctcagcctcctgagtagtcgggattacaggcacgcaccacca

SEQ ID NO: 942685 - DNA, 627 bp, Homo sapiens
gtccacactgcctttatgagctgtaacactcatgcgaaggtctgcagcttcgctcccgaagccagccagaccacgaacccaccaggaggaacaaacaactccagacgcgctgccttaagagctctaatactcaccgcgaagatctgcagcttcactcctgagccagcgagacacgaaccaccagaaggagaaaacgccgaacacatccgaacatcagaaggaacaaactccggacacgccacctttaagaactgtaacactcaccgcgagggtccgcggcttcattcttgaagtcagaccaagaacccaccaattccggacacacatgcaccactacacctggctaatttttgtatttttagtagagatggggtttcaccacgttgcccagtctggtctggaactcctgagctcaagcgatcttcttgcctaggcctcccaaagtgytgggattacaggcactaggttatttttttttattttttttctgagaaagagtctcgctctgtcgcccaggcttgagtgcaatggcgcgatctcagctcactgcaacctctgcctctcaggttcaagtgattctcctgcctcagcctcctgagtagtcgggattacaggcacgcaccacca

SEQ ID NO: 942686 - DNA, 818 bp, Homo sapiens
gaacccaccaattccggacacacatgcaccactacacctggctaatttttgtatttttagtagagatggggtttcaccacgttgcccagtctggtctggaactcctgagctcaagcgatcttcttgcctaggcctcccaaagtgttgggattacaggcactaggttatttttttttattttttttctgagaaagagtctcgctctgtcgcccaggcttgagtgcaatggcgcgatctcagctcactgcaacctctgcctctcaggttcaagtgattctcctgcctcagcctcctgagtagtcgggattacaggcacgcaccaccatgcccgactaatttttgtatttttttgtttagtagagacggggtttcgccatattggtcaggctggtctcgaactcctgacctcatgtgatctgcctgcctcggcttcccatagtgctgagattacaggcgtgagccactgcacccggcctacaggcrctaggtttttaactcattttactccctaagtttccctagattcgtctaatgtgactaaagtacacttagttctcaatttcatccttaactacataccctaattttggtctcagggaatggtaatagagaaagacccacatacaaaaaagacattaaggcattgaaatctcaaagaaagatcaaacaaactcaggtgtaacagagaagccaagtctgattatgagaaaggtaatcgcaggtttgagatttgatactgggtagccccccacaaatcttattcactctgagaagtacaaagaggcggtcattagcttcggttgttagaaatcaagatt

SEQ ID NO: 942687 - DNA, 434 bp, Homo sapiens
aagcaacctcactgctgggtgtatacccaaaagaaagaaaatcagtatattaaagaaatacctgcactcctgtttgttgcagcattgtttaaaactgataacatttggaagcaacctaagtatccatgaacagatgaatagataaagaaaatgtggtacatagacacaatggagccatgaaaaagaatgatatccattaattcgcaacaacaygggtggaattggagatcattatgctaaatgaaataagccagggacagaaagacaaacattgcctgttctcacttatctgtgggacctaaaaaatcaaaacaattgaacttatggacatagaaattagaaggatcattaccagaggctgggaagggtagtggggcactgaaggggaggagaagatcattaattggtacaaaaatagttagaaagaatgaatg

SEQ ID NO: 942688 - DNA, 751 bp, Homo sapiens
ctggtaaagcataatttctgggtatgtctggggatgtttctggaagagacttgcatttgaatcagtaagctgagtaaggaacatccacccttactcagtgtgcagggagcaccatccacttggctgaaggccaggacagacaaaaaggcttgggagggctcaatttgctygctctctttctcctggaactgggacatccttcttctcctgcccttgaacatcacaactctaggttctctgacctttggactctgagacttgcaccagcagatccccgtttctcaggcctctggctcctactgaaagttaccccattggccccctggttctcagacctttgtgcctggactgagtcacgctaccagcttccctgcttctcctgtttgcagatggcatattgcagggcttctcaacttttgattacctgagccagttcccctaataacgctcctctcatatctatctatctatctatcatctatctatctatttttatccatctatccctctatatatattatgtacacatctatcatctatctatatcccattggttctgtttctctggaaaatcctgattaatatagacatagacatagacgcagacatagacactgacacagacacagatagacacagacacagacacagacagacacagacacagacatagacacagacacagacctagatgcagacgcagatgcagacaaacgcagacgcagacacagacacagacgcagacagatac

SEQ ID NO: 942689 - DNA, 751 bp, Homo sapiens
ctggtaaagcataatttctgggtatgtctggggatgtttctggaagagacttgcatttgaatcagtaagctgagtaaggaacatccacccttactcagtgtgcagggagcaccatccacttggctgaaggccaggacagacaaaaaggcttgggagggctcaatttgctcgctctctttctcctggaactgggacatccttcttctcctgcccttgaacatcacaactctaggttctctgacctttggactctgagacttgcaccagcagatcccygtttctcaggcctctggctcctactgaaagttaccccattggccccctggttctcagacctttgtgcctggactgagtcacgctaccagcttccctgcttctcctgtttgcagatggcatattgcagggcttctcaacttttgattacctgagccagttcccctaataacgctcctctcatatctatctatctatctatcatctatctatctatttttatccatctatccctctatatatattatgtacacatctatcatctatctatatcccattggttctgtttctctggaaaatcctgattaatatagacatagacatagacgcagacatagacactgacacagacacagatagacacagacacagacacagacagacacagacacagacatagacacagacacagacctagatgcagacgcagatgcagacaaacgcagacgcagacacagacacagacgcagacagatac

SEQ ID NO: 942690 - DNA, 560 bp, Homo sapiens
tcgaggagacattggcgttgctgagcagccctgtgagggttgccctcggtggcctgggcctggcaggggtgggctgccatggatctgagctctcccatagccacagggacaactggattcccgagtagcacaggtcaaagggcagcacttaactgtctgtcacaagcaagggggtgagaggatcagaatggacagcagggttgggacagccgcgggggagcctgccctgcccagcctatggagatggctcataggacatagcatttccagggggaaggtgtctaggcagccggcaaggattttgttcaacaaatagaatgaaaagcaaccaagaatcgatgagcagaagtccaaggccggatgccccaacagaaaggaatgatcccctgctgtttccaartctgaacttgttctcaatctcagaatccatcagtggaagaggggcaggtcccaagaggaaggaccccgcagccataccatcccccaggactgtatcggtttcctggggctgctgtaaaaacctgccccagactgggtggcttaaacaatagaaatgcatt

SEQ ID NO: 942691 - DNA, 611 bp, Homo sapiens
tgaagcagttgggattcagggcaccatgtcctgaggtggcatagagcaggggggccctgggcccagctcaagaaaccattgttccctcctaggcttccaggcctgtgatgggaggggctgctgtgagggtctctgacatgccctggagacattttccccattgtcctggtgattaaaatttggttcctcattactcatgcaaatttctgcagccagcttgaatttctccttagaaaatgggtttttcttttgtattgcatcctcaggytgcaaattttccaaatgttaatgctctgcttcccttttaaacataagttataattccaaaccatatctttgtgactacataaaaatgaatgcttttaacagcaaacaagtcacttcttgaacactttgttgcttagaaatttcttctgctagataccctaaatcaactctctcaagttcaaagttccacagatctctagggcagggtaatatactgccagtttctttgcatagcaagagtgacctttactccagtacccaacaagttcctaatctccatctgagaccacctcagcctggacttcattgtccatatcactatcagcattttggtcaaagccatt

SEQ ID NO: 942692 - DNA, 741 bp, Homo sapiens
gttgagatgaaggtgctcaccctccgggcttcactctgatacttgacagcctttttggtatctgccacggcccgctccacaaagcccactgactggtccatgttgttctcaatacggtcaatcatggatccctttccccagatgcaagaggtggtggcagcagaaacagagacagggagagggaagagaaagagcgagacacagcaaacaaaatggactctcttctctgaaggcacaggagagtctcaccttccgggcctgactctggtatttcacagcttttttcgtttcatctcgtgccttctccacgtggtccactgtgtgcatgacattcaactctatgttatctaacatctcaccctgcaaagaacagactctgatcacaccaagtaaacgtctcaggtcagtcctagccaatgcggggaagggattctctttcttacaatcttcagtggcaagaagagcatccacaaaccttgatgcatggccttccataggacacccattcacagtccttggtggtrgggtggcagtcacttgttcaagaaacattcagtgaattttactacttctctgtgaccagcactccaccaggcatccagaacatactatctagatacctagtaactacctataaatatactctgagatatccccagacaacctttgttattttttttacacttaagcacatggagaggaaccaaaataaggatatctcattgttattaggacatcact

SEQ ID NO: 942693 - DNA, 550 bp, Homo sapiens
ttagtgctataaattttcctctaaacactgctttagctgtgtcccagagattttggtatgttgtgtctttgttatcattagtttcaaggaacttatttatttctgccttaatttcgttatttatccagcagtgattcaggagcaggttattcagtttccatgtagttgtgaggttttgagcgagtttcttaatcctgagttctaatttgattgcactgcagtctgagactgtttgttataatttctgttattttgcatttgctgaggagtgttttacttccaattatayggtcaattttagaataagtgctatgtggtgcttagaagaatgtatattctattgctttggggtggagagttctgtagatgtctattagatctgcttggtccagagctgagttcaagtcctgaatatccttgttaattttctgtcttgttcatctatctaatattgacagtggggtgttaaagtctcccactattattgtgtgggaatctaagaacttgttttatgaatctggatgcttctgtattgggtgcatatatattt

SEQ ID NO: 942694 - DNA, 584 bp, Homo sapiens
ttttgaatttcttctctgcgttatcttgaatttctttgagtttcctcaacacagctattttgaattctctgtctgaaaactcacatatgtctctctctccaggattggcccctggtgccttatttcatttggtaaggtcatgtttttctgtatggacttgatgcctgtggctgttcattggtgtctgatctttgaagagttatgcatttatcacaatcttcacagtctgggcttgtttgtgtccatccttcctgggaacgctttctacatattcaaagggacctgggggttgagatctgagtttttggtcactgcaagccatatctgcattacagagcaccccaagcctagtaacgttgtggttcttgaagactcrtagaggtaccactttggtggtctcggataagatatggaagaattctctggattaccaggtggagacttttgttctcttcttttactttctcctgaacaaaggagtctctctttctttgctgaggtacatgaggctatgggaagggttacacaagcacccctgtggccatcaccactgagattgggctgggtgagacctgaatccagca

SEQ ID NO: 942695 - DNA, 605 bp, Homo sapiens
gtcaaggcactctgatttttggtcaggacacagaaaaaaaaagtgaggggaactggggaaccctgcaggagttttattcagaatatataagaaatctaacatattaataataaagtgacacatgcaattaaaaatgcatgggagttttaatcagactcttcacaaagacatatatatggccaataaacacatttaaaaagtacttaacattattagttatcragaaaataaaattcttataaggcaccactaaaaaaaatccactaaaatcattaatgttaataagactgacaacaccaaacattgatgaggagctagaacatctggaaggctcatacaatatcaaattgctcacagttcaatatttattcaccctatgacttctacatatttgcccaagataaatgaaaacataaataccccaaaaaagcttgctcaagaattcataacagctttattcttgatagtccaaatctgaaaatagtggcatattcatacaatagaatattaccactagtactatatacaacaacatggattaaactgaaaaccattaaaatgtctctcttatcctaagagacatcattctaggcaaaagaagccag

SEQ ID NO: 942696 - DNA, 599 bp, Homo sapiens
ggtgatgttcttgtcatagtgagtgagtgagttatcatgagatctggatgtttaaaagtgtgtagcacctagcccctctctttcttctcctgctctggccatgtaaagtgcaggctcctcttttgccttccgccatgattgtaagtttcctgaggcctccccagaagaaggtgccaccatggttctcatatagcctgcagaaccgtgaaccaattaaatctcttttctttataagttacccagtctcaggtatttttgatagcaatgcaagaacaaactaatacagagctgataagcacccatcagctattgtcattgtagccaacataatgtcatagtacaatacattacccatgtgtttgtgatgatgctggtgtaarcaaacctactgtgctgccatacgaaagtctagcacatgcaattgtgtacagtacataattcttgataatagtgataaatgactgtttatgcatttactatacattttatcatttattttagagtgtaccttttttttaaaagttaactgtaaaactgcttcaggcaggtccttcagaaggcattccatggttactgccctatgcaggcattattatcat

SEQ ID NO: 942697 - DNA, 608 bp, Homo sapiens
cctacccccaaaatttcactcccagtccttagaggatcagccaggggccctcagtctccatcatacagatgagggactgcagtccagggaaggaaatggactgggcctcctgacacccagctcctgctccctccccaaagtgtaggagctagcaggagccttgccactgagaagtggggacatcagtgcttaatcagaccaacctctgctctgaggggctcccagtctggtgtaggccatagacattttaaaagtgtgatcaaggccgggtgcagtggctcacgcctgtaatcccagcacttctggaggccaagacrgacagatcacctgaggttgggagttcgagaccagcctgatcaacatggagaaacccagtctctactaaaaatacaaaaattagctgggtatggtggtgcatgcctataatcctagctactcaggaggctaaggcaggagaatcccttgaacccaggaggcagaggttgcagtgagccaagattgagccctttgcactcccaccttggccacaagagcgtaactcccttttaaaaaaaaaaaaaaaacaccactgaaaaacaaaagtgtgatcaatgctaggctggaaggaa

SEQ ID NO: 942698 - DNA, 626 bp, Homo sapiens
aggatgtaaataaatggataatagttttactttgttaaaaactgaaagatacagtaagatcacttctctccaaaatgatgtatggagttaatggaatcccagtcaaaatcttcgcagaattcctgatagatacataaactttattccaaaatttatacggaaatctcaaaaacttgaatggtcaaaacaatggtttaaattacaataaagtkggagttatgtgatattaagtcatattatgaagctacagtaatgaagacagtatagtattgacaaaataaaacatataaacctattgaacagtatacagaccttcaaatatggccaactgtttttgacaaatgtgcaaagacaattatatggagaagagcaaagttttcaaccaatggtgctggaacagttggacgttcacatacaaaaataatgaacctgtaatatcatatgcaaaaaattaactttaaatggttcatggatttaactgtaaatgtaaacactgaagaaaatatagaaaaagttctttatgacattggttaagcagatagttcataaatgcaaaatcaaagcgttacccaaaaaataaaaaagaagataaattagactttatcaaaataaaaaaaaatgttctc

SEQ ID NO: 942699 - DNA, 626 bp, Homo sapiens
aggatgtaaataaatggataatagttttactttgttaaaaactgaaagatacagtaagatcacttctctccaaaatgatgtatggagttaatggaatcccagtcaaaatcttcgcagaattcctgatagatacataaactttattccaaaatttatacggaaatctcaaaaacttgaatggtcaaaacaatggtttaaattacaataaagtgggagttatgtgatattaagtcatattatgaagctacagtaatgaagacagtatagtattgacaaaataaaacatataaacctattgaacagtatacagaccttcaaatatggccaactgtttttgacaaatgtgcaaagacaattatatggagaagagcaaagttttcaacmaatggtgctggaacagttggacgttcacatacaaaaataatgaacctgtaatatcatatgcaaaaaattaactttaaatggttcatggatttaactgtaaatgtaaacactgaagaaaatatagaaaaagttctttatgacattggttaagcagatagttcataaatgcaaaatcaaagcgttacccaaaaaataaaaaagaagataaattagactttatcaaaataaaaaaaaatgttctc

SEQ ID NO: 942700 - DNA, 633 bp, Homo sapiens
ctatttaaggccaataactcttagattttcccttttcatgctattttataaaacttgtaggcatgcttcattttttttgttattgctttcctctgtctgtgtgttttcaaatagcctgttcaagcacacaaatcctttcttctccttcatccattctgctcttgagagactctgatgcatttttctgtttgtcagttaatagggctgttccagaatttctgcttgagtttttaagattattttaatctctttgttaaaattatctgatggaattctgaatttcttctctgtaatgtcctgaatttcattgcgkttcttcaaaacagctattttgagttatctgaaaggtcacatatctctgtcactctgggattgctcattggtgccttatttagtttggcaaagtcatgttttcctagatggtcttaatacttttggatgtttgtcaatgtctggacattgaaaaactagtttattctaatcattgcagtctgagcttatttatacctataattcttgatagggctttccaggtatttaaagggaattgaatgttgttctaaatctttggtcactgtgtgcattagggtgcaccccaagcccagtaacactttaagtcttgctgactcatac

SEQ ID NO: 942701 - DNA, 654 bp, Homo sapiens
caagctggcattgagtgccttttgcttttccaggcacatagagcaagctgtcagtgtatctaccattctggggtctgaaggatggtggacctctttttacaactacactaggtagtgccccagtggggactctgtgtaggggccctaaccccacatttccccttctgcaatgccctagtagaggttctccttgagggctctgcccctgaggcaaacctctgcctggatatccaggcatttccataygtcctctgaaatctaggcagaggttcctaagcctcagttcctgccctctgctcccacacagacttaacaccatgcggaaactgccaaggcttgcagcttgcatgctttggaacagcagcctaagtcatgtctgggtcccttttagccatcgccagaactggcgtggctgggacacagggaacagtgtcctgatgttgcacaggaaagaagtgccctgggcccagcctgcaaaaccattcttccctcctacgcctccaggcctttggtgggagggcttgctgtgaaggtctccaaaattcttttgaggtatttcccccattttcttggctattaacatttggttactctttacttatgcaattttccacaactggcttgaatttctccctacaaaatgtgtttttttct

SEQ ID NO: 942702 - DNA, 654 bp, Homo sapiens
caagctggcattgagtgccttttgcttttccaggcacatagagcaagctgtcagtgtatctaccattctggggtctgaaggatggtggacctctttttacaactacactaggtagtgccccagtggggactctgtgtaggggccctaaccccacatttccccttctgcaatgccctagtagaggttctccttgagggctctgcccctgaggcaaacctctgcctggatatccaggcatttccatatgtcctctgaaatctaggcagaggttcctaagcctcagttcctgccctctgctcccacacagacttaacaccatgcggaaactgccaaggcttgcagcttgcatgctttggaacagcagcctaagtcatgtctgggtcycttttagccatcgccagaactggcgtggctgggacacagggaacagtgtcctgatgttgcacaggaaagaagtgccctgggcccagcctgcaaaaccattcttccctcctacgcctccaggcctttggtgggagggcttgctgtgaaggtctccaaaattcttttgaggtatttcccccattttcttggctattaacatttggttactctttacttatgcaattttccacaactggcttgaatttctccctacaaaatgtgtttttttct

SEQ ID NO: 942703 - DNA, 654 bp, Homo sapiens
caagctggcattgagtgccttttgcttttccaggcacatagagcaagctgtcagtgtatctaccattctggggtctgaaggatggtggacctctttttacaactacactaggtagtgccccagtggggactctgtgtaggggccctaaccccacatttccccttctgcaatgccctagtagaggttctccttgagggctctgcccctgaggcaaacctctgcctggatatccaggcatttccatatgtcctctgaaatctaggcagaggttcctaagcctcagttcctgccctctgctcccacacagacttaacaccatgcggaaactgccaaggcttgcagcttgcatgctttggaacagcagcctaagtcatgtctgggtcccttttagccatcgccagaactggcgtggctgggacacagggaacagtgtcctgatgttgcacaggraagaagtgccctgggcccagcctgcaaaaccattcttccctcctacgcctccaggcctttggtgggagggcttgctgtgaaggtctccaaaattcttttgaggtatttcccccattttcttggctattaacatttggttactctttacttatgcaattttccacaactggcttgaatttctccctacaaaatgtgtttttttct

SEQ ID NO: 942704 - DNA, 636 bp, Homo sapiens
gtttccatttgatttagttctagaaagtccttaggttctctgcctccaggccctattctcctgcctcaatcatagatcactgcagccttgaggtcctgggctcaagctcaggtcccacctcagcttcctgagtagctgggaccacaggcccgcaccaccatgcccagctaktttaatttttttttttttggagatggaatcttgctctgtcgcccaggttggagtgcagtgttgcgatctcggctcactgcaacctccgcctcctggattcaagcaattctcttgcctcagcctcccgaatagctgggactacaggcgcccaccaccacgcccagctaattttcgtatttttagtagagacggggtttcaccatattggccaggctggtctcgaactcctaaccttatgatccgcacgcctcagcctcctaaagtcctattttttttttttaagaggccaggtgtggtggctcacacctgtaatcccagcactttgggaggccaaggcgggtggatcctctgaggtcaggacttctgccattttcccattcatttattcaagttttaattgagtacttacttgtgctaggcactgttgtggcagcggacaaactgttcaacaagacagagctcttg

SEQ ID NO: 942705 - DNA, 671 bp, Homo sapiens
gaggagcacattggcagaggaacacacaagcggctagacgttgagtggaactcaccagcaggcaccagcaggccactgacgggcaaaacaacacagagtttggctggggcagttggaggagcgctcggcccccaagcggcccaacttatggggaaaatcatctcccttatggctcccccatctgctgagagcttcttccactcaataaaaccttgcactcattctccaagcccacgtgtgatctgattcttccactacaccaaagcaagcaccccaggatacagaaagccctctgtctttgccacaaggtagagggtgtaattaagctagttaacacaagctgcctttggatggctacactaaaagagcaccctgtaacacatgcctactggggcttcaaaagctgtaaacattcacccctagacactgccctggtgttggagccccacagcctgcccrtatgtatgctcccttagaggcctgagcagcagggcactgaagaaacgagccacttccccatcgtacaccctgcgagggggacaaaggaacttttcccatttcacctcctctgtcagtaccaagctggtctgtatgaggacggcagtctttgaaaaacaacatattggccaggcgtggtggctcacacctgtaatcccagcacttcgggaggt

SEQ ID NO: 942706 - DNA, 603 bp, Homo sapiens
gataccaccatttcttttctttgagatggagtcttgctctgtcacccaggctggagtgtagtggtgcgatcttggctcactgcaacctttgcctcccgggttcaagcaattgtcctgactcagcctcccgaatagctgggattacagacgggtgccaccacacctggttatttttttgtatttttagtagatatggggtttcaccatgttggtcaggctggtctcgaactcctgacctcgtgatccgcctgtcttggcctcsaaaagtgctgggattacaggcatgagccaccatgtccagccaccatttcttattaatacaatagcttcctatataatctccttaaaatttccctcctcctgtctttttaaaaacacaacagcgagaatgatccattgaatacctaagtcagattatgccacttctctgcttaaaaccctccagtaccttcctgtaatggttaacattaactgttaatttgactggattgaaagatgcaaaagtattgttcctgggtgtctgtgagggtgttgccaaaggagattaacatttgagtcagtggatcgggaaaggcagacccaccctcaatgtgggtaggtacc

SEQ ID NO: 942707 - DNA, 610 bp, Homo sapiens
atctgtatactgaatgtaagaatgaacaaaaggtcatcataaggacagcctgtgagtttatgcactgcatactgcaaatgacccactccagcaatgggaagacacccctaacattgcttctctccttataacgaaaatattattcatcatcagctttaaaatggatcttctcactctgtgcagtctccgtggtaacgtcccataagcccagggttttaagacctttctcctgtgctctaagcctacatatctaactgcctaatggcctttccmcttgaatgacacatcattcagtttcagtgtcctaaactgaagtttcaactccaagtctgtttttttctcttgtagtcttcatgtcagtcaatcagtcttttatcctaaccagaaatatgtgagttctcatggattcctccctctcactcacttttcagttctataatcacccagttcctacattgtttgcatcttaaatatctcttctagtcctcccttctcctttatacccactgccactgccacaatgttagctccttcagatctcatattttctcacttttattgctatagacataccccccgcagttatcctacctctaggcaaatcccttcc

SEQ ID NO: 942708 - DNA, 533 bp, Homo sapiens
aaaccaggaatagcgcatgacttcctgcaagatggggtctctatagttcatcctgaccctggcagaaaatccgcatatcttggaggccctggaatttgagggatccactcagaggctgccaaactggccttggcagccacaaacaggaatgtcataccagagacatgggaggcagggacggccttccctttttggagctgatcataattccaaaagacacaatcctgaatgttgaaatcctgaaagttcaaaatcccaaaaattaggccaggcgcagtggctcacgcctgtaaccccagcactttgggaggctgaggcagatgtatcatttgargtcaggaatttgagtccagcccgatcaacttggtgaaatcctgcctctaccaaaaaatacaaaaattagccaggcatggtggcgcgcacctgtaatcccagcttctcaggaggctgaggtaggagaatcgcttgaacctgggaggtggaggttgtagtgagcagagatcgggccactgcactccagcctgggtaacaga

SEQ ID NO: 942709 - DNA, 561 bp, Homo sapiens
tgaacatgctgtctcttacctgcttaaaatcctgctatttagaatgaagcctcaatatctcacaatggtctgtgcagccctgggtcatgtagatcttgccaatccctgacctcactttgtaccactctcctcctcaatcactgtatttcaagccatgctggccttctttctgctcctcaagcacaccaaacgatttcccttctcaggcttttgtgcttactattctctttggctaygatattcttcccttaggtcttggaatagtcggttctttattgtccttcaatctgtaactctaatgttatcccttcagagagccccactttagctcaagtagaatcctccttcctcttagtttctatggcatcacctgttttatccttcatggtactaaccctgctggatagtcatcctatgtatgtctttgcttacttatttttgttcatctacccatcactagcctaagtttcataaagacggggacctagtccaccctgttctctactgtaaccccagtgcttagaacagtgctcagtacacagtaagttcacaataaatatt

SEQ ID NO: 942710 - DNA, 745 bp, Homo sapiens
gacactaaatccttattgtagactatggttttaaaaacttgggcatttctgagtctgtgcatattattttccgttttagtgaactattttgcccaaatcttgaaagagttttctctgatgtactcgtgatcgtatgtgtatgtgcgtgattgtmtatgcgcccccagatactgcgtatgtgtgtatatatgtattaggcttaaacggaatctcaattttgtgaaggaaaggagcttagagaagaaataccataccacctgtttgttgcatcttagttatgaacctcgaacagaaattgcctgtcattcttgttttgctttgctttgtctcaagaaagaaaacattgttgcgctcctctcagtccctgagaccctaacttgtgatgtttaccgtttaaatccacgggttaggctcttgggagctgcgagtcgtgcttttgcatcctggaaatttggtggaattttattctttaaagcaaaaacaaaagaaaagaaagtttgtctgaggtgattgagtatacctctgaggttttcattgttagatgggatcaggtgaccagagagtggcagctcctggatttctgttaaagtaggtatatattttgctttaatagcgtgttggctgctatgtatatgtatgcatgttattgatgcctgaggcttgtggaactcatctgcctggtctattccttgagagcaacacgcagtagtatacgagcgtaacaagaacagctcagtacctggtg

SEQ ID NO: 942711 - DNA, 777 bp, Homo sapiens
atctatctggtcctgggtattttttgctcaggaggctattaattactgtctcaatttcagaacctgttattggtgttctcagggatttgatttcttcctggcttagtcttgggagggtgtatgtgtccaggaatttatccatttcttctagattttccagtttatttgtgtagtggtgtttacagtattctcttatggtaatttgtatttctgtgggatcagtggtgatattgcctttatcatttttattgtgtctatttgattctgctctcttttctttattagtctggctagtggtctgttttgttaatcttttctaaaaaacaccttctggattcattgatgttttgaaaggttttacgtgtctctatttcctttggttcttctctgatttcagttttttcttatyttctgctggcttttgaattcgtttgctcttccttctctagttcttttaattgtgatgttagggtgtagattttagatctttcccactttatcctgtggtcatttagtgccataaatttccctctaaagacttctttagctgtgtcccagagatgctgctatattgtatctttgttttcattggtttcaaagaacttacttatttctgccctaatttctttatttacccagtagtcattcagaagtaggtggttccgtttccatgtagttgtgcagcttcgagaaagtttcttaatcctgagttctaatttgattgcactgtggtctgagagacagtttgttgtaatttgtttttttttgcatttgctg

SEQ ID NO: 942712 - DNA, 777 bp, Homo sapiens
atctatctggtcctgggtattttttgctcaggaggctattaattactgtctcaatttcagaacctgttattggtgttctcagggatttgatttcttcctggcttagtcttgggagggtgtatgtgtccaggaatttatccatttcttctagattttccagtttatttgtgtagtggtgtttacagtattctcttatggtaatttgtatttctgtgggatcagtggtgatattgcctttatcatttttattgtgtctatttgattctgctctcttttctttattagtctggctagtggtctgttttgttaatcttttctaaaaaacaccttctggattcattgatgttttgaaaggttttacgtgtctctatttcctttggttcttctctgatttcagttttttcttattttctgctggcttttgaattcgtttgctcttccttctctagttcttttaattgtgatgttagggtgtagattttagatctttcccactttatcctgtggtcatttagtgccataaatttccctctaaagacttctttagctgtgtcccagagatgctgstatattgtatctttgttttcattggtttcaaagaacttacttatttctgccctaatttctttatttacccagtagtcattcagaagtaggtggttccgtttccatgtagttgtgcagcttcgagaaagtttcttaatcctgagttctaatttgattgcactgtggtctgagagacagtttgttgtaatttgtttttttttgcatttgctg

SEQ ID NO: 942713 - DNA, 750 bp, Homo sapiens
ataaaatcatggcaaaacaaaatattttaattataattgttataatggagaattagaggagagtctagcctagaccaggaggccttcttggaaggcttttccaggtgtagcctaatcttaaaagatgaatcagcattgaccagcaaagacaatgttccaggcaaaggaaacagcttgtgtacaggacctgagtctggtgggcttcccagaaacatcaccaggtagctagggcatgacgggggtgaagagttgcttgaaatcatgcagtacagtttggcagrgcccaagaaacgcagggccttggaggcaatattagcactgggcttggttttgttttgttttcctaagatcaatgggcagtcatcgaaaggtgttatataaggggtgacatgatcagacttgtattttaaaaatattgtgctcaggaaatggattgtggccatgacaagtagtgctgatgagtggggtggtggtggtggcagtaggggtgtggagaggggttggaattcagcaacacgggggagtaggatttgatgtttctttggactggggcaagtgagcaggagcggtcaagggcaactcctggttctggcttgcgtaggctgtggcaccatgaattaaggttgggtagctggggagaagccctgggattgcctttatggtagctcttcaggtgcctttcaccctctgcctcttgctataattatttcacagcatttgtgtttgaaaccagaggctacaaaagaacct

SEQ ID NO: 942714 - DNA, 798 bp, Homo sapiens
cttaatggcaaaatactgaatgctttctctctaagatcagaaataagacaaggatatctgctcttgccactgctattcaacattgtattctaggatctagtccgggaatttaagcagtgcagtgaagtaaagaataaccagattggaaagaaataataaaactctatttcttagatggcatgatcttgtatatagaaaatcataaggaaktcactgaaaatattagcattaataaacaagttcaactaggtcacaggctacaagatcaattacacacatcaatagtatttccatacactagcaatgaacaatctgaaagtgaaattaagacaataattccatttagagtaacatcaaaaagaatcaaatacttaagaatatatttgacaaatgaagttcaagattgccacatacattattaaaaggaattaagaagacctccatatatcaaaagatattttatgttcactgataggaagacttaatattgttaagatggtatcttagtctgtatgtgctgctataagcaaataccacagactgggcaattagaatatacatttatttcttacagttctggagggtggggaaattcaagatcaagacaccagcaggttcggtgtctcatgagggctgctgtctgcttccaagatggtgccttgttgctgcatcctcacaagacagagagagtgactgctctgtcctcacatggcaaaggtggaaaggcaaaagaatctagtagttccctccagcctttgtataggggtactaatcccactgcttttgtgacttaatgac

SEQ ID NO: 942715 - DNA, 765 bp, Homo sapiens
agaatgagggaaaggccttttgaagtcacaattacaatgccaatgaagtgacagtactttgcaggggtggggcaaagttctccagaaggctatgtatactctgaatcacagtccaatatatggtaccatttcccccatagccaggattcatgggtccaggaatcaaggggtggaaatggaagtggcatcactcaccatcactcctagtgaccctagcaaaattttttccttcctgttcccrtgacattacattctgctggcctagaggtctttattccagagggaggaatgctgccaccaggagacacagcaacgagtccattaaactggaagttaagactgccacctggccactttgggcttctcttacctctaagtcaacagactaagaagtaagttacagtgttggctggggtgattgacctagactgtcagatgaaatcagtctactactctacattggaggtaaggaagaatatgcatggaatacaagagatccattagggcgtctcttagtattatcacaccctgtgattaaggtcaatgggaaactacaacaacccaatccaggcaggactacaaatgacccagaccctcaggagtgaaggtttgggtcactccactgtgtaaaaaactacaacctgctaaggtgcttgctgaaagcaaagggaatacagaaagggaaatagaagaaggtagtcatcaataccagctacgaccatgtgaccagttgcagaaatgaggactgtaattgtcatgagtata

SEQ ID NO: 942716 - DNA, 665 bp, Homo sapiens
aggtcaatgggaaactacaacaacccaatccaggcaggactacaaatgacccagaccctcaggagtgaaggtttgggtcactccactgtgtaaaaaactacaacctgctaaggtgcttgctgaaagcaaagggaatacagaaagggaaatagaagaaggtagtcatcaataccagctacgaccatgtgaccagttgcagaaatgaggactgtaattgtcatgagtatagcctcctcattttaagaacatatttgcacatgtatatacttgtactaagaaaatatcttcattttatttcctttctttttcttttatcatgtgacatagatttatggacttcatgtcatcatttaagtgttgttaactttatgtaatagcatttaggttaaggattagtgcacttccagttgtatgaaggatagctgtattatgttaggcataattatgaccttattattgtctttatttgaagattatgtataatttcaggagatgtgtatgggttcaagttgrcaaggggtggacttgtgatggttaatattgagtgtcaacttgattggattgaaggatgcaaagtattgttcctgagtgtgtctgtgagggtgttgccaaaggaggttaacatttgagtcagtggactgggagagttagacccaccttcaatc

SEQ ID NO: 942717 - DNA, 672 bp, Homo sapiens
ctaaatgaagagttaatgggtacagcacaccagcatggcacatgtatacatatgtaactaacctgcacattgtgcacatgtaccctaaaacttaaagtataataataataaaataaaaataaataaataaataaataaaacagtgaatgtttattggctgctaactctgtgccaaagactgctctagattcttgatgtgtatgaacttaccacaatttcccaacaaacctgtgaggtaataagtagtatttttaaaaagaaaaagctactattataaaaatggtcatgtgaaaagtagaaagaggcaaaatgaaaatccatattcccacaacctagatccaacagttgctaactttttgccatatttatttgatttctttcttttacttagatattttaaagtaaatacatcagcataaatctccaaaaaagcagtacgtcgttccatatgaccacaatagcattgccaygcctaggaaattaataacgtaactatctaaaatcatcgaatacttcatattaaaaatgtttcagttatccctaaaatttttttttataactggtgtgttcaagtcacactaatgagttcaagctgatatgtgtaaaatccgcattttacaaattcaggaaagaaggcaccgagtcacacagctagtcactagaagagctgga

SEQ ID NO: 942718 - DNA, 581 bp, Homo sapiens
tctaggcatgtgccaccacgcccagctaattttgtatttttagtagatacagggtttctccgtgttggtcaggctggtctcaaactcccaacctcagatgatccaccctcctgggcctcccaaagtgtttgtttttaaataaataagttgggacatttggagatccaaatagataaaaatacttttggagtcttaccctctacatatacaaataaatcccagatagataatagccttaaatatgcaaagaaaaataataaattttttagaacatagcagaggaaaaatctttataactttgggttagaaaataattcattaaacaagactcaaaaagcactaactctaaagraaataaattggtaaaaataggctacattgtaactaagacttttgttcataaaagtataccatattcttagtaaaaaatggaagccataaaatgggaataattatttgtaatataaatatccaatgaaagttttatatgtggaatatataaatatcttttacagataaataagaaaaaggcaatcagtccttcacacaggaggaagtttaaacatgtgaaaagtttttta

SEQ ID NO: 942719 - DNA, 588 bp, Homo sapiens
ggacttacagaataccttatccaccatcatggtattctgtatctcattgcatcctatcaaggaactcacttcatggccaaagaagtgtagaaatgggctcatgatcatgaagttcactggttttaccatgctccctaccatccttaagcagttggcttgattggatcgtgatatggcgtttttaagactamgttattgtgttcattaggtgataactggggcacttgcaagtatgggataaaattctgcagaggatcatatatgctctgaatcagcatctgatgaaacaggaaacatggtgctgtttcactgatagccaggattcaacagtctaggaatcaagaggtggaaatgagagtggccctactccctattactcctgttaacccactagcaaaatgtttgcattctgtttctgtgactttatgctctgctagcctagaggtctttattccagaggaaaaatgcctccaccaagagacacaacaatgattccattgaagtgaaggttaaatggcaacaaggatgctttgggctcttcctgcctctgagtcaacagaacatggagggtgtttcggtgttgggtga

SEQ ID NO: 942720 - DNA, 604 bp, Homo sapiens
ttaggtgataactggggcacttgcaagtatgggataaaattctgcagaggatcatatatgctctgaatcagcatctgatgaaacaggaaacatggtgctgtttcactgatagccaggattcaacagtctaggaatcaagaggtggaaatgagagtggccctactccctattactcctgttaacccactagcaaaatgtttgcattctgtttctgtgactttatgctctgctagcctagaggtctttattccagaggaaaaatgcctccaccaagagacacaacaatgattccattgaagtgaaggttaaatggcaacaaggatgctttgggctcttcctgcctctgagtcaacagaacatggagggtgtttcggtgttgggtgaaataattgatttaaactaccaaaggaaaattggacttccactcyacagtgaagaaaaggaagaggaaacagaaggaaaacacgagatatcttaggatgtctcttagtattaccatgctccgttttaaggtcagtgaaaaactgtaacaacccaatccatacaggactaaaaatggcccagactcttcaggaattaagatttgtgtcatacagccaagtaa

SEQ ID NO: 942721 - DNA, 576 bp, Homo sapiens
ccctttccttctacaattcggtgggttcttgtctgcagctcatcctgctacgaggtgttttgacctacgttttctgatagtgtctttttctggctttgatatcagagtaatattggcctcatagaatgagtttggagaagttctttcctctttaatactttggaagagtttgagaatgattgtcattaatacttctctaaatattttatagaattcaccattgaagtaatctagtcctgaagtaatttaccttttttgttgggaggtttttgattagtaattcggtattcttaatagttagtattatcttcaaattttctatttcttcatgattcattgttggtaggttacatctttcatggaatttatctatttcttctagkttatgccattgttgacatataattgttcttagtagtttcttataatcagttttacatctgtggcactggttgcaatgtctctttcatttacatttccatttactcaaatcttctctttttttcttagtatagctaaagatttggcaactttgcttgtctttaaaaagacaactcaatttgttacctcttttta

SEQ ID NO: 942722 - DNA, 590 bp, Homo sapiens
agacaattcttcttctccagtgtgacccaggaaagccaaaagattgtacacccctggcttacaccaatgtccaaagtattttttcctaggttttcttttagtattattgtagtttcagttcttacatttaagtcttttatccatcttgagttgattattgtatatagtgagagataggggtccagtttcgttctyctgtatatggatatccaattttccaattttcccagaattatttattgagaagggtatcctctccctactgtatgttcttgtcaactttgtcaaagatcagttggctatagagatatggcttaatttctggtttctctgtttggtttcattgatttatgtgtccaattttacaccagtgccatacatcgccctgtattataatttgaagtcaggtaatgtgataccttcagctttgttcttttgcttaggatttcattgggtatttgggctcttttttggtttcatgtgaattttaggattgttttttctaattctgtaaaaaaataacgttggtattttgataaggattgcattgaatctatagattgctttgagcagtctggtcatttgaataa

SEQ ID NO: 942723 - DNA, 584 bp, Homo sapiens
gtgtgaattactctttcgtcattgcaattcccatcttgataaatcggctctgtctaggcagcgggcaaggtgaacccattgggctgttaaaatattaatgtggcctttatcaatgaaacagcctcggcttggcgtaatcggcacgaatcagccacacacacctgcgctgctgccttttaacttccgttatcatctgcctctgaagccctcagatccagttttctttcctwgggctttgacccgaagcttgggattgagtccgggacaaaaatgtgtcttggggggtggttgcatggactccttaatgtaagtcgaatgctgatgtgaaactgtggaactgagtcctcctccaacaagggagagaaaaggatgtcttgttaacacactcagataaccggtacctatagttattcttcctaggatttgggtgcatggtgcttagctttggttagttcccttggtgttactgtctccaaggaaaacccctggggtgatgggcaccctatttattcctatcacctggaaggatttgcagggtaatttctctgaactggaatactgatccagatttttacattacccat

SEQ ID NO: 942724 - DNA, 584 bp, Homo sapiens
gtgtgaattactctttcgtcattgcaattcccatcttgataaatcggctctgtctaggcagcgggcaaggtgaacccattgggctgttaaaatattaatgtggcctttatcaatgaaacagcctcggcttggcgtaatcggcacgaatcagccacacacacctgcgctgctgccttttaacttccgttatcatctgcctctgaagccctcagatccagttttctttcctagggctttgacccgaagcttgggattgagtcygggacaaaaatgtgtcttggggggtggttgcatggactccttaatgtaagtcgaatgctgatgtgaaactgtggaactgagtcctcctccaacaagggagagaaaaggatgtcttgttaacacactcagataaccggtacctatagttattcttcctaggatttgggtgcatggtgcttagctttggttagttcccttggtgttactgtctccaaggaaaacccctggggtgatgggcaccctatttattcctatcacctggaaggatttgcagggtaatttctctgaactggaatactgatccagatttttacattacccat

SEQ ID NO: 942725 - DNA, 576 bp, Homo sapiens
tcagtagactgggaactatacttggatgggagcagcttcttcaacccccaaggagaggtggagggtatgcaggggtaaccctggacactgttgttgaagccacatcgttgccccaggccacttcagcctagaaagctgaactcattgctttcattcgggccttagaactcagtgagggtgagactgtcaacatttacactgattctaggtatgtcttttcaacccttcaagttcatggagcgtgatagaaagaaaagggcctattgaattctagggaagagacagaaaatatcaacaagaaatcttgcaatgattagaagcagtatggaaaccccacaaggtggcagttatgcattgcaggggacaccagcgagcttccacctkgctgggtttgcggaattcccgcgctgactcagaggctcgaaaagcagcatcttcccccttctgggcatcagggctccctcaagcacctgatctgggacctacttcttctaacgaagaaaaggactttctccaggtagagggaaggacaagtgatggaggaaggatggattcggttagcagatgggagagtag

SEQ ID NO: 942726 - DNA, 589 bp, Homo sapiens
gggaaacatggcaagaccctatctctacaaagataaaaataaaaataaattagttgagggtgatggcatgcatctgtagtcccagctccttgggagactgaggtgggaggatcacttgagcccaggagttggaggctgctgtaagctatgaccccacaactgcactccagcctgcatcttgggagacagagacagggtgaccctgtctcagaaaaatccmattatataataagtttaacaggatatatattaaattactctaattatttgacgattactaatttaggtatggtgtgtgtgtgtgtgcgcatgttttattaaacaggtcagcatactaccactttctctgcgtgaatgttttatgctccccactagaatggaattcctctaaaccacgggagatagctccatgtccagccattcagaccacatgcctgacacagcagctcttcagttcaattttaagtcatgtttaaggatgttacattgtacaattaaaaaaaaaaactgctgtaagacagtattcagaaaaatggaatttcagaaggaagatgggatatatgcatacaattaacaacagtaaagggtg

SEQ ID NO: 942727 - DNA, 621 bp, Homo sapiens
gctgcaaggaacagactctctgtgagaatcagtacaaaggtaagccccaaagctaggaggagaggaacaaagaagcctgctataggaatttgaagactttggcaccagtagctacaataaacattaaacacagctcatctcagattaatagaaattctcacaccaatggcctatttacttcagtgcctattatcctatagaacatgtctggctttcaacaaaaatttacaaggcatgccaaaaggcaaagaaacaaaaaacatccaaagacataaagcaagcttcagaaccatactcrgatatgacacagattttgcaattatcaagtaatttaaaataattatgtttaatttgttaaaggttctaatggaaaaagtatacaacatgcaagcctatataggtaatgtaagctgagatattaaaactaaaaaagaataaaagtaaatgaaattaaaaattaaaacccacaataatggaaataaagaatgttttcaacaagttcataggtagataacacaaccacgggaaaaaatattgatgaacttgaagataagttaataaaccttccaaaactgaaatgtaaaccaagaaaggatggggaaaaaagagacagaaaattca

SEQ ID NO: 942728 - DNA, 641 bp, Homo sapiens
caccaggagcctcaagcttcgggtgtatactgacaatgaaaaccacagggaaaagacgtccatgtcagagactgccctcagacatggtgagatctgtgacgactcctcagaagcaggcacaccaaatcactgattcaatcctccctgatgtcaatgtagacccatctaactaatcccacttctcctgattaccttttcttttcttcttacaaacctaaaaatctcaccatttctattggcctgaaaataacatccctctgttcttctcttcctcctttagcattcaatctcacttacaatgggttttatttaatgattctcctccttatactttctatcttaccagtttcctctcacaatggtttacctgctacacaaaattattctttttgkgcttatgtgccttttcctccacttattcgacctctcacctggatagatactcctgcagaaatctacactagtgatagtgtgtggatgcctggagctacagatgacttttgccctgctcaaccaggagaagaaagtactgcatttaatattaccatgggttataaataccccactctgtgcctcagacatgcacctggttgtatccatctagaaactcaagtctgggctgtttatcttctggagagatc

SEQ ID NO: 942729 - DNA, 563 bp, Homo sapiens
gagttaaacctttctcttcattcagcagtttagaaacactgtttttgtacaatgtgggaagggacagttgggaatgcattgaggtcaacggtgaaaaagaaaatttcttcagataaaaaatagaaagaagcattctgagaaactgctttgtgatgtgtgcwttcatctgacagagtgaaacctttcttttgattcagcagtttggaaacacggtttttgtagaatctccaaaggtgaatttggcaggtcattcacaccaatggcaaaaaagggaatatcctgagatataaactataacaaaactgtctgacaaactgcattgtaatgtgtgcattcatctcacagagttaaagctttcttttgtttcagtagtttggaaacactgtttttgtacattctgtgaatggacatttgggagcgtgttgaggcctacaatgagaaggaagataacttctgataaaactagaaagaagctttctgagaaagtgttttctgatgtgtgcattcaactcacaggttttaaactttctcttgattcagcaataaggaaaagctgattttgt

SEQ ID NO: 942730 - DNA, 556 bp, Homo sapiens
cttggagggtcctatgcccacagagcctcactcattgctagcacagcagtctgagatcaaactgcaaggcgacagcaaggctgggtgaggggtgcccgcaattgctgaggcttgagtaggtaaacaaagcggccaggaagctcaaacggggtggagcccaccacagctcaagaaggccttcctgtctctgtagactacacctcttggggcagggcataggcaaacaaaaggcagcaraaacctctgcagacttaaatgttcctgtgtgacagcttcaaagagagtagtggttctcccagcacacaccttgagatctaagaatgcacacacactgcctcttcaagtaggcccctaacacccgagtagcctatgtgggaggcaccccccagtaagggcagactgacacctcacatggcagggtacagctctgtgacaaaacttccagaggaaaaatcaggcagcaatatttgcggttcaccaatattagctgttctgcagcctctgcggctgatacccaggtaaacttggtccggagtggacctccagcaaactccaa

SEQ ID NO: 942731 - DNA, 602 bp, Homo sapiens
caatggtcttagcaaacggcacaccaggagattatattctgtgcatggcttggagggtcctatgcccacagagcctcactcattgctagcacagcagtctgagatcaaactgcaaggcgacagcaaggctgggtgaggggtgcccgcaattgctgaggcttgagtaggtaaacaaagcggccaggaagctcaaacggggtggagcccaccacagctcaagaaggccttcctgtctctgtagactacacctcttggggcagggcataggcaaacaaaaggcagcagaaacctctgcagacttaaatgttcctgtgtgacagcttcaaagagagtagtggttctcccagcacacaccttgagatctaagaatgcacacacactgcctcttcaagtagrcccctaacacccgagtagcctatgtgggaggcaccccccagtaagggcagactgacacctcacatggcagggtacagctctgtgacaaaacttccagaggaaaaatcaggcagcaatatttgcggttcaccaatattagctgttctgcagcctctgcggctgatacccaggtaaacttggtccggagtggacctccagcaaactcc

SEQ ID NO: 942732 - DNA, 621 bp, Homo sapiens
catttgggagctctttgaggccaatggtgaaaaagcaaatatcccaggataaaaactagaaggaaactatctgagaaacagcattgtgatgtgctcattcatctcacagtgttaaaactttcttttcattcagtagtttggaaacactgttttgatagaatctgtgaagggatatttgaaagctcattgaggccataggtgaaaaagcctatatcccaggataaaaattagaaggaagttatcttacaaaccgctttgagatgtgtccattcatctcacagagttaaaccttttattcagcagtttggagaccatgtttttgtataatctgtgaagggatatctgtgattgcatggaatcctatgctgaaaaaggaaatatctttggatactgactagaaagaagctttctgagaaactgctttgtgatgtgtacrttattctcacatagttaaaactttcttgtgattcagcagtttagaaacactgctttgtagaatttgtgaagggatatttgatagctcattgaggccactggtgaaaacttgaacaccccaggataaaaactggaaggaagctatttgagaaacctcttagtgatgtatgcgtacatctcacagag

SEQ ID NO: 942733 - DNA, 622 bp, Homo sapiens
gggtgtgagggtgacggtgtccagcacttctcccaaccttcgattgcaggggtcgagggagaggtgcggggagcagagcaggagggccactgcgcgcggccgggggcccgaggtgggcgccttcacctggatccgcagttctacctgacaccggagacagctctgaaccrcaggggaaggtgctgccaggcctggatgaggcacggctgtcagccgaagagcctggggggcacaggaggctgccagaggatgggggtctctctctggcccaaagccccaggagccagaccttctccctgccatctggctcagggaccctgggggtcttggagcccactccccaaggacaagctgctggccagtctggtcccctttagcctctggctctggggtaggggaagggcaagcacagccacaggaagcctttgtggggagggaggggctctccctgcccgtgtggtgcccctagctgtggggccaggtgtggagggggccagggctgctgatgcctcctgcagtggcctgaccccatcctgggcatggggaggcagcccctccatggcttccctgcaggggcacaggcagagcaggcggtggtggggctggtgacacccccgggccc

SEQ ID NO: 942734 - DNA, 718 bp, Homo sapiens
atggaccatatggtgagatcagtgaattccatgagctaggcctactgctacattgcatttggtgtcaaatgatttccttgatcagaagaacgctatgaagaataccatgacagcggatacattattctttaagtccacagatggtcattttggcagaagcattttgtacagcaaacgcaaatacatatccaaagtaattaatataccaagtagaacaaagcactgcaccttccatggtggaagtggttgcatgcaatcaaccttccacaaaataactctctatcacacccagcaattataccatattggggaatcagtgytggtctctactattggcagaaagggcactcagcagtggaaagattggccttggtaagcggaaatccacattgtatttcatgcatagcctccatccctgccaccacaggtactttttgttcatgagcacattgggcatgacaggactggctagggaaacaggctcactggtgtccacagaatgagttctcctaatcacttaattattaacatccctctctgctgaaataactttttggtgaacattgacatggggcaaaaataacttcatgttctttacccatgcagagagatctatccacatactttacctcccatactcagacttccttatcatcaattttccaattgtatttcctccaagccaaacctttgaccacagcctattgatataaacgca

SEQ ID NO: 942735 - DNA, 653 bp, Homo sapiens
attctagggataatcagctctcacctgctctctagaatgcccagcccagaggcggtcagcagtacttaatcagaaagggccacacactgggtgatgtgcattggctctgtgtccccactgaaatctcatctcgaattataatccacatgtgttgggggaggggcctggtaggaggtgatttaatcatgggggctgacttcccccttgctgttcttgtgataatgagtgagttctcacsagacctggttgtttgaaagtgtgtggcactttccccttcactgtctctcctgctctgacgtggtaagatgtgcttgtttcccctatgcctcccgccatgattgtaagtttcctgagacctcctagtcatgcttcctattaagccttcagaactgtgagtcaattaaacctcttttcttcataaattacccagtctcaggtagttctgtagagcaatgtgaaaacagactaatacactggggcaacaaatataagttcatctgttatcattatcaccatcaaaaattcacattttacaagtcgatagggcagtttctcaaaaaattaaaattaaattaccacatgacccagccatcccacttctggatatttacccaaatgaattgaaagcagggtcacaaagagatattcgaaca

SEQ ID NO: 942736 - DNA, 623 bp, Homo sapiens
atgcccagcccagaggcggtcagcagtacttaatcagaaagggccacacactgggtgatgtgcattggctctgtgtccccactgaaatctcatctcgaattataatccacatgtgttgggggaggggcctggtaggaggtgatttaatcatgggggctgacttcccccttgctgttcttgtgataatgagtgagttctcacgagacctggttgtttgaaagtgtgtggcactttccccttcactgtctctcctgctctgacgtggtaagatgtgcttgtttcccctatgcctcccgccatgattgtaagtttcctgagayctcctagtcatgcttcctattaagccttcagaactgtgagtcaattaaacctcttttcttcataaattacccagtctcaggtagttctgtagagcaatgtgaaaacagactaatacactggggcaacaaatataagttcatctgttatcattatcaccatcaaaaattcacattttacaagtcgatagggcagtttctcaaaaaattaaaattaaattaccacatgacccagccatcccacttctggatatttacccaaatgaattgaaagcagggtcacaaagagatattcgaacacccatg

SEQ ID NO: 942737 - DNA, 611 bp, Homo sapiens
ctgccaactcctggcaaggacagtaactcaggacctgccactggcctatcaatggtttttttaaaattatggacaactggtgtgtccaaataataagacttttcaaatgaggataagaaaggtgcactccagacctaatctgactcttttgatctatgttttatgaaaaagtgcaaaccaattgagcaaatttgctttccagaggaaagaaacatttgtgaggacctactgtgtgctgacactgttgggcactccattgttatcctgttttttcttcacaacagtcaggtgtaacaacattatgctcattttacagatgaaaaaatgttaacgcagtttacttatttgcatcatgccacgcataaatatcaagtactgaagctaggaatcaaactttttttttttttaaactgcaaggtcaatattctttkggccacactatacatctcatttaaaattatttccagccgggtgagatgggtcatgcctgtaatcctggtacttggggagcctgagatggtggattactagagcccaggagttcagaccagcctgagcaacacggcaaaaccctgtctctccaaaaaaaaaaaaaaaaaaacaaaaaaaca

SEQ ID NO: 942738 - DNA, 609 bp, Homo sapiens
taaacatgtatgctttgcagtccacagttggctaatctttacactatatttcttgctggttgagcaggaaagatgttcctttccatatggtagaaaactgacatgaagaacgttaataatctgagagtgaatgtaaaaatcatgcttagtgctcttcaggcaatgagatggagcagacttagatctcagtccctactcccttcacttaactgacttagcatcctgactacttattaaacctctcaaaaactgttttctctccataaaaatggaggacagtaactacctagaagctttgtgaaattaaagaaaacactgcatgtaaagtactgagctatactttgcaggtaacagatgctcaacatgtctcctctttcacacctttccctgcamttaaccatgagtgctcttagaaatggactaatgtgtagaaacagcaaggaatgctgaactgtggattcctgccttaaaatactgatttgcaatttttttttttttttttttttgaggtggagtcttgctctgtcacccaagctggagtgcagtggcatgatctcagctcactgtaacctctacctcccgggttcaagagattctcctgcctcagcc

SEQ ID NO: 942739 - DNA, 624 bp, Homo sapiens
gcatctggtgagggcctcaggctgcttccactcatggtggaaggtgaaggagagctgatgtgagcagatatcacatggcaagaggagaagcaagagagaggggagagggtgccagaatctttcaacaagcagctctcccaggaactaagagagtgagaagtcactcacccccagggaaggcattaatctattcatgagggaccacctccatgagccaaacacctcccatcaggccccactccaaccctagaaatcacatttgaacatgagcctcggaggggacaaacatctaaaccatagcacacatccaacaaaagaataaactgaatggattagggatctaagtgtaaaaaacaaagccacctgtcttagtcagctcgggctgctrtaacaaaataccacaaaccaccaaatccaatggtaaagtgaggggaaaggcaccaacaggtaactaaccaaaaaagatattaaaatggccctcaaacttatgaaaaaaatattcaaggacactggtaattagagcgaggcaaatcgctctacagtgagatgccatttttcacttttcagactgacaataaaaaagatcacaacacattctgttcaccaagttgtagggaaacagtc

SEQ ID NO: 942740 - DNA, 618 bp, Homo sapiens
aaatatttatcggcaccttgataatcctaacagctaatatttactgaatactatgtgccaaggaccatagtaaattctttacacacattatcatttggtcttcacagtaactcttcagaggcaggtatttgagagcttaagtcaacgtgctcaaaatcacaacactagaaagcagtggcagtggaatttgaatccaggcagccagcatttcctactactcggctgtcctaacctcccacsctatgcagggtgctggtaatacaacggtgaagactggtgtgatccctatccttaaaatgcttacagcctaggagggaagataatctttaaacaaatcacatgctgagaatgtctaacagggtacctggtctcctttgggcttcattcaagcttccccaagaatatgccttgtcaagtggacccagagactgagttcttaagtagacagagcagggagagagacatcaatccaggcagggggacagcacaaggaaaagctctgaggtagcaagaggtctggcagtctgaggctgtcactgggctgagggcaaggccaggtggatcacagggaagctaaggaaaagagcatgagaagcggcataaatctacgtaattcaa

SEQ ID NO: 942741 - DNA, 601 bp, Homo sapiens
gccagaatagaagggaaccaacatcaaaaaggagacagaggcagagaatagagaaaatggaagagaggcaattaccaaaataattcaagaaaacattatataattgatgggcatgagttattagactgaaaaagcccactggatacccagcacaatggatggagatgtgctccatccttgttctagacctatgccagtttcagagttctagaacaaggaaggattccagaagtatataagttgagaggcaggaatatatacaaaggatcaggaatcagaatggctttgggcttgccaaagcaacattgaaactagaagaccaatgccttcaaatttctaaaggaaaattatttctaagctagaattctacaggcagccaaactatcagtaaaatacagagaaaaatatgttttcatacattccaagatctcaaaaaaactkacatcccattaaatattgctcaagaacctactgaaagacgtgcttcgccaaaatgagagtactacaaaaaggacgagtgcgtgggatacaagacaggagatccaatgaaagagagaggtgaaggcagttcctaaggtgcaggtgatggaaagggatttct

SEQ ID NO: 942742 - DNA, 556 bp, Homo sapiens
tcagctgactttaagataggaaaagaatcccaggttatctaggtaggcccagtgtagttacagggtccttggaagtggaaggagaaggcaggaaagtcagagagtgatgtggctgtggaagcaacgcaccaagagccgccacatggtcggttttggagatggaggaaggaggtctctgcaagctggaaaaggcaaagaaatggatccttccctagcacctccagtaaggagtgcagttggtgggtagagctgtagggtaacagatgartgtgcttttaagccaagcttgtgggaatttgttacagcagcaatagggaactagtacagtatcctaacacaggggtccccaatccctgggccaatgaccggtattggttgtggcctgttaggaaccgggctgcacagcggcaggtgagcaaagcttcatttgtaatttatagttgctccctatcgcgtgcattaccacctcagctccgcctcctgtcagatcaacgacagcattagattctcatagtagcatgaaccctattgtgaactgcgcatgtgagggatctag

SEQ ID NO: 942743 - DNA, 637 bp, Homo sapiens
ccacctgagtcggctgttcccttcctcctgggcactcacctagactccatttcccagcactccgtcccctgaagttagatgtggccctgtgactaggccctcatggatggacgggagtggatgaggatcactgtggcacctgggcctgcttatgctctcttcctccttcccattcgctggaacatggatgggcctgggacccagctctgactttgcaagtgaggacaatgctycaggcccaagtggaagtttctcaactactgacatttggggcaggacggttctttgttgtggggggcagtcccgtgcattgtaaaacattcagcagcatccatgtcctccactcactagataccagtatcacagcccaagtcatgacacccaaagtatctccagacgttgccaaacataccctggtgggaaaattcaccctagcagagaaccgctggcctagaggaaggcagagaaacgaggattcctgagttcctgcacggagcagagcagcccggggaccaacctggaatactcagttcagactactgaggaagacaaaataaacttttatgcttttaaaaaaaattatggacagaacaatatagacaaaaacttttatgatttttcagcttctggggtttgt

SEQ ID NO: 942744 - DNA, 637 bp, Homo sapiens
ccacctgagtcggctgttcccttcctcctgggcactcacctagactccatttcccagcactccgtcccctgaagttagatgtggccctgtgactaggccctcatggatggacgggagtggatgaggatcactgtggcacctgggcctgcttatgctctcttcctccttcccattcgctggaacatggatgggcctgggacccagctctgactttgcaagtgaggacaatgcttcaggcccaagtggaagtttctcaactactgacatttggggcaggacggttctttgttgtggggggcagtcccgtgcattgtaaaacattcagcagcatccatgtcctccactcactagataccagtatcacagcccaagtcatgacacccaaagtatcyccagacgttgccaaacataccctggtgggaaaattcaccctagcagagaaccgctggcctagaggaaggcagagaaacgaggattcctgagttcctgcacggagcagagcagcccggggaccaacctggaatactcagttcagactactgaggaagacaaaataaacttttatgcttttaaaaaaaattatggacagaacaatatagacaaaaacttttatgatttttcagcttctggggtttgt

SEQ ID NO: 942745 - DNA, 611 bp, Homo sapiens
tctgccaggatgtctcacacagtctacaaactctgcaaatcccaagtgtactctataataccctaaaccttcttcccatgtacctctgatatattggagttcgtatctccactgccactatccaccattcttcctctatctagtatccctacatccatactggctccctttaatccatcctccatcttttccagagctttccaaattcaaattctttttttttctttcaaaggtgatgtttctattgtcccaggctggagtgcagttgatttaagctcactgcagcctggaactcctggattcaagcgatcctcccacctcagcctcctgagtagctggaactacaggtgagtgccaccacacctggctacttaaattttttttgtagagatgggggtctcgtttgtgttgcccaggctggtcttgaactcctggsctcaagcagtcctcccaccttggtcttccaaagtgttgggattacagggcatgagccaccgcaccaggacaaccaaattcaaatttgtaagatggctttcaaagccctatgtgatgtcattccagtccatctctccagaaactcacctctggctccctgtgctgtaaagggcctt

SEQ ID NO: 942746 - DNA, 602 bp, Homo sapiens
atttaccagataaatagaactaaaaacaaaaaccacatgatcatctcaatagatgcagggaaggcatttgataaaattcaacatcccttcatgttaaaaattaaacatccctttgtgttaaaaattcaacatcccttcatgttaaaaatcctcaacaaactaggcattcaaggaacatactcagccaacgtcatactgaatgggcaaaagctggaagcatttcccttgaaaacgacactgagttaagaataccctctctcattactcctgtagcactggaagccctagccagaagaataaggcaagagraaaaaataaaaggcgtccaaaatgaaagagaggaggtcaaactatccctgtttgcagatgatatgattctatacctaaaaaaccccagagtctctgcccaaaagctccttcatctgataaaaaatcttcagcacattttcaggatatgaaatcaatgtacaaaaatcagtagcattcctatacaacaacaacatcgaatctcagagccaaacctacaatgcagtcccattcacaatagccacaaaaataataaatacagttaaccatggaagtgaaggacctctacaatgaga

SEQ ID NO: 942747 - DNA, 727 bp, Homo sapiens
caccacctctggctagtttttgtatttttagtagacataggattttaccatgttggccaggctggtcttgaacccctgacctcaagtgatccacctgcctcagcttcccgaagtgctgggattacaggcatgagccaccatgcccagccagtgtttttattgtagaaawttttagtttatttatttatagtttttattgtagaaatttttagtttatttatttataggttttattgtagaaattttttacttcttcagttaattcctagatatataattttattggtggctattgtaaatgggattactttttttttttttacttctgtttcagattgttcactgctggcatatattaggttggttcaaaaataattgtggtttttgccattaacagcaaaaatagcaattacttttgaaacaacctaatagaaatgctaatgatttttgtatgctgattttgtatcctggaactttactgagtttattattagttctaacaatttatttgtggagtatttagtttttcctaaatgtaagattatatcattttaaaaatgggtaatttaacttcttccttttcagtttggatgctgttcatatcattctattgtcagtttgctctagctaggattttcagtactatgttgaataacagtggtgaaactgggcatccttgtcctgttccacatcttaaaggaaaggctttcaggtcttctccctattc

SEQ ID NO: 942748 - DNA, 727 bp, Homo sapiens
caccacctctggctagtttttgtatttttagtagacataggattttaccatgttggccaggctggtcttgaacccctgacctcaagtgatccacctgcctcagcttcccgaagtgctgggattacaggcatgagccaccatgcccagccagtgtttttattgtagaaaattttagtttatttatttatagtttttattgtagaaatttttagtttatttatttataggttttattgtagaaattttttacttcttcagttaattcctagatatataattttattggtggctattgtaaatgggattactttttttttttttacttctgtttcagattgttcactgctggcatatattaggttggttcaaaaataattgtggtttttgccattaacagcaaaaatagcaattacttttgaaacaacctaatagaaatgctaatgatttttgtatgytgattttgtatcctggaactttactgagtttattattagttctaacaatttatttgtggagtatttagtttttcctaaatgtaagattatatcattttaaaaatgggtaatttaacttcttccttttcagtttggatgctgttcatatcattctattgtcagtttgctctagctaggattttcagtactatgttgaataacagtggtgaaactgggcatccttgtcctgttccacatcttaaaggaaaggctttcaggtcttctccctattc

SEQ ID NO: 942749 - DNA, 589 bp, Homo sapiens
gggtcttagcaaacagcacaacaggagattatctcccacgcctggttcagaagatcccacacccatggagcctcacttatagctagcaaagcagtctgagatccatctacaaggcggcagcaaggctgggggaggggcacccaccattgctgaggcttgagtaggtaaacaaagcagccaggaagctcgaactgggtggagcccacyacagctcaaggaggcctgcctgcctctgtagactccacctctggaggcagggtatagtcaaacaaaagacagcagaaacctcagcagacttaaatgtccctgtctgacagctttgaagtgagtagtggttatcccagcacggagtttgagatctgagaatagacagactgcccccacaagtgggtccctgacccccgagtagcctaactgggaggcaccttccagtaggggaagactgatacctcacatggccgggtacccctctgagacaaagcttccagaggaacgatcagacagcaacattccctgttcagcagtatttgctgttctgcagcctccactgctgatacccaggcaaacagggtctggagtggaccttcag

SEQ ID NO: 942750 - DNA, 780 bp, Homo sapiens
cctcagcaaatgcaaaaaaaaacaaattacaacaaactgtctctcagaccacagtgcaatcaaattagaactcaggattaagaaactttctcgaagctgcacaactacatggaaacggaaccacctacttctgaatgactactgggtaaataaagaaattagggcagaaataagtaagttctttgaaaccaatgaaaacaaagatacaatatascagcatctctgggacacagctaaagaagtctttagagggaaatttatggcactaaatgaccacaggataaagtgggaaagatctaaaatctacaccctaacatcacaattaaaagaactagagaaggaagagcaaacgaattcaaaagccagcagaaaataagaaaaaactgaaatcagagaagaaccaaaggaaatagagacacgtaaaacctttcaaaacatcaatgaatccagaaggtgttttttagaaaagattaacaaaacagaccactagccagactaataaagaaaagagagcagaatcaaatagacacaataaaaatgataaaggcaatatcaccactgatcccacagaaatacaaattaccataagagaatactgtaaacaccactacacaaataaactggaaaatctagaagaaatggataaattcctggacacatacaccctcccaagactagccaggaagcaaatcaaatccctgagaacaccaataacaggttctgaaattgagacagtaattaatagcctcctgagcaaaaaatacccaggaccagatagat

SEQ ID NO: 942751 - DNA, 780 bp, Homo sapiens
cctcagcaaatgcaaaaaaaaacaaattacaacaaactgtctctcagaccacagtgcaatcaaattagaactcaggattaagaaactttctcgaagctgcacaactacatggaaacggaaccacctacttctgaatgactactgggtaaataaagaaattagggcagaaataagtaagttctttgaaaccaatgaaaacaaagatacaatatagcagcatctctgggacacagctaaagaagtctttagagggaaatttatggcactaaatgaccacaggataaagtgggaaagatctaaaatctacaccctaacatcacaattaaaagaactagagaaggaagagcaaacgaattcaaaagccagcagaarataagaaaaaactgaaatcagagaagaaccaaaggaaatagagacacgtaaaacctttcaaaacatcaatgaatccagaaggtgttttttagaaaagattaacaaaacagaccactagccagactaataaagaaaagagagcagaatcaaatagacacaataaaaatgataaaggcaatatcaccactgatcccacagaaatacaaattaccataagagaatactgtaaacaccactacacaaataaactggaaaatctagaagaaatggataaattcctggacacatacaccctcccaagactagccaggaagcaaatcaaatccctgagaacaccaataacaggttctgaaattgagacagtaattaatagcctcctgagcaaaaaatacccaggaccagatagat

SEQ ID NO: 942752 - DNA, 574 bp, Homo sapiens
aaaaactattctaaaattcatatggaaccaaaaatgagccttaatagccagagcaaccctaagcaaaaagaacaaagtcaaagccatcacactatccaacttcaaactatactataaggctacagtaaccaaaacagcatggtactggtacaaaacaggcccatataccaacagaacagcacagagaaccaagaaataaagctgcacacctataaccatctgatctttgacaggttatctgatctttgacagatrtttttgtcaagcatctgattcttgacaaaaacaagcatgaggaaaggactccctattcaataaatggtactgggataactggctagctgtatgtagaagaatgaaactagatccataagtttcaccatacacaaaattaattcaagatggattaaagatttagcctaatacctgaaaccataaaaattccagaagaaaccctaggaaaaactactctagacattggcctaggaataaatttacgactaagaccccaaaaccaagtgtaacaaaaacaagtaaatgggacctaatttaaaaaaaagaaaccttttgcata

SEQ ID NO: 942753 - DNA, 574 bp, Homo sapiens
aaaaactattctaaaattcatatggaaccaaaaatgagccttaatagccagagcaaccctaagcaaaaagaacaaagtcaaagccatcacactatccaacttcaaactatactataaggctacagtaaccaaaacagcatggtactggtacaaaacaggcccatataccaacagaacagcacagagaaccaagaaataaagctgcacacctataaccatctgatctttgacaggttatctgatctttgacagatatttttgtcaagcatctgattcttgacaamaacaagcatgaggaaaggactccctattcaataaatggtactgggataactggctagctgtatgtagaagaatgaaactagatccataagtttcaccatacacaaaattaattcaagatggattaaagatttagcctaatacctgaaaccataaaaattccagaagaaaccctaggaaaaactactctagacattggcctaggaataaatttacgactaagaccccaaaaccaagtgtaacaaaaacaagtaaatgggacctaatttaaaaaaaagaaaccttttgcata

SEQ ID NO: 942754 - DNA, 599 bp, Homo sapiens
ctattctgttccattggtctgtgtgtctgcttttgtaccagtcccatactgttttggttattgtagccttacagtatagtttgaatactggtagggtgatacctccaactttgttctttttgctgaggattgtcttggctatacaggctcttttttggttccgtatgaattttaaaattgtttttttctaattctgtgatgaatgtcaatggtagtttaatgggaatagcattgaatctataaattactttgggcagcatggccattttcatggatattgattcttcttatccattagcatagaatagttttcatttgtttgtgtccttcctccctggctcccttaagaagagttttgtagttctccttgaagaggtccctcacatccctgttaccccagctgttaactctttttattctctttgcagcaaytgtgaatgggaattcattcatgatttggttctctgcttgcctgctgttagtgtataggagtgcttttgacttctgcacattgattttgtatcatgagactttgctgaagttgtttatcagcttaagaagcttttgggctgagatgctggggctttctagatatagaa

SEQ ID NO: 942755 - DNA, 621 bp, Homo sapiens
tggcctccagctggatctgtgtttctgcaaaactgaataatttgaaagacatgatttcattattttctatggctgcatagtattctatggtgtacatgtgccacattttcttttttaaaatttttattttaggttcaggggtacatgtgcaggtttgttgtagaagtaaattgtgtttcataggagtttggtttacagattattcctccacccaggtaataagcatagtaataggtaatttttgatcctcacccttctctctccttccacctcaagtagaccttagtgtcttttgctcccttctttgtgtccagatgtactcaatgtttagctcctacttgtaagaccatgctgtatttggttttctgttccagcattagttggcttaggataatggcctccagctccatccacattgctacaaaagwcatagtaacatacttttttattgcagcttagtgttctatagcgtgtgtgtatcacattttctttacccagtctaccattcatgggaatttaggttgactccatgtctttaatattgtgaatattgctatgatgaatatacacatgcatgtgtttttatggtagaatgatttagattccctggagtatataccc

SEQ ID NO: 942756 - DNA, 760 bp, Homo sapiens
gtttctgcaaaactgaataatttgaaagacatgatttcattattttctatggctgcatagtattctatggtgtacatgtgccacattttcttttttaaaatttttattttaggttcaggggtacatgtgcaggtttgttgtagaagtaaattgtgtttcataggagtttggtttacagattattcctccacccaggtaataagcatagtaataggtaatttttgatcctcacccttctctctccttccacctcaagtagaccttagtgtcttttgctcccttctttgtgtccagatgtactcaatgtttagctcctacttgtaagaccatgctgtatttggttttctgttccagcattagttggcttaggataatggcctccagctccatccacattgctacaaaagacatagtaacatacttttttattgcagcttagtgttctatagcgtgtgtgtatcacattttctttacccagtctaccattcatgggaatttaggttgactccatgtctttaatattgtgaatattgctatgatgaatatacacatgcatgtgtttttatggtagaatgatttagattccctggagtatatacccmataatgggatttctaggtcacatggtaattctgctttgagttctctgagaaattgtcaaacaagttttcacaatgctgaactaagttacattcccactagccacatataagccatccctttttctgcaacctcgccagcatgttatttttttgacatt

SEQ ID NO: 942757 - DNA, 473 bp, Homo sapiens
caattaaaagaaacagagtggcaagcaggagaaaaaactagcacccattggtatgctgtcttccagagacctgtttcacatgtaatgacacctataggctcaaaataaagaggtggagaaaaatctacccagaaaatgggagacagaaaaaatgaggggttgaaatcctagtttctgaagcaaaacagactttaaacaacaaagatcaaaatagacaaagaagggctttacgtagtggtaaagggttcaactcaacaagatctacctctcctaaatacatatgcatccaagrcaggagcactcagattcaaaaagcacattgtttgggacctgcaaagagacttggattcccacaaaatagtagtgagaggctttaacactccactgatgatataagacatattattgagataaatacttaacaaagatattcagaatctaaactcagcactggatcaaatggacctgataga

SEQ ID NO: 942758 - DNA, 589 bp, Homo sapiens
tgatggaatggattaattggaagtggagtaaagaaaaactgtatgatcaagaacaacttgggttttggttttatcagcaagagggatgattatggcatttactaagaatttgggaaacactgggggcatgggcaagagttgttagtgataatgtratgtctgagatgcatcttagacattccaggggagatatcaagtaggtctccagtgtgagagtctttgcctctttattctcattcaagggttaagtaatgaaagtgaaggagaagaagtggatttgaagagatgcaaaaatgtaaaatattcatctggtgagttgaaagacaaatgtattaaggaaggattgtaggatcaccaggaattctggaatacctcctaggatttttggtcatacttctaaagtgagaccagtcagcaaagctgtgtgtatctcctagaatgtttagttgtcacgtgaagaaacagagttggtaggataattatatttaaatagatttacataggtttagagctctcccaggaaagaagggtgaagggaatataattaactatgtttgcaaaggagtggttatagtgttgagccacatgg

SEQ ID NO: 942759 - DNA, 744 bp, Homo sapiens
gcctgttacagcatggccttttaaagcctataaatgctccttaccattcccccattttacctgtcctgaaaccagacaaggcttacaggttagttcaggatctgagccttatcaaccaaattgttttgcctctccaccccatggtgccaaacccatatactctcctatcctcagtacctccctttataacccattattctgttctagatctaaaacatgctttctttactattcctttgcacccttcatcccagcctctcttcactttcacttagactgaccctgacacccattaggctcagcaaattacctaggctgtactgccgcaaggcttcacagacagcccccattacttcaatcaagcccaaatttcatcctcatctgttacctatctcggcataattctcataaaaacacacgtgctctccctgctgatcatgtccaattaatctcccaaacctcaatcccttacaaaacaacaactcctttccttcctaggcatggttagtgtggtcagaattcttacacaagagccaggaccgcaccctgtagcctttctstccaaacaacttgacctcactcttttagcctagccctcatgtctgcgtgcagcggctgccactgctttaatacttttagaggcccttaaaatcacaaactgctcaactcattctctgcatttctcataactttcgaaatctattttctttctcatacctgacgcgtatactttctgctccccgg

SEQ ID NO: 942760 - DNA, 614 bp, Homo sapiens
aactctttcttaggttttaagttttcacataatgaatcttgcaggaaaataaaactaatctcttggttcactatttcactgaaaagactgaacacttttggtgcatcacatacccttttagttgctgggaataacgcagtgaaaacagacaaaacagaaaaataatttatgtcttggtaagccttctaacaagtgagtaaacagaaaaaaatacgtgaatttttttaaagatatatatatatattttaaaatatatgtattttaaaatatatatatatatatatagacagataatatgtacacataggcttaaaagaaggctastgcaacaataaaagtaagaatagttcactataatgagatcaatgaggatggagaggagttttcagaatgtggggtcaacaggatttgctgaaagatttgactggattacatgtagaagaatctagaatgacacaaacgttttaaactaagaacttgaaaatacagagatgccacttattgaaatggggaagattttaagtgaaacaggcttggttaagggaaagatcaggactttgattcagacctttgaattttgagatactgctctatggttatgtggaaatgctgat

SEQ ID NO: 942761 - DNA, 578 bp, Homo sapiens
tggggtcaagactctgtggttttctaggtatagattcatatctacaaacagggatagtttcaactcctctcttcctgtctgaatgtcctttacttctttctctcaacagattgctctggccaggacttccaatattatgcttgaataggagtagwgagaaagggcataattgtcttgtgccagttttcaaaacgaatgtttctagtttttttccattcagtatgatgttgactgttggtttgtcatagatggctcttattgttttgagacatgtttcttcaatacctagttattgagaatttgtaacataaaggggtgttgaattttatcaaaagtttttttttctgcatctattgagataataatatggtttctgtctttagttccatttatgtgatgaattacattgcttgatttgtgtatgttgaaccagccttgcatgctggcaatgaagcctatttgatcatggtgagttagattttgatatgctgctggattcagtttgcaagtattttattgaggattttttcatcaatgttcatcaagaatattgtctacaagttttctttttagttatg

SEQ ID NO: 942762 - DNA, 570 bp, Homo sapiens
tttgagaggcagaggctggtggatcacttaaggtcaagagttcgagaccagcctggccagcatcaaaatcctgtctgtacaaaaattaccaaatagctactagggaggctaaggcatgagaattgcttgaacctaggaggcagagtttgcagtgagccaagattgcgccactgcactccagcctgggcgacagagtgagactctgccmcaaaaaaaaaaaagtaatttagcaatgttgcaagttgtaagatcaatacaaaaatcaatattatttctatatactgtcaatgaaacactggaaattgaaaatcttaaaacataatacagccaaatgtggtggctcatggctataatcctgtactttgggaggctgctgttggaggattgtttgaggctgggagttcaagctcagcctgggaaacatagtgagacccttgtctctaccaaaaagaaaaagaaaaagaaaaaaattataattctgtctctcaacaaaatcataattttttttttaatttggccaggtttggtggcgggcatctgtagtcccagctcctgagctgaggctgaggt

SEQ ID NO: 942763 - DNA, 570 bp, Homo sapiens
tttgagaggcagaggctggtggatcacttaaggtcaagagttcgagaccagcctggccagcatcaaaatcctgtctgtacaaaaattaccaaatagctactagggaggctaaggcatgagaattgcttgaacctaggaggcagagtttgcagtgagccaagattgcgccactgcactccagcctgggcgacagagtgagactctgcccmaaaaaaaaaaaagtaatttagcaatgttgcaagttgtaagatcaatacaaaaatcaatattatttctatatactgtcaatgaaacactggaaattgaaaatcttaaaacataatacagccaaatgtggtggctcatggctataatcctgtactttgggaggctgctgttggaggattgtttgaggctgggagttcaagctcagcctgggaaacatagtgagacccttgtctctaccaaaaagaaaaagaaaaagaaaaaaattataattctgtctctcaacaaaatcataattttttttttaatttggccaggtttggtggcgggcatctgtagtcccagctcctgagctgaggctgaggt

SEQ ID NO: 942764 - DNA, 598 bp, Homo sapiens
gtgtgccacaggtgcagtagcatgtgcctgtagtgtgagctgcttggtaggctgaggcaggaggatcacctgagcccaggagttcaaggctgcgttgcactatgatcacgcctgtgaatagccactgcactttagcctggaaaacatgagagacyccatctcttaaaaaaaaaaaaaaaaagtaaaaaacttagaacactagttcaggaaattcaacatcaataacaaaataaaaacaaaaaatagagaaaaataaatcgataaaataactcatgagatttcccaaaaacaaaagaacatgaatttccaagctgaaagaccaccatatgttaagtacaattgatgaaaataagtgaacactaagacacatcattatgaagtttcagaacactaaggttaaagataaaattcaaatagaaaaaaaatgggaaggtcacaatgaaagaatcaagaattagaatggttttaaacttttcaacagccatactaaagaaggcaaaggagtgacatgtttaacgttctgaagaaaaacaatttacaaattagaattctgtattagtcaggatgggcttggttatactacaataacagacaactc

SEQ ID NO: 942765 - DNA, 604 bp, Homo sapiens
aagtgtgccacaggtgcagtagcatgtgcctgtagtgtgagctgcttggtaggctgaggcaggaggatcacctgagcccaggagttcaaggctgcgttgcactatgatcacgcctgtgaatagccactgcactttagcctggaaaacatgagagaccccatctcttaaaaaaaaaaaaaaaaagtaaaaaacttagaacactagttcaggaaattcaacatcaataacaaaataaaaacaaaaaatagagaaaaataaatcgataaaataactcatgagatttcccaaaaacaaaagaacatgaatttccaagctgaaagaccaccatatgttaagtacaattgatgaaaataagtgaacactaagacacatcattatgaagtttcagaacactaaggttaaagataaaattcaaatagaaaaaaaatrggaaggtcacaatgaaagaatcaagaattagaatggttttaaacttttcaacagccatactaaagaaggcaaaggagtgacatgtttaacgttctgaagaaaaacaatttacaaattagaattctgtattagtcaggatgggcttggttatactacaataacagacaactccaaa

SEQ ID NO: 942766 - DNA, 593 bp, Homo sapiens
aaagatatttgtaatccagacatctggaaaagaaatttatcttcagaatatgtaaagagcagctacaagtctttgagaaaaaaaaacatttttttttaatggacaaaagacttgaacaggcatttcttaaaagaggatatgtaaaacggtcaattcacatgaaatggtggtactcccagaatggctaaacattaaagactgttcataccaagtgttkgtgaacatgtagagagtctcaaacattgctcatgggaagtaaaccaccacattggaagattttttgtcagtatctatcagagccaaacatataccctatgatctatccctaggtatatacccaatagtaatgagtacatgtgttcaacaaaaatatatacagggatgtgcatggcagcattgtttgtaatagcctaaacctgggaataaccaaatgtccatcaacaatagaataggtaaataaattatggcatatttgaacaaaaggataatatacaacaatgaaaatcaataatagcagataggaatcttgcaaatattatattaagtacaataagccagacacacacacacacatacacactactatatgcata

SEQ ID NO: 942767 - DNA, 606 bp, Homo sapiens
gtgcaggaggagttgatactcaggatctgaatgtgagggccgaggagggcgaagagcgtgggtggggaggggatgttgctttggggtctcatggtccccagagggcactagggagtcacttttggctccgctggtgcatgaagtcacctgtggccaccatccgttccgcctaaaacactctggagagaatcccacctttcttacaatttgttgggccattgaggtttgagggcctgtgtttggatccttgcaactgtgtggtctcacctctgtgcgtgcattctcattgccagaattggtctattttcacggctggtctttggggaggggggcgggatccagcctttgttttgttgtgttggggtgggggtgttgtttttctaaaagctacctcttatgtttgtccagttgttcttttgttcctttcccgcctcccattctgctgctcttmctccctcttttccccaacctcccccgacccttcttgaattttgggaaagcacatttgcaatattcgtgtttgctttgggacggaccctccgtttcatctcatgctttatgtgtaagagttttttattattattttttctttcctttctctctctg

SEQ ID NO: 942768 - DNA, 604 bp, Homo sapiens
ttaaactaaagacctcctgcacagcaaaagaaactatcatcagagtgaacaggcaacctacggaatgggagaaaaattttgcaatctatccatctgacaaagggctaatatccagaatctacaaataacttaaacaaatttacaagaaaaaaagaaacccgatcaaaaagtagtcaaaggaaataaacagaaagttttcaaaagaagacatttatgcagccaaaaaacatgtgtaacaaagctcatcatcattgatcattagagaaatgcaaatcaaaaccacaatgagataccatctcatgccagttagaatggcgaatattaaaaagtcaggaaacaacagatgctggagaggatgtggagaaataggaacgcttttacactgttggtgggagtgtaaattartccgaccattgtggaagacaatgtggtgattcctcaaggatttagaaccagaaataccatttgacccagcaatcccattactgagtatatacccaaaggaatataaatcattctactacaaagacacatgcacacgtatgtttactgtggcactgtttactatagcaaagatttggaaccaacccaaatgcccatcaat

SEQ ID NO: 942769 - DNA, 621 bp, Homo sapiens
tatctcatggccttcagttttcagtggttaaactatgtgtcagcttctatatggtaaattaagtttcttcaagactcacacctgccatatgtaacagctattaattctgggaaaaaagcaaaaaaaaaatacacaaaggcacttgagaatgaatgaaagcaggataattcttgaggggagtgaaaacttgaaagaagagtctcatttgaagtacatttctctttttttgacttttatggaaggacaggccaaaactgccaccaaatcatcagtagaaaactcataacctggccgggtgcggtggctcacacctgtaatcccagcactttgggaggccgaggcgggtggatcacgaggtcaggagatcgagaccatcctggctaacacggtgaaacctgtctcaactaaaaatacaaaaaaaattagccgggygtggtggcaggcgcctgtagtcccagctacttgggaggcagcagaatggtgtgaacccaggaggcggagcttgcagtgagccgagattgcaccactgcactccagtctgggcgacagagcgagactctgtctcaaaaaaaaaaaaagaaaactcataacctttatggcatgtagacaagaggacaaaat

SEQ ID NO: 942770 - DNA, 601 bp, Homo sapiens
gtagcacacccttaaaatgcatgcaaactttgattcctaactttcagatttcctcctaccgtgacatgaattctcaccaaacaaaggccagaatgtttttttgacatatttagctattgataggctttagctctccctctccctctccctctgcctctccccacggtctccctctctttccacggtctccctctgatgccgagccgaagctggactgtactgctgccatctcggctcacygcaacctccctgcctgattctcctgactcagcctgccgagtgcctgtgattgcaggcacgcgccgccacgcctgactggttttggtggagacggggtttcgctgtgttggccgggcgggtctccatcccctaactgcgagtgatccgccagcctcggcctcccgaggtgccgggattgcagacggagtctcgttcactcagtgctcaatggtgcccaggctggagtgcagtggcgtgatctcggctcgctacaacctacacctcccagccacctgccttggcctcccaaagtgccaagatgcagcctctgcccggccgccaccccgtctgggaagtgaggagtggtctctgcctggctgcc

SEQ ID NO: 942771 - DNA, 601 bp, Homo sapiens
gtagcacacccttaaaatgcatgcaaactttgattcctaactttcagatttcctcctaccgtgacatgaattctcaccaaacaaaggccagaatgtttttttgacatatttagctattgataggctttagctctccctctccctctccctctgcctctccccacggtctccctctctttccacggtctccctctgatgccgagccgaagctggactgtactgctgccatctcggctcaccgcaasctccctgcctgattctcctgactcagcctgccgagtgcctgtgattgcaggcacgcgccgccacgcctgactggttttggtggagacggggtttcgctgtgttggccgggcgggtctccatcccctaactgcgagtgatccgccagcctcggcctcccgaggtgccgggattgcagacggagtctcgttcactcagtgctcaatggtgcccaggctggagtgcagtggcgtgatctcggctcgctacaacctacacctcccagccacctgccttggcctcccaaagtgccaagatgcagcctctgcccggccgccaccccgtctgggaagtgaggagtggtctctgcctggctgcc

SEQ ID NO: 942772 - DNA, 601 bp, Homo sapiens
gtagcacacccttaaaatgcatgcaaactttgattcctaactttcagatttcctcctaccgtgacatgaattctcaccaaacaaaggccagaatgtttttttgacatatttagctattgataggctttagctctccctctccctctccctctgcctctccccacggtctccctctctttccacggtctccctctgatgccgagccgaagctggactgtactgctgccatctcggctcaccgcaacctccctgcctgattctcctgactcagcctgccgagtgcctgygattgcaggcacgcgccgccacgcctgactggttttggtggagacggggtttcgctgtgttggccgggcgggtctccatcccctaactgcgagtgatccgccagcctcggcctcccgaggtgccgggattgcagacggagtctcgttcactcagtgctcaatggtgcccaggctggagtgcagtggcgtgatctcggctcgctacaacctacacctcccagccacctgccttggcctcccaaagtgccaagatgcagcctctgcccggccgccaccccgtctgggaagtgaggagtggtctctgcctggctgcc

SEQ ID NO: 942773 - DNA, 738 bp, Homo sapiens
aaatctaccttctgcctgtatagatttgcctactgggggtcaggtacagtggctcacacctgtaatcccagcactttgggaggccgaggcgggtgggtcacttgaggtcaggagttcaagaccagcctgggcaacgtggtgaaaccccatctctactacaaatataaaaattagccgggcgtggccaggcgcggtrgctcacgcctgtaatcccagcactttgggaggccgaggcgggcggatcatgaggtcaggagattgagaccatcctggctaacacaggtgaaaccccatctctactaaaaatacaaaaaattagccgggcatggtggcaggcgcctgtagtcccagctactcaggaggctgaggcaggagaatggcgtgaacccgggaggcagagcttgcagtgagcaagatcgtgccactgcactccagcctgggcgacagagcaagacaccgtctcagaaaaaaaaatcagccgggcatggtggcacacacctgttcccagctactcaggaggctgaggcaggagaatcgcttgaacttgggaggaggaggttgcagtgagccaagatcgcaccactgcactccagcctgggcaagagagtgagattcagtctcacaaaaaacaaaaaacaaaaagatttgcctattgaagacatttcacataagtaaaatcatgaagcacatggtctcttgtgtctggcttcttccacttagcatgttttcagagttcat

SEQ ID NO: 942774 - DNA, 609 bp, Homo sapiens
agcttcttggaggccgggcgcggtggctcacgactgtaatcccagcattttgcgaggccgaggagggcagatcacaaggtcaggatattgagagcatcctggctaacatggtgaaaccccatctctactaaaaatagaagaaattagctgggcgtggtgataggtgcctgtagtcccagctacttgggaggctgaggcaggagaatggcatgaacctgggaggcgaaggttgcagtgaaccgagatcacgccactgcactccagcctgggcgacagagcaagactccgtgtcaagaaaaaaaaaaaagcttctgggccagggaagaagctacaaaaaatacaaaaattagctgggtgttgtggtatgcacctgtagtcctaactatttgggaagctgaggcaggagaatcgcttgaacctgggaggcagaggttrcagtgagccaagatcgtgccactgcactccagcctgggtgacagagactccatttgaaaaaaattaaaaattagctaggtgtggccaggcacagtggctcacgcctgtaatcccagcactttgggaggccgaggcaggcggatcactttaggtcaggagtacagatcagcctgg

SEQ ID NO: 942775 - DNA, 641 bp, Homo sapiens
tcatagccgttattgatgcctaccttcttctactacccattctgtattccctttgccttcagcaagcacctcagcagatggtggtttttttcctggtggagtgacccgaaccttcattcctgatttgtagtcctgcctggattgggctgttgtagtttcccattgaccttaatcacagggcattagataatactaagagatgtcctaatggatctcctgtattccatgcatactcttccttacctctgttgtggagtaagagactaattccatcttttttttttttttgagatggagtgtcgctctgtcgcccaggctggagtgcagtggtgcaatctcggctcwctgcaggctccgcctcacgggttcacaccattctcctgcctcagcctcccgagtagctgggactacaggcacttgccaccatgcccagctaatgttttgtattttgtgtagtagagacggggtttcaccgtgttagccaggatggtctccatctcctgacctcatgatccgcccgccttggcctcccaaaatgctgggattacaggcgtgagccaccacacccggccgagactgattccatcttgatagtccagatcaatcactccagccaacaccataactcctccttagcctgt

SEQ ID NO: 942776 - DNA, 641 bp, Homo sapiens
tcatagccgttattgatgcctaccttcttctactacccattctgtattccctttgccttcagcaagcacctcagcagatggtggtttttttcctggtggagtgacccgaaccttcattcctgatttgtagtcctgcctggattgggctgttgtagtttcccattgaccttaatcacagggcattagataatactaagagatgtcctaatggatctcctgtattccatgcatactcttccttacctctgttgtggagtaagagactaattccatcttttttttttttttgagatggagtgtcgctctgtcgcccaggctggagtgcagtggtgcaatctcggctcactgcaggctccgcctcacgggttcacaccattctcctgcctcagcctcccgagtagctgggactacaggcacttgccaccatgcccagctaatgttttgtattttgtgtagtagagacggggtttcaccgtgttagccaggatggtctcmatctcctgacctcatgatccgcccgccttggcctcccaaaatgctgggattacaggcgtgagccaccacacccggccgagactgattccatcttgatagtccagatcaatcactccagccaacaccataactcctccttagcctgt

SEQ ID NO: 942777 - DNA, 575 bp, Homo sapiens
gtctctattaatacagaaagttagccgggtgtggtggtacacgcctgtaatccaagctacttgaatcgcttgaacccaggaggtggaggttgcagtgagccaagactgtgccattgcactccagcctgggcaacaagaacaaaactccgtctcaaaaaaaaaaaaaaaaatgaatgaatgaatgaatcaatgaggcctggcgtggtagctcacacctgtaatcccagcactttaggaggccaaggtgggcggatcacttgaggtcaggagttcaagaccagcctgaccaacatgggtgaaaccccatctgtactaaaaatacaaaaattagccggacgtggtagtgtatgcctgtaatcccagctacttgggaggctgaggcacaagaatcacttgaacatgggaggcagaggttgcagtgagccaagattgcaccmctgcactcaagcctgggccaaaagagcgagaccccatctcaaaaaaaaaaaggacttgaattgggttttagaagatgggcatacttaaatgaattggagagggaattagtacaaaagccactgagataggcacactaa

SEQ ID NO: 942778 - DNA, 641 bp, Homo sapiens
agcccacagtagagacccaatacatatttgttgaataaatgaatgaaatgctcatgtttccaggttgaaaactaactcatccttgaggaaatcctagaatttcccattctgctacttccccattttaaagggaaaactaaggcataaagaaaagaaatgatggatcttgagcatatgagtggtaaagcctgaactaacatcccttcagccactcatagaacaagtatttatttgatatggaatgcaccccagtcctcttcagcctttttaggaatatccatgtggcttggtgctctagttctatgtcctggtggtcatcactaacaaaagagagaggaaacttcctttgctttttttaggggggaaaaaaagtcctccgtgtggaaaggtagaagggcagcctggatgttggggggcctgggtgagtgattcatttcaatgtcctagaattcctggagggggcctttataagttagttgaaatcygccttccgagcctgtttctcttgaccctgcttttgtcacaggagtgagtgagtgtgtgtgtgtgtgtgtgtgcgcgcgtgctgcaggtggggtggcacatggctcctgtggcagacactccctggatccctgcagtctggagaaccaaccccccag

SEQ ID NO: 942779 - DNA, 641 bp, Homo sapiens
agcccacagtagagacccaatacatatttgttgaataaatgaatgaaatgctcatgtttccaggttgaaaactaactcatccttgaggaaatcctagaatttcccattctgctacttccccattttaaagggaaaactaaggcataaagaaaagaaatgatggatcttgagcatatgagtggtaaagcctgaactaacatcccttcagccactcatagaacaagtatttatttgatatggaatgcaccccagtcctcttcagcctttttaggaatatccatgtggcttggtgctctagttctatgtcctggtggtcatcactaacaaaagagagaggaaacttcctttgctttttttaggggggaaaaaaagtcctccgtgtggaaaggtagaagggcagcctggatgttggggggcctgggtgagtgattcatttcaatgtcctagaattcctggagggggcctttataagttagttgaaatctgccttccgagcctgtttctcktgaccctgcttttgtcacaggagtgagtgagtgtgtgtgtgtgtgtgtgtgcgcgcgtgctgcaggtggggtggcacatggctcctgtggcagacactccctggatccctgcagtctggagaaccaaccccccag

SEQ ID NO: 942780 - DNA, 665 bp, Homo sapiens
ctcccagaggtgggggctacagaatcagcaggcctagctgagctgtggtgggctccgcccagtttgagcttccaggcagctttgtttacctactcaagcctcagcaatggcaggtgcccctccccctgccaggctgttgcctcgcagttcaatctctgactgctgcactagctgtgagcaaggctctgtgggtgtgggaaccaccgagccaggcactggatagtagctcctggtctgcatttgctaagactgttgaaaacrcgcagtatttgggggaggagtgttccgttttttccaggtacagtctgtcagggcttcctttgtctaggaaagggaaatctcccaacgccttgcgcttcctgggtgaggcgacgccctgccctgctttggttcaccctccgtgggctacacccactgtcctcctgacctcaagtaatctgcccgccttggcctcccaaagtgctgggattatagtcataagccaccacacccggcccaggttttctatattcttattgatgttctgtacactacttctactgattactgcaaagaagaaatattaaagcctccaattgtaactagatttatctatttctcctttcagtttttgtttcatgtattttttgagggggggacgggagaggacagtgtctcactctgtc

SEQ ID NO: 942781 - DNA, 691 bp, Homo sapiens
gccttttgttcagctatgccctgctcccagaggtgggggctacagaatcagcaggcctagctgagctgtggtgggctccgcccagtttgagcttccaggcagctttgtttacctactcaagcctcagcaatggcaggtgcccctccccctgccaggctgttgcctcgcagttcaatctctgactgctgcactagctgtgagcaaggctctgtgggtgtgggaaccaccgagccaggcactggatagtagctcctggtctgcatttgctaagactgttgaaaacgcgcagtatttgggggaggagtgttccgttttttccaggtacagtctgtcagggcttcctttgtctaggaaagggaaatctcccaacgccttgcgcttcctgggtgaggcgacgccctgccctgctttggttcaccctccgtgggctacacccactgtcctcctgacctcaagtaatctgccygccttggcctcccaaagtgctgggattatagtcataagccaccacacccggcccaggttttctatattcttattgatgttctgtacactacttctactgattactgcaaagaagaaatattaaagcctccaattgtaactagatttatctatttctcctttcagtttttgtttcatgtattttttgagggggggacgggagaggacagtgtctcactctgtctgt

SEQ ID NO: 942782 - DNA, 691 bp, Homo sapiens
gccttttgttcagctatgccctgctcccagaggtgggggctacagaatcagcaggcctagctgagctgtggtgggctccgcccagtttgagcttccaggcagctttgtttacctactcaagcctcagcaatggcaggtgcccctccccctgccaggctgttgcctcgcagttcaatctctgactgctgcactagctgtgagcaaggctctgtgggtgtgggaaccaccgagccaggcactggatagtagctcctggtctgcatttgctaagactgttgaaaacgcgcagtatttgggggaggagtgttccgttttttccaggtacagtctgtcagggcttcctttgtctaggaaagggaaatctcccaacgccttgcgcttcctgggtgaggcgacgccctgccctgctttggttcaccctccgtgggctacacccactgtcctcctgacctcaagtaatctgcccgccttggcctcccaaagtgctgggattatagtcataagccaccacacccggcccaggttttctatattcttattgatgttctgtacrctacttctactgattactgcaaagaagaaatattaaagcctccaattgtaactagatttatctatttctcctttcagtttttgtttcatgtattttttgagggggggacgggagaggacagtgtctcactctgtctgt

SEQ ID NO: 942783 - DNA, 736 bp, Homo sapiens
gcaatttacaaaagaaagaggttcattggacttacagttccagatggctgggtaggcctcacaatcatggctgaaggcaaggaggagcaaatcacatcttacgtggatggcagcaggcaaagagagagcttatgtagtgcaactcccattttttaaaaccatcagatctcatgagacccattcactatcatgagaacagcatgggraagacccacccccgtaattcagtcatctcccaccagatccctcacacaacacatgggaattatgggagctacatgatgagatttgggtagggacacagagcccaaccgtatcacccatgtttactgtggcactattcacaatagtgacaatgtggaatctacttaagtgtccatcaatagatgaatagataaagaaaatatggtatgtatacagaatggaatattattcagcccaaaaaattaaatcctttgaccatgtttgattatgttaaaaaaaaaaaaagaatgaaatcctgccatttgcagaaaaatggatggaactggaggtcattacattaactgaagtattgcatgttctcactcacatatgggaccttagaaagtagatctctagcaaagacatggaatcaacctaaatgcccatcaatagtagactggataaagaaaatgtgatatatatacattatggaatactgatatggcttagctgtgtccccacccaaatctcacacggaattgtaataatcccc

SEQ ID NO: 942784 - DNA, 640 bp, Homo sapiens
gataggggtggggccgttttaggggcttttgagccaggatgagccaggagaaggaatttcacaagagaatgtcatcagttaaggcaggaacaggccattttcacttcttttgtggtggaatgtcatcagttaaggcaggaaccagccatctggatgtgtacctgcaagtcacaggggatatgatggcttagcttgggctcagaggcctgacattcctgtattcttatattaataagaaaaataaaacaaaatagtaaagtgttggggcggcgaaaatttttagaggtagtatggagagataatgggtgatgtttctcagggctgcttcgagcgggattacgggcggcgtgggaacctagagtgggagagattaagctgaaggaagattttgtggtraggggtgatattgtggggttgttagaagaaacatttgtcgtgtagaattattagtgatggcctggatacggttttgtatgaattgaaaaaactaaacagaataagagaaggagaaaaacaggtattaaaggactaagaattgggaggacctaggacatctaattagagagtgcctaaggaggttcagcatagccttgccagcaaagattatttatttactttaagagcgcggtttgggtatagc

SEQ ID NO: 942785 - DNA, 605 bp, Homo sapiens
gtattttaggtgggaatgacaataattgctcaaacgactgtttaaaaaaaattggtgcaaaagttgcatccggtggccaagataggggtatgggatgggggaaagagcacgtacagggcatggagctgagcacctcctctgcttgcagtcwcttcagagctgctgctcaaagtggtttcccgagcaaaagtcaccatgctgatatagacgtgtgacctgccattgcgaccacagatgattagctcaaagagtgatccctcacccaaggcactcgtggtgggaaaatagtctctggaacatgatcacgaaaagtctgcccaacagagaggctccacactgaatagtgactggtcaaccaattggattctctctcagagaaagcttgaacatgggcatgttggtaaatcaatagagacagaaataggatcactacaagtccaccttaaaagtttggttactcctggccagacaccgtggctcatgcctgtaatcccagtactttgggaggccaaggcaggcagatggcttgaggtcagtagtttgagaccagcctgaccaacatggtaaaacctgaactctactgaaaatacaaaaattagccaggt

SEQ ID NO: 942786 - DNA, 605 bp, Homo sapiens
gtattttaggtgggaatgacaataattgctcaaacgactgtttaaaaaaaattggtgcaaaagttgcatccggtggccaagataggggtatgggatgggggaaagagcacgtacagggcatggagctgagcacctcctctgcttgcagtcacttcagagctgctgctcaaagtggtttcccgagcaaaagtcaccatgctgatatagacgtgtgacctgccattgcgaccacagatgattagctcaaagagtgatccctcacccaaggcactcgtggtgggaaaatagtctctggaacatgatcacgaaaagtstgcccaacagagaggctccacactgaatagtgactggtcaaccaattggattctctctcagagaaagcttgaacatgggcatgttggtaaatcaatagagacagaaataggatcactacaagtccaccttaaaagtttggttactcctggccagacaccgtggctcatgcctgtaatcccagtactttgggaggccaaggcaggcagatggcttgaggtcagtagtttgagaccagcctgaccaacatggtaaaacctgaactctactgaaaatacaaaaattagccaggt

SEQ ID NO: 942787 - DNA, 605 bp, Homo sapiens
gtattttaggtgggaatgacaataattgctcaaacgactgtttaaaaaaaattggtgcaaaagttgcatccggtggccaagataggggtatgggatgggggaaagagcacgtacagggcatggagctgagcacctcctctgcttgcagtcacttcagagctgctgctcaaagtggtttcccgagcaaaagtcaccatgctgatatagacgtgtgacctgccattgcgaccacagatgattagctcaaagagtgatccctcacccaaggcactcgtggtgggaaaatagtctctggaacatgatcacgaaaagtctgcccaacagagaggctccacactgaatagtgactggtcaacmaattggattctctctcagagaaagcttgaacatgggcatgttggtaaatcaatagagacagaaataggatcactacaagtccaccttaaaagtttggttactcctggccagacaccgtggctcatgcctgtaatcccagtactttgggaggccaaggcaggcagatggcttgaggtcagtagtttgagaccagcctgaccaacatggtaaaacctgaactctactgaaaatacaaaaattagccaggt

SEQ ID NO: 942788 - DNA, 819 bp, Homo sapiens
cacataatcttgatttctaacaaccgaagctaatgaccgcctctttgtacttctcagagtgaataagatttgtggggggctacccagtatcaaatctcaaacctgcgattacctttctcataatcagacttggcttctctgttacacctgagtttgtttgatctttctttgagatttcaatgccttaatgtcttttttgtatgtgggtctttctctattaccattccctgagaccaaaattagggtatgtagttaaggatgaaattgagaactaagtgtactttagtcacattagacgaatctagggaaacttagggagtaaaatgagttaaaaacctagygcctgtaggccgggtgcagtggctcacgcctgtaatctcagcactatgggaagccgaggcaggcagatcacatgaggtcaggagttcgagaccagcctgaccaatatggcgaaaccccgtctctactaaacaaaaaaatacaaaaattagtcgggcatggtggtgcgtgcctgtaatcccgactactcaggaggctgaggcaggagaatcacttgaacctgagaggcagaggttgcagtgagctgagattgcgccattgcactcaagcctgggcgacagagcgagactctttctcagaaaaaaaataaaaaaaaataacctagtgcctgtaatcccaacactttgggaggcctaggcaagaagatcgcttgagctcaggagttccagaccagactgggcaacgtggtgaaaccccatctctactaaaaatacaaaaattagccaggtgtagtggtgcatgtgtgtccggaattggtgg

SEQ ID NO: 942789 - DNA, 674 bp, Homo sapiens
gaaaccccgtctctactaaacaaaaaaatacaaaaattagtcgggcatggtggtgcgtgcctgtaatcccgactactcaggaggctgaggcaggagaatcacttgaacctgagaggcagaggttgcagtgagctgagatygcgccattgcactcaagcctgggcgacagagcgagactctttctcagaaaaaaaataaaaaaaaataacctagtgcctgtaatcccaacactttgggaggcctaggcaagaagatcgcttgagctcaggagttccagaccagactgggcaacgtggtgaaaccccatctctactaaaaatacaaaaattagccaggtgtagtggtgcatgtgtgtccggaattggtgggttcttggtctgacttcaagaatgaagccgcggaccctcgcggtgagtgttacagttcttaaaggtggcgtgtccggagtttgttccttctgatgttcggatgtgttcggcgttttcttccttctggtgggttcgtggtctcgctggctcaggagtgaagctgcagatcttcgcggtgagtattagagctcttaaggcagcgcgtctggagttgtttgttcctcctggtgggttcgtggtctggctggcttcgggagcgaagctgcagaccttcgcatgagtgttacagctcataaaggcagtgtg

SEQ ID NO: 942790 - DNA, 674 bp, Homo sapiens
gaaaccccgtctctactaaacaaaaaaatacaaaaattagtcgggcatggtggtgcgtgcctgtaatcccgactactcaggaggctgaggcaggagaatcacttgaacctgagaggcagaggttgcagtgagctgagattgcgccattgcactcaagcctgggcgacagagcgagactctttctcagaaaaaaaataaaaaaaaataacctagtgcctgtaatcccarcactttgggaggcctaggcaagaagatcgcttgagctcaggagttccagaccagactgggcaacgtggtgaaaccccatctctactaaaaatacaaaaattagccaggtgtagtggtgcatgtgtgtccggaattggtgggttcttggtctgacttcaagaatgaagccgcggaccctcgcggtgagtgttacagttcttaaaggtggcgtgtccggagtttgttccttctgatgttcggatgtgttcggcgttttcttccttctggtgggttcgtggtctcgctggctcaggagtgaagctgcagatcttcgcggtgagtattagagctcttaaggcagcgcgtctggagttgtttgttcctcctggtgggttcgtggtctggctggcttcgggagcgaagctgcagaccttcgcatgagtgttacagctcataaaggcagtgtg

SEQ ID NO: 942791 - DNA, 774 bp, Homo sapiens
ttcttttttcacctatctggcggcctgacttgctgattttttctacattcttttttagtatgaccatgcttcccacagttaaaacaagctccaggaaatggagtatttcctttatccactctcagtcctgccattgcctgtgccaacaaagtagctttatgcagattacctccgataccatcacaggccttgatataatcaactaaatgtgctttccctctaataggtcacagagcagcctggcaattgggattagcattgtcaaaagctartaactgcaacactatatcctgagcagccaaatctgcaatcatcttttcaagagactcctgtaaccaagctataaaatcaacatgtggttccctaggtccctgttttatagcactaaaggaagggtattgttccccacctgaagtgattttttcccaagctctaatgcacactcctctaagctgttctatggcatcatcctgcatgatgagttgtgcacctagcccagccaccaacccccaaaagttggtctgcagttatattaatttgaggttggtcctgggcattgcaagcagcctgaatggaagcttcatctgcccaccaagctttaaattgtaagaactgagcaggagttagacaagcttgagtaagagcatcccagtcagtaggaatcatccgactggaaacagtaacattctttaacagtcccattacaaaaggagaacctggtccatactcatttatagcttgttttaattctttgagtaatttaaaagaaaaagg

SEQ ID NO: 942792 - DNA, 577 bp, Homo sapiens
tccctccaccccattgagatggtgttcagaccatggaggcagctatccttccctttgggccaaatgagctcactgttaccaatgtttccatctataacctactaactatttaacaatcacttgtagtaagataaataaagtagtaaaataatctctcagaaaatgagcatgtcccctgtgggcctggggactgggaatgttttgatgtagttgttcatgtttcagagtcacgctgggcctgcctctgcctcatcagtgttcaaaggccacaattacgcctgcaccacagraggcagcacacaccaaagggtctgctccggagccagcagtcccacctatccccattttgttttggcaaagtaaacattcaagagtgtgctgtggacttcagcaggtcccaccaaattcatatactgaagttctaacccccaatattactgccttaaaaaatagggtctgtaggacaaaactaaggttaaataaggtcattaggatgggaccttgatctgataggatcagtgtccttataagaagagacaccagtgcctcacgcctgtaatcccagaactttgggagg

SEQ ID NO: 942793 - DNA, 773 bp, Homo sapiens
tctacgggagccagtatcaggatagaaaaactaaaatggaactgatgagttgctggaggttcagtgtgcacaagtcttaggggtcaaaacatgagagctccagactttgggagactccacacttcaataggagccctaggaggttcaagagccctaggaggttctcacagtaaggatcaaagaaaaatcccctcatgcatccagcagggggagwgcaagggcagccattttgaaatatgacacatgcatcctgttctaatgaaggcctgccctcaatagaaattatattaccagagcctaatgatgcagggaagggaaaatacccaactgcagccccttctacacttcctgtctcacctgagcgggggaagaaaagcaaccctgagacacacttgtgaagctcacggcgcaggggcacaggcttagtaaaatactgaggcctactcatggctctatagaagatttccctccccccacacccatggtcacatccataggagtagctcatcataacaagaggggaatggaaatgaaagaattctgtatctcagatggtatttgaaaataaatttctagggacaacagggaaatcaaaaacaagaacaccagaggaaactttaacctctgacacagttacaacaagcaataattacagcttgatccctagccagaaacataaaactttaaactaaaaatctatttactccagtttcttttaccccagtatatcatgtctggctttaaagataaaagtaccaccagcatactataag

SEQ ID NO: 942794 - DNA, 773 bp, Homo sapiens
tctacgggagccagtatcaggatagaaaaactaaaatggaactgatgagttgctggaggttcagtgtgcacaagtcttaggggtcaaaacatgagagctccagactttgggagactccacacttcaataggagccctaggaggttcaagagccctaggaggttctcacagtaaggatcaaagaaaaatcccctcatgcatccagcagggggagtgcaarggcagccattttgaaatatgacacatgcatcctgttctaatgaaggcctgccctcaatagaaattatattaccagagcctaatgatgcagggaagggaaaatacccaactgcagccccttctacacttcctgtctcacctgagcgggggaagaaaagcaaccctgagacacacttgtgaagctcacggcgcaggggcacaggcttagtaaaatactgaggcctactcatggctctatagaagatttccctccccccacacccatggtcacatccataggagtagctcatcataacaagaggggaatggaaatgaaagaattctgtatctcagatggtatttgaaaataaatttctagggacaacagggaaatcaaaaacaagaacaccagaggaaactttaacctctgacacagttacaacaagcaataattacagcttgatccctagccagaaacataaaactttaaactaaaaatctatttactccagtttcttttaccccagtatatcatgtctggctttaaagataaaagtaccaccagcatactataag

SEQ ID NO: 942795 - DNA, 586 bp, Homo sapiens
acatgaaacagtaattctctattcccttctcctgcccagcccctagcagccaccattccacttcctgtctctataaacttgactactctaggtacgtggaataaggagaatcatacagtatttatccttttgtgaacagttactttcacttaccataatgttttcatggctcatccatgttgtaacatgtaataatttattccctttttggggctaaataatatttcattgtatgtgtgtaccacattttctttatccgttcatctattgatggtgacttggttgcatccaccttttggctattrtgactaatgttgctatgaacatgagtatacaaatatctgtgcgagtctctgttttcacttctttttggtatatatatccagaagtagaatttctgaatcatatggtaactacacttaatttttcgaggaatttccatgccattttccacagggactgcactccatcttacattcccacttgcaatatattcttgctaatgcttgtattttctttgtcttcttcctttttttttttctgatagtagtcaacctagtgtaaagtggtgatttattataatgtt

SEQ ID NO: 942796 - DNA, 636 bp, Homo sapiens
gtagatggggacaagtgaggtacaggaaaaagggggagtcccagaaaggaggtgggccctgttgcataaggtgggtaggtgactgcatggctggacaaaccagagagatggaagggcaggtgcagttacctcgggtggctttcacctgcagagacaaatagctccaaaactctagaactgggtcctgcaatttactctagaaccacccctcaccctacccacagttagcatcttagtcaccaatgttgggctcaaaattcctcttctcctctcctgtctcctgtggtcttcccctcccaggaggatcagggtagagaagcaatttccaatttaaaaaatggaagagcaggatacacctactcatcctataatctaaaccacgtgttagatatgtaagagtctaaattacgtgggacttggagcacttctatagacmcagtcctgacctgctcttcaccaggtcaaagttgacacatccccttctcccacaaccagcattatggggggtaggggcccacagaaagggctggtgttgagagggtcttggccaataagcctgtgtctcagggcacattctcacggggatgtgaggctcactacaatgggctttgagcatggaatgccagcatctacagg

SEQ ID NO: 942797 - DNA, 606 bp, Homo sapiens
aaaactctggaggacacgatctccccaggggccctcttggtgccagtggaggctcctgttgggcctgcatcacagctcaaatacccctctgtctgctcttccttctctcccttcctacaacagggcttgatcccaaagtcaatcttcaataatgtcagcctgaaaaaaccaaaaggatcaaaatccaattttagtcaagcataaagtttgaagacagccactcagaaacacacactccaaaataatggggtcagtgcctccctagtgaggaaattaaggttttattaatrtaggcagaaacaaagaggtttggcaggatcacacatttccatacatggccagtacacagttgcagggatgtgattgctcacagtttgctacattctaaggaacagtgctccagcgctttctgaggaggggtgacaatctgagggggtctgctctctggtgccacagccttttcttatcatttacaggaaggaacagaagctgtagctgcatgctacatgactcaggtctcacaattcacattcccttagaggctcaaaatactttaaagttcaaacagctttaatttgaattatttatcttcacaataagcattct

SEQ ID NO: 942798 - DNA, 751 bp, Homo sapiens
ggaggcgggaaggagaccgtgcaggccgcagcaccgaaaatatttgctctctggcccttcccagagtgcttgccgacctctgtccgacagctagaaggaaggataggacccgtccgacgataaccactgttgacatttgagcgcgtttccttcccggcttttgtgtgagagtggcagtctgtttgcttttgtggtcgggatctgctgcacgcacggcgggctgtttgcatgaggcttcctggaggatagggctgggctcggagctgcacgcagtggggcgtgtcctgcatgcagtggggcctcagaagagagctgtggtgggcggggcagtgccaatgctggtgggtgccaggcctccacgctcagatcagccccggcgacaggtttgggccaccctctctctggcctctgtgcagtggcccaggccgtctgctctgcctggcacacttgcctctgtccttccactgaagcgctcctcttaccctctgctcccggctgggtacgttgaattgtgtccctcaaggagatatgctaaaggtctaaccccaggaacctgtgtatgtgatctaatttggaaacagggtcttggcwgatgtaatcaagcgaggatgaggtcaccctagagtagggggcctatatccacggtgctggtgtcctcatgagagcaggtgagcagacactgacactcaggggtgaaggctgcatggagtcagaacagggcttagtgcgatggcggccacaagccaaggaa

SEQ ID NO: 942799 - DNA, 795 bp, Homo sapiens
tttggaaccactgttttacaccacaggtttagggactgtttgtgagttaagggttcctttcggtgatctgtgaacttggtctttgcagtacctagatcctgccttggagattatttagtagtggggattatttagatggtatacttaaccatttttcagatgcctgaagactgaactttagaagcatttgttaattgattttataaaatatcttaggacttttttttcttaacctcatgaaaatacattaccatactgtgctgaaactaagcaaaattcttagatatttagagtttgcttctgtgctgaataatcttacactactgtaatttttgagttagtatcttttgccctccttttttcagtcagyggtcaggtctggttttagatgccagcttcaactttttttttttttttcggagacagtctcactatgtcacccaggctggagtgcagtggcatgatcttggctcactgcaacctccgcctcctgggttcaagtgattctcctgccttagcctcctgagtagctaggattacaggtgcgtgccaccacacctggctcatttttgtatttttagtagagatggggtttcaccatgtgggccaggctggtcccgatctcctgacctcaagtgatccgcccgcctcggcctcccaaagtgctgggattacaggcgtgagccaccatgcctgttttttgtttttgtttttgttttaataaagacctattcccagagaattagccctggatcagtttaccagttctgcccattgagggcacagataggcata

SEQ ID NO: 942800 - DNA, 539 bp, Homo sapiens
tgactggatgtggcccacagtttgccgattcctgttcaaggagaaaccttgtgaaaataaagcagacttaattttgtgttgattgggttgcccctggggaggtccggcgtgttcctgacaggcatcactcatcccccggggcacacactctctgaggaggaacacccacagagctccccagagcacctgagcctcacgctgctgcttcttccacagacccgctgacattcttcaacacctgcctggacacctcccagaaagaagcggtttyatttgcgctgtctcagaaagaacttgccatcatccatggacctcctggcactgggaaaaccacgactgtggttgagatcattcttcaagctgtgaaacaaggcttaaaggtgggcagtgcatgccacttccctgtcagagcccgtccgctcctggtctgttgtgttcagtgggtgctcagcgacctttcagcctcagttctggtgggatgggtcaggaacattactgagcatttattgattgagccttggactgcccctgtttgattt

SEQ ID NO: 942801 - DNA, 623 bp, Homo sapiens
ttggtgggtaggggcttgggaagtggggagtgctgattggtcaggctggagatggaatcacaggggatcaaagtaagtttttcttgccgtcttttgttcctgggtgggatggcagaactggttgaacaagactaccggtctgagtggtgtcaactggtccatcgagtgcaaggtctgcaaaatatctcaagcactgatcttaggttttacaatagtgatattatcctcaggagcaatttggggaggttcagactcttggagccagagactgcatgacccctaaactgtaatttctaatcttgtagctaatttgttagtcctgcaaaggcagactggtccccaggcaagaagggggtctttttgggaaagggctgttatcaattttgtttcagagtcaaaccatgaactgaattccttcccaaagttagttgggcctatgcccaggaatgaacaggacagctwaaaggttcgaagcaagacagagttggttaggtctgatttctttcactgtcataatttccacagttataatttttgcaaaggtcgcttcaatcagaaggagctggagccaacagtcaaggagcggccagaggaatttgattccagggctggttctgccactt

SEQ ID NO: 942802 - DNA, 718 bp, Homo sapiens
aaggcaggagctgctctggttgagacagtgagaacttgcctatatcacctctcctggcccaccagagtgcatggctgtgtgtctggaattggtgggttcttggtctcactgactccaagaatgaagccgtggacccttgcggtgagcgttacagctcttaaggtggtgcgtctggagtttgttccttctgatgttcggatgtgttcagagtttcttccttctggtgggttcgtggtctcactggctcaggagtgaagctgcggaccttcgcggtgagtgttacagctctgaaggcggcatgtctggagttgttcgttcctcccagtgggttcgtggtctcactggcttcaggagtgaagctgcagaccttcscagtgagtgttacagctcataaaggcagtgtggacccaaagagtgagcagtagcaagatgtattgcaaagagcgaaggaacaaagcttccacagtgtggaaggggacctgagcggattgacactgctggctccggcagcctgcttttattctcctatctggcaccacccacatcctgctgattggtagagccaagtggtctgttttgacagggcactgattggtgcgtttacaatccctgagctaggcccagcgagaaattgagcgcagcaccagtgggatagcactgctgggggacccagtacaccctccgcagccgctggcctgggtgctaagcccctcattgc

SEQ ID NO: 942803 - DNA, 581 bp, Homo sapiens
gctgggattaccggcacccaccaccacacctggctaatttttgtattgttagtagagatggggttttgccgtgttggccaggctggtctcgaactcctgacctcaggtgatgcagcctgccttggccttccaaagtgctgggattacaggcatgagccactgcgccaggctataacattgaaattttactcataaaagttctgtacactttattgtgttaatttctagrtattgttttagtggtttgctggcattgtaaatggtattttattacatctaaaaaattttactttttttttttttttgagatggagtctccctctgttgccaggctggagtgcagtgttgagatctcggctcactgcaacctccgactccctagttcaagcgattctcctgcttcagcctcccaagtaagctaggtttataggcacatgccaccacgcccagctaatttttgcattttcagtagagacagggtttcatcatgttggccaggctcgtctttatctcctaacctcgtgatccacccacctcagcctcccagattacaggcatgagccactgtgccctacttacat

SEQ ID NO: 942804 - DNA, 581 bp, Homo sapiens
gctgggattaccggcacccaccaccacacctggctaatttttgtattgttagtagagatggggttttgccgtgttggccaggctggtctcgaactcctgacctcaggtgatgcagcctgccttggccttccaaagtgctgggattacaggcatgagccactgcgccaggctataacattgaaattttactcataaaagttctgtacactttattgtgttaatttctaggtattgttttagtggtttgctggcattgtaaatggtattttattacatctaaaaaattttactttttttttttttttgagatggagtctccctctgttgccaggctggagtgcagtgttgagatctcggctcactgcaacctccgactccctagttcaagcgattctcctgcttcagcctcccaagtaagctaggwttataggcacatgccaccacgcccagctaatttttgcattttcagtagagacagggtttcatcatgttggccaggctcgtctttatctcctaacctcgtgatccacccacctcagcctcccagattacaggcatgagccactgtgccctacttacat

SEQ ID NO: 942805 - DNA, 635 bp, Homo sapiens
ctggaagccagagcctgacgtggctcattcaagcactctttcactcattcctttaaaaatgcttattgcctaccagggtgtaccagggtattgttagatgttgataagaaaataagtcagagtctctgacctcaaagaacttaaattttactatgggacacaaaaattaagagatcattataatatagaataggtgctatcatatggttatatgcagagtatttttgagaaaacacagaggaagtatccactttagccttaataggtcagaaaaggattaggagttagctggtaaaaaggaagacaaatagcatttcagggataaaatgaactggttggtataagcaaaactaataaatacatgtcagtcctgaaagagagcaaatgccctgtagaagaacatgttagtaaaggaaaacacaaagattctagcctctggccccaaatgatttcatccctctgatatgctaagtaaattaacacatgtacaatgtmtggaaaagtattatttcattatagcatatgctcaaagtccagaatttcaattaagttcgagtgtgaacaagcctacttatatgtagttctctaactataggacctttgtgtttgtataaattgacctgtgaaactaaaga

SEQ ID NO: 942806 - DNA, 607 bp, Homo sapiens
tcctgcctaaatactgtgcttttcccaaggtcttagcaaccagcagaccaggagatactctcccatgcctggctcactgggtcccatgcccacggagccttgctcactgctagcacagcagtctgagatcgacctgcaaggcagtagcctcatggggggaggggtgtctgccattgctgaggcttgagtaggtaaataaagtggccaggaagctcgaactgggtggagcccaccacagctcagcmaggcctactgcctttctagattccacctctgtgggcagggcatagatgaacaaaaggcagcagaaacttcagcagacttaaacgtctctgtctgacagctttgaagagaccagtggttctcccagcacagtgtatgagctctgagaatggacaggctgcctcctcaagtgggtccctgaaccctatgtagcctaactgggagacacctcccagtaggggctgacagacacctcatacaggcaggtgcccttctgagacgaagcttccagaggaaggattaggcagcaatatttgctgttctgcaaaacctccactggtgatacccaggcaaacagggtctggagtggacctccagcaaactc

SEQ ID NO: 942807 - DNA, 658 bp, Homo sapiens
tacatatgtaacaaccttcacgttgtgtacatgtacccttaaacttaagtataatttaaaaaaaaaaaaattctaccatttttgaggcggccttggccacagatcttgaggcttttgcaccacctagtgacaattgtgtgctattacaatacattgatgatttgttattcactgtccccatgagggaggaatgcctccaaggaayagagaggcttcttcacctgctgtgtgaagctggttataaagtgtccaaggacaaggcaaaagtctgtttttgagaggttggatatctatgattcatggtatcccaaggccagcccaggcttggaagtgcacacaaggaggctgtatgtgcattgcccaccccagttacaagtggcaggtcagggaatttctaggtgtggcaggattctgccgaatctggattccaaacttctcccttatagcaaggctcctcccttatatgaggctatcaaaggaaaggaaagagagcccctcctatgggaaaaggaacaggaaaaggccttcaaggatataaaggaagctctcatccaggccccagcacttgggttgccagatgtaaaaaaagcccttctttttgtatgtggatgaatgaaagggaatggcagtgggagtcttaactcagttgttgggctgt

SEQ ID NO: 942808 - DNA, 701 bp, Homo sapiens
gaccttcatggccttaggttggcccaatgcctcagggcattggtggctaccacaatccttatagaagatgccaacaagctagccctaggtcagaagttaatagttcgggtgccacacgctgtagtcaccttaatggagccaagaggacatcgttggctgtccaattctagaatgctaaagtatcaaggacttctgtgtgaaaatccccagataacactagagactrtaaataccttgaacccagctaccctgctgtctgtggagaaacccgattggaagggcagtgggttgcctcactgctggcaggaccttccccactgttgcataaatatggtggacgaagtgttctcgagccgggaagatctcagagatacccccttggagaggccagatgttgaatacttcactgatggtagcagtttcataacagatggggtgcgatatgcaaggtatgtagtagtgatccaacactcggtagtcgaggctcaagccttaccttctgggacttccactcagaaggctgaattaaaagcctcagaaggaggagtacatggaaaatttaatttaaccaactgttgccaagaaatagatgataatggcttagctgtcatggaaatcacagctagaatgaacaagttggtccatgttccagttcagatttggtccaggtggtccccagattccttgtttggaggatggtt

SEQ ID NO: 942809 - DNA, 701 bp, Homo sapiens
gaccttcatggccttaggttggcccaatgcctcagggcattggtggctaccacaatccttatagaagatgccaacaagctagccctaggtcagaagttaatagttcgggtgccacacgctgtagtcaccttaatggagccaagaggacatcgttggctgtccaattctagaatgctaaagtatcaaggacttctgtgtgaaaatccccagataacactagagactgtaaataccttgaacccagctaccctgctgtctgtggagaaacccgattggaagggcagtgggttgcctcactgctggcaggaccttccccactgttgcataaatatggtggacgaagtgttctcgagccrggaagatctcagagatacccccttggagaggccagatgttgaatacttcactgatggtagcagtttcataacagatggggtgcgatatgcaaggtatgtagtagtgatccaacactcggtagtcgaggctcaagccttaccttctgggacttccactcagaaggctgaattaaaagcctcagaaggaggagtacatggaaaatttaatttaaccaactgttgccaagaaatagatgataatggcttagctgtcatggaaatcacagctagaatgaacaagttggtccatgttccagttcagatttggtccaggtggtccccagattccttgtttggaggatggtt

SEQ ID NO: 942810 - DNA, 594 bp, Homo sapiens
gcaagggaaaaaaactggatgaagaatgagtttgacaagttgacagaagtaggcttcagaaggttggtaataacaaacttctccaagctaaagaagcatgttctaacccatttcaaggaagctaaaaaccttgaaaaaaggttagacgaatggctaaataaaataaacagtgtagaaaagaccttaaaggactggatggagctgaaaaccacagcatgagaactttgtgatgcatgcacaagctaaaatagcctattggatcaagtggaagaatggatatcaatgattgaagatgaaatgaatgaaataaagtgagaagacaagatwagagaaaaaagagtgaaaagaaatgaacaaagctgtcaagaaatatgggactaagtgaaaagaccaaatatatgattgattggtgtacctgaaagtgacagggaaaatggaaccaagttagaagatactcttcaggatgttatccaggagagcttccctaacctagataggcaggccaacattcaaatccaggaaatacagagaacactacaaagatactccttgagaagagcaagcccaagacatgtaattgtcagattcaccaag

SEQ ID NO: 942811 - DNA, 625 bp, Homo sapiens
actccagataggcacaccacctcacccttcagagcagggctctgagactccacaagtggtgaggacttaccagaggaactgaacttgacctccaacccaaccttccatttgctggtattattctgaagccctcatggcccaggggcctgcctcaggtagcaggtctcactcctgcagtggaggggccataaagttcagttcatgatcagcccccaagccaggggcagcggatgasagggcaggagttccatctagaggagctcctgtgttcaggcgttcctagacacctgcctgcccttctcccatcagcactggggtataaagaaggaaagaggcctgaggtttccagaggcctctacctgctgaggtcttaagaggactcaaccctctgggaaatacaaataaaatcctcaaccctccaaacaactgaatggacacctcttggccaaagagaccccggaaaaactttaaaatccaagtttcctggccgtgatgataggtcactcacacctcagcacacctgcttcctcacgaaccgttaccaggcttctttcccaagagctaaacagaaaccagccctgaaaaccaagaacaggagactccttcactgatttcaatttcaacc

SEQ ID NO: 942812 - DNA, 679 bp, Homo sapiens
tgcaaaacaggttaaagtgaagacatcactcaaagatgggcatgacagtgtagaaaaccaattaggaaagggtaagtatatgtaaaataggtgaagggtggggatcaatcagaggaaagcacaacaaatgggaagacaagtcttcaatctggtctgaggatttagcttgtagcttggctttcaggctttaaactggctttggcttggaagtggggtttcaccagggaccagtccctatttgcctaggcatttggctgcctcctgtccctctcatttccccctctgaagaggtacaactacctgttgttagaatagggacaaagacaatcttaactacttcctgctgacaggggatgctgttttgagcaaacagcaatcagagctccctcagaggcctatctaagcrtcccaggttaaagggagccatcattcaaggctctgttcggaatttgatggcctctaagtgagaagaaacagtttgggttattagatgacatggatcaaaatggaacaacaaggaggtaaagacagctcaaaaatcccaagtctgctgacatgcccagataactagtggctatagttatgcctgctaagatttggatgcatggtgcttggctttggtttgctcccttgttttcattttcccaaaaaaacctccagattatgagcaccacatcct

SEQ ID NO: 942813 - DNA, 583 bp, Homo sapiens
ctattgattggggaagtgataaatgtccgtgaaatcttcacaatttatgttcagagattgcagtaaagacaggtgtaagaaattataaaagtatcaatttggggaactaataaatgtccatgaaatcttcacaatttatgttctgccatggcttcagccggtccctccgtttggggtccctgacttcccgcaacaccaaagtactccttttcttacawcctgagaattgacaggacatgaagtagtgaagatgaacaaagctcaggggaaaccataggtccagccccagctccacttcagatgacagatgtggggcagtcagtctctctgagcctcactgttcttgtctgtattacatgcagtatatgtgtgctgtctgacactcaccatgtttggaataataacatatgagaatgcagtttaaaactggaaagcagcatggaggtattactggtttttcttgtaaggaatcaggagaagtatgaagtccacaaatgtcctttgcctaccctttaaagatttcctcctgccatcataactaagtgtgcttgtcaagctgctctccaaatactccctgtatttt

SEQ ID NO: 942814 - DNA, 583 bp, Homo sapiens
ctattgattggggaagtgataaatgtccgtgaaatcttcacaatttatgttcagagattgcagtaaagacaggtgtaagaaattataaaagtatcaatttggggaactaataaatgtccatgaaatcttcacaatttatgttctgccatggcttcagccggtccctccgtttggggtccctgacttcccgcaacaccaaagtactccttttcttacatcctgagaattgacaggacrtgaagtagtgaagatgaacaaagctcaggggaaaccataggtccagccccagctccacttcagatgacagatgtggggcagtcagtctctctgagcctcactgttcttgtctgtattacatgcagtatatgtgtgctgtctgacactcaccatgtttggaataataacatatgagaatgcagtttaaaactggaaagcagcatggaggtattactggtttttcttgtaaggaatcaggagaagtatgaagtccacaaatgtcctttgcctaccctttaaagatttcctcctgccatcataactaagtgtgcttgtcaagctgctctccaaatactccctgtatttt

SEQ ID NO: 942815 - DNA, 421 bp, Homo sapiens
atttattatatagggaatcctttccccattgcttgtttttgtcaggtttgtcaaagatcagatggttgtaaatgtgtgcccacatggtatacagcttcacaaaagattgaataaagaagcagatatgagaatctagttgtcttccattaagccagatgttaaagagatttgcaaaaatataaaacaatgtaacccttctcaagaaactttttttttgttttggaaaatagttattttacagttatccatttatatattttkgtagttatatatagttatatacataggtatgtatataaaatggatatatatgaatatgtgtattaaatagatatatcgaatatagttatatcaaattttttctttttaaatgaatcaataaatatttaagtgttctcagaaaaaaaaaacaaaaaaagga

SEQ ID NO: 942816 - DNA, 570 bp, Homo sapiens
ttaacagtaatgcgattttataacccaggactgtaacttaactctaacttttgttagccattcacagaaattacacagcagactgtaaaaaattaagtttattgatatgtatttataatatagaaattcagtagcattgcctaggattaggcttgaaggtagcaaaggaacatttttatatgaaaatcaaagagcaaagtatttttctcaaaagcagatttggttctccataaatacctcatcatatacctgattaaagaaactgatgagtttcataccacaagtttgtttgggcgatgamtttgcttagaaatgagttactagttggctttcttttccataaaagaaccataatgtaatatttacagaatgttttaagttgcagtaagacagcagcttagcctgctctcatgtggagtgcagtggtgcgatctcagctcactgcaacctccccctctcaggctcaagcgattctcgtgcttcagcctcctaagtagctagaattacaggcatgtgccaccatacctggctaatttttgtatttttcagtagagacggggtttctccatg

SEQ ID NO: 942817 - DNA, 572 bp, Homo sapiens
aatggccaaatatttggttaaacattattctgggtgtgtttgtggagatgttttttatgagattgacatttgaatgagtagactgagtaaagcagattgccctccctaacatgggtgaccctcatccaatcagttgaaggcctgagtagaayaaaaacactaagaaagatacaactttggtactttgactgattgatctgaaacatgggacttctgccctcaggctaaaacttacatcattgtgtctcctggtgctcaggcctttggattcagactgaacttacacaatcagctgtactgggcctccacttgccaactgcaggtcttgggacttttcagcctccatagtcatgtgagccaattccttatcatcttattttatatattttttttctattggttctgtttgttttatgaagcctgactggctaacacattaattttgtactacatgctaatttctgcactaagctctttgcatggataacataattttatcttcacaataaccgtatgagttaagtacttttattgtccttgtaagacatttgacaagactgtactcaaaggac

SEQ ID NO: 942818 - DNA, 594 bp, Homo sapiens
ccctgtctggttaattttctttttttctttgtagagataagatcttaatactcaggctgccagcttttgtagagacagggggtcttgctatgatgcccaggctggtttcaaactcctgggctcaagcgatcctcccactttggcctctcaaagctctgagattgcaggtgtgggctgccatacctggccctaaattcctatactggagccctaatccctaaagtgactgcatttggagatagtgccctaaggatgtaatatggttaaatgaggtcagaagggtggggccctaatctgatagggctggcatccttattaaaggaagacacaagggcttacatatgctctctgtgcacagaggaaaggccacatgaagacacacctagaatgtgcccgtctgcagccaagaagaaaggcctcaccaraaaccaacccctactggcaccttaatcttggacttccagtctccagaactgtgagaaaatgtttgctttttaagccactcattctatggtattttgttatggtagcccatgcagactaaacacaacactcaaactagaaaatgagccttgctgggttctcttggccttg

SEQ ID NO: 942819 - DNA, 601 bp, Homo sapiens
atgttttattttttgtagagtcagggtctcgctatgttgcctgggctggtctcaaactcctgggctcaagtaatcttcccgcctcagcctcccaaactgctgggattacaggtgtgatgtgcagtgcccagtctctcttaacttttgaagccaatattctattttttagaatacaacgttgctgttgagaagtccaatgtcatcttgattcccaattcattgtgacagctttggaagttttcggggtcatctctttccagtatcattaaatttcacaatgattagaaccttggtgtgggtatacattaatctattatgtaggtgcttattactttgggtatgaaaactcatacttcagttctgaaaatttttcttaatttatttctttgattccccttccttagttttcaccactatttttctggcacttctattattcaaatataagacttcacagagtratccgttaatttgacaaccttttttattttctatttttcatctatgcctttttgttctactttctaggagagtttcaacttaatcttctaatccttcttggagatttcatttctgctaaaacatagatctgagaattaac

SEQ ID NO: 942820 - DNA, 631 bp, Homo sapiens
ttttgttgatattcaacctaaaacttgaatgtctttttttcaaaaataatctcaacttttattttagatttcagggtacatatacaggtttgttacatgggtatgttgcacgatgctgaggtttggggtatggatgattcygtcacttgggtaatgggcatagtacccaataggtagttttccagcccacacacccctccctcctttcccccctagtagttctcagtgtctattattcctatctttatgtccacatgtacccaatgtttagctcccacttataagtgaacacatgtggtatttggttttctgttcccatgctaattcacttaggataatggcctctggctacagccatgttgctgcaaaggatatgatttcattctttctcatggccatgtagtagtccatggtgtatatgtaccacattttctttattccaccattgacgggcacctaggttgattctatgtcttttgctattgtgaatagtgctgcaatgaacatatgtgtgcatgtgtctttctgatagaacaattttatattcctctaggtatatattcagtaatgagattgctgggtcatatggtagttttaagttctttgagagtcatatggtcgttttaagttc

SEQ ID NO: 942821 - DNA, 714 bp, Homo sapiens
ccaggactagcaaatttgctattctactacttctcagggattattcaggccccctccgtccctacacatctgactcaaggatgtgcccctgccccagaactggcaagttgactttactcaacacgccgccgcagttcaggaatactaatgatacctctaggtcgtaggtagacactttcactggataggtatgaggcctttcccacagggttctgagaaggccaccatggtcatttcttcccttctgtcagacataattcctcggtttggccttcccacctctatacagtccgatagcagaccggcctttattagtcaaatcagccaagcaggttttcaggctcttggtattcagtgaaacctttatatcccttatggtcctcagtcttcaggaaaggtagaayggactaaaggtcttttaaaaacacacctcaccaagctcagccaccaacttaaaaaggactggacgatacttttaccactttcccttctcagaattcatgcctgtcctcagaatgctacagggtacagcgcatttgagctcctgtatagacgctcctttttattaggccccagtctcattccagacagcagaccaacttggactgtgctccaaaaaacttgtcatccctactatcttctctctagtcatactcctattcaccattctcaactactcatacatgccctgctcttgtttacactgccggctta

SEQ ID NO: 942822 - DNA, 606 bp, Homo sapiens
tgggtctttgtatgtgtgtaagtggctattttgccaggactctgcccagctttgtgtaacaaacccaaggcccttgtgatgtgggctcatgaggggatcttctgctccacaggttgcaaagacctgtgggagaagcatggcttcccaggtgagtcacacaaacactcaccacctyccctggctgaggatgagggtttctttggccccaagcttctcctgggtgggccatcactgcaccccccacctcaaacctgcttctccccactctctgtggatcttaactgcttgcctattcattcctaatatgataacctggatatttcaattgaaggtattgtattcacttgccccttttcattcctctccatgagtgccatggaccacagctacatctaactggccattttgtccccaacccaaaatgtcttaatgcaactcagcatcaactcaaaagtccaaagtcttcaatttaatctgagagtcaaggccatgtttcttccacctatgaacatgtaaaatcaaaacaagatatttactctaaagacacaatggtggtaaaagcaatgtgtagacatttcccatttaaatagagagaaattggccaaa

SEQ ID NO: 942823 - DNA, 732 bp, Homo sapiens
ccaccaaactgtatgtgcattttattgtttgtaaattatgcatcaataaacttgatgttaaagaattgtgtcaaatactattgagatgttaggtaagtcaaggacagaaaagggactattaggaatggcaatattagaagtcataatggctttattaggagtgttttcaacggagggataaagaccaaaacctaaccagtgggttaaaaaagaaggaattgattaagtggaaatacacagttctgttttttgtttgtttgtttctttttgatacaggaattcactctgtcacccagcctgcagtgcagtggcacmgtcacagctcactgcagcctcaacctcccaggctcaagtgatcctcctgcttcagccttccaagtagctgggaaaacaggtgcgtgccaccacacccagctaatttttgtatttttttgtagaggtggagtttcatcacgttgcccaggctgggaaatacacagttcttttaaggacttttgagctgaactgaggcagagaaatggggtggtacttgaggggcatgtggcagccaagggactttttttgaagattggtattgtaaaggcatatttgtatgctgagggaaatgatccagtaaagagagtgagatggatgacacaaggagaaaaagaaggtattgcatgagaaaactgtagagacgtctagagggtaggggatacaaagcacaagaggaggtgtttacctctgatagga

SEQ ID NO: 942824 - DNA, 593 bp, Homo sapiens
atctcggctcactgcaacctccgcctcccgggttcaagcaattctgctgcctcaacctcctgagtagctaggattacaggcgctgacccccatgcccggctgatttttttaatatttctagtagagacggagtttcaccaagttggtggtcaggctgctcttgaactcctgacctcaggtaatatgcccgcctyggcctcccaaagtgctgagattataggcgtgagccacagtgcccggcccatggttgttttatatagcctatgttcatcagctagaaagcttttatgcttactttctattttcttctaacagtaactttatttaaaacttttaaaaatagctttattgagataaaattcttctaccatactattcactcatttaaggtgtatgactcacattcatttaaagtgtgttttctaaggtcatgcaaccattatcacaatctaattttagaacattttaatctcccttaaagagaataatcacacccatcagctgccacaccccaccccaaccccacccttttcactcactcccccataccactgagaaatcactaatatactttctatctccataaatttgcc

SEQ ID NO: 942825 - DNA, 721 bp, Homo sapiens
gagaatctgtgagatagggtaaggaagagtgaagtgatcatgggacttagcattggaattcagcgctgcctgattgattcaatgttgccacagtggaaaacaacacaggacagaattcagcgggcacccacaaagagagcatttagaccagtcctagacagaggcaaayaatctatcccagtggtcagaatccgatttccagcaagcccttccaatgcatgctaaagtgctctggtgtcctaaataaatttgaaaggcagtctaggtcacaaaggctgcaattcctgggcacgtcttagtgctgtgcagggttcaaagccagtggacttggtgtgcttggaacctagttagacatcagccaggataagcaaaggactgcttaagtcaagcctttcccaaccctaggcagcacagctctgggggcaattctttccctctacttgaggaaagtagaggggagagtaaaaaggactttgtcttgcaacttggatacaagcttagccacagtggaatggggttccaggcagggtgctgaggctcccccattctagggcctaactcttggacatttctagacacctggggccagaaaggaacccattctcttgaaagaaaggaacaaatactgacatgattcatcacctgctgcttaaagagcccttgggcactgaataatcagcaaatggtagtgaggcagtactcatcatgggccttgggtgag

SEQ ID NO: 942826 - DNA, 532 bp, Homo sapiens
aattttaaagctccaaaatgatctcctttgactccaggtctcatttccaggtcatgctgatgcaagaggtgggttcccatggtcttgggcagctctgcctctgtgggtttacagggtacagcttccctcccaactgctttcacgrgcaggcattgagtatctgtggtttttccatgcacacagtgcaagctgttggtagatctaccattctgcagtctgaaggacagtagccctcttctcacagctcaactaggcagtgccccagtagggactctaggtgggagctcccagcccacatatcccttctgcactggcctagcagaggttctccatgagtggcccacccctgcagcaaaacttttgcctggtgcatcaagcatttcatacatcttctgaaatctaggtgaaagtcctcaaaccttaattcttgacttctgtgcacctgcaggctcaacatcacatggaagctgccaagcctgggatttccaccctctgaagccacagcctgcgctgtacatgtgcccctttcagc

SEQ ID NO: 942827 - DNA, 532 bp, Homo sapiens
aattttaaagctccaaaatgatctcctttgactccaggtctcatttccaggtcatgctgatgcaagaggtgggttcccatggtcttgggcagctctgcctctgtgggtttacagggtacagcttccctcccaactgctttcacgagcwggcattgagtatctgtggtttttccatgcacacagtgcaagctgttggtagatctaccattctgcagtctgaaggacagtagccctcttctcacagctcaactaggcagtgccccagtagggactctaggtgggagctcccagcccacatatcccttctgcactggcctagcagaggttctccatgagtggcccacccctgcagcaaaacttttgcctggtgcatcaagcatttcatacatcttctgaaatctaggtgaaagtcctcaaaccttaattcttgacttctgtgcacctgcaggctcaacatcacatggaagctgccaagcctgggatttccaccctctgaagccacagcctgcgctgtacatgtgcccctttcagc

SEQ ID NO: 942828 - DNA, 532 bp, Homo sapiens
aattttaaagctccaaaatgatctcctttgactccaggtctcatttccaggtcatgctgatgcaagaggtgggttcccatggtcttgggcagctctgcctctgtgggtttacagggtacagcttccctcccaactgctttcacgagcaggcattgagtatctgtggtttttccatgcacacagtgcaagctgttggtagatctaccattctgcagtctgaaggacagtagccctcttctcacagctcaactaggcagtgccccagtagggactctaggtgggagctcycagcccacatatcccttctgcactggcctagcagaggttctccatgagtggcccacccctgcagcaaaacttttgcctggtgcatcaagcatttcatacatcttctgaaatctaggtgaaagtcctcaaaccttaattcttgacttctgtgcacctgcaggctcaacatcacatggaagctgccaagcctgggatttccaccctctgaagccacagcctgcgctgtacatgtgcccctttcagc

SEQ ID NO: 942829 - DNA, 603 bp, Homo sapiens; identical to SEQ ID NO: 942706

SEQ ID NO: 942830 - DNA, 610 bp, Homo sapiens
ttggaagggatttgcctagaggtaggataactgcggggggtatgtctatagcaataaaagtgagaaaatatgagatctgaaggagctaacattgtggcagtggcagtgggtataaaggagaagggaggactagaagagatatttaagatgcaaacaatgtaggaactgggtgattatagaactgaaaagtgagtgagagggaggaatccatgagaactcacatatttctggttaggataaaagactgattgactgacatgaagactacaagagaaaaaaacagacttggagttgaaacttcagtttaggacactgaaactgaatgatgtgtcattcaagkggaaaggccattaggcagttagatatgtaggcttagagcacaggagaaaggtcttaaaaccctgggcttatgggacgttaccacggagactgcacagagtgagaagatccattttaaagctgatgatgaataatattttcgttataaggagagaagcaatgttaggggtgtcttcccattgctggagtgggtcatttgcagtatgcagtgcataaactcacaggctgtccttatgatgaccttttgttcattcttacattcagtatacag

SEQ ID NO: 942831 - DNA, 652 bp, Homo sapiens
tgctgagagcttcttccactcaataaaaccttgcactcattctccaagcccacgtgtgatctgattcttccactacaccaaagcaagcaccccaggatacagaaagccctctgtctttgccacaaggtagagggtgtaattaagctagttaacacaagctgcctttggatggctacactaaaagagcaccctgtaacacatgcctactggggcttcaaaagctgtaaacattcacccctagacactgccctggtgttggagccccacagcctgcccrtatgtatgctcccttagaggcctgagcagcagggcactgaagaaacgagccacttccccatcgtacaccctgcgagggggacaaaggaacttttcccatttcacctcctctgtcagtaccaagctggtctgtatgaggacggcagtctttgaaaaacaacatattggccaggcgtgcgtggctcacacctgtaatcccagcacttcgggaggtcgaggtggacagatcacgaggtcaggagattgagaccatcctggctaacacggtaaaaccccatctctactagaaatacaaaaaaattagctgggcgtggtggtgcggcacctgtagtcccaagctactctgggaggctagaggccggagaatgacatgaac

SEQ ID NO: 942832 - DNA, 606 bp, Homo sapiens
agccagtggaattggggaagggcacagggtgaagaaacctccccaagtgaaattggtagtggtttccaactggggcacaaattttcttgagtggagtccaggtgatgagtgggaggtgttgtggatacaaggtgctgccaatgaagtaggcagatggagagaggcgaggtctgaaagccgtgcttgctttctcagtggggtaagctcacagcctggggcaaggtctgaatgrtccactgcagaagagaggctggcctgaccaatggtgtgggagctgggtcaggcctcttgctaccagctatctcctactaccctggcaaactatatgatacagtggaggtagccaaaatcctcttgggaacataaccccattggcctgagaactatcctccatcactcacagtggctgcagcaagccccacccaaggagaatctgagcctagaccctcttaactctgccccaacctgatggtattttcctacttgccctggtagttgaacacaaaactcagaaactcttgggagctttatggccctgccaatcacctgagtatccaaaatacttaccctgaccatcttagggcaagcttagagccccctacgact

SEQ ID NO: 942833 - DNA, 610 bp, Homo sapiens
ctcaaggaaggcagccagtggaattggggaagggcacagggtgaagaaacctccccaagtgaaattggtagtggtttccaactggggcacaaattttcttgagtggagtccaggtgatgagtgggaggtgttgtggatacaaggtgctgccaatgaagtaggcagatggagagaggcgaggtctgaaagccgtgcttgctttctcagtggggtaagctcacagcctggggcaaggtctgaatggtccactgcagaagagaggctggcctgaccaatggtgtgggagctgggtcaggcctcttgctaccagctatctcctactaccctggcaaactatatgatacagtggaggtagccaaaatcctcttgggaacataaccccattggcctgagaactatcctccatcactcacagtggctgcagcaagccccacccaaggagaatctgagcctagacyctcttaactctgccccaacctgatggtattttcctacttgccctggtagttgaacacaaaactcagaaactcttgggagctttatggccctgccaatcacctgagtatccaaaatacttaccctgaccatcttagggcaagcttagagcccc

SEQ ID NO: 942834 - DNA, 664 bp, Homo sapiens
tcttaagactacatataagtgatgtatagaagtacagtgcctagcaaatatatgttcttgaaagtctttgctatactcacaaatttctcctcaagtttttagtttatcgtttatcactcaattgatacctcatatctaagaactagttcagacgtaggccataaatattaacctatgaattcaaggctagttattaatcagattttttaaccttttatgttacacgtggtttctgtttgaataacagattgtgttttactcttgaaatgaagtaacataaatcttgaaagctagttgtgaattgtttatgaggtgcaatgtaactaaaaaaatgaatttcagcttttccttgtgcttatagatatttaaatacaaaatgattagagatagataatgtaaatgtaatcatcacagatgattacattacaatacaaaatgtacctttcttacataaaaattttaagtagtagacatgctagaaaatgctgataaaaagtcaaaacttaaatatcacccatcagctcaytttcatactccaaatctttgaccagatctatgtgtctgtgtttgtgtatatatctgcatgtctgtataattttacctgtagtctgtccacctagtgaacaatgagcaggcactcagactggccggaatttggctttca

SEQ ID NO: 942835 - DNA, 776 bp, Homo sapiens
aaggttgcaagatgacggctgcagatccaaatatcatatcatgacctgacaacacccgaaacctagatgggaatatcagaagagcttcctgccttgtctctcctgtttttgtctttttcttttttttttctcaagtaagaaaatctttcttaaaatcctgcccctcagcagactggccctttcatttcattggtcagaactgggacccaaagacaccacttaacaaacgacagaggaaggagactactaccagggctggattagaccaatcatgactcatgctgtcaacagggaagaaagaaaatgcctgtkgggaagtgaccaatagtgtccatcataatatttttggtccttttctctgattacagaagtcatgtatgttcattatagaatatttgggaagcccagaaaaaggtgaagaagaaaataaaatcccctcagattctaccacctggatccaactattgtcttacccactttgcactggttttatccatctttgtactctagcccttccatccttgttctgcaccagcccttgaaatctgcccacctgtctcaaaccaccttccattcagcaccgggtcccaaacttctccttctttattttttttaagcagagtctcactcgttgcccaggctggagtgcaatggcgtgatcttggctcactgcaatctctgcctcccaggttcaagcaattctcctgcctcagcctccagagtagctgggattacggggcatgagccaccacgcccagctaatttttgtattttta

SEQ ID NO: 942836 - DNA, 636 bp, Homo sapiens
gattacttcgcctcagagcaaaaacaggattctctagttgattgtctcaaggaggctgaaagataagatgcagtttccagccatgtgttggttaatgttgggggtatgttctgagaattgcgttgttaggtaatttcattgtgcaaacatcataaagtgtacttatacaaacctagatgatctagcccactacacacctaggctatatgatatagctgattgcttctaggctacaaacctatacagcatgttagtgtgatgactactgtaggcagttataacacaatggtaagtttgtgtgtatctaaacatagaaaaggtacagtaaaatataattaaaaagatacaaaatggtacatttgtatagggcccttaccgtgaatggagcttgcaggactggaagttgcactgggtgtcagtgagtgagtggcgygtgaatgcaaaggcctaggacatcactgtacactactgtggaccttataaacactgtacacttaggctgcactaaacttatttttaaaaatttctttctttaataataaattaacttttacattaatttttttgctttgctttacaacttttaaattgtttaaacttttgacttttgtgataacacagcttaaaatacaatca

SEQ ID NO: 942837 - DNA, 626 bp, Homo sapiens
ttgtgtttattagctattgtgcccatttacatttgtaagagcagtataagtgagttccagtcattccacatcatccacttagtattgtcagacgttttaattttgccaatctatgaatgagaaattacatctcactattgcttaatttgcatttcccttgtggaggaggctgagcatcattttgccatatgtttattgaacttgagtttctcttccgctcatgtatttttttttttttttttgaggcagggtgtggctctgttgcccaggctggagtgtagtggtgccatcatggcttactgaagccttgacctcctgggctcaagtaatactcccacctcagcctctcaagtaactggggctacaggcgtgagcaccatgctaggctaatttttttttttatttttagtagagatgaggccttgctatgttgcccaggctggtcttgaactcctgaccttgtaatctttctgcctcagcctcctaaaakaattgggattacagacgtgagacacttctcccggctgctcatattttttgcttaatttttgagtttttttccttgcagatttgcaagaattcttaaaaaaaatttttttggtgaaatatatttgaaacatatagat

SEQ ID NO: 942838 - DNA, 642 bp, Homo sapiens
gtaaccgccccggtcgcccccttatccaaaaagactattgatgtcatcggagccacgggggtttcagcaaagcaagctttctgcttgtctcagacttgtactgtaggaggacataaagtcattcatcagttttggtacatgcctgactgtcccttgaccttttcgggaagggacttgctcagcaagctgagagccactgtctctttgacagagcacagctctttactgctaaagttacccagaacgggagtcattatgacccttatggtcccccgagaggaggaatggagacttttctgaactgagctgggccaagagagaagaccagctctggctaagcggtggccaagagtacgggtagaagacaaccctccgggattggccagttaagactggggcccagccrgtgaggcaaaaataggacctggtccccagagaagcccttcaaggtatccaggtccgtctcaggcacctaagaacttttggaattattgttccttgtcagtctccatggaacactcccctcctgcctgttcccaagccacggaccaaggactaccggccggtacaggatttgcgcttgcttcatcaagctacactgactttccatccaacagtacctaacccgtccatattgttggg

SEQ ID NO: 942839 - DNA, 674 bp, Homo sapiens
agagagctggtggagggacagaggccacacattttttttttgagatggagttttgctcttgttactcaggctggagtacaatggcatgatctcggctcaccgcaacctccgcttcccaggttcaagtgattctcctgcctcagcctcccgaatagctgggagtacaggcatgcaccaccacacctggctaattttgtatttttagtagagacagggtttctccctgttggtcaggctggtctcgaactcctgacctcaggtgatctgcccacctcagcctcccmaagtgttgagatgacatgcatgagccaccatgcctggtcagtgccacatatttttaaaccaccagatcttgctcgaacttattcatcaccaaggagatggtgctaaaccattcatgaaaaatctacacccatgatccaaacacctcccagcaggccccaccaacataagatttggaggaagcatgcaaactatattactggggatcacttttttttttttagatgaagtcttcctctgtcacctgggctggattgcagtgacgtgaccacagcttactgcaccttcaaacttctgggcttaaggaatcttcccgccttggcctcctaggtagctgggaatataggcatgtatcaccatacccagctaacttttaaactttttgtagagat

SEQ ID NO: 942840 - DNA, 674 bp, Homo sapiens
agagagctggtggagggacagaggccacacattttttttttgagatggagttttgctcttgttactcaggctggagtacaatggcatgatctcggctcaccgcaacctccgcttcccaggttcaagtgattctcctgcctcagcctcccgaatagctgggagtacaggcatgcaccaccacacctggctaattttgtatttttagtagagacagggtttctccctgttggtcaggctggtctcgaactcctgacctcaggtgatctgcccacctcagcctccccaagtgttgagatgacatgcatgagccaccatgcctggtcagtgccacatatttttaaacmaccagatcttgctcgaacttattcatcaccaaggagatggtgctaaaccattcatgaaaaatctacacccatgatccaaacacctcccagcaggccccaccaacataagatttggaggaagcatgcaaactatattactggggatcacttttttttttttagatgaagtcttcctctgtcacctgggctggattgcagtgacgtgaccacagcttactgcaccttcaaacttctgggcttaaggaatcttcccgccttggcctcctaggtagctgggaatataggcatgtatcaccatacccagctaacttttaaactttttgtagagat

SEQ ID NO: 942841 - DNA, 605 bp, Homo sapiens
tcacaactgagaaacattgctggtggtgtatggtccgcaagtgtgaaaatgttccttctgaattacttgcatcaagcattaagagctggtttttatcttttatttttccaatcctctttccttctcaaggtgtccaagacacacagagccacggaatctcacaggtgtctgagaattcctcctccttggactcccagaggatccagaactgcagccggttctcgctttgctctccctgtccctgtccatgtatctggtcacggtgctgaggaacctgctcatcatcctggctgtcagctctgtctctcccctccacacccccatgtacttcttcctctccaacctgtgctgggctgacatcggtttcacctcggccacggttcccaagatgattgtggacatgcagtcgcatagcagagycatctctcatgcgggctgtctgacgcagatgtctttcttgttcctttttgcatgtatagaaggcatgctcctgactgtgatggcctatgactgctttgtagccatctgtcgccctctgcactacccagtcatcgtgaatcctcacttctgtgtcttcttcgttttggtgtcctttttccttagcc

SEQ ID NO: 942842 - DNA, 713 bp, Homo sapiens
cgtctcaccatgcgcggctgtcatggtgcatgagaccgctcctcttcctctcctgcaccacctctctctaccctgatgttctaaaccctctcctcccaggcacagtcccaggaaagctcctggtgccgtttgtctattgggctctgcaaattctgagccttgaccttgtgattcctttgaataagcgatcgcttcccctcacgagtcctgttttcagtgtggcccttttcctgctgttccttttgaatgagcctttcaacctccctcctggccctaaagcaccccctttctttgcgcttcctgatcacatcaggctgttgggtgatccactcctwcatgcggcacagtttgctaagcaccactgcatgcaccaggagcgcgagaagaacgcagcgtggcgcctggccttggggtgcttggacgggagctggggagcccctacgatagggtggaggggtaactgaggtcctccacagccaggtggcgagaaggccgagcggggcagatgtgagagggtctgagacgcagcatgacagggaagagaccagccaactctaaaaatagctttgggagtagaatttcaagcatggtgactgcttggatggacgaagggctgggagaggcatagagagaaaggaggagggaaggggggctcccttgttcctgagccagtgcagagtcctccaggacccacttctttctgtgtcctgccc

SEQ ID NO: 942843 - DNA, 767 bp, Homo sapiens
gccattatcctaagagaactaatgcagaagcagaaaaccaaatcccacatattctcacttataggtgagagctaaacattgagtccacatggacataaagatgaaaaccatagacactggggaacaagaggagggaggaaaggagggaggsggcaagggctgaaaaactattgggtactacagtcactactccaaacctcagcatcacacaatatatccatgtgacaaatctgcacatgtactgcttgattctcaaataaaagttgaagaaaaagttctttatatactctagatgctagacgcttatcagatatctgatttgtaaatcttttcttcctttatgtagattgttctttcactttgttgatagtatcctttgattcaaaaatatttaacttttgatgacatccaatgtatttgtatttttcttttgttgctggcccttttggtgtcctatctatcaatccatgctaaatccaggtcatgttttctttaaatagttttatagatttgactcttacatgtaggcctttggaccgattttgaattaattattgtggtgtgaggtaggggttcagctcattcctgtgcatgtggatgtctagtttcccagcaccatttgttgaagtactgctcttcctccattgaataatctggcactctgtcaaaaatcagttggtcatctacacgagggtttatttctggctctcaattctatcccactggtttaatacatctattctaatgccagtactaaactgccttga

SEQ ID NO: 942844 - DNA, 709 bp, Homo sapiens
actcttacatgtaggcctttggaccgattttgaattaattattgtggtgtgaggtaggggttcagctcattcctgtgcatgtggatgtctagtttcccagcaccatttgttgaagtactgctcttcctccattgaataatctggcactctgtcaaaaatcagttggtcatctacacgagggtttatttctggctctcaattctatcccactggtttaatacatctattctaatgccagtactaaactgccttgatgattgcagctttgtagtaagttttcaaattggcaagtgtgagcctccaacattgttcttctgtgttctttctttyttttttttttttttttttttttttgacgaagtctcactctgtagcccaggctggagtgcagtggcacaaccttggctcactgcaagctccatctcccgggttcacaccgttctcctgcctcagcctcccgagtagctgggactacaggtacctgccactacgcctggctaattttgttatttttagtagagatggggtttcactatgctagccaggatggtctccatctcctgacctcgtgatctgcccgccttggcctcccaaagtgctgggattacaggcgtgagccaccacaccccgcctgttcttctttttaacattgttttagctattcagggtcccttgagattccacacgaactttagaatcagcctgtgaa

SEQ ID NO: 942845 - DNA, 818 bp, Homo sapiens
atccaatgtatttgtatttttcttttgttgctggcccttttggtgtcctatctatcaatccatgctaaatccaggtcatgttttctttaaatagttttatagatttgactcttacatgtaggcctttggaccgattttgaattaattattgtggtgtgaggtaggggttcagctcattcctgtgcatgtggatgtctagtttcccagcaccatttgttgaagtactgctcttcctccattgaataatctggcactctgtcaaaaatcagttggtcatctacacgagggtttatttctggctctcaattctatcccactggtttaatacatctattctaatgccagtactaaactgccttgatgattgcagctttgtagtaagttttcaaattggcaagtgtgagcctccaacattgttcttctgtgttctttcttttttttttttttttttttttttttttgacgaagtctcactctgtagcccaggctggagtgcagtggcacaaccttggctcactgcaagctccatctcccgggttcacaccgttctcctgcctcagcctcccgagtagctgggactacaggtacctgccactasgcctggctaattttgttatttttagtagagatggggtttcactatgctagccaggatggtctccatctcctgacctcgtgatctgcccgccttggcctcccaaagtgctgggattacaggcgtgagccaccacaccccgcctgttcttctttttaacattgttttagctattcagggtcccttgagattccacacgaactttagaatcagcctgtgaata

SEQ ID NO: 942846 - DNA, 572 bp, Homo sapiens
agccattttgtaatgtatacatacttcagtcacatcatgttgtaccctcttgtacatattttttgtcaattcaataaattcaacaactccaaaaaacaagacatttttacaaaataattattaaaaataaaattcaaaattctatttaattaatttatttatttttgaaayagagtctcgctctgtcacccaggctggctgaagtgcagtggtgcgatctcggctgactgcaacctctgtctctcaggttcaaatgattctcctgcctcagcctcccaagcagatgggattacaggtgtgtgccatcacacctggctaatttctgtattttcagtagagatagttccgccatgttgtccaggctggtctcgaactcctgaccttaggtgatccaccagcctcgacctgccaaagtgctgggattacaggtgtgagccactgcgcctggacagaatataaaagattgtttaattcaactaaaacattaaaacagattatttctataagtggtaattgttctaacatgttttggtcaaaatagtctccttagtcatccacaattaaatggttaa

SEQ ID NO: 942847 - DNA, 572 bp, Homo sapiens
agccattttgtaatgtatacatacttcagtcacatcatgttgtaccctcttgtacatattttttgtcaattcaataaattcaacaactccaaaaaacaagacatttttacaaaataattattaaaaataaaattcaaaattctatttaattaatttatttatttttgaaatagagtctcgctctgtcacccaggctggctgaagtgcagtggtgcgatctcggctgactgcaacctctgtctctcaggttcaaatgattctcctgcctcagcctcccaagcagatgggattacaggtgtgtgccatcacacctggctaatttctgtattttyagtagagatagttccgccatgttgtccaggctggtctcgaactcctgaccttaggtgatccaccagcctcgacctgccaaagtgctgggattacaggtgtgagccactgcgcctggacagaatataaaagattgtttaattcaactaaaacattaaaacagattatttctataagtggtaattgttctaacatgttttggtcaaaatagtctccttagtcatccacaattaaatggttaa

SEQ ID NO: 942848 - DNA, 572 bp, Homo sapiens
agccattttgtaatgtatacatacttcagtcacatcatgttgtaccctcttgtacatattttttgtcaattcaataaattcaacaactccaaaaaacaagacatttttacaaaataattattaaaaataaaattcaaaattctatttaattaatttatttatttttgaaatagagtctcgctctgtcacccaggctggctgaagtgcagtggtgcgatctcggctgactgcaacctctgtctctcaggttcaaatgattctcctgcctcagcctcccaagcagatgggattacaggtgtgtgccatcacacctggctaatttctgtattttcagtagagatagttccgccatgttgkccaggctggtctcgaactcctgaccttaggtgatccaccagcctcgacctgccaaagtgctgggattacaggtgtgagccactgcgcctggacagaatataaaagattgtttaattcaactaaaacattaaaacagattatttctataagtggtaattgttctaacatgttttggtcaaaatagtctccttagtcatccacaattaaatggttaa

SEQ ID NO: 942849 - DNA, 602 bp, Homo sapiens
cttttggccaatttctctctatttaaatgggaaatgtctacacattgcttttaccaccattgtgtctttagagtaaatatcttgttttgattttacatgttcataggtggaagaaacatggccttgactctcagattaaattgaagactttggacttttgagttgatgctgagttgcattaagacattttgggttggggacaaaatggccagttagatgtagctgtggtccatggcactcatggagaggaatgaaaaggggcaagtgaatacaataccttcaattgaaatatccaggttatcatattaggaatgaataggcaagcagttaagatccacagagagtggggagaagcaggtttgaggtggggggtgcagtgatggcccacccaggagaagcttggggccaaagaaaccctcatcctcagccagggraggtggtgagtgtttgtgtgactcacctgggaagccatgcttctcccacaggtctttgcaacctgtggagcagaagatcccctcatgagcccacatcacaagggccttgggtttgttacacaaagctgggcagagtcctggcaaaatagccacttacacacatacaaa

SEQ ID NO: 942850 - DNA, 544 bp, Homo sapiens
tggcataatcgtatctcactgcagcctgaacttcctgggctcaagtgatcctcttgcctgagcctactgagtagctaggactacaggcacatacctccatgcccagctccacaacagaattttaatgtgatgattctcattaaagaggtagtatggtgtagtgtttaaaagtacgggttctggccgggcgcggtggctcacgcctgtaatcccagcactytgggaggccgaggcgggagaatcacgaggtcaagagtttgagaccagcctgaccaacatggtgaaaccccatctctactaaaaatacaaaaattagctggacgtggtggtacgcacctataatcccaggtactcgggaggctggggcaggagaatcgcttgaacttgggaggcggacgctgcagtgagccaagatcacaccactgcactccagcctaggcgacagggcgagactactccgtctcaaaaaaaaaaaaaaaaaaaaagtatgggttttgtggggccggtgtgtcaggggcccccgcctgtgttatccccagcattt

SEQ ID NO: 942851 - DNA, 472 bp, Homo sapiens
tctcataaagatatataataacataatgatcactcataaagtctgggttttatactgtttgtatctaatgactaacaaccaatccaggaagcacagaatatgacccccatctccctgtcctttcattgcttctaaaacagcacagtcagccagctagggcagttggtcaaatactttgaagtgtgtgtgtgtgtgtgtgtgtgtgwgagagagagagagagagagagagtgtgtgtgtgtgtgtgtgtcagagagagatttcttctgtttaaaaacatttgttatttatgaaaccacataattaaaaataattccatcaacttactataaagctccatttctaatgcaaaaaaattttgtggaagtagcaaagtaataagaaaagacttgaagcttttcaaattctgcccagaataccaaaattatttttgatactttaatcttttttgatactttattgagcattcaaaat

SEQ ID NO: 942852 - DNA, 785 bp, Homo sapiens
tttaacagcacccaagtcacctctgaatgcttctctgcttagaaatttcttccgccaggtaccctaaatcatctctctcaagttgaaaattccagaaatctctagggcaagggcaaaatgctgccagtctctttgctaaaacataacaagagtcacctttgctccagttgccaacaagttccccatctccatctaagaccacctccgcctggactttattgtccatattgctatcagcattttgggcaaagccgttcaacaagtctctaggaagttccaaactttcccacattttcccttcctcttctgagccctccaagctgttccaatctctgctattacccagttccaaagtcgcttccacatttttgggtaccttttcagcagcaccccactcctggtaccaattctttgtattagtccattttcatgctgctgataaagacatatccgagactaggcaatttacaaaagaaagagatttaaaggacttacagttccacatggctggggaggcctcacaatcatrgtggaaggcaaggagcaagtcacatcttacgtggatggcagagagacagcttgtgcaaagaaactcccattttaaaaccatcagatcttatgagacccactcagcatcatgagagcaacacaggaaagatccgcccccataattcagtcaggtcccactgggttcctcccatgacacatgggaattgtggaagttacgattcaagaggagatttgggtggggccaaatcatatcatatcagccaaaccatatcagc

SEQ ID NO: 942853 - DNA, 460 bp, Homo sapiens
tgaggagtgcattctgccccgactcttggccctcaagctggggtctttgaggttcatgaacctactttgtcgagagccacggccgtgggggtggtgaggccccatctggccagaccatggggctctgcaaggggacagagtcagccccccagacagcccccaaccagagggggcagaagatgstgaccttagtgcagtgactaactatgccggcggaaacctccctctgaacccagcccagaagaactctgaccttcctggaattgcttctgacattttcgtttcagaagaaagaagaaaatcacaaacagaaaggagaagtgagtccccatggtggatacacagtgggcagggatgctgagggtccccgctacagcccccgtggcccgagggcctagaccctcagtccacgcggtggccctgtgtgcttctatcatccagtcttggccacggatgggac

SEQ ID NO: 942854 - DNA, 806 bp, Homo sapiens
cttgcagaattccagaaggacatgactccagcacaccatgggcctggacacagatgaggacctcagaactatagccagaatggcaaagatttcaccccagcagcctgggatgccctgtggcagagctgtgcaatgatggtcttggggtcactcttaaaaacatgatatttttaaaaaggtccagaatgaattttctttccctctttctttcttttcttttctttctttctttctttctttctttctttctttctttctttctttctttctttctttctttctttctttctttctttctttttctttctctttcctttctttctttcctttctttctttctttctttccttccttccttccttccttccttccttccttccttccttccttccttcctttctttttctttctttcctctctctctctctctctctttcttttttgagacagtctcattttgtcaaccaggctgaagtgtggtggcgcgatcttggctcaatgcaacctccgcctcctgggttcaagcaattctcttgcctcagcctcctgagtagctcggactacaggcgccagccaccacgcccggctaatttttgtatttttagtacagatggggtttcgctatgtggccaagctggacttgawctcctgacctcaggtgatcctcctgcctcagcctcccaaagtgctgggattataggcatgagccatggcacccagcccagaattcactttaaaagaaatatgtttccatgaaaccaagacaagccaaaagaaaatcaggccatgataaaagtcatccaatc

SEQ ID NO: 942855 - DNA, 632 bp, Homo sapiens
ttaaaggtagcgtggccagatgacttgcttcagtaaatggaatatgaacagaagtagcatgtgtcacctccaggcagagcctttgtcatgcccctttcccccacaccccctgacagcaatcagcaatgcttcaggtggtggacgtgccatcaactgggctcagagtaagggatgtgaacaggtgctccatgatggacatggagtgtgtgagagggatgagccaatagttgttagtaaatgtttaatggccaactctccaaaggagaagggcaacatgtgtgtgtgcacacatgtatgtgtttcacttataaaggatgccattgmcaaataataaaatacacagtattctacattgaaattgcatctatccaactgatacccacagaatgctttggttcattttttgctgaagtattgtatccataatcagtttatggttcccatttacaaaggactgtaattccaacctgcatgttggctgatatgttcatttatgttaacaaataagataaaacaataaagacatatgttagaacttcactcatccatctatggtgtgagtgacttctttgttgaattggggataagtttttgaatactagagaaatactgcctcaattttttgtgccatt

SEQ ID NO: 942856 - DNA, 737 bp, Homo sapiens
tgaatccaccaaactgtatgtgcattttattgtttgtaaattatgcatcaataaacttgatgttaaagaattgtgtcaaatactattgagatgttaggtaagtcaaggacagaaaagggactattaggaatggcaatattagaagtcataatggctttattaggagtgttttcaacggagggataaagaccaaaacctaaccagtgggttaaaaaagaaggaattgattaagtggaaatacacagttctgttttttgtttgtttgtttctttttgatacaggaattcactctgtcacccagcctgcagtgcagtggcacmgtcacagctcactgcagcctcaacctcccaggctcaagtgatcctcctgcttcagccttccaagtagctgggaaaacaggtgcgtgccaccacacccagctaatttttgtatttttttgtagaggtggagtttcatcacgttgcccaggctgggaaatacacagttcttttaaggacttttgagctgaactgaggcagagaaatggggtggtacttgaggggcatgtggcagccaagggactttttttgaagattggtattgtaaaggcatatttgtatgctgagggaaatgatccagtaaagagagtgagatggatgacacaaggagaaaaagaaggtattgcatgagaaaactgtagagacgtctagagggtaggggatacaaagcacaagaggaggtgtttacctctgatagga

SEQ ID NO: 942857 - DNA, 566 bp, Homo sapiens
tttctcctcagaaaataggattttcttttctattgcattgtcaggctgcaaattttctgaacttttatgctgtgcttcccttataaaactgaatgcctttaacagcacctatgtcactccttgaatgatttgctgcttagaaatttcttytgcaggctggggcatggtggctaacgcctgtaatccagcactttgggaggccaaggcaggtggatcacctgatgttgggagtttgagaccagcctgaccaacatggagaaaacccatctctactaaaaatacaaaaattagccattgccttgtattccccgctactcgggaggctgaggcaggagaaatcgattgaactcgggagctgagatcatgccatttgcactccagcctggggcagcaagcgcaaaactttgtctcaaaaaaaaagaaaagaaaagaaatttcttctgctggatacactaaatcacctctctcaagttcaaaattccacaaatctcgagggcaggggcaaaatgccgccagtctctttgctaaaacatgaacagagttaccttgcttcagttcccaacaag

SEQ ID NO: 942858 - DNA, 643 bp, Homo sapiens
gagccctcctagttctcaccccactccagctcttcccctctctcagttgtcccaattgtaactcaaaagatggaatatcaaagtcttaaaaaaaaaaaaaaaaaggacactgcagactaaccaaagagcagggagagaacagagtgaattacttaattcccaagaatagtgatgttggggagggaagacctaaattggggmttagctcaagagggtttttagcttcacctaggaaagaattcaagaacaagctgacagtagaggaaaaccactttattgaagcagcagtgttatagctccggtggtgttacagctctgtgactgcttctgcagagcagggctaccctgcaggcagagagtagcagctcagggcagttctacagtcatgtttatacctacttgtaattacatgcagattaaggggcagtttatgcagagatttctaggaaaagagtagtaacttctgggtcattgggtcattgccatggaaagggctggtaactcctggatgttgccatggcaatggtaaactgacatgacacactggtggatgtatcttatggagagcttaggcaccggacataattgaggactagctaaaacagggacaggatcaaggaaggcctccagggttgaagataga

SEQ ID NO: 942859 - DNA, 655 bp, Homo sapiens
ttccaggaaataatgtgtaagatactatactatggcgtctggcaaatagtatcttgttatatgttatatattctgatgattgttatattttctatcttatctcacctcccaccctagtccatacggaaccacttaacttcttgtagggctgaaatatatattcacttatttatgactaaatcctgtggaataaaaccaaggactttatgaagctaagaaatattaaatctcctgcctcttctaatctayacagtgagtcataaagggaatttacctgatcgagtatgatttgtctttcaaagctgtgctttatttcctcctacaaatctgtatttttaaccatcataaattatttttccctatcttcccaaatattaataataagtgtcattatccattcaggctgccataacaaaatatcacaattaaatggcttataaacaacagatatttatttctgacagttttgaaggctggaagtccaagatcagggtgccagcaaggtcaggctctgctgagagctctcttctgggttgcagaccactttctccttatgtccttacatagcagaaggcaactttcataaagacactaatcccaatcatgaaggttgtatcctcatgacctaatcaccttccaaaggccccgtctccca

SEQ ID NO: 942860 - DNA, 564 bp, Homo sapiens
aatatttattgtgaacttactgtgtactgagcactgttctaagcactggggttacagtagagaacagggtggactaggtccccgtctttatgaaacttaggctagtgatgggtagatgaacaaaaataagtaagcaaagacatacataggatgactatccagcagggttagtaccatgaaggataaaacaggtgatgccatagaaactaagaggaaggaggattctacttgagctaaagtggggctctctgaagggataacattagagttacagattgaaggacaataaagaaccgactattccaagacctaagggaagaatatcrtagccaaagagaatagtaagcacaaaagcctgagaagggaaatcgtttggtgtgcttgaggagcagaaagaaggccagcatggcttgaaatacagtgattgaggaggagagtggtacaaagtgaggtcagggattggcaagatctacatgacccagggctgcacagaccattgtgagatattgaggcttcattctaaatagcaggattttaagcaggtaagagacagcatgttcagga

SEQ ID NO: 942861 - DNA, 556 bp, Homo sapiens
tggtgcctgcatatcaaacaaagccatctgaaacccggacccaagtttacacttcctcagtcaactgatcatagagaatgccacatgaggccacgggtgcaggctgggagagaaaaggcaatgtagcacgagtaggagccatgggcatttgggccacttcttcatgtaatttacttgtgccttcagatcctgctcaagcctgatctcatgtatcccactttcatttgatgttggatggaatgccgctgtacatgcccagccttatggctttgagggccagacaacacccagttcgtaacagacagtggcccatggttaaacttttagtytctactaagcctagtaacacgccaagtgctgtttctcaaaaggagagtagtcctacgcagagagtggcagggctttgctacaaaaagggcttgtggtgtgattcacctacaggggcctgccagaggctccaaatcgcacctccatctgccactgatacctcaagcaccactggatctgctggatcgtgatgcaagtggcagagcagcttgcacagcagcctggacct

SEQ ID NO: 942862 - DNA, 679 bp, Homo sapiens
ttcaggtggtgcctgcatatcaaacaaagccatctgaaacccggacccaagtttacacttcctcagtcaactgatcatagagaatgccacatgaggccacgggtgcaggctgggagagaaaaggcaatgtagcacgagtaggagccatgggcatttgggccacttcttcatgtaatttacttgtgccttcagatcctgctcaagcctgatctcatgtatcccactttcatttgatgttggatggaatgccgctgtacatgcccagccttatggctttgagggccagacaacacccagttcgtaacagacagtggcccatggttaaacttttagtttctactaagcctagtaacacgccaagtgctgtttctcaaaaggagagtagtcctaygcagagagtggcagggctttgctacaaaaagggcttgtggtgtgattcacctacaggggcctgccagaggctccaaatcgcacctccatctgccactgatacctcaagcaccactggatctgctggatcgtgatgcaagtggcagagcagcttgcacagcagcctggacctaccagaatccttctctcattctgggccccacagaaaactagaagctcttcagtcccatagaaaactagaagctcttcagcagccactcagcaaatgggctagagtagcacatccaaa

SEQ ID NO: 942863 - DNA, 626 bp, Homo sapiens
aaaaccagtctctaggaagttccaaacatatcctcatcttcctgtcttctaaacacacactctctcttttgctcctgcttccaccatgtgagatacctggcacccccttgccttctaccatgattggaagcttccttatatstccccagaagcagaagctgctatgcttcctgtacagcctgcagaaccgtgagccaattaatcctttttttctttataaattttccagtctcaggtgtttttttagagcaatacaagaacaaaataatacaaatgcattctacattcattttttttgaactaaaggaagtgatagagaaatagaacatctgattcttggataaaaattgacaatgagtaagagttttaattcttattacaagagtaggcaaaattaggaaatatgctttgagactaacatgtcattgttcttttcacctaagcgttctgtcctctgtttcattagcgagatctgagaatgcctgttcctgcaagaagaaggagcagtcctatgtatctgggctgtaatgctgaagagggccaagtggctccctgtgagtccagataaaggatatattattcaagagaaaaacttgtaactactctaaacttaagacagatttatt

SEQ ID NO: 942864 - DNA, 698 bp, Homo sapiens
ggatctggcaggccgagaggccgagaccccgtccccaggcgtccctgaggtctgagggtcaggttgtccatgtgtgggacgaacgtggctctcgggctgctgtggtgccctagtatccggtggaagcaggaaggtttggcaggtcctcagcagggatgcagcctcctgggctgacgcgaggctccttgccagtgcctcgacgcgcaatgcaggtgccacctggtggccatgggaccctggaaaggggctccaggtcccacaagaaaacccagttcatggccctttatggcacccatgggagggggctggatggggctctttccccgtttactgcgcagtgttcaagttgcccagagctccattagcctgccccggtcagccagcgtgggggcagcagagctccatggggaggggggctcctgcatcctgatgaaggcccaggcagaagcaggcccggcagagcctgaggctgagggcagaagggggtctctcctgggcgattctttactatrccctgacaagcgggtcagctcgccggctccccaggggcatggaaggaaggaagcgtcctcggcatccgtgggggagatcacctacgccaagtgggggagggtgaaaggtgaaggggggtccgtggcagccggcgagctgggagaagcacagcacccagaggaacccaggtggcgactcctgctcca

SEQ ID NO: 942865 - DNA, 576 bp, Homo sapiens; identical to SEQ ID NO: 923144

SEQ ID NO: 942866 - DNA, 586 bp, Homo sapiens
ccaaagcaatctacagattcagtgttgttcctatcaaactactgtcatttttcacagaattggaaaaaagctattctaaaattcagatggaactaaaaaagagctcaaatagccaaagtgattaatcctaagcaaaaataacaaaatgagaggcatcacactacccatcttcaaactgttctgcagagctacagtaaccaaaacagcatgctactggtacaaaaacaaacacatagaccartggaggaggttagagagcccagaaataaaactgtacacatacagctatctgatctttgacaaaggcgacaataacaagcaatgggaaaggactccctattcaataaatggtgccgggataactggctagccatatgcagaagaatgaaagtggatccctaccttttaccatatacaaaaattaactcaggatggattaaagacttaaatgtaaaacttcaaaccataaaaattctagaagaaaacctaggaaatagccattctggatgtcggccctggcaaagaattatgaccaagtccccaaaagcagtatacaacaacaaacaaaaattgacaaggtgggacc

SEQ ID NO: 942867 - DNA, 586 bp, Homo sapiens
ccaaagcaatctacagattcagtgttgttcctatcaaactactgtcatttttcacagaattggaaaaaagctattctaaaattcagatggaactaaaaaagagctcaaatagccaaagtgattaatcctaagcaaaaataacaaaatgagaggcatcacactacccatcttcaaactgttctgcagagctacagtaaccaaaacagcatgctactggtacaaaaacaaacacatagaccagtggaggaggttagagagcccagaaataaaactgtacacatacagctatctgatctttgacaaaggcgacaataacaagcaatgggaaaggactccctattcaataaatggtgccgggataactggctagccatatgcagaagaatgaaagtggatccctaccttttaccatatacaaaaattaactcaggatggattaaagayttaaatgtaaaacttcaaaccataaaaattctagaagaaaacctaggaaatagccattctggatgtcggccctggcaaagaattatgaccaagtccccaaaagcagtatacaacaacaaacaaaaattgacaaggtgggacc

SEQ ID NO: 942868 - DNA, 609 bp, Homo sapiens
caattatgcattctggcaccggggaaatgaccacaggatgagtccagggacccactgaacccactgtaagtcagacctgagctaaaactccattaattacttggcctccataagctcctactttaactgggggaccacaatgatgttttgggtcccctggaatcaatgtcagctcagagccagcgtccagtggtcccccaaatgtctggtcatttccctttctgcaatgcacagtcacactggtaaaaggctggaggtctctctggggaaggatgggagaaagatccactgcataaattgytggtaatgtagtggggtcctccctcaaggagacccgacctcccctttattcaagggattctgggtccgtaaactggctcaagtctggaaattgaggggccgtgattctctgtttttataattcaaattagccttttgtctattcgacctagaagttttccacttgtataaattaagtaggaatgcagtaggctccctatcaatttcacttctaggaataccatgattaattagccaatgccagagctctacaccagactattctgattgtgactttgcctctgctgtccattacagtagatattccca

SEQ ID NO: 942869 - DNA, 609 bp, Homo sapiens
caattatgcattctggcaccggggaaatgaccacaggatgagtccagggacccactgaacccactgtaagtcagacctgagctaaaactccattaattacttggcctccataagctcctactttaactgggggaccacaatgatgttttgggtcccctggaatcaatgtcagctcagagccagcgtccagtggtcccccaaatgtctggtcatttccctttctgcaatgcacagtcacactggtaaaaggctggaggtctctctggggaaggatgggagaaagatccactgcataaattgttggtaatgtagtggggtcctccctcaaggagacccgacctcccctttattcaagggattctgggtcygtaaactggctcaagtctggaaattgaggggccgtgattctctgtttttataattcaaattagccttttgtctattcgacctagaagttttccacttgtataaattaagtaggaatgcagtaggctccctatcaatttcacttctaggaataccatgattaattagccaatgccagagctctacaccagactattctgattgtgactttgcctctgctgtccattacagtagatattccca

SEQ ID NO: 942870 - DNA, 642 bp, Homo sapiens
gagccagcgtccagtggtcccccaaatgtctggtcatttccctttctgcaatgcacagtcacactggtaaaaggctggaggtctctctggggaaggatgggagaaagatccactgcataaattgttggtaatgtagtggggtcctccctcaaggagacccgacctcccctttattcaagggattctgggtccgtaaactggctcaagtctggaaattgaggggccgtgattctctgtttttataattcaaattagccttttgtctattcgacctagaagttttccacttgtataaattaagtaggaatgcagtaggctccctatcaatttcacttctaggaataccatgattaattagccaatgccagagctctacaccagactattctgattgtgactttgcctctgctgtccaytacagtagatattcccaccttgcctttgatggttgagtgccactacttggtccctgccacctcaggatccaattattcccattgtatttaaattttgtagttgagtgactgcagttcccaccattagctctgacatacagagaagagcaattatagggctcttcaaagatgcaggtgctgccctcacaaatctatttctaaatgcattggtcaagggtatttggac

SEQ ID NO: 942871 - DNA, 739 bp, Homo sapiens
tgtggggtgttggggtgttgactttttctgcctccaataggagaggtgactagaccactccagaaaaccaccatcccatgaccagaaagctttgcagataaacgccaagactcaggttagggctcacttcacctaggagcctctccctcagccccagaccagatgaggacggactaacctgtgcacgccacggtcatatttctccatatgtttaaatcacgtgtttaagtgcctgtttacccctctcctgccaagtcataatccaggaggtttcaaagaccaattgcaaaccgagcacagtggctgcaatttagtacattctcaacgtgttgagttgaactgaggaattcgtagaaatcaattaccatgttcacgaacgttaagcccgactgtcatctacccgtttggttccccagctttcttccaattaagaaaacraatgatccactgaaaattgaatgaaggtaagatcaataatagtcttgtgaagcaatttatcccttatccatccatatacgcccagacaccatgggcatttcaacatcttaggcccagtttgttaactttacagataaaaagatttctcagctctcaaatcctatttgacttttaaagcccctactaggactcgaagcagagcaaaatacattttctgcttattcctggagcgtgttatgttttgctgttcagccaagagaagtgcttccttgggattgttgatgatctaaggctgacacct

SEQ ID NO: 942872 - DNA, 627 bp, Homo sapiens
gaaccagctggtaaatgttttggtccttggtgcccatatggtctctgtcacaactactcaactctcccgtggtaggacatacgcagccatcacgtagagaacagaaacacaggcgtgtggctttgttacaggacaactgaattcatggctactgaaacctgaatttcagtaactttcatgtcactaaatatttttctttgattatgtgtcaaccatttcaaaacataaagaccccagcctggtcaacatggtgaaactactaaatatacaaaaattagccgggcgtggtggctggtgcctgtaatcccagctacttgggaggatgaggcaggagaatcgcttgaacccaggaggtggagattgcagtgagccaagatcatgccactgcactccagcctgggcgacacagtgagactctgtcataaaataaaataaaataaaataaaacgaaaaataaaaamataaagaccattcttagctcataggctatagaaacccaatgagctgggttcagctatagtttgctgaccccagtctaaatcatctcccagaggtcccagtgagctggagccctgcttgcccgcagcggtaatctggagtgattggctccttcccttccctggttta

SEQ ID NO: 942873 - DNA, 596 bp, Homo sapiens
ctaacaagagagtcagcctgtcccttgaaggcaagcagtgacttctctctagctatgaaagtcctaaacagcatcttccaatatcagaatgtttcatctgcattgaaaaatctgttgagtgtagccaccttcatcaatattcttagctagatcttctgataacttactgcaacttctccattggtagttgctgcttcaccttgcactattatgttacggagagggcttttttctttaaacctcgtaaaycaacttctgctagcttcgtacttgtcttctgtggtgtcctcacctgtctcagccttcacagaattaataagagagttaaagcctttctctggctggtttgcttgtctatccagaccactcagactttctctgtatcagcagtaaggctgttttgctttcttatcattcatgtattcactggagtggcacttttaacttccctcaagaactttatctttgcattcacaacttggctaactgttaagcgcaagagaactttcagcctgtcgtggcttttgacatgccttaattactaagcttaatcatgtataggtttttatttaaagtgagaaatgtgagactcatcc

SEQ ID NO: 942874 - DNA, 553 bp, Homo sapiens
ttggttatacttctctctgctgcttttgacctgtacattactactcctgccgctccaagcttgaatgttttctatggcactgctggggcaatctgtcttttaccaaagttagattatttggaatctcctttggtccacattgaatttttcatkgtttgacattgatcagcttttgcattatcagtatgagactttatattccacatcttctagaaatttctcactttttgctttttttttttttttcccccgaaacagagtcttactctgtcacccaggctggagtacagtggtgcgatagctcaatgcagtgcaacctccgcctcccgggttcaagcagttctccgcctcaacctcctgagtagctgggattacaggcccttgccaccatgcccggctaatttttgtatttttagtagagacagagtgtcaccatgttggccaggctggttttgaactcttgaccttgtgatccacctgcctcagcctcccaaagtgccgagattacaggcgtgagccaccgtgcctggcccactttttgcttttttgatgg

SEQ ID NO: 942875 - DNA, 586 bp, Homo sapiens
gcctggctaatttttggtatttttagtagagatggggtttcaccatgttggccaggctggtctcaaactccagatctcaggtgatccacccgcctcggcctcccaaaatgctgggattacaggcgtgagctactgtgcctggtctttttaacattaatttttttttctttcttttttttttgagacagagtcttgctctgttgcccaggctggagtccaatggtgcaatcttggcttactgcaacctctgcttcctgggttcaagcaattctcctcccagtagctcagcctcccaagtagctgaaactacaggcacatgccaccacgccrggctaattttttgtattttagtagagacgaggtttcattgtgttgcccaggctggtcgtgaactcctgagctcaggcaatccacccgcctcagcctcccaaagtgctgagataacaggtgtgagccactgtgcccagcctctatatctatatttcaagacaaggtctcatatctgttgaccaggctggagtgttggtggcacaatcacagctcactgcagccttgacctccctgggatcaggtgatcctcccacct

SEQ ID NO: 942876 - DNA, 616 bp, Homo sapiens
cccaggctggagtgcaataggtgcaatctcggctcactgcaacctccgcctcccaggctcaagcaattctcctgcctcagcctcctgagtagctgggattacaagcatgcaccaacacacccagctaattttgtatttttagaagatatggggtttctccatgttggtctgactggtctcgaattcctgaccccatgtgatctgcccaccttggcctcccaaagtgctgggattacaggcatgagccactgcgcccggctgcttcagttttctacatttatcactatcactttacttcaggccacatcttctcaggataatgaagttagaatgagttataataacctcacaactacccctgataccaagccctttccatctccgatasgtccttcactttgcccatatagcaagtttataaaacacaaaagcctcttcctcagatcctttgataaatttcgtattgcctatagaatgaaattcaaaatctatgctaatgacctagtcccaccttaccttttcagcttcatccccacattttcccttcagaaccttgctccagggacacatacgtaatgcccctgaatctctccccacttgcttgtgtctgtggttt

SEQ ID NO: 942877 - DNA, 698 bp, Homo sapiens
cacatagaccaatggaacagagtagagaactcagaagtaagaccgcacatctacaaccatctaatctttgacaaacctgacaaaaacaagcaacggggaaataattccttatttaataaatggtgctgggagaactggctagccatgtgcagaaaattggaactggaccccttctttacaccatttacaaaaattaaattaaaatggattaaagtcttaaatttacaacccaaaactataaaagtcctagaacaaaatctagtaatactattctggaaataggcacaggaaaggatttcacggcaaatacataaaaagcaattgcaacaaaagcaaaaattaacaaatrggatctaattaaagagtttctgcacagcagaagaaactatctcagaatgggagaaaacttttgcagtctatccatctgacaaaggtctaatatcctgaatctacaaggaaattaaacatgtttatgagaaaaaaaaccattaaaaagtgggcaaaggatgtgaacagacacttctcaatagaagacatttaagcagtcaacaaacatatgcaaaaaacctcaacatcactgatcattagagaaatgcaaatcaaaaccaaagtaagatgccatctcatgccagtcagaatggcaattattaaagagtcacgacttttttttacaagccaagacatcacttgtcattggt

SEQ ID NO: 942878 - DNA, 592 bp, Homo sapiens
tctccagtgtgacccaggaaagccaaaagattgtacacccctggcttacaccaatgtccaaagtattttttcctaggttttcttttagtattattgtagtttcagttcttacatttaagtcttttatccatcttgagttgattattgtatatagtgagagataggggtccagtttcgttctyctgtatatggatatccaattttccaattttcccagaattatttattgagaagggtatcctctccctactgtatgttcttgtcaactttgtcaaagatcagttggctatagagatatggcttaatttctggtttctctgtttggtttcattgatttatgtgtccaattttacaccagtgccatacatcgccctgtattataatttgaagtcaggtaatgtgataccttcagctttgttcttttgcttaggatttcattgggtatttgggctcttttttggtttcatgtgaattttaggattgttttttctaattctgtaaaaaaataacgttggtattttgataaggattgcattgaatctatagattgctttgagcagtctggtcatttgaataatttatgaacatggag

SEQ ID NO: 942879 - DNA, 681 bp, Homo sapiens
ttactttcccctctgcttttctcaaccagatgaagtcgctcactgtagcctccacaactgagattgctgagtctcacttgaagccagtgcatcttagagtcttgcttaaggcccacagaatagtagctgggtatcgctggtggttattcagggcccaagggctctttaggtgatgggtccagctaggactggatccttcccttcaatacagtaggttccccttgtggcccatggtgtgtctagaaatgtctgggaactagtgcctgaaatgggggcctcatgactctgactggtgccctatcctactgtggctgagctggtatccaagatgcaagacaaagtcctctttacttttccctctcttctccttaagcgaaaggaagaagtctcttttggagatgwaagttgcactgcctggggttgagggaggggtgctgcaagcattcccttagctgcccaagttggtatctcagtaagttgtgtctcccacaagtccactggctccaggcccagctcagcactaaaacttgcagtacttgtggcctggactgactttcaagtttatttaagactccagagcactttagtccatggtggcaaggtttggcagaactcaagttctgaacactggcatgggtgattcccctctgcctagggctggtctaaatgctccctctgtgt

SEQ ID NO: 942880 - DNA, 709 bp, Homo sapiens
acagacagagtgagacactgtcctctcccgtccccccctcaaaaaatacatgaaacaaaaactgaaaggagaaatagataaatctagttacaattggaggctttaatatttcttctttgcagtaatcagtagaagtagygtacagaacatcaataagaatatagaaaacctgggccgggtgtggtggcttatgactataatcccagcactttgggaggccaaggcgggcagattacttgaggtcaggaggacagtgggtgtagcccacggagggtgaaccaaagcagggcagggcgtcgcctcacccaggaagcgcaaggcgttgggagatttccctttcctagacaaaggaagccctgacagactgtacctggaaaaaacggaacactcctcccccaaatactgcgcgttttcaacagtcttagcaaatgcagaccaggagctactatccagtgcctggctcggtggttcccacacccacagagccttgctcacagctagtgcagcagtcagagattgaactgcgaggcaacagcctggcagggggaggggcacctgccattgctgaggcttgagtaggtaaacaaagctgcctggaagctcaaactgggcggagcccaccacagctcagctaggcctgctgattctgtagcccccacctctgggagcagggcatagctgaacaaaaggcagcagaaacttctgcata

SEQ ID NO: 942881 - DNA, 709 bp, Homo sapiens
acagacagagtgagacactgtcctctcccgtccccccctcaaaaaatacatgaaacaaaaactgaaaggagaaatagataaatctagttacaattggaggctttaatatttcttctttgcagtaatcagtagaagtagtgtacagaacatcaataagaatatagaaaacctgggccgggtgtggtggcttatgactataatcccagcactttgggaggccaaggcrggcagattacttgaggtcaggaggacagtgggtgtagcccacggagggtgaaccaaagcagggcagggcgtcgcctcacccaggaagcgcaaggcgttgggagatttccctttcctagacaaaggaagccctgacagactgtacctggaaaaaacggaacactcctcccccaaatactgcgcgttttcaacagtcttagcaaatgcagaccaggagctactatccagtgcctggctcggtggttcccacacccacagagccttgctcacagctagtgcagcagtcagagattgaactgcgaggcaacagcctggcagggggaggggcacctgccattgctgaggcttgagtaggtaaacaaagctgcctggaagctcaaactgggcggagcccaccacagctcagctaggcctgctgattctgtagcccccacctctgggagcagggcatagctgaacaaaaggcagcagaaacttctgcata

SEQ ID NO: 942882 - DNA, 648 bp, Homo sapiens
agacagagtgagacactgtcctctcccgtccccccctcaaaaaatacatgaaacaaaaactgaaaggagaaatagataaatctagttacaattggaggctttaatatttcttctttgcagtaatcagtagaagtagtgtacagaacatcaataagaatatagaaaacctgggccgggtgtggtggcttatgactataatcccagcactttgggaggccaaggcgggcagattacttgaggtcaggaggacagtgggtgtagcccacggagggtgaaccaaagcagggcagggcgtcgcctcacccaggaagcgcaaggcgttgggagatttccctttcctagacaaaggaagccctgacagactgtacctggaaaaaacggaacactcctcccccaaatactgcgygttttcaacagtcttagcaaatgcagaccaggagctactatccagtgcctggctcggtggttcccacacccacagagccttgctcacagctagtgcagcagtcagagattgaactgcgaggcaacagcctggcagggggaggggcacctgccattgctgaggcttgagtaggtaaacaaagctgcctggaagctcaaactgggcggagcccaccacagctcagctaggcctgctgattctgt

SEQ ID NO: 942883 - DNA, 523 bp, Homo sapiens
tgcaacctccgcctcccaggttcaagctgttctcatgcctcagtttcctgggtagctgggattacaggcactcaccaccacactcagctaattttgtatttttagtagagatggggtttcaccatgttgggcgggctggtctcgaactcctgacctcaagtgatcctcccgccttggcctcccaaagtgctgggattacaggtgtgagccaccatgcccagccaataataattattaattaattattattattattgctctcattcattcaggacatctaagtgcyaggcactgttcacatatttcttcatttaatcatctcaataaataataaacagactgggtacagttattatctccattttatagatgggaaaactgaaacacttaggggctgagtaacttggccttggccacacagtgggaggtgagtgagcaagatgtgaacctggctggtttggctgcagggtgtgcgcccctaacctctcctctctgttgcagctcagcgcccccctgcctgcta

SEQ ID NO: 942884 - DNA, 556 bp, Homo sapiens
ggctgaaaggggcacatgtacagcgcaggctgtggcttcagagggtggaaatcccaaggcttggcagcttccatgtgatgttgagcctgcaggtgcacagaagtcaagaattaaggtttgaggactttcacctagatttcagaagatgtatggaaaygcttggatgcccaggcaaaagtttgctgcaggggtggggccctcatggagaacctctgctagggcagtgcagaagggatatgtggggtgggagctcccacctagagtccctactggggcactgcctagttgagctgtgagaagagggctactgtccttcagactgcagaatggtagatctaccaacagcttgcactgtgtgcatggaaaaaccacagatactcaatgcctgctcgtgaaagcagttgggagggaagctgtaccctgtaaacccacagaggcagagctgcccaagaccatgggaacccacctcttgcatcagcatgacctggaaatgagacctggagtcaaaggagatcattttggagctttaaaatttgaccacaatgttggattttgg

SEQ ID NO: 942885 - DNA, 556 bp, Homo sapiens
ggctgaaaggggcacatgtacagcgcaggctgtggcttcagagggtggaaatcccaaggcttggcagcttccatgtgatgttgagcctgcaggtgcacagaagtcaagaattaaggtttgaggactttcacctagatttcagaagatgtatggaaatgcttggatgcccaggcaaaagtttgctgcaggggtggggccctcatggagaacctctgctagggcagtgcagaagggatatgtggggtgrgagctcccacctagagtccctactggggcactgcctagttgagctgtgagaagagggctactgtccttcagactgcagaatggtagatctaccaacagcttgcactgtgtgcatggaaaaaccacagatactcaatgcctgctcgtgaaagcagttgggagggaagctgtaccctgtaaacccacagaggcagagctgcccaagaccatgggaacccacctcttgcatcagcatgacctggaaatgagacctggagtcaaaggagatcattttggagctttaaaatttgaccacaatgttggattttgg

SEQ ID NO: 942886 - DNA, 556 bp, Homo sapiens
ggctgaaaggggcacatgtacagcgcaggctgtggcttcagagggtggaaatcccaaggcttggcagcttccatgtgatgttgagcctgcaggtgcacagaagtcaagaattaaggtttgaggactttcacctagatttcagaagatgtatggaaatgcttggatgcccaggcaaaagtttgctgcaggggtggggccctcatggagaacctctgctagggcagtgcagaagggatatgtggggtgggagctcccacctagagtccctactggggcactgcctagttgagctgtgagaagagggctactgtccttcagactgcagaatggtagatctaccaacagcttgcactgtgtgcatggaaaaaccacagatactcaatgccwgctcgtgaaagcagttgggagggaagctgtaccctgtaaacccacagaggcagagctgcccaagaccatgggaacccacctcttgcatcagcatgacctggaaatgagacctggagtcaaaggagatcattttggagctttaaaatttgaccacaatgttggattttgg

SEQ ID NO: 942887 - DNA, 556 bp, Homo sapiens
ggctgaaaggggcacatgtacagcgcaggctgtggcttcagagggtggaaatcccaaggcttggcagcttccatgtgatgttgagcctgcaggtgcacagaagtcaagaattaaggtttgaggactttcacctagatttcagaagatgtatggaaatgcttggatgcccaggcaaaagtttgctgcaggggtggggccctcatggagaacctctgctagggcagtgcagaagggatatgtggggtgggagctcccacctagagtccctactggggcactgcctagttgagctgtgagaagagggctactgtccttcagactgcagaatggtagatctaccaacagcttgcactgtgtgcatggaaaaaccacagatactcaatgcctgcycgtgaaagcagttgggagggaagctgtaccctgtaaacccacagaggcagagctgcccaagaccatgggaacccacctcttgcatcagcatgacctggaaatgagacctggagtcaaaggagatcattttggagctttaaaatttgaccacaatgttggattttgg

SEQ ID NO: 942888 - DNA, 754 bp, Homo sapiens
gctgcattatgtctttgctctccaactcaggttttttaagatttatgaagagccataaagaatttgattagcattaaaaattcatgatgtatagggatgaactgaacactgaaatacatctacattttcaggctgaaggtataaaattgacctaaagtattttgaggttaaaaaaatgtaaggtcctaatctttgacatcattaaaactgctttttttccccctttttaattttcattccaagatgaaatacaggttcagattccatataaatttgggacaggtagcttggggattaaggagcagatagaaaacttgaagttcaaaattggatccttattcaacctctgctttactgtatgatacttaaaatattgctctttcattgctaaaatgggttgatttggcaaaacatttccgtcagcagtgtcaaagctmtttgagagacaacctattcagggtgtctttatttttttttaattttaagttcaggggtacatgtgcaggtttgttgtgtagataaacacatgtcatgggagtttggccacccgggtattaagccaagtactcattagttatttttcctgatcctctccctcctcccacccttccccctctgaaaggttgcagtgtctgttgttcccctctatgtgtctttagatatctcagaggtaactgaggttaaaaattctcaaaatattgaaaaaagctatctttagttctatttaatttttatgattcatgcataaaaacag

SEQ ID NO: 942889 - DNA, 570 bp, Homo sapiens
catctagcattaggtatatctcccaatgctatgtgccctcttactagtgatattttacacattaaatgttttgaattcaaaatttccatggaaacaaggtaaatttcaaatttacaatctctgtggcgtgattataattttaggttcctagtgaaactgagaatgtttaaggttcaattcccacatgtctgttaatttcaccccacggatacaggctgacttaactctgaccaaccaccctgaacgtgcacttccttctcacgtggaaatgaggtggcatagcaaagtcaagatgtggagccctggtgaatcagcctaggacaggcagctatggaggacacatttggattcagatggaggaatcaccaccgaggaaaggattatgaagagcaaccccsatctggaagatattctgtttacctctcaaaatcatgcagggattaaaacccgacctacaaggcagaaaaaaatacaagagttcagaggaaagcaacacttcattacattcatgagatgcataaatgactgtaaaagcagcagactcagaaatcaaaataggaaaaaatcaga

SEQ ID NO: 942890 - DNA, 638 bp, Homo sapiens
cagcgtccagtggtcccccaaatgtctggtcatttccctttctgcaatgcacagtcacactggtaaaaggctggaggtctctctggggaaggatgggagaaagatccactgcataaattgttggtaatgtagtggggtcctccctcaaggagacccgacctcccctttattcaagggattctgggtccgtaaactggctcaagtctggaaattgaggggccgtgattctctgtttttataattcaaattagccttttgtctattcgacctagaagttttccacttgtataaattaagtaggaatgcagtaggctccctatcaatttcacttctaggaataccatgattaattagccaatgccagagctctacaccagactattctgattgtgactttgcctctgctgtccaytacagtagatattcccaccttgcctttgatggttgagtgccactacttggtccctgccacctcaggatccaattattcccattgtatttaaattttgtagttgagtgactgcagttcccaccattagctctgacatacagagaagagcaattatagggctcttcaaagatgcaggtgctgccctcacaaatctatttctaaatgcattggtcaagggtatttggac

SEQ ID NO: 942891 - DNA, 606 bp, Homo sapiens
gtcaaggcactctgatttttggtcaggacacagaaaaaaaaagtgaggggaactggggaaccctgcaggagttttattcagaatatataagaaatctaacatattaataataaagtgacacatgcaattaaaaatgcatgggagttttaatcagactcttcacaaagacatatatatggccaataaacacatttaaaaagtacttaacattattagttatcragaaaataaaattcttataaggcaccactaaaaaaaatccactaaaatcattaatgttaataagactgacaacaccaaacattgatgaggagctagaacatctggaaggctcatacaatatcaaattgctcacagttcaatatttattcaccctatgacttctacatatttgcccaagataaatgaaaacataaataccccaaaaaagcttgctcaagaattcataacagctttattcttgatagtccaaatctgaaaatagtggcatattcatacaatagaatattaccactagtactatatacaacaacatggattaaactgaaaaccattaaaatgtctctcttatcctaagagacatcattctaggcaaaagaagccagg

SEQ ID NO: 942892 - DNA, 656 bp, Homo sapiens
cttgttatttggaatttgttttcccataaaaaataatgttggctaaatttttgagccaacacacagaacctatttcttcacaactgacttaatcaccatttatagcttgttttttgggataaaatgcattgcaccttctaactcttgtaattgtagctgctgctgcttttcttctacttttttaaagagacagggtctcatgccagtcagaatggtgattattaaaaagtcaagaaacaacagatgtggtgaggttacagagaaatatgaacacttttacactgttggtgggaatgaaaattagttcaaccattgtggaagacagtgtggtgattcctccaagatttagaactggaaatacaatttgacccagcaatctcattactgggtatatacccaaaggaatataaatcattctgttataaaaatacgtgcaygtatatgttcattgtagcactattcacaatagcaaagacatagaatcaacccaaatgccaatcaatgataggctggataaagaaaatgtacatatacaccatggaatactgtgcagccgtagaaggaacaagatcatgtcctttgcagggacatggatggagctggaagccattatcctcagcaaactaatgcaggaacagaaaaccaaataccacatg

SEQ ID NO: 942893 - DNA, 602 bp, Homo sapiens
acagagcaccaagtccctaggctgtacacagcaagggggccctgggcccagcccacaaaaccactttttcctcctaggcttccaggcctgtgatgggaggggctgccatgaagatctctgacatgccctggagacattttccccagtatctcagggattaactttcagctcctcattccttacccaaatttctgcagccagcttgaatttttccccagaaaatggggtttycttttctatcacattgtcaggctgcaaattttccaaacttttttatgctgtttccttttaaaactgaatgcctttaacagcacccaagtcacctcttgaatgatttgctgcttagaaatttcttctgccagataccctaagtatcatctcttaagttcaaagttccacaaatctctagggcaggggcaaaatgcgctagtctctttgctaaaacatagcaagagtcacctttactccaattcccaacaagttcctcgtctccatctgagaccacctcagcctgaatttcattgtccatatcgttatcagcattttggccaaagccattccacaagtctctagggagttccaaactttcccatattttccta

SEQ ID NO: 942894 - DNA, 602 bp, Homo sapiens
acagagcaccaagtccctaggctgtacacagcaagggggccctgggcccagcccacaaaaccactttttcctcctaggcttccaggcctgtgatgggaggggctgccatgaagatctctgacatgccctggagacattttccccagtatctcagggattaactttcagctcctcattccttacccaaatttctgcagccagcttgaatttttccccagaaaatggggttttcttttctatcacrttgtcaggctgcaaattttccaaacttttttatgctgtttccttttaaaactgaatgcctttaacagcacccaagtcacctcttgaatgatttgctgcttagaaatttcttctgccagataccctaagtatcatctcttaagttcaaagttccacaaatctctagggcaggggcaaaatgcgctagtctctttgctaaaacatagcaagagtcacctttactccaattcccaacaagttcctcgtctccatctgagaccacctcagcctgaatttcattgtccatatcgttatcagcattttggccaaagccattccacaagtctctagggagttccaaactttcccatattttccta

SEQ ID NO: 942895 - DNA, 602 bp, Homo sapiens
accacacctggctcattttttttattttttgtagagacgaagtcttgctatcttgcccagcctggtctcaaactcctgacctcaatccattttcctgtcttggcctcccaaggtgctgggattacaggtgggagacactatgtcccgcatattagtctgttcttgcactgctatgaagaaatacttgagactgggcaaattataaagaggtttaattggttcatgattctgtaggctgtacaggaagcataacggaagtttccaatcatggcagaaggcaaagggggagtgaggcagtttacatggccagagcaacaaggaaaagagaacgagagtgggaggtgccacacacrtttaaacaaccggatctcatgatcactcactcactatcatgaggacagcaccaacgggatggtgctaaactctttatgaagggtcaccccaatgatacaatcacctcctaccaggccccgcctccaatacggggattacgattcgacatgagattctgtggggacacagatccaaaccataacacccagctttgactttctatttctgtattgcgggcacttggtaaatatttgctggctggatgcagt

SEQ ID NO: 942896 - DNA, 663 bp, Homo sapiens
ggtttgatcttctatccagaccactacaattttctccatatcagcaataaggctggttcactttcttatcattcatgtgctcactcactggagtatcacttttaatttctttcaggaatttttcctggccaggaacagtggctcatgcctgtaattccagcactttgggaggccaaggtgggtggatcacttgggcccagaagttcaagaccagcctgggtaacatagtgaaaccccatctctagaaaaaaatgtttaaaaaattagccaggaatggtgatgcacactagtagtctgagctacttagggggctgaggtgggaggatcccttgagcccaggaatcaaggctgcagtgaaccatgatcacaccrctgcactcctgcgtgggtgacacagagagatcctgtctcaaaaaaaataaaacacaaaatttcctttgcactcacaactttgctaactgtttggcagaagagacttagctgttggcctgtttcagagttcaaaatgccttcctcaccaatcttaattatttctagatttacatttaaaatgagagacatgcaactgactcttcctttcacttgaacactgagaagccactgcagggttattaattggccaaatttcaataccattgtgcctcagggatctgggatgcctga

SEQ ID NO: 942897 - DNA, 607 bp, Homo sapiens
aacagtcagaacacacggcatttattgattaggttcaccatcttcaaagggcatggttggtggcaccccaaaacaatgacaatcatgacatcaaagatcactgaccacagatctccttaacagatataatcaaaaatgaaaaaggttgaaactattgtgaaaattaccaaaatgtggcagagacacagagtggagcacacgacgttggaaaaatggcaccaatagacttgttcaatgcgggattgccatacaccttaaatttgtttaaaaaaaaaaaactcaacatcttcaaagcacaataaagcaaagcacaataaagtgagatacaacttatatagaatgacaccaggaataagaggggatagkggaagagggaaaggaaatggagatgctaagttcactgactgccttatatgtaatagctgagtgccaagagttatcatttaaagctggcaaatcatataagagaaacataagcaaatttaatcatttaaaagatgatgtccaccaaaacttgtgttggaaaaagagagaaaagagatatcatcacccgttatagggatcgaatacatgctggttaacgaatagaacactaaaattattatat

SEQ ID NO: 942898 - DNA, 607 bp, Homo sapiens
aacagtcagaacacacggcatttattgattaggttcaccatcttcaaagggcatggttggtggcaccccaaaacaatgacaatcatgacatcaaagatcactgaccacagatctccttaacagatataatcaaaaatgaaaaaggttgaaactattgtgaaaattaccaaaatgtggcagagacacagagtggagcacacgacgttggaaaaatggcaccaatagacttgttcaatgcgggattgccatacaccttaaatttgtttaaaaaaaaaaaactcaacatcttcaaagcacaataaagcaaagcacaataaagtgagatacaacttatatagaatgacaccaggaataagaggggataggggaagagggaaaggaaatkgagatgctaagttcactgactgccttatatgtaatagctgagtgccaagagttatcatttaaagctggcaaatcatataagagaaacataagcaaatttaatcatttaaaagatgatgtccaccaaaacttgtgttggaaaaagagagaaaagagatatcatcacccgttatagggatcgaatacatgctggttaacgaatagaacactaaaattattatat

SEQ ID NO: 942899 - DNA, 620 bp, Homo sapiens
cacctttgtggctgagccaaacacttattttacttagtaacattgctgcagcctgtagcaaaactcttaacattgtaaagaaagagataagagccatttcaaattgtgtgtgagagaggaaagagacgaaagaaaaacagagcctcttacctgcaggaaagagagagaggtggcagggttttgaaagaaaggcagacctgacagtttcatgtttgctcacacttaccttctgcgatcccagacgatccccagttgtaatgggaagtttccttgtcctcctcgcagggcatrtgatgggatatgactcgcttcttcagtgccttgctgctccagcctctaggggagcatacagacgggcaggctgtggggctctgactccacgacaacgtctagggcttgagtgttcacaactgaaaccccagtgggcatgtgttacagtagactctgttagggtccataggtggctgtgttagtcagctcagttagacccctgccttatcacatggacagagggctttctgtatcctggggttcttgcctttgtgtaccggaagaattggatcacacatgggcttggagaatcacttgggtttcactgagaagtgtcactggaggaagag

SEQ ID NO: 942900 - DNA, 730 bp, Homo sapiens
gagtgccccagcaaacttctgtttggcttcttgacgcttccatccctgcataaacaatccctttattatattactttgattaaaataactagataggttttcactttcctgactaagttttgagtgatgcaaagccccaacacacttaatttacttgagattattgtctcagaatacttgttttcattggtcagtataattctgagatcattcttttcttttcattcataaaaggagaattgaaacattagtcctggtctgataaaatgctttgggacttgacttccattgcttggttgactgaggtggccttttccctcccttttcatcaacattcgttttctttttttttttttttttatattagcaaaacccttttatttattaaccmaagggatgatcctaattaatccaacacactttgaaatagctgcatgtaaaatgtttatgataaagataattgaacacagtaatgaaaaaaaaaagaaagaaacagtatggagatttgctcattgaactgagcttggtcattctcttaattaactcctgtccaaagtgatgatggaatttttattctactttttcatagatccgagtacaggtgacattgttcatgacacactccaccactaatttcccatctttcaattttcttgttattgtgctttccttcccatcccactcctgatgctgaaccaatgcaccatctgtaaagttgcagacagtctga

SEQ ID NO: 942901 - DNA, 593 bp, Homo sapiens
acaagtaaatgtccatgttatgaggctcccttggcaaggagcttagcacagcctctaggggctgagggtaatgacagtcagaaagaagctatggccctcagtcccagagtttcaagaaaatgaattctgccatcaacctgagtgagcttggaagtggattcttcaccagttgagtctccagataagagtgcagcccagccgccatcttgagtgcagctttgtgaagccctaaccaggggacccaaccaagatgcacctgtatctgaccacagaaatcgtgaggtaatatatatgtgtktggctttaagccattaagtgtgtggtcatttattgtgcagaaatagatagctaatatagtaactttttaatttatttttttcccacttaaaaaaatggaggcaacaacatacagtaaagtgcacaggtgtgtccaatttggttaatttttatctatgtatacactcatgcagccataactcagatcaagatatgaagatctgcactgccccaggaggctacctcacactcccctcccctgctgctcccaagggccaacaactgtgctgacttctactaccattagtttatctaaa

SEQ ID NO: 942902 - DNA, 614 bp, Homo sapiens
gaggggcatgacctctgcagaagaggaaacgaccatccacttgccctgcacccacagaagccatggcagtggggtcatctcctttttcaaagggggtgatcatgctgttggagcccagtgggtggcctgggccttggctttggctctgggcagygcccggtggcatgggcgctgccatgcgggtgtctccccttggccttggctctgggaggtgtcccccacagtgctgtgaccactgacacaccagcacttcccacattctcaggcacgcagtgtcctacagctaaaatccctgttttgttttggaaggacactgagaaagttaattctaagtatgagacagcagtttggggagactgggagggatgacactgcccaggctctgagaggagcccatcctgccagccgacctcacttcccccacgacctactttccctggcatcatcgctggagctcagcaggactcatgttcttccgtggggctgccgctgctttaaatctttccaaatgctggtgttctctatctcgctgagcctgtagatatgtgcctgactctactggctaatcgtccactggggaccatgtttccagcctgagtcttattctttaacag

SEQ ID NO: 942903 - DNA, 614 bp, Homo sapiens
gaggggcatgacctctgcagaagaggaaacgaccatccacttgccctgcacccacagaagccatggcagtggggtcatctcctttttcaaagggggtgatcatgctgttggagcccagtgggtggcctgggccttggctttggctctgggcagcgcccggtggcatgggcgctgccatgygggtgtctccccttggccttggctctgggaggtgtcccccacagtgctgtgaccactgacacaccagcacttcccacattctcaggcacgcagtgtcctacagctaaaatccctgttttgttttggaaggacactgagaaagttaattctaagtatgagacagcagtttggggagactgggagggatgacactgcccaggctctgagaggagcccatcctgccagccgacctcacttcccccacgacctactttccctggcatcatcgctggagctcagcaggactcatgttcttccgtggggctgccgctgctttaaatctttccaaatgctggtgttctctatctcgctgagcctgtagatatgtgcctgactctactggctaatcgtccactggggaccatgtttccagcctgagtcttattctttaacag

SEQ ID NO: 942904 - DNA, 614 bp, Homo sapiens
gaggggcatgacctctgcagaagaggaaacgaccatccacttgccctgcacccacagaagccatggcagtggggtcatctcctttttcaaagggggtgatcatgctgttggagcccagtgggtggcctgggccttggctttggctctgggcagcgcccggtggcatgggcgctgccatgcgggtgtctccccttggccttggctctgggaggtgtcccccacagtgctgtgaccactgacacaccagcacttcccacattctcaggcacgcagtgtcctacagctaaaatccctgttttgttttggaaggacactgagaaagttaattctaagtatgagacagcagtytggggagactgggagggatgacactgcccaggctctgagaggagcccatcctgccagccgacctcacttcccccacgacctactttccctggcatcatcgctggagctcagcaggactcatgttcttccgtggggctgccgctgctttaaatctttccaaatgctggtgttctctatctcgctgagcctgtagatatgtgcctgactctactggctaatcgtccactggggaccatgtttccagcctgagtcttattctttaacag

SEQ ID NO: 942905 - DNA, 555 bp, Homo sapiens
tatcaaactactgtcatttttcacagaattggaaaaaagctattctaaaattcagatggaactaaaaaagagctcaaatagccaaagtgattaatcctaagcaaaaataacaaaatgagaggcatcacactacccatcttcaaactgttctgcagagctacagtaaccaaaacagcatgctactggtacaaaaacaaacacatagaccartggaggaggttagagagcccagaaataaaactgtacacatacagctatctgatctttgacaaaggcgacaataacaagcaatgggaaaggactccctattcaataaatggtgccgggataactggctagccatatgcagaagaatgaaagtggatccctaccttttaccatatacaaaaattaactcaggatggattaaagacttaaatgtaaaacttcaaaccataaaaattctagaagaaaacctaggaaatagccattctggatgtcggccctggcaaagaatttatgaccaagtccccaaaagcagttacaacacaaacaaaaattgacaagtgggaccta

SEQ ID NO: 942906 - DNA, 555 bp, Homo sapiens
tatcaaactactgtcatttttcacagaattggaaaaaagctattctaaaattcagatggaactaaaaaagagctcaaatagccaaagtgattaatcctaagcaaaaataacaaaatgagaggcatcacactacccatcttcaaactgttctgcagagctacagtaaccaaaacagcatgctactggtacaaaaacaaacacatagaccagtggaggaggttagagagcccagaaataaaactgtacacatacagctatctgatctttgacaaaggcgacaataacaagcaatgggaaaggactccctattcaataaatggtgccgggataactggctagccatatgcagaagaatgaaagtggatccctaccttttaccatatacaaaaattaactcaggatggattaaagayttaaatgtaaaacttcaaaccataaaaattctagaagaaaacctaggaaatagccattctggatgtcggccctggcaaagaatttatgaccaagtccccaaaagcagttacaacacaaacaaaaattgacaagtgggaccta

SEQ ID NO: 942907 - DNA, 645 bp, Homo sapiens
gtccaaatacccttgaccaatgcatttagaaatagatttgtgagggcagcacctgcatctttgaagagccctataattgctcttctctgtatgtcagagctaatggtgggaactgcagtcactcaactacaaaatttaaatacaatgggaataattggatcctgaggtggcagggaccaagtagtggcactcaaccatcaaaggcaaggtgggaatatctactgtartggacagcagaggcaaagtcacaatcagaatagtctggtgtagagctctggcattggctaattaatcatggtattcctagaagtgaaattgatagggagcctactgcattcctacttaatttatacaagtggaaaacttctaggtcgaatagacaaaaggctaatttgaattataaaaacagagaatcacggcccctcaatttccagacttgagccagtttacggacccagaatcccttgaataaaggggaggtcgggtctccttgagggaggaccccactacattaccaacaatttatgcagtggatctttctcccatccttccccagagagacctccagccttttaccagtgtgactgtgcattgcagaaagggaaatgaccagacatttgggggaccactggacgctggctctga

SEQ ID NO: 942908 - DNA, 561 bp, Homo sapiens
tggtgcctgcatatcaaacaaagccatctgaaacccggacccaagtttacacttcctcagtcaactgatcatagagaatgccacatgaggccacgggtgcaggctgggagagaaaaggcaatgtagcacgagtaggagccatgggcatttgggccacttcttcatgtaatttacttgtgccttcagatcctgctcaagcctgatctcatgtatcccactttcatttgatgttggatggaatgccgctgtacatgcccagccttatggctttgagggccagacaacacccagttcgtaacagacagtggcccatggttaaacttttagtytctactaagcctagtaacacgccaagtgctgtttctcaaaaggagagtagtcctacgcagagagtggcagggctttgctacaaaaagggcttgtggtgtgattcacctacaggggcctgccagaggctccaaatcgcacctccatctgccactgatacctcaagcaccactggatctgctggatcgtgatgcaagtggcagagcagcttgcacagcagcctggacctaccag

SEQ ID NO: 942909 - DNA, 546 bp, Homo sapiens
taagtgtgtctattgttcgttgaagttttgattgtttttttatttatgatatctatttcactgaagatttctcccctcatttcttgtatcattcttttgatttctttaaattgggcttcacctttttcttgtgcctcctttattaatttagtaactgaccttctgaattctttttcaggtagatcagggatttcttcttggtttggatccattgctggtgggctagggtgattttttttttttgcagggtgttaaagaatcttgttttgtcatattaccagagttggttttctgattccttctcatttgggtaggttctgtcagaggaaaggtctagggctcaaggctgttgttcagattcttttgtcccacagtgtgttcccctgttgtagtactctcctccttttsctatgaatgcagcttcctgtgagctgaactgcagtgattgttatctctcctctggatctagcaaaccagcaggtctaccaggctctgggctggtgctgggggttgtctgcacagagtcctgtgttgtgaactgaatgt

SEQ ID NO: 942910 - DNA, 769 bp, Homo sapiens
tcgggaggcggaggcacaagaatcacttgaacccaggaggcggaggttgagatcgtaccactgcactccagccttggtgacagagcgagactctgtctcaaaaaaaaaaaaacaatacctgatactgaaatttaggtctcacaattctggaggctgggaaatccaaaatcaaggtacaggcatctggggagggccttcttgttgcatcctcacatggtggaagagcagaagatggcaaacccactcccacaagctctttttattttatgttttgagatggagtctcactctgtcaccaggctggaatgcagtggcactatctcagctcactgcagcttccgcctcccaagttccgcctcccaaattcttctgcctcagccttccaagtagccgggactacaggcgtgcaccaccatgcccagctattttggtattttaagcagagacggggtttcaccatgtgggccaggatggtctcaatctcttgacctcgtgatcygcccgcctcagcctcccgaagttctgggattacaggcatgagccaccatgcccagccacaagctctttttataagggccccagtccatttgtgaaggaggaaccctcatgacccaatcccctctcagaggccccctttccagtatgtcatcttggtgattaggtttcaatgtggcttttggagggaacaccacatgcaaaccatagcaggtggcttgtccccttctgtctggggaagagaagaaaaaagcacaccttccttagagtttca

SEQ ID NO: 942911 - DNA, 750 bp, Homo sapiens
ttctgtttttatgcatgaatcataaaaattaaatagaactaaagatagcttttttcaatattttgagaatttttaacctcagttacctctgagatatctaaagacacatagaggggaacaacagacactgcaacctttcagagggggaagggtgggaggagggagaggatcaggaaaaataactaatgagtacttggcttaatacctgggtggccaaactcccatgacatgtgtttatctacacaacaaacctgcacatgtacccctgaacttaaaattaaaaaaaaataaagacaccctgaataggttgtctctcaaakagctttgacactgctgacggaaatgttttgccaaatcaacccattttagcaatgaaagagcaatattttaagtatcatacagtaaagcagaggttgaataaggatccaattttgaacttcaagttttctatctgctccttaatccccaagctacctgtcccaaatttatatggaatctgaacctgtatttcatcttggaatgaaaattaaaaagggggaaaaaaagcagttttaatgatgtcaaagattaggaccttacatttttttaacctcaaaatactttaggtcaattttataccttcagcctgaaaatgtagatgtatttcagtgttcagttcatccctatacatcatgaatttttaatgctaatcaaattctttatggctcttcataaatcttaaaaaacctgagttggagagcaaagacataa

SEQ ID NO: 942912 - DNA, 582 bp, Homo sapiens
caattatctctattcattgtctctcctacttctttctcatttttttctacttattgattgtgctctccttctatttcttcctgctctgattgcattatttttctttccaataaacttaagaactggcattgaatttgggcaatgaggaaacctagaactygatggaatagtaaggttattatgacaaacttacagctaaaactgtcgtgatgtatactaatatggttaattattaagagatttaaaggttggggtgatgtaatcttaaagttggagaagttatagtctagttacagtattgtactgtaaattctaaattatacaattaaatatatcagtaaataaaaaatgctctttatattgaaatgagaaaatgatatgcatcaactgcactagtatattcaactgcatgccataaatatttgaaaaagaataaatattgagattctgttggcagaggcccggtttttgacattttgtttaagaatttacacttgcccattagtatttgaaataatacactaaacctatgtaatgagtagaaggtgggcagaaaaatgagagaaagatggtacctatttc

SEQ ID NO: 942913 - DNA, 650 bp, Homo sapiens
gttgatgctgcagtccaagtccgaaggtcatctgctacagattccctttcgcggcaggtagctcagtctttcattctattcaagccatcaactgattggatgagacttacccacattaggaagagtaatctgggccaggcgtgatggctcacacctgtaattccagcactttgggaggccaaggcacgtggatcccttgagctcaggagtttgagaccagcctgggcaacgtggcaaaatcccaattctacaaaaaatacaaaaattagctgggcatggaggcgcatgccttgtggtcccagctattcacaaggctgaggtgggaggatcgtttgatcccaggaggtcgaggctgcagtgagctgagattgtgccactgcmctccagtctgggcgacagagcgagactccatctcaaaaaatatataagtaaattaaataaaataaaatacaaacacagaattagccagttgtagtggcacgctcctgtaatcccatgtactcaggaggctgagggaagagaattgcttgaactcaggaggtgggggttgcagtgagacgagatctgccactgcactccagcttgggcgacaaagcaagaatctgtctcagagggtggaggtggggggtggggaaagaactacctgggac

SEQ ID NO: 942914 - DNA, 650 bp, Homo sapiens
gttgatgctgcagtccaagtccgaaggtcatctgctacagattccctttcgcggcaggtagctcagtctttcattctattcaagccatcaactgattggatgagacttacccacattaggaagagtaatctgggccaggcgtgatggctcacacctgtaattccagcactttgggaggccaaggcacgtggatcccttgagctcaggagtttgagaccagcctgggcaacgtggcaaaatcccaattctacaaaaaatacaaaaattagctgggcatggaggcgcatgccttgtggtcccagctattcacaaggctgaggtgggaggatcgtttgatcccaggaggtcgaggctgcagtgagctgagattgtgccactgccctccagtctgggcgacagagcgagactccatctcaaaaaatatataartaaattaaataaaataaaatacaaacacagaattagccagttgtagtggcacgctcctgtaatcccatgtactcaggaggctgagggaagagaattgcttgaactcaggaggtgggggttgcagtgagacgagatctgccactgcactccagcttgggcgacaaagcaagaatctgtctcagagggtggaggtggggggtggggaaagaactacctgggac

SEQ ID NO: 942915 - DNA, 702 bp, Homo sapiens
ccaaatgagaaggaaccagaaaaccaactctggtaatatgacaaaatgagattctttaacacctccaaaaaaatcacattagctcaccatcagtggactcaaaccatgtagaaatccccaatttacctgaaaaagaattcagaaggttaattattaagctaatcagggaggcaccagagaaaggtgaagcccaatctaaggaactacaaaaagtgatacaagaagtgaacacagaaatattcaaggaaataggtaacataaataaacaacaatcaaaacttcaggaaagaatggacacacttatagaaatgcaaaatactctggaaagtctcagcaagagaattgaacaagtagaagaaagaaattcagagctcaaagacagggtcttcgaattaacccaatccaacaaagacaaagataaaagcataagaaaatatgaacaaagcctccaagaagtctgggattatgttaaatgaccaaacctgagaataattcrtgttcctgaagaacaggaacctaagaagagaaatctaaaagtctggaaaacatagttgggggaataattaagaaaaacttacccagccttgctagaagcctagacatccaaatacaagaagcacaaagaacacctggaaaattcatcacagaaagatcattgcctagccactttgtcatcaggttatctaaagttaagacaaagtg

SEQ ID NO: 942916 - DNA, 646 bp, Homo sapiens
tcctaagctacctttgtcaggtcacaggattaatggagcacaccagctttttattcttataaactaactttttgaattttaggcttcctggtattttaagtatgctgactatactctcataaatagaatttgagtcatatttctttctctctgcctagtttctccaaaattgtaaactatttataaatattcttaattcatggcaatgtgtttgtttacatacagtcaagcatgatccctaaggctgctcagggagagagaacytagaaacctggcatgctggcaaaagggtaagaatttcttgccagtcagtctctggcctctttctttctgtgcaaactggttacattaaagataaaaatcactgtttgtctcctctgtaaagttttgacttaatttgtttaataataataagagcttaaatcaaatgtttcatcagaaatgtgaaaaacataatgccttttattttgttcatgtgacttgagtaatcgttggcaaataaagacagttttaaagattattggtaaaatacaatgtcttcaaaatgtaaacatgtggtgtaagttatgttcaaacattaggtttgctaaaagctttaagatcataaactgcttctttggtttttgaaaattgtttaacttgcctg

SEQ ID NO: 942917 - DNA, 646 bp, Homo sapiens
tcctaagctacctttgtcaggtcacaggattaatggagcacaccagctttttattcttataaactaactttttgaattttaggcttcctggtattttaagtatgctgactatactctcataaatagaatttgagtcatatttctttctctctgcctagtttctccaaaattgtaaactatttataaatattcttaattcatggcaatgtgtttgtttacatacagtcaagcatgatccctaaggctgctcagggagagagaacctagaaacctggcatgctggcaaaagggtaagaatttcttgccagtcagtctctggcctctttctttctgtgcaaactggttacattaaagataaaaatcactgtttgtctcctctgtaaagttttgacttaattkgtttaataataataagagcttaaatcaaatgtttcatcagaaatgtgaaaaacataatgccttttattttgttcatgtgacttgagtaatcgttggcaaataaagacagttttaaagattattggtaaaatacaatgtcttcaaaatgtaaacatgtggtgtaagttatgttcaaacattaggtttgctaaaagctttaagatcataaactgcttctttggtttttgaaaattgtttaacttgcctg

SEQ ID NO: 942918 - DNA, 643 bp, Homo sapiens
atccacctcccgggttcaagcgattctcctgcctcagcctcctgagtagctgccattacaggcgcccaccaccacaccgagctaatttttgtatttttagtagagagggggtttcaccatgttggctaggctggtcttgaactcctgacctcaggtgatccgcccaccttggcctcccaaagtgctgggattataggcrtgagccaccacatctggccaacaataataatattaataactattcttggtattattattattaatagtgatattcccattacttttatctttctctcaaaatcgagataaaatgtgatataatggacatgcaatcacaagttttattttatttttaattataattcccccagcatatacatttcacaaaactaaaattaattttgcctcaatatctttattttttaaataaaatggtgatgtagccttacagatcaatgagactctgtagtctgttaaaataattaaataggagctaacggacagaaaaagattctaattatttaatgtgcattaaaaatatcaggttaacaaagcttttgcgtaatcttatgcaatacaaatgttagttttaatctttttgcatggctgtatcttgtatctgcagcatctctatttcacaatc

SEQ ID NO: 942919 - DNA, 643 bp, Homo sapiens
atccacctcccgggttcaagcgattctcctgcctcagcctcctgagtagctgccattacaggcgcccaccaccacaccgagctaatttttgtatttttagtagagagggggtttcaccatgttggctaggctggtcttgaactcctgacctcaggtgatccgcccaccttggcctcccaaagtgctgggattataggcgtgagccaccacatctggccaacaataataatattaataactattcttggtattattattattaatagtgatattcccattacttttatctttctctcaaaatcgagataaaatgtgatataatggacatgcaatcacaagttttattttatttttaattataattcccccagcatatacatttcacaaaactaaaattaattttgcctcaatatctttattttttaaataaaatggtgatgtagccttacagatcaatgagactctgtagtctgttaaaataattaaataggagctaackgacagaaaaagattctaattatttaatgtgcattaaaaatatcaggttaacaaagcttttgcgtaatcttatgcaatacaaatgttagttttaatctttttgcatggctgtatcttgtatctgcagcatctctatttcacaatc

SEQ ID NO: 942920 - DNA, 748 bp, Homo sapiens
cagagaggcttcactccatagccactacaactccgggctgtgaggagtactgccaaactaccaccgatgtacccttaaggctcaaggaagggctcttaagtcagcttgttgtgaatgatgcctggcctgggactcgcccttcaggtcagcaggctcctttctggcccagggaaggtccagaagttccatgaaaagttcaagtcctggaatcagggacccaaagaggtcacttggtgctctaccttcctgtggttaggctggtacctaaggttcaagataaagtcccctttactttccttctgcttttctcaagcagaaggggttttgccttgtagccactatggccagctatgtactgaatttcacttgaagccatcaagtcagaggttcrtccaaggcgctcgatttaggacctgggtattgctgctggttattcaggacccaaggattcttcaattaccaggtgttgaatgctgcccagactgggttctttcctttaaggcagtgggttcccttctggcccaaggtatgtctagaaatgtcatcttggagctaggtcctggaacaatggccctcccaactctaaccagtatcttaacctgttgtggctgggctggtattctagatccaagacaaagtcctccccactcttccttctcttctccttaagcagaagaaaaaggtgttttttggaacttcaagctgtgcagcctggggttagggtaagggtgatgccagctctccctta

SEQ ID NO: 942921 - DNA, 632 bp, Homo sapiens
atgtatgtgtatttgaaaagtcattttatcagttgatatagtttggatatttgtcccctgaaaatctcttgttgaaatgtgagcccccatggccgggcgcggtggttcacacctgtaatcccagcactttgagaggcccaggcgggcagatcacaaggtcaggagatggagacaaacctggctaacatggtgaaaccctgtctctactaaaaatacaaraaaattagccgggagtggtggcgggcacctgtagtcccagctactcaggaggctgaggcaggagaatggcgtgaacccaggaggcggagcttgcagtgggccaagatcgtgccactgcactccagcctgggcgacagagcaaaactccgtatcaaaaaataaaaaataaaaaaaaaagaaatgtgagcccccagtgttggagtgggtcctagtgggaggtgtttgcgtcacaggggccgatccttcgtgaatggctggacgtcctccctgtagttatgagtgacttctcacactactattagttccctgaacagtcagtttttcctctccacaatctccacactcttgctccctctgttgccatgtgacatgccagttccccttgacttctgccatgagtaaaatcttcttga

SEQ ID NO: 942922 - DNA, 619 bp, Homo sapiens
atattagatctttgtcagatatagtttgcaaaaatgttctcctattctgtaggttgtctgtttactatctattctctttcattggtatatatgtcaggttttgtacaatatcatgctattttggtgactgtagccccgtagtatagtttgaaatttggtagcaaattgttctttttgttaggttgcttttttctttttgcttmggtttgccttggctattttggctcttttttggttccatataaattttgaaatagaattttctagttatgtgaagaatgtcactggtagtttgataggatagtattgaatctgtaaattgctccgggggcagtatggccattttaataatatttattcttactattcatgatcatggaatgtttttccatttgtttgcattatctctgtttgtttgtacagtgttttgtagttgtcactgtagagacctttaatctccctggttatctgtattcctaggtattttattctttttgtggcaactgtgagtgggattgccttcctgatttggctctcggcttgactgttgttggtgtatgggaattctagtgagttttgtacattgattttatttcttgaaactttgctgaagttgttt

SEQ ID NO: 942923 - DNA, 619 bp, Homo sapiens
atattagatctttgtcagatatagtttgcaaaaatgttctcctattctgtaggttgtctgtttactatctattctctttcattggtatatatgtcaggttttgtacaatatcatgctattttggtgactgtagccccgtagtatagtttgaaatttggtagcaaattgttctttttgttaggttgcttttttctttttgcttaggtttgccttggctattttggctcttttttggttccatataaattttgaaatagaattttctagttatgtgaagaatgtcactggtagtttgataggatagtattgaatctgtaaattgctccgggggcagtatggccattttaataatatttattcttactattcatgatcatggaatgtttttccatttgtttgcattatctctgtttgtttgtacagtgttttgtagttgtcactgtakagacctttaatctccctggttatctgtattcctaggtattttattctttttgtggcaactgtgagtgggattgccttcctgatttggctctcggcttgactgttgttggtgtatgggaattctagtgagttttgtacattgattttatttcttgaaactttgctgaagttgttt

SEQ ID NO: 942924 - DNA, 575 bp, Homo sapiens
ctgaagaaccagtcctgcaatatttaaactttatcatcacccatttgctcctgttatttattacatatatacaactgtaattatagtttggaccaaatatccatgtagttaaactcagttgtcactttattttctaaaactccttctggatggcaaaaattttctggtttaaagcaaaataattaagccattgcgttttacataggatagttagggatgattcttaaatttttttttttttttttttttttttttttttttttttttgagacggagtctcgctctgtcgcccaggctggagtgcagtggcrcgatctcggctcactgcaagctccgccccctgggttcacaccattctcctgcctcagcctcccgagtagctgggactacaggcgcccaccagcacgcccagctaattttttgtatatttagtaaagacggggtttcaccatgttggccaggatggtctcgatctcttgacctcatggtccacccgcctggtcctcccagagtgttgggattacaggcgtgagcccccgtgcccggccaattcttaaaaattttaaactcaacat

SEQ ID NO: 942925 - DNA, 540 bp, Homo sapiens
cattacaaaatacctgcatggaattatgctgtgtctagaccagcagtttttaaaatgaaatagaaactaataaaattgaaaaaaaaaagaaaaaagaacggtaaaaataattttgtgaatatacacgcatacacatctgtactgtatagaagtgtaaaaaccgctgttcaatgtggattgcattcaaaagtataaatcccaktgacctaaatgataccattaaagctttctaccacaacgtaaagacccttcataaacaagcattggaacaaagattcggcatcatctcttgcaactctgcttccttgtatggtcccaaagtcttgaattagtcacaacttcttagaatcattatgatgtgtaggtttattccagtttgtctttaatatcttaacactgaacataagataatttatagattccaattaagataatttggtataattaatatatttaaactaacgtaatttatagacttagataatctttcaagataatattctatgccagtggttttcaaacttgaacctgcctcagaat

SEQ ID NO: 942926 - DNA, 806 bp, Homo sapiens
aaatttctgcagctggcttgtatttctcctcagaaaatgatattttcttttctattgcattgtcagattgcaaattttctgaactttcatgctctgtttcccttttaaaactgaatgcgtttaacagcacccaagccttccaccagaaaccctaaatcatctctctcaagttcaaagttccacaaatctccagagcagggcaaaatgctgccagtctctttgctaaaatacaacaagagtcacctttgctctagttcccaacaagttcctcatctccatctgagaccacttcagcctgaayttcattgtccatttcattatcagcatttttatcaaagccattcaacaagtctctagagagttccaaacttcccctcattttccttcttcttctgagccctccaaactgttccaaactctacctgttacccagttccaaagttgcttccacattttcaggtatcttttcagcagcaccccactctacttgtactaattcactgtattagttcgttttcacactgctgataaagacatacccaaaactgggcaatttacaaaaaaaagaggtttaatggacttacagttcccagtggcttgggaggctttacaatcatggcggaaggtgaaaggcatgtctcacatggcagtagacaagagaagagagcttgtgcagggaagctcccatttaaaaaaaaattctccatttatttaatgtgtttaaccatttatctggatttttgaaactatgcactaaaattataataatgtaattcatgtagttgtattctaattctagcatctgt

SEQ ID NO: 942927 - DNA, 600 bp, Homo sapiens
accacataattggaagtaaagcattgctcagcaaatgcaaaagaatggacatcataacaaagagcctctcagaccacagtgcaatcaaattaaaagtcaagattaagaaactcacacaaaattgcacaactacatgaaaactgaacaacctgctcctgaatgactattgggtaaataaaaaaattaaggaagcactttgggaggctgaggccagtgaatcayggggtcaggagatcaagaccatcctggctaacacagtgaaaccacatctctaccaaaaatacaaaaaaaaattagccaggtgtggtggcgggtgcctgtagtcccagctactcaggaggctgaggcaggccaggaggcggagcttgcagtaagccaagattgcatcgccacaccccagcctgggtgacaaagcaagaatcagtctcaaaaaaaaaaaatttaaggaagaaataaagaaggtcattgaagccaacgagaacaaagacaaaatgtaccagaatctctgggacaaagctaaggcagtgtttagagggaaatttatattatgaatgcccacaggagaaagtgggaaagatctaaaattggcaccataacatc

SEQ ID NO: 942928 - DNA, 702 bp, Homo sapiens; identical to SEQ ID NO: 942915

SEQ ID NO: 942929 - DNA, 621 bp, Homo sapiens
aatttccatccccaccagcagtgtaaaagcgttcccttttaagtacaaattcaccagcatctttcgtttttttccttttaataacaaccactgcagttttaacttgcatttccctaatgattagtgagagtgaacgttttccatatgcttttggccacawatacgtcttcttctgagaaactgtctataaatgctggagattctccagactcagtcttaggccctcatcttattttccatacctttactatttatatcatgaaacttcactattttatatatttagcccagacctcagcttcatttataactaccaatcttgcctatgtgcttacttgacatctttaaaaggtatataaaaaatttgttaaatttacatattcaaaacaaaactcttagagttctccctcatcataatttctctcctgccctaacctatctcatttcaataagtgatatctccatatatttagtcatttctgccaaaaatctgcctcctccctttacttcccatattcaacctgtaaccaagtctggatgagcctatcttcaaaataatgttaaattcacccagttatcaccagcactgtcactcttgtctaaactgccaccacctgttgc

SEQ ID NO: 942930 - DNA, 602 bp, Homo sapiens
cctcttctcttcagtaaatttctgatagtcccagcttgcctctaattgttcagtctgacaatatttccaattcaatggatttcctgtttcctccaaaattgaaacctggagctgactctgttagctactttggtccagaatgggcatttttgagcttgtgagtttttgagagtgcagctgggcggtattccttaggtatccatttccttaccactgacactaacaccagcccccagtaacacaacaggcacctctaagatcgtctyacttaggcctaagcaagggacccagttaattctccttaatcctccatttatggatcactagcccttccatgcaggagaacacctagcatggtgtattagtccattttcacagtgctataaagaaatgcccaagactgggtaatttataaggaaaagaggtttaattgactcagagttccgcatggctggggagacctcaggaaacttataaccatggtggaagaggaagcaggcacctcttacatgaggtgagagagtgtggaaactgtcacttatgaaaccatcagctctcgtgaaaactcactatcacgagaacagcatgggggaaactgcccc

SEQ ID NO: 942931 - DNA, 606 bp, Homo sapiens
cactgtggcctatgaagaaatccatcaaatgtagattatagaaatttagggatagaggattaacaaagagattgcttagttaagtgggtaaactctttagctcattctttgatctacttgattttaggaggtttggcttgggggtggtaccttgggtaagcggcatattccaaactcggtattatcctcccaataaacataatagtctccctggtgcactgtattctgtcaaaggttttaaatgcttgcgtgcaccatctctagaacattgtatattctcttcaactggaagagaagaaatcattgggaaaaaaaatgattggctaygttaatcaagagcacctgagcatgaagccaatattttaggtaaaaataggattcttaatttctggaaaactgagttccttctggcttatattttaggcctgggaggcagcaacgtcttgagagaaatggcaaaatcttactaaagataataggagctgaaagaaatgtgtaaccgtgagggcaccataacctataaatgatgtgctgaaacccaaaatgatggtaactgagagtggcactaaggccctaaatcttggttacactctcacctaagtgaga

SEQ ID NO: 942932 - DNA, 657 bp, Homo sapiens
ctttcgtgagatcctaaaaagcaagaaatcctgaactatcagatatggctatttatagataagaatgattccacaattttcaaaacatatttcccctatcacaaccctttcttaattggaaattacccagatattaaataagtatcaaaaaaaactaagattttaatttacacaaaagtttacctaaaacatttatcccattcacttaacttttacttttaacaagggagacataagacatcaatcaacatatgtaaaatgatcactggtttagtctggaaaggagggacaacttgaggtgaggaggggggttgggggcttcggatcacacgtgggagacmaatggttacattcttttgagtttctgattaacctttccaaaggaagcaatcagatatgcatttatctcagtgaaactttgaatagaatgggaagtaagctcgccccaaacagctcccagctttaacactggcacttaaacatacctaacaaagatagacaaaaaatacaaactgaagctgaaaggttcccttgtccccctcacagggcgtgcaatggcgctgtggctcacttcctcagtgccccgctcctcaaacctctagggaagcatacagattccccctccccctccccctccacggcaatgtctaggggtaa

SEQ ID NO: 942933 - DNA, 754 bp, Homo sapiens
atgctcaaaggagttttacattgggaagaaacgacgataaccaccatcataaaaacatgcaaaactatataactaattggtagagctgatacataaacaagaaagagaaagcagtcaaatcttatcactacagaaaaccactcaattccagacataagcaataggagaggaagtaaggaacaaacaatgtgcaagacaattagaaaacaataaaatgacaaaagtaagtcctcacctataaataataaccttgaatgtaaatggactaaatttcccatttaaaagatgtagatygaagctggctgtggtggctcatacctgtaatcccagcactttgggaggccaagacaggaagattgcttgatgccaaaagttcaagaccagcctggacaacatattgagacctcttatttaaaaaaaattaaagaattagctgggtgtggtggcacatgcctgtagtcccagctacttgggaggctgaggcaggaggatcacttcagcccaggagtttgaggctgcactgagctatgatcatgtcactgcactcctgcttgagcaacagagcaatcccctgcctctaaatagattagatagatagatagataaagattagctgaatggattaaaaaaaaaaagacccaactatatgctgccagtgagaaactcacctcacctataaagatacacatagactgaaagtgaagggatggcaaaagatatttcatgtgaatggaaaccaaaagtgagcaggcat

SEQ ID NO: 942934 - DNA, 648 bp, Homo sapiens
tcttgcgtggtcctatgtcacacagaccttctcatccatggaccccaccccattccaggccctcaccctttaaataaaaggacaatctagctggagagaaagaaacataaatcatggataaagaacaagaatagaatctaagcacagttgtgtctgccaaaagatgctgctctaaagcatgctgatgaaagggctttgggggcaaagtagcgcccagaacagaatgcaccaaggaatcttctacggtggaccaggcatgtgagctgagcctaggaacttgtggattccaccaggcagagccctgaaggaaagggagcgatggaggcacaatgcaaggacgaatgcgacaacaagacaaccagtggggccggggcacagtctgtcccactaggtgtggggcagtgtgggcacagagcctaatcatcacagccctgyacacggaggagtctagacttgacccagaatgctggggcttctaaacattttttgatcacgagaatcctttttttaaaaaattaatacatttattttgtagagcagttttaggttctcagcagaattgagcagaaagtacagacagttcccacgtactcccctcctcacccacacacacagcctcccccatcatcaacatcccccaccagaggg

SEQ ID NO: 942935 - DNA, 738 bp, Homo sapiens
gaatgggtctgagtttcagtatctttggggaattctgaaaagtctgtttggggaatctggaaagacctcttgcctggtgcccaaatgcttggttttctgtcctggatttatacattcttgggagccagagagccagttttgcattcacaccaacacaactgagtcagaagtrgaagcagccaagacaggtgtcttggtgacaggtgtctcatctttgccttagttcctcccatcagtcttggtaaagagtcctggagtctggagctgctggggctttcctggtcccaggttctgcttttccttctcatttggcccaaaagctatgggactgtaccctatcctagcacttcactgggcatcttctggttctgtccatgtgccctaagacttggtagctctttcgctttctctgtaggttgaagagaagggaggtcagtgagtccgaatcatcacaggcagctttcaaagattaatcttaggatgattttttgaatttaggtattgatttcctaggactggacccagacaagtgacatactgggtgtctgaaaacttatgatgcattagtaatattcacaacccattttaaactgagaaacaaaaagaaaataccaaaatggtaagggttacgataatccaggtaagtttatcagctcagattgtgaatcctgagcaaattctacagaacacaatgtggctcccaggatgaatgagggagggtgagatagagcagaagtt

SEQ ID NO: 942936 - DNA, 678 bp, Homo sapiens
gggatgaaatacactctgtaagccccgctctagtccttccaggccagaacgacaaagcaactttggatatgtggcaaatccaggcttagagcgccctctaatgctaaaaaagcagcagtgaccacagttgaaaaatgtaatgaaccaaataaaaaataccagcagaatcaatcaatcaaacagaaaaaagaatcaatgagctcaaagacaggctttttgaaaagatatcaaatcagacaaggacataacaacaacaacaaaattacaggactatttccctgaagaatatagatgcaaaaatcctcacaaaatactagccaactaaatcccatwgcacatcgtgaagattattcaccaagatcaagtagaattcatcccagaaatataaagatggttcaacatatgcaaatcaataaaggtgatacatcagattaatggaacgaaggacaaaaaccatacgctcatctcattagataaaaactgtcaacagattgggtatagaagaaatatacctcaatataataaaggccatatataacagaaccatcatactgaatgggaaaagctggatgttttctctctaagatctgacacaagataaggatgcttatgtttaccatttttattcaatgtagtactgaaagtcctagccagaccaatcaggtaagaaaaagaaat

SEQ ID NO: 942937 - DNA, 555 bp, Homo sapiens
gtgtattttgaattcttggaatttacattctgtttcttggtctaacacggacaggctgtccattgccaggaagaggcttgtgccgttattctgctggaacatggtgccaatccaaaccttaaggatatctacggcaacactgctctccattatgctgtgtatagtgagagcacctcactggcagaaaaactgcttttccatggtgaaaatattgaagcactggacaaggtatagatcaatcaactttctttccaaaatatttgttttaacattgacataggtaagggtcaattttttatatttggaagctcaaccattccctgaatgcaaatgcaaataattttgaaataattgtctaagattttattttaaatattgatacttttaaaggagcattaaagggtacagctttataaaacrcactttggaaaatatttgtgaatttgttaaaggtaaaaccttttcaactttttttctatgcagggttatctttcctttttttccccgtaattagcgtaaaacaacacaggaaagaaaatatgccctggaaatagg

SEQ ID NO: 942938 - DNA, 586 bp, Homo sapiens
agactctgccaggctgaagggtctgtccccaaaggtgccaccctcaccaggctcatcctgacaatcttggattatttttgccctgaagttttggagtgggggacagggagagagcagacagtactcattagccacctttccagagagcatcagccctccagactggggcaggtcagacctccactcaggcatttttctcactggttgccagttgggggaagcagtatttgtgagcacctgcctgtctccccaggtcctgttcagaaaccccatctgtgcctttggagggactgccctgcgcacacaggcccagcaaccaccatctacrgcccccaggacctaatccccttctacttgggattcagtgcatgttagcagacactgggcttgattcctgcctagtccctgccagatatcccatgcccacctcattaagagaatgaggccacacaaacacacccaggccatcgtgatgatggagtgcctggggtcccacttgcccacccttcattgctggttcagagccagctctgaccacattcctaccctgagatgggactctggggacattgtccaccagggtcac

SEQ ID NO: 942939 - DNA, 835 bp, Homo sapiens
tgtccacctcccgaaattcccagttcaacccagactggctaccctcagtcttagcttagagctgggacacagaggttttgttgattgtgtgacctggctctttggggctgcacttaggggacaggcctaaagctgctctcctcagcggagttactgataatgtccctcaattatgtttgcattctaaaaatacatttgctttcttttggagccataaagcacaaagaagtctcagttggaggttgtctaaccaccccagtttgcccaggattgtaacgactttcacactgaaagtctgtttctgtggtccccccagtcccagctaacctgggcaggcagttggttgccctgtgagtcaggagagagggagagaatgtcatggaactgaaggctcatgcacccactaaaggctgtcccattgctccttctacgtggctgaatcccccagagataggcagatagatgtctatggaagatctagctgaaaggtaaagggctttggcttttgacagaccagggttcaaatctcccattggctgtgtactatcaccttractttggccaaatgtcttaacttgagcctcagtgtcctcatttgtaaatgtggggactgtaataactatgtcatggtgctgttttgggacttcaatggtccaaggcaaataaagtacctggcatattacagatgttacatacaacaggctcagccatctgagccattacatttattcccagtgttggatttggatgggacgacatagcctctttctcttaggaaagctgggtttgtgaaactggcctccccagctcctccaaattcatggctcctggccca

SEQ ID NO: 942940 - DNA, 748 bp, Homo sapiens
gtacatctctggctgccactccagacgacaaaagccatgagctttggaggcattcatgtggtgttaagcctgcaggcccacacagtgcaagagtaaaggagtcttagtagcctttgcctagatttcagaggatgtatgggaaagcctgggtgcccaagcagaagcctgccacagaggcagagccctcacagagagcctctgctaggagagtgccaaggggaaatgtggggttggaatccccacacagtccccaatgaggcactgcctagtggagctgtgagaagggggccaccatcctccagactccagaatgctacgtccactggtagcttgctccctgcacctggaaaagccccaggcacacaacaacctgtgaaagcagcyatgggggctgaaccctgcaaagccaaagaggtagagctgcccaaggccttgggagcccaccccttacaccagcatgctctggatgtgggacatggagtcaaaggagattattttggagctataagatttaagggctgccctgctgggttttgatcttgcatggagcctctggcttcctttttttgggccaatttttcccttttggaaaggaagtgtttacccaatgcctatacccccactgggtcttggaagtaaatggcttgttttgattttacagtatcgtaggtagaaggaactcattgtctgatgagactttggacttggacttgggacttgggacttttgagttgatgctagaatgagt

SEQ ID NO: 942941 - DNA, 873 bp, Homo sapiens
aactttatcaacacctggaaataacattatgcacactgtacagctatatttctgtagtcttctctggacgtgaatggtgagaaacattctttctgacaaatctcttcagaaaacaagcatggaatatatcacctttgcctggaaggtgaaagaggtttggaagagggccctgagctgtatgttctagtcaagctttgctcctgccatgggaggtgaggatgctgcagaaccctgggaaaataatggcccttgccttgagcagaaaatgtggctctagccccagaragcagtccctcaccacacactgcaccagctctgctttctcacaaggcagacagggaagtcaacaataatcataatagctgacatttattgagtatttaggatgtgccaggcactctggtgttttgagcatactaacccatttaatcctcacaacaacctttctatagatagagcaactgaggcatatagaagttcagacatgcatccaaggttacagagctggtaatagcaaaatgggcatttgaatccaagcagtctgctccaagctgttactcttcaaatcttactgcgtctgcattgaatgtcatcatcaatgtggaacatagaggtgctaaaaagaaaggtcatgaattaatctagtattttgaaaatacacatcaagtactagatacattaacaaataatagcacctaagaaaaacaataaagacccttgaccaacagaacgagccagctaaaataatattgtcattgttgttgcgtgtgtatatgtatgtttaaaagagaaagatgtggttcagttcttgtcacatttgttttccagtatagtctcagctttcctttacaatggacccttaagtaagagatg

SEQ ID NO: 942942 - DNA, 647 bp, Homo sapiens
cagctggagccagaaatgggaagaaatgtaaccataacagtcttgttctcggatgcatggccggtcaatatgccaaacactgggttgcagcagaggaatgggtttcattgtaaggaaactgaatgaggaggtaggaggaaccctcaaatctagctccccaaggagtttgaggctagggattttaaggggtttggaagagtagtgggccaaggtataggaattattgattggtcaaagagtatagggtgaagtcatgggatcgagagatgaagattttaaataactgtgattaacatgctaagggctttrctggaaaaagtgggggacaggaggacagctgagtaatttaattagagaggtggaaactacaaaaacaatcaaaagctccatccatgttgctgcaaaggtatgatttcattcttttttatggctgcatagtattccatggtgtacatgtaacatattccctttattcaatccactgtggataggcacctaggttgattccatgtatttgttattgtgaatagcatggtgatgaacatttgcatgtatgtgtctttttggtataatgatctatttttctttgggtatatgcctagaaatggggttgctgggtcaaatggtagctctgttttaagttcttt

SEQ ID NO: 942943 - DNA, 647 bp, Homo sapiens
cagctggagccagaaatgggaagaaatgtaaccataacagtcttgttctcggatgcatggccggtcaatatgccaaacactgggttgcagcagaggaatgggtttcattgtaaggaaactgaatgaggaggtaggaggaaccctcaaatctagctccccaaggagtttgaggctagggattttaaggggtttggaagagtagtgggccaaggtataggaattattgattggtcaaagagtatagggtgaagtcatgggatcgagagatgaagattttaaataactgtgattaacatgctaagggctttactggaaaaagtgggggacaggaggacagstgagtaatttaattagagaggtggaaactacaaaaacaatcaaaagctccatccatgttgctgcaaaggtatgatttcattcttttttatggctgcatagtattccatggtgtacatgtaacatattccctttattcaatccactgtggataggcacctaggttgattccatgtatttgttattgtgaatagcatggtgatgaacatttgcatgtatgtgtctttttggtataatgatctatttttctttgggtatatgcctagaaatggggttgctgggtcaaatggtagctctgttttaagttcttt

SEQ ID NO: 942944 - DNA, 727 bp, Homo sapiens
gcatgcagcatccactgcaggcacttgcgtctggatgaggggaatgtgatggtacccggaagcttggagacaccaggaactgcagagtcccaaagatggtgtcacagccctggccaggagaaccctaggtctgggctgccctaagggtcacagctcttctttccttcttgtcccccacagtgtggtgagtggaggggcatgtttcagccctgtttatgttacagctcttttagtcccaccattcggccagtcacaagttcttgtcccacatccaagaagaatgaggtacatggacaactggtgggtgagaagttggagagaagcttcattgagcaacagaacagctctcaggagacccagactggatagctcctttctgtaggcaggtcatcctgatgtctgtctgtccagctcagatcagagaggagacccacagtgggtagctcctttccccagacaggtcatcccaatgtctgtctgtcaatgggtagctcctttctgtaggcaggtcatcctgaygtctgtccagctcagagcagagaggagacccatagagggtagctcctttccccagacaggtcatcccaatgtctgtctgtcaatgggtagctcctttcctcaggcaggtcatgccaataagtgtctagccgtcagtggagaggagacctgcagtgagtagctcctatccacaggcaggttgatccgatgtctgttcaagtcaaactga

SEQ ID NO: 942945 - DNA, 585 bp, Homo sapiens
ttaggtcccacttgtcaatttttgtttgtgttgtaactgcttttggggacttggtcataaattctttgccagggccgacatccagaatggctatttcctaggttttcttctagaatttttatggtttgaagttttacatttaartctttaatccatcctgagttaatttttgtatatggtaaaaggtagggatccactttcattcttctgcatatggctagccagttatcccggcaccatttattgaatagggagtcctttcccattgcttgttattgtcgcctttgtcaaagatcagatagctgtatgtgtacagttttatttctgggctctctaacctcctccactggtctatgtgtttgtttttgtaccagtagcatgctgttttggttactgtagctctgcagaacagtttgaagatgggtagtgtgatgcctctcattttgttatttttgcttaggattaatcactttggctatttgagctcttttttagttccatctgaattttagaatagcttttttccaattctgtgaaaaatgacagtagtttgataggaacaacactgaatctgtagattgcttt

SEQ ID NO: 942946 - DNA, 585 bp, Homo sapiens
ttaggtcccacttgtcaatttttgtttgtgttgtaactgcttttggggacttggtcataaattctttgccagggccgacatccagaatggctatttcctaggttttcttctagaatttttatggtttgaagttttacatttaagtctttaatccatcctgagttaatttttgtatatggtaaaaggtagggatccactttcattcttctgcatatggctagccagttatcccggcaccatttattgaatagggagtcctttcccattgcttgttattgtcgcctttgtcaaagatcagatagctgtatgtgtacagttttatttctgggctctctaacctcctccaytggtctatgtgtttgtttttgtaccagtagcatgctgttttggttactgtagctctgcagaacagtttgaagatgggtagtgtgatgcctctcattttgttatttttgcttaggattaatcactttggctatttgagctcttttttagttccatctgaattttagaatagcttttttccaattctgtgaaaaatgacagtagtttgataggaacaacactgaatctgtagattgcttt

SEQ ID NO: 942947 - DNA, 627 bp, Homo sapiens
caaccatcaaaggcaaggtgggaatatctactgtaatggacagcagaggcaaagtcacaatcagaatagtctggtgtagagctctggcattggctaattaatcatggtattcctagaagtgaaattgatagggagcctactgcattcctacttaatttatacaagtggaaaacttctaggtcgaatagacaaaaggctaatttgaattataaaaacagagaatcacggcccctcaatttccagacttgagccagtttacrgacccagaatcccttgaataaaggggaggtcgggtctccttgagggaggaccccactacattaccaacaatttatgcagtggatctttctcccatccttccccagagagacctccagccttttaccagtgtgactgtgcattgcagaaagggaaatgaccagacatttgggggaccactggacgctggctctgagctgacattgattccaggggacccaaaacatcattgtggtcccccagttaaagtaggagcttatggaggccaagtaattaatggagttttagctcaggtctgacttacagtgggttcagtgggtccctggactcatcctgtggtcatttccccggtgccagaatgcataattg

SEQ ID NO: 942948 - DNA, 627 bp, Homo sapiens
caaccatcaaaggcaaggtgggaatatctactgtaatggacagcagaggcaaagtcacaatcagaatagtctggtgtagagctctggcattggctaattaatcatggtattcctagaagtgaaattgatagggagcctactgcattcctacttaatttatacaagtggaaaacttctaggtcgaatagacaaaaggctaatttgaattataaaaacagagaatcacggcccctcaatttccagacttgagccagtttacggacccagaatcccttgaataaaggggaggtcgggtctccttgagggaggaccccactacattaccarcaatttatgcagtggatctttctcccatccttccccagagagacctccagccttttaccagtgtgactgtgcattgcagaaagggaaatgaccagacatttgggggaccactggacgctggctctgagctgacattgattccaggggacccaaaacatcattgtggtcccccagttaaagtaggagcttatggaggccaagtaattaatggagttttagctcaggtctgacttacagtgggttcagtgggtccctggactcatcctgtggtcatttccccggtgccagaatgcataattg

SEQ ID NO: 942949 - DNA, 805 bp, Homo sapiens
gatacactgcatgcagcatccactgcaggcacttgcgtctggatgaggggaatgtgatggtacccggaagcttggagacaccaggaactgcagagtcccaaagatggtgtcacagccctggccaggagaaccctagktctgggctgccctaagggtcacagctcttctttccttcttgtcccccacagtgtggtgagtggaggggcatgtttcagccctgtttatgttacagctcttttagtcccaccattcggccagtcacaagttcttgtcccacatccaagaagaatgaggtacatggacaactggtgggtgagaagttggagagaagcttcattgagcaacagaacagctctcaggagacccagactggatagctcctttctgtaggcaggtcatcctgatgtctgtctgtccagctcagatcagagaggagacccacagtgggtagctcctttccccagacaggtcatcccaatgtctgtctgtcaatgggtagctcctttctgtaggcaggtcatcctgacgtctgtccagctcagagcagagaggagacccatagagggtagctcctttccccagacaggtcatcccaatgtctgtctgtcaatgggtagctcctttcctcaggcaggtcatgccaataagtgtctagccgtcagtggagaggagacctgcagtgagtagctcctatccacaggcaggttgatccgatgtctgttcaagtcaaactgaatccaggatttttaatgagctcaaaagggaggaagtgcatgctgattggtccatggacggccacaggcag

SEQ ID NO: 942950 - DNA, 601 bp, Homo sapiens
caaatttgaacttaggtctctgacaccatggccatccatattcttttttttttcttagagacaagttcttgctctgttgcccagcctggagcgcagtggcgtgatcatggctcactgcagccttaaccttctgggcttaagtgatcgtcctgtctcagtcccccaagtagctgggactacaggtatgtgccgccacacccagctaatttttaaaatttttgtagagactgtgtctcgctatgttgccctggatggtcttgaactcctgggttcaagtaatactcttgtcttggccttccgaagtgctgggattacaggtgtgagccactgcacttgacaatattcttttctttacataaggacttataaaataagaattggcaatatttgtatatggaagatgaggaagagagaaggagagagaagaactcttgaggttactagcttgggtagctgtgaattggwgatgatgctaagtgagagaagggatacaggaggcagaacatgcttggggaggaaggaaattagtccattttgtgcagtgcttggaagtcatccaggtagagatttctagtgaatagttggaaatatgagtctggag

SEQ ID NO: 942951 - DNA, 645 bp, Homo sapiens
gttgtattttcattttctttcagctcaacatattatttgaatttttttccttgatacttcctctttaacccatagattatttagaaatgtgttatttagtctctaagtgcttgaaggtatgtctgttattttttctgtcatttatttctagtttgattccattgtggtcagagaagacagtctgtattatttcagttctattgtatttgttaagatttattttatggcccagtatatgatctatcttgctgtcttggttcattttgtgttgctataacaaaatatggcagactgggtaatatataataaacagaaatgtattggctaacwgttctggatgctggaaagttcaagattgaggggctggcatgtggtaagagccttcttgctgcatcttaacacgggagaaatcatcacatggcagaagggcaaggaaacagtgagagagagagacaaaaaggggccaaactaacccttttataaaaaacccactcccatgataatagcattaatccaatcacgataatggtgccctcataacccaagtaactcccattaggccccacccccaacactactgcattggagattaagtttatcacacatggactttggggaacacattccaatcacagcgcatagtaa

SEQ ID NO: 942952 - DNA, 610 bp, Homo sapiens
tgattgagtcaaatttgaacttaggtctctgacaccatggccatccatattcttttttttttcttagagacaagttcttgctctgttgcccagcctggagcgcagtggcgtgatcatggctcactgcagccttaaccttctgggcttaagtgatcgtcctgtctcagtcccccaagtagctgggactacaggtatgtgccgccacacccagctaatttttaaaatttttgtagagactgtgtctcgctatgttgccctggatggtcttgaactcctgggttcaagtaatactcttgtcttggccttccgaagtgctgggattacaggtgtgagccactgcacttgacaatattcttttctttacataaggacttataaaataagaattggcaatatttgtatatggaagatgaggaagagagaaggagagagaagaactcttgaggttactagcttgggtagctgtgaattggwgatgatgctaagtgagagaagggatacaggaggcagaacatgcttggggaggaaggaaattagtccattttgtgcagtgcttggaagtcatccaggtagagatttctagtgaatagttggaaatatgagtctggag

SEQ ID NO: 942953 - DNA, 632 bp, Homo sapiens
agctgccatacatagccttgacattacattaggtattaaaagtaatctagagatgatttaaagtatacaggaggatgtgggtaggttatatgcaaatactatgccattttatatcagggacttgagcatccatggattttggtatctgcgagggtcctggaactaatcctgcttggatactgagggatgtccctatagtacaacttagcaaaatgttaccattgatgaaaactgggcaaagcatacaaatgatctgtattatctctaacaataacatatraatctagggccgggcgtggtggctcacacctgtaatcccagcactttgggaggccgaggcgggcagatcatgagatcaggagattgagacccccatccttgctgacatggtgaaaccctgtctctactaaaaatacaaaaaattaggcaggtgtggtggtgggcgcctgtagtcccagctactccggaggctgaggcaggagaatggtgtgaacccgggaggcggagcttgcagtgagcagagtttgcgccactgcactccagcctgggcgccagagtgagaccgtgtcttaaaaaaaaaaaaaaaaaagaacaaagtaccagttaactgtaggtctacatcaagccatcta

SEQ ID NO: 942954 - DNA, 632 bp, Homo sapiens
agctgccatacatagccttgacattacattaggtattaaaagtaatctagagatgatttaaagtatacaggaggatgtgggtaggttatatgcaaatactatgccattttatatcagggacttgagcatccatggattttggtatctgcgagggtcctggaactaatcctgcttggatactgagggatgtccctatagtacaacttagcaaaatgttaccattgatgaaaactgggcaaagcatacaaatgatctgtattatctctaacaataacatataaatctagggccgggcgtggtggctcacacctgtaatcccagcactttgggaggccgaggcgggcagatcatgagatcaggagattgagacccccatccttgctgacatggtgaaaccctgtctctactaaaaatacaaaaaattagscaggtgtggtggtgggcgcctgtagtcccagctactccggaggctgaggcaggagaatggtgtgaacccgggaggcggagcttgcagtgagcagagtttgcgccactgcactccagcctgggcgccagagtgagaccgtgtcttaaaaaaaaaaaaaaaaaagaacaaagtaccagttaactgtaggtctacatcaagccatcta

SEQ ID NO: 942955 - DNA, 632 bp, Homo sapiens
agctgccatacatagccttgacattacattaggtattaaaagtaatctagagatgatttaaagtatacaggaggatgtgggtaggttatatgcaaatactatgccattttatatcagggacttgagcatccatggattttggtatctgcgagggtcctggaactaatcctgcttggatactgagggatgtccctatagtacaacttagcaaaatgttaccattgatgaaaactgggcaaagcatacaaatgatctgtattatctctaacaataacatataaatctagggccgggcgtggtggctcacacctgtaatcccagcactttgggaggccgaggcgggcagatcatgagatcaggagattgagacccccatccttgctgacatggtgaaaccctgtctctactaaaaatacaaaaaattaggcrggtgtggtggtgggcgcctgtagtcccagctactccggaggctgaggcaggagaatggtgtgaacccgggaggcggagcttgcagtgagcagagtttgcgccactgcactccagcctgggcgccagagtgagaccgtgtcttaaaaaaaaaaaaaaaaaagaacaaagtaccagttaactgtaggtctacatcaagccatcta

SEQ ID NO: 942956 - DNA, 573 bp, Homo sapiens
gcttgtcttacccatgagtgacgggctgcatggcccaggacagttttgaatgcagttcaacacaaatttgtaaactttcttaaaacattaggagattttggccaggtacagtggctcatgcctgtaatcccagcactttgggaggctgaggcgggcagattacctgaggtcaggagttcgagaccaccctgaccaacatggcaaaccccatctccacaaaaaatacaaaaatttgctgagtgcactgtcaggcacctgtactcccagctactcaggaggtgaggcaggagaatcacttgaacctgagaggcagaggttgcagtgagccgagagcacaccactgyactccagcctgggtgacagagtgagaccccatctcaaaaacaacaaacaaaaacaaaaacaaaaacaaaaaaatggctgggcacggtggctcacacctgtaatccccagcactttgggaggcccgaggccaggccagatcgcctgtcaggagttcaaggcccagactggccaaccatggtgaaacctcatctctactaaaaatacaaaaattagtcgggcatggtggca

SEQ ID NO: 942957 - DNA, 591 bp, Homo sapiens
ctgttctatgtttttcttttcctgttaagctgtctgttgtcagctcatttctgcagtgaatcttcagagaggagattggaagctttccttccacccatacgatagaactataaagcagaagagtttagaaagaatttccyttttaagtgacgaaacctcatactccatttgtaataaatagcacaaaggttaaaaaagcttatttttcaccaaaagctctgttgacattctattaaacaaacaccgacctatttaatttttgtaatgcaaatggcagatattttcataattcttatgctaataaatcatttccctgattttttgggtaaaaccacatattcataatgaagtccagaaacgtgaattgttttatataatttattcttatttgtgattacaagtatacctctacagaaagttagtatactcacccaaaggtaaactgtccagaggataatgaaaactttataacttctcggaaacgcaataatgaaatgtaaccaaggacttccacgaaagccagtcccacaatgatgatggtcagccagagtattgataacctggaataataatagttgaaataatgaaaag

SEQ ID NO: 942958 - DNA, 591 bp, Homo sapiens
ctgttctatgtttttcttttcctgttaagctgtctgttgtcagctcatttctgcagtgaatcttcagagaggagattggaagctttccttccacccatacgatagaactataaagcagaagagtttagaaagaatttcctttttaagtgacgaaayctcatactccatttgtaataaatagcacaaaggttaaaaaagcttatttttcaccaaaagctctgttgacattctattaaacaaacaccgacctatttaatttttgtaatgcaaatggcagatattttcataattcttatgctaataaatcatttccctgattttttgggtaaaaccacatattcataatgaagtccagaaacgtgaattgttttatataatttattcttatttgtgattacaagtatacctctacagaaagttagtatactcacccaaaggtaaactgtccagaggataatgaaaactttataacttctcggaaacgcaataatgaaatgtaaccaaggacttccacgaaagccagtcccacaatgatgatggtcagccagagtattgataacctggaataataatagttgaaataatgaaaag

SEQ ID NO: 942959 - DNA, 591 bp, Homo sapiens
ctgttctatgtttttcttttcctgttaagctgtctgttgtcagctcatttctgcagtgaatcttcagagaggagattggaagctttccttccacccatacgatagaactataaagcagaagagtttagaaagaatttcctttttaagtgacgaaacctcatactccatttgtaataaatagcacaaaggttaaaaaagcttatttttcaccaaaagctctgttgacattctattaaacaaacaccgacctatttaattttygtaatgcaaatggcagatattttcataattcttatgctaataaatcatttccctgattttttgggtaaaaccacatattcataatgaagtccagaaacgtgaattgttttatataatttattcttatttgtgattacaagtatacctctacagaaagttagtatactcacccaaaggtaaactgtccagaggataatgaaaactttataacttctcggaaacgcaataatgaaatgtaaccaaggacttccacgaaagccagtcccacaatgatgatggtcagccagagtattgataacctggaataataatagttgaaataatgaaaag

SEQ ID NO: 942960 - DNA, 639 bp, Homo sapiens
aagctgtctgttgtcagctcatttctgcagtgaatcttcagagaggagattggaagctttccttccacccatacgatagaactataaagcagaagagtttagaaagaatttcctttttaagtgacgaaacctcatactccatttgtaataaatagcacaaaggttaaaaaagcttatttttcaccaaaagctctgttgacattctattaaacaaacaccgacctatttaatttttgtaatgyaaatggcagatattttcataattcttatgctaataaatcatttccctgattttttgggtaaaaccacatattcataatgaagtccagaaacgtgaattgttttatataatttattcttatttgtgattacaagtatacctctacagaaagttagtatactcacccaaaggtaaactgtccagaggataatgaaaactttataacttctcggaaacgcaataatgaaatgtaaccaaggacttccacgaaagccagtcccacaatgatgatggtcagccagagtattgataacctggaataataatagttgaaataatgaaaaggtcaatgacactgacaatatttcactcagaaagaatcatccttagaaaccgtcaacctcctccaaaaggtaacc

SEQ ID NO: 942961 - DNA, 544 bp, Homo sapiens
gggtggccagtctcaatggctcccaactcttttgcctcgaggtgacacgcttcacttccactcacatctcctgggtcaaagcaaatcccatgggtacatccactttcaagtggcccaggagagaaactgaaatacccggtggactccattamggccgtcatatagtgtcagcctgcatgggagactgtggaggggcagaggaggagagtggggaactgatgggaaatgacaggaggactaagtcaccgcagatttgctttatcttcagccaggtggagtttgtcccagagctgcacaaaatcatcaccagcatgattaaacagagtagacttcagaaaaagcagtttggtcggatgtaatcagcagtgaactcagaatcaattgagtgacattgagtcagtaaacctctgactgcctcagttaccccatatgatagttttgaggatgggaacattgagagagttgatttggaaggatatcaagagtaaaaattccaacattttagttcctttaagtgaaatccaggcactgtctttcctacaag

SEQ ID NO: 942962 - DNA, 564 bp, Homo sapiens
tttaccatgttggtcaggctggtctcaaactactgacctcaagccatctgcctgccttggcctcccaaagtactgggattacaggcatgagccacggtgtctggccaggagtaaccaaacttttaaggtggacttgtagtgatcctatttctgtctctattgatttaccaacatgcccatgttcaagctttctctgagagagaatccaattggttgaccagtcactattcagtgtggagcctctctgttgggcagacttttcgtgatcatgttccagagactattttcccaccacgagtgccttgggtgagggatcactctttgagctaatcatctgtggtcgcaatggcaggtcacacgtctatatcagcatggtgacttttgctcgggaaaccactttgagcagcagctctgaagwgactgcaagcagaggaggtgctcagctccatgccctgtacgtgctctttcccccatcccatacccctatcttggccaccggatgcaacttttgcaccaattttttttaaacagtcgtttgagcaattattgtcattcccacctaaa

SEQ ID NO: 942963 - DNA, 753 bp, Homo sapiens
ttgggatgatcttcttgtgaagtatctcactggggttctctacatttcctgaatttgcatgttggcctttctagctaggttggggaagttctcctggatgatatcctgaaatacgttttccacttggttccattcttcccatctctttcagggaaatgaactagttgtagatttggtctctttatataatcccatgtttctcggaggtttgttsattccttttcattcttttctctctatttttgcctgcctgcctgtcttatctcaggaagatggtctttaagctctgagattctttccccaatttggtctattctgttattaatacttgtgcttgcattataaaattcttgtagtgtgttttcttaggtctatcaggtcagttacattattttctatactggctattttgtctgtcagctcctgcattgttttatcctaattgttagcttccttgtactgggtttcaatgtactcctgtagctcaatgatgttcattcccatccatattctgcattctatttctgtcattttggccatctcagcctagttccgaactcttgctgaagaggtgatatggtcatttggagaaaagaaggcactgtggctttttgagttttcagtattcttgtgccaattctttctcatcttgcgggcttatctaccttcaaactttgaggttgctgacctttggatttctttttctcttttaccctctttgatgaccttgaaggtttgattgtggtataaagt

SEQ ID NO: 942964 - DNA, 744 bp, Homo sapiens
ggaatgcagtgtagatgcacatatagatggccttccaggaacaatttagggtgattgcatccccacaggaggagcacttctcaaattcaggcttgcagagtcacaactcctctctacttggaacatcaacattcctacagatgcaaagagttacctgtctgatctgaatagctggaatactgggacaggaaggtggatagctttcctgcttgcctggcaggggagctgaggtggcttccacccttcactctgataaaacctcagcacatttaatttagagctcccccaggcaccttcatcaaggctgggacctctgcccaccattagatatatctaygcatctctttagctaccaccaatacctaccccagggatacctctcctattggcctgaaggctgaatcatcagcttagtaaataaaatactgggaaaaaattaaataaataaaaaggtgtacaccatgggagaatgagataagcttcaagagatcctagccattccaaccctacaggagacagtgaacttacccacaggccaaatgcatggttactgcaaccagcgtctgggaaagccagcgcacaaaaactctctttaaggaactcctacagagtcttccccactaaaagcattaagaatcaaattaggctataataaatgataaacattaaagtcagatccttaagagggaaaagaagaaattaaagaaaaaaacacagtcaaatcaaaaataaatttaagaacaa

SEQ ID NO: 942965 - DNA, 567 bp, Homo sapiens
ctagcattaggtatatctcccatatgctatgtgccctcttactagtgatattttacacattaaatgttttgaattcaaaatttccatggaaacaaggtaaatttcaaatttacaatctctgtggcgtgattatattttaggttcctagtgaaactgagaatgtttaaggttcaattcccacatgtctgttaatttcaccccacggatacaggctgacttaactctgaccaaccaccctgaacgtgcacttccttctcacgtggaaatgaggtggcatagcaaagtcaagatgtggagccctggtgaatcagcctaggacaggcagctatggaggacacatttggattcagatggaggaatcaccaccgaggaaaggattatgaagagcaaccccsatctggaagatattctgtttacctctcaaaatcatgcagggattaaaacccgacctacaaggcagaaaaaaatacaagagttcagaggaaagcaacacttcattacattcatgagatgcataaatgactgtaaaagcagcagactcagaaatcaaaataggaaaaaatcaga

SEQ ID NO: 942966 - DNA, 477 bp, Homo sapiens
ctcagggtgctgggatcacaggcatgagccactgcacccggtcttgatttcttatttttacaaagagactaaagatacttggatctgtaaataaacattttttttatcacactgaaaaattgtattatgaagaggcatatacgaattatgaaatgatgtattcataaactgctagcctgctayggaatgttggaatatgacagacaattcacaattgtctacttttcactactgtctagttttctctataaaaggaaggttactaatgataaaaattaattataactaatataagtaaattaaactactaaaaataataacagtgaagggaaacaaacacaaggaaggggctgggcatagtggctcatgcctgtaatcctagcactttgggaggctgaggccagagactcacttgagtccaggagttcaagaccagcctgggcaacacagcaagaccctacctcttaaaaaagaaaa

SEQ ID NO: 942967 - DNA, 740 bp, Homo sapiens
ggaggccttgggtcacttggtggtggggtatagcaggcctactatcttgtttttggctgcctacatctttttttctttcttttttttagagacggtcttgctctgttgcccaggctggagtgcagtagtgcaatcacgacttactgcagcctcaaactgtttggcttaagtgatcctcccatctcaggctctgcagtagctgggactatggttgcgagctaccacacctggctaattttcgtattttttgttgacatagggatcttgctctattgcrcaggctggtcttgaactcctggtctcaagtgaacttcctgccttggcctcccaaaatgctggggttacaagcataagccaacacacctggtctgcctacatctttttttttttttaatttttatttttttgttttgttttgagacagggtctcactctgtcacccaggcagaagtgcagtggtgcgttcttggctcacagcaacctctgcctcccaggttcaagcaattctcctgcctcaggctcctaagtagctgggactacaggtgtgcgccaccatgcccagctaatttttgtatttttagtagagactgggtttcaccatgttgggcaggctgttctagaactcctgtcaagtgatccgcccgcctcggcctcccaaagtgctgggattacaggcatgagccactgtgcctggccttaaatctttttaagacagatttttgctatggaaatttcacaac

SEQ ID NO: 942968 - DNA, 598 bp, Homo sapiens
gttgttttcatgcctgctaacacaacatccattctgtagcccatggatcaaggagtaagttttacttttacttaagaaatacacttcataaggctttagctgtcacaggcagtggttcctctgatggatctgggcaaagcacattgaaaaccctcaggaaaggattcaccattctagatgccattaaaaacattggtgattcatggaaggaggtcaaaatgcaacatgaacaggagtttggaagaagttcattccaagacttcagtagaggaagtaactgcagatggggtggaactagcaagtgaacwagaattagacatggagcctgaggatgtgactgaattactgcagtctcatgagaaaacgtaaattgctgaggcattggttcttgtgaatgagcaatgtggttttttaagaggaaatctaccagcgaagatgctgtgaacattgttgaagtgatcaaagatttacagtagtgcatacttagttgataaagcagcggcagggtttgagaagattgactcagattttgaaagtaattctactgtgggtaacatgctgtcaaacaccactgcatggtacagagaaatttttcatg

SEQ ID NO: 942969 - DNA, 836 bp, Homo sapiens
ggcctcagacagaggaattggcaagtgccggagacacacactggattaccctccctttccaaaaataaattaaatgctgaccagcatttctcgggataatcaggaaattggacccatgatcatgtcatcaaatatccttctcaagggaatccaaattatgtaactggctccactctggaaggctcagtcacgtactcatcatggcatactttttggataaactttgtttgaaagagctgaacacaaaaatatataggcagccgtttgtgtccactctttccaaggtcacaccagagtttgtgttatcctatgaagaattttatgtcactttgcagggacagtgggtaaactgtcctctcaaattagattttacttccatttgcaggtactttttttagaatgaaagccttatttgacttaattgcaacaaaattaccaccaccaaacagtttacataactatgaagttaataaacgtggttcatatttttttttttgacggagtctcgctctgttgcccaggctagagtgcagtggcgcaatctstactcactgcaagctctgcctcccgggttcacgccattctcctgcctcagcctcccgagtagctgggactacaggcacctgccaccatgcccagctaatttttttgtattttttttagtaaagacggggtttcaccatgttagccagaatggtctcgatctcctgacctgctgatccgcctgccctggcctcccaagtggttcatatttcttaaccctttaagaaggggtagcacattaagtactttctataggaatatttctaataagtgatgaatacactaatttttct

SEQ ID NO: 942970 - DNA, 836 bp, Homo sapiens
ggcctcagacagaggaattggcaagtgccggagacacacactggattaccctccctttccaaaaataaattaaatgctgaccagcatttctcgggataatcaggaaattggacccatgatcatgtcatcaaatatccttctcaagggaatccaaattatgtaactggctccactctggaaggctcagtcacgtactcatcatggcatactttttggataaactttgtttgaaagagctgaacacaaaaatatataggcagccgtttgtgtccactctttccaaggtcacaccagagtttgtgttatcctatgaagaattttatgtcactttgcagggacagtgggtaaactgtcctctcaaattagattttacttccatttgcaggtactttttttagaatgaaagccttatttgacttaattgcaacaaaattaccaccaccaaacagtttacataactatgaagttaataaacgtggttcatatttttttttttgacggagtctcgctctgttgcccaggctagagtgcagtggcgcaatctctactcactgyaagctctgcctcccgggttcacgccattctcctgcctcagcctcccgagtagctgggactacaggcacctgccaccatgcccagctaatttttttgtattttttttagtaaagacggggtttcaccatgttagccagaatggtctcgatctcctgacctgctgatccgcctgccctggcctcccaagtggttcatatttcttaaccctttaagaaggggtagcacattaagtactttctataggaatatttctaataagtgatgaatacactaatttttct

SEQ ID NO: 942971 - DNA, 760 bp, Homo sapiens
tgtcagactggatttggagaatcaatatctctgcttcctcatcccttgggtgggaaaatactgagagcttatttgacacactggcctgggtcctcagcaggactgagccacttgtgcccgtggtgacagcttgctcattaatgcacctagtattttcttctccccttccctgtctcactttccttctctaccaggctttctgggatcacctcccaagtattctacttatactcaaatccttgtctcagagtctgctttgagaaaaacccaatccaatatagctttcttgctgtttcctaaacatgccaagtatactgcagggcctatgcactgacttttaactctacccctaatgcttttcttccatatagctgaatggctcactcccatgctcactcaggtctccactcaaatgttactttatccaaggccttccccagcaagcacactttccctcattcttattctyattcttttgttttgttttgttttgttttttgtgagacacagtttcgcttttgttgcccaggctggagtgcaatggtgcgatcaccactcaccaccacctctgcctcacaggttcaagcaattctcctgcctcagcctcccgagtagctgggattacaggcacgtgccaccaccctcgactaattttgtatttttagtagagacagggtttcagcatgttggccaggatggtctcaatatcttgacctcgtgattcgcccacctctgctggattacaggcatgagccaccgc

SEQ ID NO: 942972 - DNA, 598 bp, Homo sapiens
gtgtgcgtgcatgtgtgtgtgtgtttgtgtgtgtgtgtgtatcacattttcttcatccattcatccatcaatggacactaagcactaaggttgattccgtatcttggctattgtgaataatgctgcaataaacatatgagtccagatacctcttcaagatactgatttcatttcctttaaatatatgcccagaagtgggattgctggatcatatggtagttctatatttagtatcttgaggaatttccatactgtttttcataatgattgyagcaatctatattcccatcaacagtgtacaagggttccattttctacatggccttaccaacgtttgttatcacttatctttttgataatagatattctagcaggtgtgaggtggtatctcattgtggttttaatttgcattttcctgatgattagtggtgtagagcatcttttcatattcccattggtaattcgtatatcttcctttgagaaatatttattcagatcttttgcccattgttagctgagttatatgtgagttggttttggtttgttgttgttttttgtttttgctattgagctgagttccttgtatattttggatatt

SEQ ID NO: 942973 - DNA, 598 bp, Homo sapiens
gtgtgcgtgcatgtgtgtgtgtgtttgtgtgtgtgtgtgtatcacattttcttcatccattcatccatcaatggacactaagcactaaggttgattccgtatcttggctattgtgaataatgctgcaataaacatatgagtccagatacctcttcaagatactgatttcatttcctttaaatatatgcccagaagtgggattgctggatcatatggtagttctatatttagtatcttgaggaatttccatactgtttttcataatgattgtagcaatctatattcccatcaacagtgtacaagggttccattttctacatggccttaccaacgtttgttatcacttatctttttgataatagatattctagcaggtgtgaggtggtatctcattgtggttttaatttgcattttcctgatgattagtggtgtagagcatcttttcatatwcccattggtaattcgtatatcttcctttgagaaatatttattcagatcttttgcccattgttagctgagttatatgtgagttggttttggtttgttgttgttttttgtttttgctattgagctgagttccttgtatattttggatatt

SEQ ID NO: 942974 - DNA, 586 bp, Homo sapiens
atttgagggaccttgagaaaagaggtattcatccatttatacaggtattacagacacagtctgagactgagtcagatttttggcttgacttcttaacatagctaggaagccaaggggctttttaaaaagtctaatctgagattctttatgaaaatattccagcaaagccaacttagaacaagcctataggtcattcatcattcttactaaacttttgtaaataatcaggtcaaagactaaacttaaacaaaacagtctgtctatgattatctttggttgaaatgggaggattcragagaaaaaattatgtcatagaaaaaaacttcacatatgcctgttattacattctagccttgtccatttgtttctgagctttgtatctggactgaatcacacatttttattttcctccaatatatggctgagacactcagactaatgtttccaatttttcttccacccttctgacttagaattattagaaactaaaactgcctttttcctgaggctgaagctagtcaacttggctttgaaggaatattattgcaacagcttatatttggacaaaactttctacacgcaaaat

SEQ ID NO: 942975 - DNA, 621 bp, Homo sapiens
taaagactgaataatatccctgtgtgtgcgtgcatgtgtgtgtgtgtttgtgtgtgtgtgtgtatcacattttcttcatccattcatccatcaatggacactaagcactaaggttgattccgtatcttggctattgtgaataatgctgcaataaacatatgagtccagatacctcttcaagatactgatttcatttcctttaaatatatgcccagaagtgggattgctggatcatatggtagttctatatttagtatcttgaggaatttccatactgtttttcataatgattgyagcaatctatattcccatcaacagtgtacaagggttccattttctacatggccttaccaacgtttgttatcacttatctttttgataatagatattctagcaggtgtgaggtggtatctcattgtggttttaatttgcattttcctgatgattagtggtgtagagcatcttttcatattcccattggtaattcgtatatcttcctttgagaaatatttattcagatcttttgcccattgttagctgagttatatgtgagttggttttggtttgttgttgttttttgtttttgctattgagctgagttccttgtatattttggatatt

SEQ ID NO: 942976 - DNA, 621 bp, Homo sapiens
taaagactgaataatatccctgtgtgtgcgtgcatgtgtgtgtgtgtttgtgtgtgtgtgtgtatcacattttcttcatccattcatccatcaatggacactaagcactaaggttgattccgtatcttggctattgtgaataatgctgcaataaacatatgagtccagatacctcttcaagatactgatttcatttcctttaaatatatgcccagaagtgggattgctggatcatatggtagttctatatttagtatcttgaggaatttccatactgtttttcataatgattgtagcaatctatattcccatcaacagtgtacaagggttccattttctacatggccttaccaacgtttgttatcacttatctttttgataatagatattctagcaggtgtgaggtggtatctcattgtggttttaatttgcattttcctgatgattagtggtgtagagcatcttttcatatwcccattggtaattcgtatatcttcctttgagaaatatttattcagatcttttgcccattgttagctgagttatatgtgagttggttttggtttgttgttgttttttgtttttgctattgagctgagttccttgtatattttggatatt

SEQ ID NO: 942977 - DNA, 774 bp, Homo sapiens
cactacactcaatactacatgggcttcagcaacctacgtgtggataaagaaactgtggtgtgtgtatatatatatatatatatatatatatgatggaatactactcagacataagaagtaatgaagtaatggcatttgcagcaacttggatgagatcggaggctattattctaagtgaagtaactcaggaatggaaaaccaaacatcgtatgttctcacttataagtgggagctaagctatgaggatgcaaaggcataagaatgacacaatggactttggggactcagggggaaagggcgggaagggggtgatggataaaaaactacaaatcgggtgcagtgtgcactgcttgggtgatggctgcaccaaaatctcasaaatcaccactaaagaacttcctcacgtaaccaaataccacctgttcccccacaacctatggaaataaaaacgtttaaaaaaaggctgttaaatgggctaaactcaccaatgaaaagcagagatggttggactggctaaaaatcaaagacttaaagtatgctgtctgcaagaatcacacctgaaagacaaagacagactgcaaatatagaaatggtcaaagatacagcattcaaaccctgaccccggggcggctggcacggccacgaacatcgcaggcaacatagactccagggcaaggaagatggacgaagacacgtggagacagttcatcagtgaagaaagggtcagcctgttaaggagacccacagtcctaaatatgcacgcacgtgatggaa

SEQ ID NO: 942978 - DNA, 774 bp, Homo sapiens
cactacactcaatactacatgggcttcagcaacctacgtgtggataaagaaactgtggtgtgtgtatatatatatatatatatatatatatgatggaatactactcagacataagaagtaatgaagtaatggcatttgcagcaacttggatgagatcggaggctattattctaagtgaagtaactcaggaatggaaaaccaaacatcgtatgttctcacttataagtgggagctaagctatgaggatgcaaaggcataagaatgacacaatggactttggggactcagggggaaagggcgggaagggggtgatggataaaaaactacaaatcgggtgcagtgtgcactgcttgggtgatggctgcaccaaaatctcacaaatcaccactaaagaacttcctcacgtaaccaaataccacctgttcccccacaacctatggaaataaaaacgtttaaaaaaaggctgttaaatgggctaaactcaccaatgaaaagcagagatggttggactggctaaaaatcaaagacttaaagtatgctgtctgcaagaatcacacctgaaagacaaagacagactgcaaatatagaaatggtcaaagatacagcattcaaamcctgaccccggggcggctggcacggccacgaacatcgcaggcaacatagactccagggcaaggaagatggacgaagacacgtggagacagttcatcagtgaagaaagggtcagcctgttaaggagacccacagtcctaaatatgcacgcacgtgatggaa

SEQ ID NO: 942979 - DNA, 596 bp, Homo sapiens
cgtcgcagtgcaggctctcccgagggccaggacgccctgtctgagcagggctccaggaacaatgaggctggccccggccacacttatgcccagccaacctcagcaccgacagtggcctgccctgtgcctgcccctgcccatggctcctgcctgctctcctcatgggaactgctgcgcactcactgagcatctgcctccttgagaaaaaactttgttttcttcttaaaaacattgtggtcccggcgcagtggctcacgcttgtaatctccacactttggggggctgaggtgggcggacctcaagtgtgaggtcagaagttcgagaccagtttggccaacatggtgaaaccccatctcyactaaaaatacagaaattagcccggcatggtggtgggggcctctaatcccagctactcaggaggctgaggcaggagaatcgcttgaacccaggagaaggaggttgccgtgagccaagatcacgccactgcactccagcctgggtgacaaagcaaggctcgaaaaaaaaaaaaaaagtagtaaaataaacgtaacatacaatgtatcgttttaaccatttttcggtacacagttgagtgc

SEQ ID NO: 942980 - DNA, 711 bp, Homo sapiens
gaagtcacacagagttacttccatgatactcttggtcgaggagatcacaaaggtctcttcaggttcaaggggaagggatatagaccttgactctcaataggaggcttctcaaggtcacattggaaagagcttgtgggatgggagacatctatgcagtcatctttggaaaacacagcctgccatttctgtataacaggtgcccagatcaagatgtaaactatttccagggacccagtgggcccttgggggccccctccagtccataccagcccctcaaggtagttactaccctgatgtctgttggcatagactagttctgcctamtcttgaatataggcagaatagacaaatggagtcacgtggtgtgttgtgtactctttcttgagtggtttcttgcatgtcatagtgtgcctattgtcgagtgcagcagcatcttgttcttgttcactgctgtggactgttgtacggtgtgaacagatcacggattgcgcactcaatcttgacaggccactggccatttccagtgtttgattattatgaggaatgatgccacaagcattctcgtatgacttttttggtgtgtaaccacacactgctgttgggtgcacacccaggcgtggagctgctgggtcactggatgcccagcagacactagcaagggatgttttgaagtggtgggaccattttcacactcaccgatagtgtaagggg

SEQ ID NO: 942981 - DNA, 600 bp, Homo sapiens
gctaattttgtatttttagtagagagacggggtttctccatgttggtcgggctggtcttgaactcctgagctcaagtaatccgcttgcctcagcctcccaaagtgctgggattacaggtgtgagccaccacgcctggccagtgttctggtctgtttgtgatgggtgtaagaatctgtctctttaaagaggtgcctctggccaggtggttacctctgtcaccagagatgagtcacccagtctcagctcgcaggccttcctggacgttcccagatagtccccagkgctggaggcctgtcgaaagtgtagctccaccacgccctttgatctcttcctcctctcctcttccccacccgcttccccctccttccccctccttccccctcctccttccccctcctccttctctcctgctgagggcatttggcctcatagataagcggtttctaatgagctcactggtttccgatggtgggtggggagtgactctgggctttctgtgctgcctcttcgacctcgtccctgttttctgctgtgcggagcatggccctttcctaatccgaaagagccgcacagtcccttccagtgctgcctgtggtctc

SEQ ID NO: 942982 - DNA, 600 bp, Homo sapiens
gctaattttgtatttttagtagagagacggggtttctccatgttggtcgggctggtcttgaactcctgagctcaagtaatccgcttgcctcagcctcccaaagtgctgggattacaggtgtgagccaccacgcctggccagtgttctggtctgtttgtgatgggtgtaagaatctgtctctttaaagaggtgcctctggccaggtggttacctctgtcaccagagatgagtcacccagtctcagctcgcaggccttcctggacgttcccagatagtccccagtgctggaggcctgtcgaargtgtagctccaccacgccctttgatctcttcctcctctcctcttccccacccgcttccccctccttccccctccttccccctcctccttccccctcctccttctctcctgctgagggcatttggcctcatagataagcggtttctaatgagctcactggtttccgatggtgggtggggagtgactctgggctttctgtgctgcctcttcgacctcgtccctgttttctgctgtgcggagcatggccctttcctaatccgaaagagccgcacagtcccttccagtgctgcctgtggtctc

SEQ ID NO: 942983 - DNA, 741 bp, Homo sapiens
atcaggcccagagagaaattaaaatgagacagtaatcacatgctgtttctcctagagctgtgtcaccatctctggagactgcttcctctcaccacaagtagctgtaagtgaacctaaggatgctgcacacaggacaccgtaatcccatacaatgtatagccaatcactaatcaatattatttctgtaaaccaatgagaattcctgatagacaattttgtatcagcctgctccttgtcccccttttgtctttaaaaacctgcttgtcggctgggcgtgatggctcacacctacaatcccagcagtttgggaggccaaagcaggtggatcacgttaggtcaggagttcgagaccagcctggccaacatgatggaaccccgtctctaytaaaaatgcaaaaaaattagctgagcttggtgtctggcacctgtaatcccagctatctgggaggctgaggcaggagaatcacttgaacctgggatgctgaggttgcagcgagccgagattgtgccactgcactccagcctgggcaacaggagtgaaactccgtctaaaacaaacaaacaaacaaacaaacaaacaaaaccctgctgtcacgaaggtcaaaagcagctctcaccaaggcaatgtggaagtgtgtcttgctgtcctcaactttagcccacgcacagtctctacatcaattctgcctcagcttcttccttcaacaaggaagaaaggaaggaaggactgacaagacctgg

SEQ ID NO: 942984 - DNA, 741 bp, Homo sapiens
atcaggcccagagagaaattaaaatgagacagtaatcacatgctgtttctcctagagctgtgtcaccatctctggagactgcttcctctcaccacaagtagctgtaagtgaacctaaggatgctgcacacaggacaccgtaatcccatacaatgtatagccaatcactaatcaatattatttctgtaaaccaatgagaattcctgatagacaattttgtatcagcctgctccttgtcccccttttgtctttaaaaacctgcttgtcggctgggcgtgatggctcacacctacaatcccagcagtttgggaggccaaagcaggtggatcacgttaggtcaggagttcgagaccagcctggccaacatgatggaaccccgtctctattaaaaatgcaaaaaaattagctgagcttggtgtctggcacctgtaatcccagctatytgggaggctgaggcaggagaatcacttgaacctgggatgctgaggttgcagcgagccgagattgtgccactgcactccagcctgggcaacaggagtgaaactccgtctaaaacaaacaaacaaacaaacaaacaaacaaaaccctgctgtcacgaaggtcaaaagcagctctcaccaaggcaatgtggaagtgtgtcttgctgtcctcaactttagcccacgcacagtctctacatcaattctgcctcagcttcttccttcaacaaggaagaaaggaaggaaggactgacaagacctgg

SEQ ID NO: 942985 - DNA, 744 bp, Homo sapiens
gtgggaggtggcaggcgccagcctccgagcagtgtggtggtttatattcatgtttgtggaaaaatcttgcaagacatttctcctttcacagaactgcccaggtgttaacagggctgtctggacggggctcttttgcttccccctcaatctggggtctagagttgtgcarggaattcagctccagtaaggcctggattgcccggggtgagcgtgtgtgtggtgggaagacctggcttccgcgagagccttgttcctggaggcaggagcgccccgccatcctgggtacccgcgggtccgcaggctgcgcacctctttccctcagccaggtcaccctcagcgtcctccctgcccctctccccttcacacctgctggagcctgtgagggaggtggcgggtccccactgtggcgacggagagctgacagtagcccagggctttccacctgcatggaacaagggcctgtctgccgccagcgctgtggccacagcctgcataggtgacaaggggccgctgcgttgggttttgcccgcatcttctgttccatgggtgcccagccagccaggccgtgtgggatccagcgagaggccagggcttggagtgggcctgggaccaggaaggacctctaggctgtggctggccttgtgcagaccctggactgcatccggttccccaaagccctgctgcattcgagtgtcccccaaccccgggcaggtggcacctggtgacacctccttcagtcccact

SEQ ID NO: 942986 - DNA, 802 bp, Homo sapiens
acgttctgtaaaggtctgtcaggtccatttggtctacggtgtagtttcaatccaatgtttctttgttaatcttctatctagatgatctttttaatgctgagagaggggttttagagtccaactattattctattggggtctatctctccctttagatctattaataataatatttgctttatatacctgggtaccctggtgttgggtgcatatatatttttaagtgttatattcccttgccaaattaacccccttattattatacagcgtctttgtctctttttatagcttttgaagtctgttttgtctaatataagtacagttactcctgctcacttttggtttccatttttgtggaatatttttttccatcccttcacttttagcctatatgtttcttyacacatgaggtgagtttcttgtaggcagcgtatagctgggtctttttaaaaatccattcatgccgggtgcagtggttcatgcctgtaattccagcattttggggggctgaggggggatgattgcttgagctcaggagttcaagaccagcctggacaacatagggagaccccatctctacaaaataatttaagaaattagctaggtgtggtggtgcatgcctgtgatcacagctagttgtgaggctgataagggagcatcacttgggcctgggaggttgagggtgcagtgagccatgattatgccattgcactccagcctgggtgaaagagtgagatcctatcttgaatgagtgaataaataaataaatccattcagccagtctatatcatttaaatggggg

SEQ ID NO: 942987 - DNA, 561 bp, Homo sapiens
ttccatcatatggctataccacattctatgtatccattcttctgttgatggacttttgggttgtttctaccctttggctgttgtaaatggtgctgctatgaacattggtgtacaagctttggcttgaatacctgctttcatttctttttggtgtatccccagaagtgaaattgctagatcatatagtaattctatatttaattttttgagggactgccaaactgttttctacagtggctgtaccactttctgtttccatcagcaacttgtggggattccaatttttcttttcttttcttttctttcttttttttaagatggagtctcgctctgttgcccaggctggagtgcagtggcgcgatcttggctcactgcaagctccgcctcccgggttcacgccwttctcctgcctcagcctcccgagtagctgggactacaggcacctgccacgacgcccagctaattttttgtatttttagtagagacagggtttcaccgtgttaggatggtctagatctcctgaccttgtgatctgcccgcctcggcctcccaaagtgccgg

SEQ ID NO: 942988 - DNA, 687 bp, Homo sapiens
cctttttctccagttgtggtttcctcctgctgccagagcagggccctttttacctgggcctcgtgcccacaccgtgagaaacactttgtgccaagtgctttctcctctgaactcgagaggactctccatggagattggtacctgccaatcgggttttatggtcgcgtgtcctctcttttatgggaagaatatcgtgtaattgctactgcagcagcgtccgggcagacagacgtgcagtgtgcggttcttctctagaaaggcaggagccgctcccagggcgatgtgggcccggctgtttcatcagagatggtcagcttggtacctacttcaccttaaatgatgttcccacagaggccccgggatacttggaaacaagcgcccagcccctctcgcagatggctctgcagttacgactgtcttataaaatattaactgccttgcgktatgtttttagttaacgagatggctctctagccagaaagcacccagggcaggggcactggatggggctctgctgacatggagcgggtgaaagggagggcgtcttcacctcctttgtctgttaagggggctctaagacacctctctgggggtgttgctgattgtgataggacccaactcctgcagtgggtgctcgtcgagcacatctagttgcagggtggaccgggcgaggactgtaccgtccag

SEQ ID NO: 942989 - DNA, 586 bp, Homo sapiens
gcccgggggaccactaccaccaatgcacagagaccagtagtggccccgaatgccaggctgcgctgttatttattggatacaaggcagaaggggcagggtaaagaatgtgagtcacctccaatgataggtaaggtcatgtgggtcacgtgtccactggayggggggcccttccctgcctggcagccgaggcagagaaggagaggagacagagagaaagacagcttacgccattatttctgcatatcagggactattagtactttcactaattgactactgctatctagaaggcagagccaggtgtacaggatggaacatgaaggcagactaggagcatgaccactgaagcacagcatcacagggagacggttaggcctccggataactgtgggcgagtctgactcatgtcaggccctccacaagaggtggaggagcagagtcttctctaaactcccccggggaaagggagaccaccccgcccccctgccgctttcccggtctgctaagtagcgggtgttgttccttgacaccttttgctaccgctggaccacggtccacctggtaacaggcatcttcccagacgctg

SEQ ID NO: 942990 - DNA, 697 bp, Homo sapiens
gtttaactacaaaggagccctggctgcccgccccgcccagacgcactgacctgttgttctctgtggctgctgatggcccgtccccaaccactggtgactcttccctggggccccaagctcagcccctaaccccctgttgctggaagtcagggaccccaaacagagagaccggctgaaaccatggcagaagaacgtggattgtgaagattttatggacatttattagttccccaaattaatacttttgtaatttcttatgcctgtctttactgcaatctctaaacataaattgtaaagatttcatagacacttatcacttccccagtcaatacccttgtgatttcctatgcctgtctttactttaatctcttaatcctgtcagttgaggagggtgtatatcrttccaggaccctgtaataattgtgttaactacaaaaattgtacagcatgtgtgtttgagcagtatgaaatgtgggcaccttgaaaaaagaacaggataacagcaattgttcagggaataagagagataaccttaaactctaaccgccggtgagccaggaagaacagagccatatttctcttctttcaaaagcaaatgggagaaatatcgctgaattctttttctcagcatgggatatccctgagaaagagaatgggcacctaggggtaggtctctgaactggcccccccggggcgt

SEQ ID NO: 942991 - DNA, 710 bp, Homo sapiens
atatcttaatgctccagcccaatcaaagctcaattaaatcgtaatctgtggcatcagcattttgaatacaggcatcagtattttaaaagctttcctggttactatgggaacaatgaaaacattttaatatttatttatttactttttaaacttttattttaggttcaggggtgcatgtgcaggtttcttacatgggtaaaatgtgtatcatggtggtttggtgtacaaattatttcatcactcaggtaataagcatagtacctgattggtagttttttgattgtcaccctcctctaaccctccacactgaagtaagccctagtgtctgttgtttccttctttgtgtccacatttactcaaagtttacctcccacttataagtgggaacatgatgtatttggttttctgttcctgtgttagttttcttaggataataacctgtatagccccatccacgttgctgcaaaggacacgatctcattcttttttatggctgcacagtattacattgtatatatgtactacattttaaaaatccagtatattgttgatgascatttaggttgattccatgtatttgttattgtgaatagtatcatgatgaacatatgtgtgcatgtgtctttatggtacaacaatttgtatattttgggtatatacccaataatgggattgctgagtcaaatggtaattctgttttaagttcttcg

SEQ ID NO: 942992 - DNA, 615 bp, Homo sapiens
aggattctttaatacacccccatgtatggcttcactgttgcaatttccttgaatcttggatgacctatgaaattgagcttaaaattatgagtgaaatttagcgtggcagaaaaagttcggaacccagaatcactatgctggcaaaatatttttgctaggtagagtttttaattataaaagtgtaaaacgaaaataaatcttgggaccccaaagtcactaagccaaagggtaaagtcaagccaggaactgcttagggcaaacctatctcccattctattcctacaccaagatagctactaagataaaaaaagctgcatacctccctcacaaggaatttctttgtggacaaaggacagacagaactcgaagtcacccctctgctcactgagataaatgcatatctgattgtctcctttrgaaagggctaatcagaaattcaaaataatgcaactgtttgtctcttatctacctggaagccccctcccagtttcgggttgtcccacctttctggaccaaaccaatgtactctgttgccaggctggagtgcagtggtgatttggctcactgtaagctccgcctcccgggttcacgccattctcctgcctcagcctgcca

SEQ ID NO: 942993 - DNA, 740 bp, Homo sapiens
tgtggggtgttggggtgttgactttttctgcctccaataggagaggtgactagaccactccagaaaaccaccatcccatgaccagaaagctttgcagataaacgccaagactcaggttagggctcacttcacctaggagcctctccctcagccccagaccagatgaggacggactaacctgtgcacgccacggtcatatttctccatatgtttaaatcacgtgtttaagtgcctgtttacccctctcctgccaagtcataatccaggaggtttcaaagaccaattgcaaaccgagcacagtggctgcaatttagtacattctcaacgtgttgagttgaactgaggaattcgtagaaatcaattaccatgttcacgaacgttaagcccgactgtcatctacccgtttggttccccagctttcttccaattaagaaaacraatgatccactgaaaattgaatgaaggtaagatcaataatagtcttgtgaagcaatttatcccttatccatccatatacgcccagacaccatgggcatttcaacatcttaggcccagtttgttaactttacagataaaaagatttctcagctctcaaatcctatttgacttttaaagcccctactaggactcgaagcagagcaaaatacattttctgcttattcctggagcgtgttatgttttgctgttcagccaagagaagtgcttccttgggattgttgatgatctaaggctgacacctg

SEQ ID NO: 942994 - DNA, 565 bp, Homo sapiens
tagacagtggtgaattctgagattttagtgcacctgtcccctgagtagtgcacgttgtgcctaatgtatagttttgaatccctagccccccttccagcctcccccttgtgagtctctgaagtccattatatcactctgtatgcctttgcacactcatagcttagcttgcacttgcaagtgagaacctacggttttkggtttttcattcctgtgatacttcactacaggtggagaataatggcctccagctccatccaagttgttgcaaaagacattattttcgaacctcaaatttcttgactcatgggaattcaattaactcagttatgccagttatcaattcatttcctgtcagttccaaactcaattttcattgcctgctctgcaaaaatggagtggggccctgtaaatacgtcctttgcagcaggcgggctgctgctccttctcagtagagggcactgaataagaaaggcgtttttctctctctggccctggtgtgcatctcaccaggtgcccacagcaggcagtttctccagcactggcatctgccgtgtccaggggccag

SEQ ID NO: 942995 - DNA, 630 bp, Homo sapiens
gaaccagctggtaaatgttttggtccttggtgcccatatggtctctgtcacaactactcaactctcccgtggtaggacatacgcagccatcacgtagagaacagaaacacaggcgtgtggctttgttacaggacaactgaattcatggctactgaaacctgaatttcagtaactttcatgtcactaaatatttttctttgattatgtgtcaaccatttcaaaacataaagaccccagcctggtcaacatggtgaaactactaaatatacaaaaattagccgggcgtggtggctggtgcctgtaatcccagctacttgggaggatgaggcaggagaatcgcttgaacccaggaggtggagattgcagtgagccaagatcatgccactgcactccagcctgggcgacacagtgagactctgtcataaaataaaataaaataaaataaaacgaaaaataaaaamataaagaccattcttagctcataggctatagaaacccaatgagctgggttcagctatagtttgctgaccccagtctaaatcatctcccagaggtcccagtgagctggagccctgcttgcccgcagcggtaatctggagtgattggctccttcccttccctggtttactt

SEQ ID NO: 942996 - DNA, 619 bp, Homo sapiens
gtgtgtgtgtgtgtgtgtgtgtgtgtgtgtggtttatttaatactattctgtagcataggtaaaaggctttaaaaaaaccttttctgctatctcatttgattctaaagacagtgtctggtcaatggatgggtgatggtattaggaacacaggctgggtgtcaatcatcctccagttaatgcagaaagaaggattcagtgagtgaagtgacttgcttaagggcacacagctctgtgcaggtgggcaacgtgggaaggctcccaggtctctcccttacaaatccccaggcatctggcttcctaagcctgaggccttacttgtcctgcytaaatactactaggtcagcaaaacttgttagccataaagagagaacactaaccctgtgtgtcacaggggattcaggatcagggtggtagaaaccaatagggccattttttcctctgggctgtgctgtttctgccaagcaccttcttgtttttatccataataaaaataagtgctaagtttttcattttacttattttttagattttgggtgtgttgcctaggctggagtgcagtggtgtgatcattactcactgccgtctgcagtcttgactttccaggctcgctacagcctc

SEQ ID NO: 942997 - DNA, 509 bp, Homo sapiens
agctgggattacaggcatgagccaccacacctggcctcaaatcttctcttctagctgttttgaaatatataataaattactattaacataatcaccttactgtgctatccaacactagaacttattccttctatctaactgtatgtttgtacccattaaccaatytgtcttcatccgtgttcctcaccctttccagcctctggtgtctctcactctgctttctacctccatgagattaacttctttagctcccacatatgagtgagagcatgtaatatctgcctttctatacctggcttattttacttaacataatgatcttcagttccatccatgttgctgcaaatgacaggattttattattttttatgactgaatagttttccattgtgtgtatatatcaagttttctttatccattcatctgttggtgattagaatgattccgtatcttggctattgtgaatagtgctgtaataaatatgagggtgcaggtatccctttgacata

SEQ ID NO: 942998 - DNA, 509 bp, Homo sapiens
agctgggattacaggcatgagccaccacacctggcctcaaatcttctcttctagctgttttgaaatatataataaattactattaacataatcaccttactgtgctatccaacactagaacttattccttctatctaactgtatgtttgtacccattaaccaatctgtcttcatccgtgttcctcaccctttccagcctctggtrtctctcactctgctttctacctccatgagattaacttctttagctcccacatatgagtgagagcatgtaatatctgcctttctatacctggcttattttacttaacataatgatcttcagttccatccatgttgctgcaaatgacaggattttattattttttatgactgaatagttttccattgtgtgtatatatcaagttttctttatccattcatctgttggtgattagaatgattccgtatcttggctattgtgaatagtgctgtaataaatatgagggtgcaggtatccctttgacata

SEQ ID NO: 942999 - DNA, 647 bp, Homo sapiens
ggcaagggctatggaagtgaagcaaagtcagaggatggagagatggggagcaagctctgcagatatttggggcagagcatcccaatggcaggggagacagcagtgcaaaggccctgaggtatgcstgtggaatggcaagaaggctaatatggtcaaatgtaccatacagaaaggagaagagaggaataaagcgatgctggagatgtaaccagagctagatcccatagggccttttgtaagaacactggctttaagtccaaataaaacagggagctattgcagaactttgagcagagcatgggtgctatgacttcggttgtaacaggatcactgagtgttggttaaaaagagggggcagaagtgggaacaaggatatctcaaaggccgttgcaataaccctgggaagacgcagtggtggcgtggaccctgcaggtggcagtggaggtgtcagaactgcttggactctgggaagactttgacttttgagtagaagcaatggaatttcctgaggatttggctacagggtgtgggagaaagagaaaggtccagttcacagtgagtgtgctgggctgggggcaggctcatacgggcttgtaagagctaatggtccaggcatttggagagcctgttgtcattatgttggtata

SEQ ID NO: 943000 - DNA, 647 bp, Homo sapiens
ggcaagggctatggaagtgaagcaaagtcagaggatggagagatggggagcaagctctgcagatatttggggcagagcatcccaatggcaggggagacagcagtgcaaaggccctgaggtatgcctgtggaatggcaagaaggctaatatggtcaaatgtaccatacagaaaggagaagagaggaataaagcgatgctggagatgtaaccagagctagatcccatagggccttttgtaagaayactggctttaagtccaaataaaacagggagctattgcagaactttgagcagagcatgggtgctatgacttcggttgtaacaggatcactgagtgttggttaaaaagagggggcagaagtgggaacaaggatatctcaaaggccgttgcaataaccctgggaagacgcagtggtggcgtggaccctgcaggtggcagtggaggtgtcagaactgcttggactctgggaagactttgacttttgagtagaagcaatggaatttcctgaggatttggctacagggtgtgggagaaagagaaaggtccagttcacagtgagtgtgctgggctgggggcaggctcatacgggcttgtaagagctaatggtccaggcatttggagagcctgttgtcattatgttggtata

SEQ ID NO: 943001 - DNA, 656 bp, Homo sapiens
ttttatgccggcaccatgctgttttaggtactatagctttgcagtatattttgaaatcaggtagtatgatgcctccagctttgttctttttgctcaggattgctttggctattcgggatcttttgtgcttccataggaattttagaactttttctatctctgtgaagaatgtcattggtattttatagggattgcattgtatctgtagatcacttttggtaatatagtcattttcacaatattaattatttcaattcatgaatatgggatktctttctatttttttgtgtcctcttcaatttcttttatcagtgttcatagctttccttatagaggtctttcacctccttagctaaacttattcctaagcattttatatatttttgaggtagctattgtaaatgggattgtttttcttgatttcttcttttcagctagtttgttgttgatgtatagaagttcctctgatttttgtatgttaatttcatactctgcaactttactgaatttgttgatcagttctaagagttttttggtggagtctttagtttttcctaaatataagatcatgtcatctgcaaacaactttccactttggatgttctttctttctttgcctagttgctctggctagggtctccagcactgtgtttaat

SEQ ID NO: 943002 - DNA, 679 bp, Homo sapiens
ctgttccattggtctatgtatctgtttttatgccggcaccatgctgttttaggtactatagctttgcagtatattttgaaatcaggtagtatgatgcctccagctttgttctttttgctcaggattgctttggctattcgggatcttttgtgcttccataggaattttagaactttttctatctctgtgaagaatgtcattggtattttatagggattgcattgtatctgtagatcacttttggtaatatagtcattttcacaatattaattatttcaattcatgaatatgggatgtctttctatttttttgtgtcctyttcaatttcttttatcagtgttcatagctttccttatagaggtctttcacctccttagctaaacttattcctaagcattttatatatttttgaggtagctattgtaaatgggattgtttttcttgatttcttcttttcagctagtttgttgttgatgtatagaagttcctctgatttttgtatgttaatttcatactctgcaactttactgaatttgttgatcagttctaagagttttttggtggagtctttagtttttcctaaatataagatcatgtcatctgcaaacaactttccactttggatgttctttctttctttgcctagttgctctggctagggtctccagcactgtgttta

SEQ ID NO: 943003 - DNA, 730 bp, Homo sapiens
catcatggtgtgatgatggcgtaaaccagagagtgactttaaccaaggcatggattagggtgtcttgggattggggacatcagtatagctaagcctttggtggccactccctcctatcccctaatgctgcaattttttcatcaaagttcttcatgctggggttttgcattcctgtaataaacatccatccttgttggtatatttttgtgcttagctaccatgatgactgatgacaaagatggggtgccagtccccatgatgttgaacctccggagamgttttacaaaaaacataaatgattaaaaatagtttcacatgggatacaaaacctcatcaatataaaaggaataaaaatgaaattagagaggtttacatagatagtcttcaaaacaggaaaacagttccacctctggctggattttgtatgaaggtctggggcctcgcaattcattcgtgctttgccccacatgaaaatgatgaaaagaccctaaccacataattgagagcagaaaccagagagcttgagcagcccagactgaaatcctgcctccatcactgagaagctgtgtgatgtcagagaagtcacttcacttctctgaacctctgtttgctcatctgtaaaatggggatgataatagcattgacctaacaagattgttatgaggattaactgagcaaatgtatgtagagttcttggcacaattttggacacgcggtgagtgttcagtaa

SEQ ID NO: 943004 - DNA, 664 bp, Homo sapiens
atgaatacttattagtagagtgtatcagtgacctagaactatagtaatgctgagtaacaaagatctctgaactcaatggcttaatgcaacaagcattcatttgctcatcagtctgtgggacagcgttttaggcttatttcagctggatggtaatcctggcattggctggttgatggatgggtgactcagctctgctctgtgtgtccttcattttcctgaagagactaaagcctaccagggcatgccctgttcttggtgatgrcagatagacaggatgtgagcagaaacacacaagcatgtttcaagcagctgttgtacgccatttccttataacccattggcaaaagcaaatcagggtcagagtgggagggcactgaaaagtcacgaccaagggcatggacatacagaggtgcaaagaactgcatccccctatgtatatcactctaccacacaagcgtttgacaaatccgtgcttctctctcttgcaggaaaccagagagtatgaggtttctatctaaagagagctacacttgagaaggggacttgtgaactcaaccacaatctcctcgagacattcatccagagaccatgtggcacttgattgaaaccccagaatgtcgactgtcttttgtttagactctttatcaaaggtttactgttttct

SEQ ID NO: 943005 - DNA, 712 bp, Homo sapiens
tgagaagtcaactgggaaggctattcatttattcaacatataattattgagcatatactatgctaagcccactgaacatacagcagtgattgtataccagcagcctctgcgttaaatccagcacaaagatatgcttaatgtggcctgcacagggttttaaaaattgccaacatttaaaaattaggagacaccatataaaaatctagattttcagtttctcttggaaaacagcaatatctggtcaccctgggtcagatttctgcaaaacagcaaattggctggtgtgtggtttgctgcagtgctcacccaatccctcttgctctccagctccagtgacaattgtcacttgccattctcatcctctttgcactatgtatgagtacgtgtatgaatgtgtgtgtgtgtgtgtgtgtgtgtgtgtgtgtgtgtgtgtgtgagtgtttatagtaaggaaatatttctctgctcccacgtctctgtcaaaaggggaaaaacaaaagccagaccaagagggctgaatgatttttattagtcttggccccttctcttgtttctgttacytgtcatgttccaaagacacttgagtttgcggctcctggaacacaatgatgccaaaaaccaaaacaacaaaacaacaaaaaaagagtctgcctcagggagtttgcaggaggaaggattaaacttgacaacctaaggtaatccctcacccagg

SEQ ID NO: 943006 - DNA, 771 bp, Homo sapiens
agactagtaacaggcggagactaggaacaggggagatgtcatccccttgggcctgaatggacaaaggaaggctaccagaacctggagagtggctaccagaacctggagagacccatattgtttagagagggctggattattctcataagggacacagtcagcttgtggtaactccacaaagagaaagccagaagaaatgacctcactctcctcccacctttttatttcctgcyggggctgcctgtagagtatacctaactaaaagccagagagaggacgctcattgatgggagctacacagttagcctccaggaacctaggacagagaggaggtggccatagagtggcttttggcagggcacaagatactcaattcaccatccaggacacaggacaagaaaatagcatccctatttgtagtagtagggataagattcaggtgtggtgtctgtagacaatattatccaattcctccaacttccggggagaataaccgcccggtttcaggaagcccagggaccaaagcaaggagaacctttgggatccggcaaaggatctgaatagataagctattcagatgcccattcagcgctgccaagatggtgcaagagacaccttcgattggtagggtgtccctcgagagatgttcctgatctgctattactggaatttgcaactcctgtaaaaagctgcctggggcatgagtcacccagtcgctgtccaaaccactgcctctgcagcacaccattccattccccgattctcctctct

SEQ ID NO: 943007 - DNA, 651 bp, Homo sapiens
agtgagttctcatgagatctgatgggttgttttttgttttttgtttttttgtttttttgagacagaatttcacttttgttgctcaggctggagtgcaatggtgtaatctctgctgactgcaacccccgcctcccaggttcaagcaattctcctgcctcagcctcctgagtagctgggattacaggcgtccaccaccacgcctggctaattttttgtatttttagtagagatggggtttcaccatgttgactaggctggtctcaaactcctgacctcaggtratccaaccgccttggcctcccaaagtgctggcattacaggtgtgagccaccacacctggctgatctgatggttttataagtgtttagaagttcctccttcattcttctctctcctgctgccttgtgaagaaggtgcctgcttccccttccaccattattgtaagtttcctgaggcctctcaagccatgcagaacagtaagtcaattaaaccccttcctttataattacccagtctcagggaagttctttatagcagtgtgaaaacagactaataaactgaccctgcagggactgactctcccagggctagccaattcctaaagatagtaaatgactcacctgcaggcatatctttcatatgccaactgtt

SEQ ID NO: 943008 - DNA, 651 bp, Homo sapiens
agtgagttctcatgagatctgatgggttgttttttgttttttgtttttttgtttttttgagacagaatttcacttttgttgctcaggctggagtgcaatggtgtaatctctgctgactgcaacccccgcctcccaggttcaagcaattctcctgcctcagcctcctgagtagctgggattacaggcgtccaccaccacgcctggctaattttttgtatttttagtagagatggggtttcaccatgttgactaggctggtctcaaactcctgacctcaggtgatccaaccgccttggcctcccaaagtgctggcattacaggtgtgagccaccacacctggctgatctgatggttttataagtgtttagaagttcctccttcattcttctctctcctgctgccttgtgaagaaggtgcctgcttccccttccaccattattgtaagtttcctgaggcctctcaagccatgcagaacwgtaagtcaattaaaccccttcctttataattacccagtctcagggaagttctttatagcagtgtgaaaacagactaataaactgaccctgcagggactgactctcccagggctagccaattcctaaagatagtaaatgactcacctgcaggcatatctttcatatgccaactgtt

SEQ ID NO: 943009 - DNA, 629 bp, Homo sapiens
aaaatggtggaatgggtcacagttacaccaccaactaggtgacagtactttacagggccgggagcaaatttctccagaaggctgtgtatgctgtgtatcagtgtcccatatgtggtactgtttctcccatagccaggattcatgggtccgggaatcaaggggtggaagtggaagtggcaccacttaccatcacccctagtgacccactagcaaaatttttgcttcccgttcctgtgacattacattctgctggcctagaggtcttagtttcagagggagggakgctgccaccaggagacataacaatgattccattaaactggcagttaagattgccacctagccactttgagttcctcctatctctaagtcagtgggctaaaaagggagttacagtgttggctggggtgattgacccagactatcaagatgaaatcagtctactactccactctggaagtaaggaagaataggcgtggaatataggacaccctaagagcacttcttagtattaccatgccctgtgattaaggtcaatgggaaggtacaacagctcaatccaggcagactacaattggcccagacccttcaggaatgaaggtttgggtcacttcaccaggtaaaaaacc

SEQ ID NO: 943010 - DNA, 627 bp, Homo sapiens
cagacccttcaggaatgaaggtttgggtcacttcaccaggtaaaaaaccatgatctgccaaggtgcttgctgaaggcaaaggggatacagaatgggtagtagaagaaggtggtcatcaataccagctatgaccatatgaccagttgcagaaacaaggactgtaattgtcatgactgtttcctccttattttaagaacatgtttgtgcatgtatacacttgtactaagaaaacatcttcattttatttcctttctttttcctttatcatgtgacktagatatttattgacttcatatcagcatttaagtattgttaactttatgtaatagcatttgggttggggattggtgcatttccagttgtgcaaaggatagctgtattatgttaggcataattatgaccttattattgcctttatttgaagattatgtatgatttcagaaaatatgtatgggttcaagttgacaagggttggacttgtgatggttaatagtaagtgtcaacttgactggattgaagaatgcaaagtattgttcctgggtgtgtctgccaggctgttgccaaaggagattaacatttgagctagtggactaggaaaggcagatccacccataatctaggcgggca

SEQ ID NO: 943011 - DNA, 576 bp, Homo sapiens
attttttttctaattttgtgaagaaagtcagtggtagcttgatgcggatagcattgaatctgtaaattactttgggcagtatggccattttcatgatattgattcttcccatccatgatgagcatggaatgtttttccattttttgtgtcctctctcatttccttgagcagtggtttgtagttctccctgaagaggtccttcacatcccttgtaagttggattcttaggtatttaattctctttgtagcaattgtgaatgtgagttcactcatggtttgcctctctgttggtctattattggtgtatagaaatgcttgtgatttttgcrcattgattttgtatcttgagactttgctgaagttgcttatcagcttaaggagattttgggttgagatgatggggttttctaaatatacaatcatgtcctctgcaaacagagacaatttgacttcctctcttcctatttgaataccctttatttctttctcttgcctgattgccctggccagaacttccagtgatgtgttgaataggagtggtgagagagggcatccttgtcttgtgccagttttcaa

SEQ ID NO: 943012 - DNA, 798 bp, Homo sapiens
tttagtagagatgggcttttgtcatgttggccaggctggtcttgaactactgacctcaagtgatctatctcagcctcccaaagtgctgggattacaggtgtgagccactgcacccagccagaaaatgctacattatggtcatctttcctttttgtaagcaagtgtagcacgtccactttcaccctccagaaggctggatggagaggaaatcttcaagccaaactgtccacagagccctctgaacccaacagagtgggaacacatgacagatgactttgaaatgaggcaagaaagtcaaaatcactgactttctaggaaagatctaaggcttctgcactagattaagcaagtttacagaccgggccatttcttttggcaccaggattcccatcaacccattgacacttgagtcttcattgccagrggcaccccaaaggtcaaagaaaacatgtgtcacgaatataaaaaagatatattcagtggagctagtgctatgaagaatgacataaaactgctgtattaggaagacgggaagcaggaagaacaagcccttcactgatccaactgctgtttactgagcatttactatctgtcaagcactgtagtaggtgctggaatgtcagttaagcaaggtaagccaggcctgtcctcacttggagcttcctttcacttcaggaaaggagacacaggtgataattaaggaaacacattaataaacaagataactttagactgcaggtaagtgcctaggtggaaaatgaattgtggtgatgctgtagacagtgtgggcaggctggc

SEQ ID NO: 943013 - DNA, 494 bp, Homo sapiens
catagttcactgcagccatgaactcctgggctgaagtgatcctctgacctcagcctcccgagttgcagtgactacaggtgtgcagcaccacacctggctaatttttatttttattttttattttttacagagatggtgtattagtccattttcatgctgttaataaacacataccagaaactgggaagaaaaagaggtttaattgaacttagggttccacacggcttgggaggcctcagaatcatggcrggaggtgaaaggcacttcttacatggcagcagcaagagaaaatgaagaagatgcaaaaaaataccctgataaacccatcagatctcatgagacttagtcactaccacaagaacagtatgggaaaaacagcctccatgattcaaattatctcccaccgggtccctcccacaacacgtgggaattatgggagtacaattcaagatgagatttgggtggggacacagagccaaccgtatcagctggaa

SEQ ID NO: 943014 - DNA, 711 bp, Homo sapiens
tcaagatagaagctataatgacacagcttaggaaagtgggaattttaaatgaaaagttccagaagaaacagaaaaggtcagctaattcattctcttgcctctgttaatcaccacagcaactgcgtttcaaacatttatgtttctcatttccaattaagccaaggagattrccacatctggtgaagggtaaggatggagtttaggacaattaaacgtttagcactgaatatatttgatagagcatttttgttacggttttttcaaatagatatgattttcaaaccgcatgcccagagcctcggtctgctagagatgcgacaaggaccattatagggaaacactggggcaaacagatcatcacccgctttctgctctccactctataagcagctcctcctttctctctctcataataccagggcttaagaaagaggtgttctgttacttaaagaagttgaaatagcattgttttaatctatctaataccaagaagacatgaaagcttattgtagaatatttaaacagggaaacctgctcatgacctgttactaaattttaaatgtggtaacaaagaagtatgaacattataagccctttttgtaaatatactcagacacaaaaagaaaaagatgaatgaatgtttaacaaataatattgagagctgaatactagggggtacagataatttttattttattatttttgcttctc

SEQ ID NO: 943015 - DNA, 711 bp, Homo sapiens
tcaagatagaagctataatgacacagcttaggaaagtgggaattttaaatgaaaagttccagaagaaacagaaaaggtcagctaattcattctcttgcctctgttaatcaccacagcaactgcgtttcaaacatttatgtttctcatttccaattaagccaaggagattaccacatcwggtgaagggtaaggatggagtttaggacaattaaacgtttagcactgaatatatttgatagagcatttttgttacggttttttcaaatagatatgattttcaaaccgcatgcccagagcctcggtctgctagagatgcgacaaggaccattatagggaaacactggggcaaacagatcatcacccgctttctgctctccactctataagcagctcctcctttctctctctcataataccagggcttaagaaagaggtgttctgttacttaaagaagttgaaatagcattgttttaatctatctaataccaagaagacatgaaagcttattgtagaatatttaaacagggaaacctgctcatgacctgttactaaattttaaatgtggtaacaaagaagtatgaacattataagccctttttgtaaatatactcagacacaaaaagaaaaagatgaatgaatgtttaacaaataatattgagagctgaatactagggggtacagataatttttattttattatttttgcttctc

SEQ ID NO: 943016 - DNA, 720 bp, Homo sapiens
ggtctgcgggatatttctgtgcgatggattcctcctgccccactgagctgcggctttggtttttataataagatggtggcggcgggaggagccaagatggccgaataggaacagctcctgtctacagctcccagcgtgagcgacgcagaagacgggtgatttctgcatttccatctgaggtaccaggttcatctcactatggagtgccagacagtgggcgcaggtcagtgggtgcgcgcaccgtgcgcaagccgaagcagggcgaggcattgcctcacttgggaagcacaaggggtcagggagttccctttccgagtcaaagaaaggggtgacagacgcacctggaaaatygggtcactcccacccgaatactgagcttttccgacgggcttaaaaacggcgcaccacgagattatatcccgcatctggctcagagggtcctacgcccacggagtctcgctgattgctagcacagcagtctgagctcaaactgcaaggctgcagcgaggctgggggaggggcgcccgccattgcccaggcttgcttaggtaaacaaagcagccaggaagctccaactgggtggagcacaccacagctcaaggaggcctgcctgcctctgtaggctccacctctgggggcagggcacagacaaacaaaaagacagcagtaacctctgaagacttaaatgtccctgtctgacagctttgaagagaacagtgg

SEQ ID NO: 943017 - DNA, 738 bp, Homo sapiens
ccaggatgaccttgatgagacgtagtcgggcctcaggaggcactcccgctgctatcccgctgccggccagcagcttggccacctggctgcacagcgacgccaccgtcagcttcgccagagggaaggactgcagaatccggccctcctgcggggggcgcttctgaggctctggggacgtcgtcctagtggggaagagcgacagcggacgcagcagccggtggtaaaaccgctggagctcaggctcgggcttcgggggctccatcatagagccggcggccgccaccgtccaggaacagaaagccgaggggttactaaggcaaccaggagcccgacggcccgagtgcgcytgcgcggccgccacccggtggctgacgaagcagggccttgcgtgcgcacgcactaggaggaggagttaagggtggctttagaggctcagtccccgcgacgccgcgctggttggtgctcctgcgccggaggagttctgcgtctcggggtggtgactgggtccagaatggcttcggattcggggaaccaggggaccctctgcacggtgagggtcgaggcttcgtgtggagcctcgccgggcagagagcctcggcccctgggatgatcgttaccttgggaagaggagaaggagtgggcacttgggttggggcctggggccatgggatgaaactagggtgcgagggtagcaggggccctgcgtgagtgttggggggtgactcccatggtcctgga

SEQ ID NO: 943018 - DNA, 749 bp, Homo sapiens
acatctcaggtgattaaaagtaacccttaggtcacagtgaaagactctggcatggaacatttgttataacctgaggattatctccacatagatcttgagagataatgtcttgtcctcaatggtaaggcggcatgggatagttggaatagcaaggctgtagaattggattgacttaggcttaaaacctcctgtctcagttataagctgtgtgaccttggcaagtttaggaacccctctgaacctctatttactgtaatgtgcaaataagaaaatctgtctcttagagttgttgtaagaataaagtgaaatacatggcatatgaaaggcgataagtggatatttgtaaaccaacttcataacctgactagctataaaagaaaatatttagctaagatacttccggctgtaataattcttgattctctgattttatttgtataaaattaataaaatatgtattttaaagataactatataactacagagttcttggttgtcatgaattactgcttgctaaatcccctttgctggacatgtcaakttagagaaccaatggagaaggctttataccagatagtgcttgtagttctctgatctaagtccgtttcattatttcagtctttccagactctcctggggcttatgaagctgagtcaccatccccacctcctcctccgtctccacctcttgaaccagtgccaaagactgagcctgaacctccttctgtcaaggtaaaattatactgggat

SEQ ID NO: 943019 - DNA, 565 bp, Homo sapiens
ctcttcactgacaatatgattttatacctagataaccccaaagactccaccaaaatgctcctggaactgacaaataactttagtaaagtttcaggatacaaaatcaatgtacaaaaatcaatagcatttttatacattaataatattcaagctaagagccaaatcaagaatgcaatcctatttacacttgccacagaaaaactaggaatacttctaaccaagatggtaaaagatctctccaaggagaactacaaaatattgctgaaataaaccttagataacacaaaaagaattccatctcatggattggaagaatcaatatcattaaagtaaccatactgcctayggcaatctatagatccaatgctattcctatcaagctatcaacataattttagaaaaaattattctctaattcatgtggaaccaaaatgagcctgagtagccaaagcaatcttaagcaaaaagggcaaagctggaggcatcatattaccagactttaaactgtgctgtaaggctacagtaaccaaaatagcatggtactggtacaaaaacaggtacatag

SEQ ID NO: 943020 - DNA, 629 bp, Homo sapiens
aagccacaaaaaccagcaagtttttagagggagtgtgtgaataggtgtgggtgacagacatcaagtacttaacagggtaatagaataccacaaggcaagtggaggcagggcgagaccacaggaccacatgaccgaggcgaaattaaaattgctaatgaagtttcgggcaccattgtcattgataacatcttatcaggagttggttttgagatcaaccrgtctgaccaaaacttattaggcgggaatttcctcttcctaacaagcctgggagtgctatgggagactggtctatttcatctctgcagcctcaaccataagagacaggcgcacctggggaagctgtttataagcctatacctccaggcacgtattctctttctcagggatgttccatgctgaggaaaagaattcagcgatatttctcccgtttgcttttgaaagaagagaaatatggctctgttctgcccggctcaccagcagtcagagtttaaggttatctctcttactccctgaataattgctgttatcctgctcttttttcaaggtgcccacatttcatattgctcaaacacacatgctgtacaatatgtgtagttaacgcaattatcacatggtcctgaggtgatata

SEQ ID NO: 943021 - DNA, 543 bp, Homo sapiens; identical to SEQ ID NO: 925294

SEQ ID NO: 943022 - DNA, 543 bp, Homo sapiens; identical to SEQ ID NO: 925295

SEQ ID NO: 943023 - DNA, 740 bp, Homo sapiens
ggaggccttgggtcacttggtggtggggtatagcaggcctactatcttgtttttggctgcctacatctttttttctttcttttttttagagacggtcttgctctgttgcccaggctggagtgcagtagtgcaatcacgacttactgcagcctcaaactgtttggcttaagtgatcctcccatctcaggctctgcagtagctgggactatggttgcgagctaccacacctggctaattttcgtattttttgttgacatagggatcttgctctattgcrcaggctggtcttgaactcctggtctcaagtgaacttcctgccttggcctcccaaaatgctggggttacaagcataagccaacacacctggtctgcctacatctttttttttttttaatttttatttttttgttttgttttgagacagggtctcactctgtcacccaggcagaagtgcagtggtgcgttcttggctcacagcaacctctgcctcccaggttcaagcaattctcctgcctcaggctcctaagtagctgggactacaggtgtgtgccaccatgcccagctaatttttgtatttttagtagagactgggtttcaccatgttgggcaggctgttctagaactcctgtcaagtgatccgcccgcctcggcctcccaaagtgctgggattacaggcatgagccactgtgcctggccttaaatctttttaagacagatttttgctatggaaatttcacaac

SEQ ID NO: 943024 - DNA, 548 bp, Homo sapiens
ctgggactatggttgcgagctaccacacctggctaattttcgtattttttgttgacatagggatcttgctctattgcgcaggctggtcttgaactcctggtctcaagtgaacttcctgccttggcctcccaaaatgctggggttacaagcataagccaacacacctggtctgcctacatctttttttttttttaatttttatttttttgttttgttttgagacagggtctcactctgtcacccaggcagaagtgcagtggtgcgttcttggctcacagcaacctctgcctcccaggttcaagcaattctcctgcctcaggctcctaagtagctgggactacaggtgtgygccaccatgcccagctaatttttgtatttttagtagagactgggtttcaccatgttgggcaggctgttctagaactcctgtcaagtgatccgcccgcctcggcctcccaaagtgctgggattacaggcatgagccactgtgcctggccttaaatctttttaagacagatttttgctatggaaatttcacaactatgcaa

SEQ ID NO: 943025 - DNA, 574 bp, Homo sapiens
atttggccccagtgttccttggagtgtgagaagatttggactttcaaaatcgaactaccacagaaactgctttacccaaaattttggttcacagccttcactggattacacattgggacacagtttagccatgtgaatatgttaatagaccattccatgtgaaatttctgagattaaagctattagagctttgtttatgtatgtgaatgcattacatatttcgatktgtttatgtatatatacaattattatattacattgtgtaccaaattagcctagaaataaagtaaacaagtacttaataaataaagaagtccaaacaattttcaagttcatgtgacataaataaatctgtcataaaaaagctggctttaaaattattaatcagataaaaactaaaatgtattaaaaattttcagcatatatttttgtctgagtttcacgttggtccttgctaaatattttgaggtgtcagggtttggcacaaaaggttagaaaactgtaaaccatacaaaaatcaaaaagggctttgtacgagttttttgacaaataagacatttaatattgttagttt

SEQ ID NO: 943026 - DNA, 602 bp, Homo sapiens
cattctggcagttcctcaaagggttaaacataaacttaccatatgacctagtaattccacttctaggtaaatctaagagatataaaaacatttgtccattcaaaaacttctacattaatcttcatagtaacactattcttaatagccaaaaggttgagacaacctcagttttcattaacaatggataaataaaatgtagtatattcatacaataggataacattaatataagaaataaagtattgaagtatgctccaacatggattaatcttgaaaacattatgctaagtgaaaaaagtcagccacaaaggactacatattgtatgattccatttatctgaaacgtccattaaaggcaaatacatacaggcagaagttrgactggtggttgcccagggctggggatttcaggtgcaagaggaaacaactgctaatgaatatggagtttcttgttggggtgtcaagtacgttgtgaaattttttttgccacgatggttgtacaactcagtgaatatatattttaaaaaacactaagtagtaccctgtaagggaataaattgtatgttaagtaaaatatctcattaaaattgtgtcaaaattat

SEQ ID NO: 943027 - DNA, 642 bp, Homo sapiens
agggatgtggttaccttttggaggaggttgacggtttctaaggatgattctttctgagtgaaatattgtcagtgtcattgaccttttcattatttcaactattattattccaggttatcaatactctggctgaccatcatcattgtgggactggctttcgtggaagtccttggttacatttcattattgcgtttccgagaagttataaagttttcattatcctctggacagtttacctttgggtgagtatactaactttctgtagaggtatacttgtaatcacaaataagaataaattatataaaacaattcacgtttctggacttcattatgaatatgtggttttacccaaaaaatcagggaaatgatttattagcataagaattatgaaaatatctgccatttrcattacaaaaattaaataggtcggtgtttgtttaatagaatgtcaacagagcttttggtgaaaaataagcttttttaacctttgtgctatttattacaaatggagtatgaggtttcgtcacttaaaaaggaaattctttctaaactcttctgctttatagttctatcgtatgggtggaaggaaagcttccaatctcctctctgaagattcactgcagaaatgagctgacaacagac

SEQ ID NO: 943028 - DNA, 642 bp, Homo sapiens
agggatgtggttaccttttggaggaggttgacggtttctaaggatgattctttctgagtgaaatattgtcagtgtcattgaccttttcattatttcaactattattattccaggttatcaatactctggctgaccatcatcattgtgggactggctttcgtggaagtccttggttacatttcattattgcgtttccgagaagttataaagttttcattatcctctggacagtttacctttgggtgagtatactaactttctgtagaggtatacttgtaatcacaaataagaataaattatataaaacaattcacgtttctggacttcattatgaatatgtggttttacccaaaaaatcagggaaatgatttattagcataagaattatgaaaatatctgccatttgcattacaaaaattaaataggtcggtgtttgtttaatagaatgtcaacagagcttttggtgaaaaataagyttttttaacctttgtgctatttattacaaatggagtatgaggtttcgtcacttaaaaaggaaattctttctaaactcttctgctttatagttctatcgtatgggtggaaggaaagcttccaatctcctctctgaagattcactgcagaaatgagctgacaacagac

SEQ ID NO: 943029 - DNA, 545 bp, Homo sapiens
acttgtaggaaagacagtgcctggatttcacttaaaggaactaaaatgttggaatttttactcttgatatccttccaaatcaactctctcaatgttcccatcctcaaaactatcatatggggtaactgaggcagtcagaggtttactgactcaatgtcactcaattgattctgagttcactgctgattacatccgaccaaactgctttttctgaagtctactctgtttaatcatgctggtgatgattttgtgcagctctgggacaaactccacctggctgaagataaagcaaatctgcggtgacttagtcctcctgtcatttcccatcagttccccactctcctcctctgcccctccacagtctcccatgcaggctgacactatatgacggccktaatggagtccaccgggtatttcagtttctctcctgggccacttgaaagtggatgtacccatgggatttgctttgacccaggagatgtgagtggaagtgaagcgtgtcacctcgaggcaaaagagttgggagccattgagactggccaccc

SEQ ID NO: 943030 - DNA, 765 bp, Homo sapiens
atgccagggcagtggtcacctgtgccagccccgtgaggtagctggaggatcattgttccttccttctcgggctctgggcagatgccagggctggggtgacccatgccctcaagtttcttgctttggtgggccacattttcccttggcaaagagggtaaaggtcacaggatgccggagagctgtgacttctctgtgccctgggcccaaactatgaagacctgacacactatgctaaaagtccaaggctgggtgctccccagagcttcttgcctcaccgcttctgctgagggaggaatgaatactatgtcctcccagagctttgggagcttgtagcaagcagcctccccagcgcaaaatctcttggaaacctctaactgtgtctgaaacattagtgcaaatgttgcatcctatttctcatatgtccgcatgttttaggaaaaaaccctcaatttcctaaatatgcaagaaaaatcggtattgtaggacaatgtgactttttaaaraatgttatttaaaaatcttccctacctccttttctgccctccaagactgccaaatacttgttgaacatatattattaaatgcctactacatgccagccatgattcatggtcttggggacacagcagggaatgaactgacaggattcctctcttatgtaactcacattcttatatgataatgataagggttaacattaattaagctgtcactacgtgttagtcacggtgcagtcattcccacacattattacacttaaacctg

SEQ ID NO: 943031 - DNA, 582 bp, Homo sapiens
tacatagccttgacattacattaggtattaaaagtaatctagagatgatttaaagtatacaggaggatgtgggtaggttatatgcaaatactatgccattttatatcagggacttgagcatccatggattttggtatctgcgagggtcctggaactaatcctgcttggatactgagggatgtccctatagtacaacttagcaaaatgttaccattgatgaaaactgggcaaagcatacaaatgatctgtattatctctaacaataacatataaatctagggccgggcgtggtggctcacacctgtaatcccagcactttgggaggccgaggcgggcagatcatgagatcaggagattgagacccccatccttgctgacatggtgaaaccctgtctctactaaaaatacaaaaaattagscaggtgtggtggtgggcgcctgtagtcccagctactccggaggctgaggcaggagaatggtgtgaaacccgggaggcggagcttgcagtgagcagagtttgcgccactgcactccagcctgggcgccagagtgagaccgtgtcttaaaaaaaaaaaaaaaaaa

SEQ ID NO: 943032 - DNA, 583 bp, Homo sapiens
accactgatgggtttagagtaggtatttccaaggtcttgtatctagtgggtaagatatttttaaaattgtcgtggatacataataggtgtatgtatttatgaggtacatgagattttgatgcaggtatataatgcataataatcacatcagggtaaatagggtatccatcacctcaaacatttatcctttctttgtgttataaacaatccagttatactcttttagttgttttaaattatacaataaattattatygactgtactcaccctgttgagctatgaaatagtagatcttattcactgtatctaactatatttttgtacccattagccatccccacgaccccagccacccctgccctcccctactacccttcccagtttctggtaaccatcattctactctctatctccatgtgttcaattgttatcattttttttttagctccccaaaataagtgagaatatatgaagtttgtctttctgttcctggcttatttcacttagcataatgatctccagttctatgcatgttgttgtaaatgacaggatctcattctttttaatggctgaatagttctc

SEQ ID NO: 943033 - DNA, 837 bp, Homo sapiens
atggaggacagagcgagactccatctcaaaataataataataataataaagaaagaaaatttactaagtctctataagaatagtaagagtctgtgacatttatgcagaattccaccacctacttacaacaaactccatctcagtgtgatggaagctctgctgtaggtgggagtgggcaagaacaaagagcttctactctcccaagctccagtctagggctacagtttcttcctggagaagcaagctgctagaatttcttattcctcactccccagctccatgttgcagaagctctattatgggcagaccaagaatattgggcccagtggttttcactttaactcacttttatagtcttgtttccatgccagaagagaagacaaaaaaagatcagggctaccacctcctcccaatgccccacacataaaacagggatatcactccaacagaagcaggcctttcttccttccctcagctctagagcagtgaaacagaggtttttcccagggggacaggcaggctgtgagaatagagaactccataggtctccctaagggcactgattttatttggaacaaagtgtggtaaagttgaagtccaaggctgctatcaaaawcaatggagattttggtagtaagcaattatgaggaggctggtagcttcatgatagcaataagctaaaccacagaacagaaagaattagggaaagagatagctaacaaaagcctttcctgggattgaaacaagcctcaaagactgtctttgcaaaggggttcaaatttaattggattaggctgtggagcaatttatggcccagagcattgctgaaaacaataa

SEQ ID NO: 943034 - DNA, 646 bp, Homo sapiens
aagaaatttctaagtggcaaagtgttcaagaggtgacagagcataaaagttcgtaaaattggccaggcatggtggatcacacctgtaatcccagcactttgggaggccgaggcaggcagatcatgaggtcaggagatctagaccatcctggctaacatggtgaaaccccatctctactaaaaatacaaaaaattagccaggcatggtggtgggtgcctgtagtcccagctactcgggaggctgaggcaggagaatggctgaacccaggaggcggagcttgcagtgagccgagatcatgccactgcactccagcctgggcaacaaagcgagactccatctcaaaaaaaaaaaaaaaaaaagtttataaaatttgcagcctgacaatgtggtagaaaataaaacacattcccckggggagaatttcaaatctactacagaatttggcctaattattgaaaacccaatttttattcttcaaaacaagggggaaattgtctcggggcttgtaagagacctttcacagcagcccctccccgtcacaggcctggaggcctaggagggaaaaatgattaatggacttggcccaggggcccccctgttctatgtggccacatagaaagaacatggtgtcctgttgcccacctgc

SEQ ID NO: 943035 - DNA, 646 bp, Homo sapiens
aagaaatttctaagtggcaaagtgttcaagaggtgacagagcataaaagttcgtaaaattggccaggcatggtggatcacacctgtaatcccagcactttgggaggccgaggcaggcagatcatgaggtcaggagatctagaccatcctggctaacatggtgaaaccccatctctactaaaaatacaaaaaattagccaggcatggtggtgggtgcctgtagtcccagctactcgggaggctgaggcaggagaatggctgaacccaggaggcggagcttgcagtgagccgagatcatgccactgcactccagcctgggcaacaaagcgagactccatctcaaaaaaaaaaaaaaaaaaagtttataaaatttgcagcctgacaatgtggtagaaaataaaacacattccccgggggagaawttcaaatctactacagaatttggcctaattattgaaaacccaatttttattcttcaaaacaagggggaaattgtctcggggcttgtaagagacctttcacagcagcccctccccgtcacaggcctggaggcctaggagggaaaaatgattaatggacttggcccaggggcccccctgttctatgtggccacatagaaagaacatggtgtcctgttgcccacctgc

SEQ ID NO: 943036 - DNA, 646 bp, Homo sapiens
aagaaatttctaagtggcaaagtgttcaagaggtgacagagcataaaagttcgtaaaattggccaggcatggtggatcacacctgtaatcccagcactttgggaggccgaggcaggcagatcatgaggtcaggagatctagaccatcctggctaacatggtgaaaccccatctctactaaaaatacaaaaaattagccaggcatggtggtgggtgcctgtagtcccagctactcgggaggctgaggcaggagaatggctgaacccaggaggcggagcttgcagtgagccgagatcatgccactgcactccagcctgggcaacaaagcgagactccatctcaaaaaaaaaaaaaaaaaaagtttataaaatttgcagcctgacaatgtggtagaaaataaaacacattccccgggggagaatttcaaatctactacagaawttggcctaattattgaaaacccaatttttattcttcaaaacaagggggaaattgtctcggggcttgtaagagacctttcacagcagcccctccccgtcacaggcctggaggcctaggagggaaaaatgattaatggacttggcccaggggcccccctgttctatgtggccacatagaaagaacatggtgtcctgttgcccacctgc

SEQ ID NO: 943037 - DNA, 545 bp, Homo sapiens
aactgttacgggatctttgaggtgtcaattttctttctggaagcctctgtagccggtggcaatctttggggtgtcaattttcttcctgaaaacctctgtggccagtggcacctttgccctgagttcttgtcctgcgtccaggaagaataaagaataaagtatgcagacaggtgaagggtgaagaagataaagaggagctttatttagtgttasaacagaagagacccacagtgggcagctcctctctgtagtcaggtcggctcctaggcaggccctctcctcaagtactcagctctcagcagagagaaagccctggaaagcgtggctcatctctgcaggcagatcatttggaagtctctgcaggtctctgaagctctcagcaggagggtagctcctctctgcagcgggtcatcccatcatctctctgtcctctgccctctgccctgctctggctgagctgccggcttttatggatctcagaggggaggaaacgctagccgattgttccatgagcagccatgggcaggcctggaagaggcaccaca

SEQ ID NO: 943038 - DNA, 636 bp, Homo sapiens
tgtgtgaataaaagggaggttaacttgcacaagttggggctgggtatagtgtcatttatgttccagagttatcttttggacaaagcctgacttcacctgaatcacatcttcttcaagcatcaccccattgtaccgtttgcctcattcccttatagttttctcctgagagcacttcctcactgcattatttgcatcagaatcctcttctcaasttctgcttctgtggaacctggccaaagacagttggtaacaggagtggtcacaaaaagcaggccataataaggaatattgcattggattgttcaactggctaaatgtcaatgagtaccctatggtggtatttggagtactgaccgttgctgatatgtggtagcagtgtgattgttaaaactttcaattgtggtgaacttggacttagaagaggtggaagatgaatttgcttgtgggtatctctgactctgagaaatgcagagatgatagtgatgataaggattgtggcattggatggctgttgctaagcatgattggagcaccaaagacagaaaatagcaggctcgtatttattaatccaaaaatttagagcaaagtgtgagtcagaggcctttcttggcagcatttagaaataccttcatttct

SEQ ID NO: 943039 - DNA, 747 bp, Homo sapiens
tcagcttcgatacttccccagtgcctgcgttgctgatctttcctcagtacctcacagatatctgagggctgtattcttttcaagattctggaagagtatctgtttctttgcctttttcagcttctagaggctgcccatgttctgtgacgaccgccgcttcctccatcgccaagccagcagcatagcatcttcagacctccgtctgatcatgacccctgcctctgtcactttatctgcttctctccatctattcctttctttcgcattttactataagtagccaaaagaaatgagggtgcactttgaacactttgctaggaaatctcagacaaatattcaagctcattgcttacaagttctgctgtccaattaacggcgtgacacaattctgccaagttttctgccactatataatgagaattccctttcctctagtttccaggarcaagttcctcatttcctcctgagccctcaccagcagcactttaatgtttataattctactaacattatgttaatgaagattgaggtattctctacaacaacatacattttctctaacgtgccccccacctctttcagaacccttggcagcagaacctttaacatccatatttcgattaacaggctgatcaagtttatataagcctttttcttgtgttccttaaaatttttccactctgtgcccactgtccaattccaaagcaacattcacacttttaggtatttgtcgcagcagaacttcac

SEQ ID NO: 943040 - DNA, 615 bp, Homo sapiens
aaaagagaggcccaaggttcaggatagagaggctagtcctctccactcactgttggagtagatacccaggtgaatttctcatcttttgcttggtggatgttactctttaatctggcactttatgtccacaacttacctgcaacatacctttytaaaggtctctctcactacctctttttcagctccctatccatgatccttttttcttttctctctctaggtcattccctctgacataaatgctcatttcttccaatttccacacattcaaattatatctacttttagcatccagctcaaataaatgccattcataattcccttctttcaactctctcctttttgaatgctcatatagttatatatatgggtctctactagggttcatgttctacttacagcagagattttatgtatacacccccatctaccttaaaatggaatacctaatgaatactcaataaatatttaataagtaaattcttcttcttataatagtggccaccacagaccctcacagacattctatttgttcaacaaactgttatccatggtacaagggacaaatctgtacaaacagtcctaactcaaatccactaagtgagcaaccagccg

SEQ ID NO: 943041 - DNA, 615 bp, Homo sapiens
aaaagagaggcccaaggttcaggatagagaggctagtcctctccactcactgttggagtagatacccaggtgaatttctcatcttttgcttggtggatgttactctttaatctggcactttatgtccacaacttacctgcaacatacctttctaaaggtctctctcactacctctttttcagctccctatccatgatccttttttcttttctctctctaggtcattccctctgacataaatgctcatttcttccaatttccacacattcaaattatatctacttttagcatccagctcaaataaatgccattcataattcccttctttcaactctctcctttttgaatgctcatatagttatatatatgggtctctactagggttcatgttctacttacagcagagattttatgtatacacccccatctaccttaaaatggaawacctaatgaatactcaataaatatttaataagtaaattcttcttcttataatagtggccaccacagaccctcacagacattctatttgttcaacaaactgttatccatggtacaagggacaaatctgtacaaacagtcctaactcaaatccactaagtgagcaaccagccg

SEQ ID NO: 943042 - DNA, 472 bp, Homo sapiens
tcctatcttagggcctttacactttctgaaacttctactgaaaagcctttctgcagacactttcagaactcagcttcttcattccttactcagttcttttctgaaatgttttcttctttgtgaccgttcctttagtccttcaatgtttcttatcctcttccttcrttttttttcctgcacaatatttatcaccatcagacagatcttgtattaatttatcagtctgctgcctgtctccctgtcccataggatgtaatctctgttaccacaggaaataatttttgtttaatattgttcacagccagccttggtggcttatgcctataatcccagcaatttgggaagctgaggtgggaggattgcttgatcccaggagtttgagaccagcctgggcaacatggtgagaccaccatctctaaaaaaaaaaaaaaaacaaataaaaatattgctcattactgtatcccgagcacct

SEQ ID NO: 943043 - DNA, 708 bp, Homo sapiens
ccactggcaggtcatcctgacatctgtccaactctggctgagtcggggttttatgggctcagagggaggaagtgctgattggtccatggttggccatgggtaggcctggaaaaagcaccagaagttatcactctgggccacgattccacccagaacttatagccctaactccaggcttcaggctctccttggcttgaaggtggaccctcagctttctgcccagaaggctgtctgcctcctgctgccatcaacatgttgtatatggcccccaggctgttcatgccaaggggtgcctataggcccctgctgagccacatttagtcttccctcagcctccctcctatgctcctaggtgcccaatgtccagagggggttgaggtagcaggggkctggtgtgtcagcacctccttgagtgtgcacacacctaggtgggatgggacggcacctgggctgggccacaactttgctccaaaatcggagcaggcaccaggaatggagagaggtcagggatgggagcaggcacttcccagcctttgggggaagggggagttcctcacctcctgagagcagagcgcgactgtgcggctgcacatgcaccagggagtgcagggctcccaccccacctactcggtaggaggcagggcttcttcctgttcctggcccctgccggctctgtggagtgcacaaacctggccagacctccccaac

SEQ ID NO: 943044 - DNA, 643 bp, Homo sapiens
gagataggggtggggccgttttaggggcttttgagccaggatgagccaggagaaggaatttcacaagagaatgtcatcagttaaggcaggaacaggccattttcacttcttttgtggtggaatgtcatcagttaaggcaggaaccagccatctggatgtgtacctgcaagtcacaggggatatgatggcttagcttgggctcagaggcctgacattcctgtattcttatattaataagaaaaataaaacaaaatagtaaagtgttggggcggcgaaaatttttagaggtagtatggagagataatgggtgatgtttctcagcgtctgcttcgagcgggattacgggcggcgtgggaacctagagtgggagagattaagctgaaggaagattttgtggtraggggtgatattgtggggttgttagaagaaacatttgtcgtgtagaattattagtgatggcctggatacggttttgtatgaattgaaaaaactaaacagaataagagaaggagaaaaacaggtattaaaggactaagaattgggaggacctaggacatctaattagagagtgcctaaggaggttcagcatagccttgccagcaaagattatttatttactttaagagcggcggtttgggtatag

SEQ ID NO: 943045 - DNA, 564 bp, Homo sapiens
ttttaggtgggaatgacaataattgctcaaacgactgtttaaaaaaaattggtgcaaaagttgcatccggtggccaagataggggtatgggatgggggaaagagcacgtacagggcatggagctgagcacctcctctgcttgcagtcwcttcagagctgctgctcaaagtggtttcccgagcaaaagtcaccatgctgatatagacgtgtgacctgccattgcgaccacagatgattagctcaaagagtgatccctcacccaaggcactcgtggtgggaaaatagtctctggaacatgatcacgaaaagtctgcccaacagagaggctccacactgaatagtgactggtcaaccaattggattctctctcagagaaagcttgaacatgggcatgttggtaaatcaatagagacagaaataggatcactacaagtccaccttaaaagtttggttactcctggccagacaccgtggctcatgcctgtaatcccagtactttgggaggccaaggcaggcagatggcttgaggtcagtagtttgagaccagcctgaccaacatggtaa

SEQ ID NO: 943046 - DNA, 601 bp, Homo sapiens
acccaactgaaaacctgagcaaaggggctggatacgatggctcacgcctgtaatcccagcactttgggaggccgaggtgggcagatcacctgagtctaggagtttgaggccagcctagacaacatggtgaaacccagtctttacaaaaatacaaaaaaaattagctgggtgagtggcacacacctgcagtyccagctactcagaaggctgaggtgggaggaccacttgagcccaggaggtggaggttaacagccagccgagattaggccactgcagtccagcctgggcaacagagtaagaccccatctaaaaataaaataaaataaaataaaggttttaaaaagactgagcaaaggcttaacaaacactttaaaaaaaggatatacaagatatacaggcagccaaaaactgttcaacatcattaaccattagagaaatgcaaattaaccatagttaatgccactacatacttgtgagaagaccacgcacacacagaacaattgctggcaaagtcaaatactggaggggatgtggagccactggggctcccattggttgctggtggaaggcagcatggtgcagccatcctggaagatggttt

SEQ ID NO: 943047 - DNA, 825 bp, Homo sapiens
tacatcctggccctgctcactgcatccactgccaccatcctatccagcccgctgccctcccacttgagctattgcagcagcctcccagttggtctcccttcctcttctcttacccctgcaggtgtaaaggcttaagtcagatcatgttactcctctgcttggaactctcagattgacccatcctccttggattgaaaattgcagtctttatcacgacccaaccagcagatcccatgccaactctccatcactactctctccagccatactgacctcattattgtccctcagcgtgcaagcctgttcttgcctcaggacccagtctttccatcggaaatgatctttcctcaggacttcgaaagactgggtcctcactttgttcagagaaaatgtcacctcccttgagtggcccttccaggtcatcctgtttctgatcagcctcagatactctctaccgccttacagtkccttcttgttctccacagtaattatctgtaaatgaaagcacagtgcatttttgtttgcttagttctttcttatgtcttctcaactagaaaagaaactccatgaggccagtgacttccttcttctccaatattgtatccccagtgcctggaacagcaccttgcacatagactgtgcttagtaaatacttgttgaattaatgaatgtgttcttttgtcaagtctttgaacattactccttattaacccaatgttacaacatcacaatgtcacaaagggattttttttaagagaaaagcaattttaccttcatctacccctttcaacacagctattgcggctgtgggtccttcccgtcttt

SEQ ID NO: 943048 - DNA, 825 bp, Homo sapiens
tacatcctggccctgctcactgcatccactgccaccatcctatccagcccgctgccctcccacttgagctattgcagcagcctcccagttggtctcccttcctcttctcttacccctgcaggtgtaaaggcttaagtcagatcatgttactcctctgcttggaactctcagattgacccatcctccttggattgaaaattgcagtctttatcacgacccaaccagcagatcccatgccaactctccatcactactctctccagccatactgacctcattattgtccctcagcgtgcaagcctgttcttgcctcaggacccagtctttccatcggaaatgatctttcctcaggacttcgaaagactgggtcctcactttgttcagagaaaatgtcacctcccttgagtggcccttccaggtcatcctgtttctgatcagcctcagatactctctaccgccttacagtgccttcttgttctccacagtaattatctgtaaatgaaagcacagtgcatttttgtttgcttagttctttcttatgtcttytcaactagaaaagaaactccatgaggccagtgacttccttcttctccaatattgtatccccagtgcctggaacagcaccttgcacatagactgtgcttagtaaatacttgttgaattaatgaatgtgttcttttgtcaagtctttgaacattactccttattaacccaatgttacaacatcacaatgtcacaaagggattttttttaagagaaaagcaattttaccttcatctacccctttcaacacagctattgcggctgtgggtccttcccgtcttt

SEQ ID NO: 943049 - DNA, 638 bp, Homo sapiens
agctctcactgagtttaactcactggtttccccctacccctttaacagggcactaacccctctggggagaggggatagcagggaactatccattggcacaggggaaatccaagctacagcaagtggggggacaatttaccaagtgtcactggtggggccacagttagaatccagagattccagctcccaggccagcctccttcatgctccaggcactgaactccaaccctgcacargccccagcattgctcctctgagagccaggctcagctcacttctcaggcataccaagatggccacgaaccctacctaggtgctctcaagccccaagagggagactagaatactacagacctgatgtcccagaccacaaagccagtgtctttcacctctgggccactattccagattgcctcctgcagtgggcacgtatataggccagtgggctgaggtctgggagaggggttgtttgcagagctgccatggttccacacagcaccttttttccaactaggaaaaaggcacctcttctggccaggtgcagtctcatgccaaggtggacagattggcgacagcagcatgagctgtatcttagctgccattcctcccctgatctgggtgcccctgtacagttaata

SEQ ID NO: 943050 - DNA, 619 bp, Homo sapiens
tgaattttctgtctcttttttccccatcctttcttggtttacatttcagttttggaaggtttattaacttatcttcaagttcatcaatattttttcccgtggttgtgttatctacctatgaacttgttgaaaacattctttatttccattattgtgggttttaatttttaatttcatttacttttattcttttttagttttaatatctcagcttacattacctatataggcttgcatgttgtatactttttccattagaacctttaacaaattaaacataattattttaaattacttgataattgcaaaatctgtgtcatatcygagtatggttctgaagcttgctttatgtctttggatgttttttgtttctttgccttttggcatgccttgtaaatttttgttgaaagccagacatgttctataggataataggcactgaagtaaataggccattggtgtgagaatttctattaatctgagatgagctgtgtttaatgtttattgtagctactggtgccaaagtcttcaaattcctatagcaggcttctttgttcctctcctcctagctttggggcttacctttgtactgattctcacagagagtctgttccttgca

SEQ ID NO: 943051 - DNA, 747 bp, Homo sapiens
gattttgataggcatttcattgaatctgtatattaatttggggattattgccatgttaacaatattaagtcttccaacccatcagtacaggatatctttccatttatttaggtcttctttaatttctttcaatgatgttttacaattttcagtgtatgtgatacttcttttgataaatttttttctgtgtattttattatttttgatgccttmggaattgtttttctaatttcattttcatagtatctattgccaatgtatagaaattgaactgatgtttgcatattgatcttgtatcctaccacttggctaaatttgtttttaaattccaatagttttgtgtgtggattccttgaaattttttatacacaaaattacattattggcaagtagagatagttttacttctttccaatctggatcccttctattttgttttcttgcctaattgccctggctagagccttcagtacaatgttgaatagaaatggtgagaacaggcacttttgtcttgtttcaaactcaggatgaaagttttcagtctttcaccactaagtatgatgttagctgtggggggttttgcagatgacctttatcagttggttaacttttccttcattcctagtttattgagtgtatttgcattcaagaaatatttattgagcacctactatgtgtcaggcattgttctaagtgctggagacacagcaatgaacaaaatagaagatagcatgataatggcagaga

SEQ ID NO: 943052 - DNA, 496 bp, Homo sapiens
agcagcaccttctggctggaggccaatcaactcaagccattacagcaactcataagagaacaactctgctccaaagaaggagaaaacaacagctaatttcaccacctgcaacaccctggttaaccagaggtcctgagtctgtccatgtgacaacttcactgctagcataaccagcatttgagaaaaccaccgcactaaacaaaactacaaccaaggactaaaaccagcacactaaaacaaaactacaaccaaggactcccaacagagtccactttactccccrccaccttcactagagcaggtgctggtatccatagctggaagacgtgaagatgaatcacatcacaggactctttgcagacagttcttagcaccaccctggagccccagaatcctgctaaatggctagaaccagaaaggcaataacaatcactgcagtctggctttttagaagccgtatccttagaggaagggggagagcaccacatcaagggag

SEQ ID NO: 943053 - DNA, 593 bp, Homo sapiens
catctggtcctggactttttttatgttggcagcttttttattaccatttcagtctcgctacttgttattggtctgttcatagtttctatttcttcctggtttaatctaggagggttgtatatttccaggaatttatccatcttctctaggttttctagtttgtgtgcataaaggtgttcatagttgccttgaatgatcttttgtatttctgtggtttcaattgtaatattgcccatttcatttctaattgatcttatttgaatcttctctcttcttttcttggttaatcacactaatgatctattggttttgtttattttttcaaagaaccasctttttgttctatttatcttttgtgttgttttttgtttgtttcaatttcatttagtgttactctgatctttgttatttctttttttttctgtttggtttgggtttgattttttctttattctctagttttttgaggtgtgaccttagattatttatttgtgctctttcagactttttgatgtaggcatttactgctatgaactttccttttagcagtacttttgctgtatcccacaggttgtgattggttgtgtcactgt

SEQ ID NO: 943054 - DNA, 716 bp, Homo sapiens
cccaacactcacgcagggcccctgctaccctcgcaccctagtttcatcccatggccccaggccccaacccaagtgcccactccttctcctcttcccaaggtaacgatcatcccaggggccgaggctctctgcccggcgaggctccacacgaagcctcgaccctcaccgtgcagagggtcccctggttccccgaatccgaagccattctggacccagtcaccaccccgagacgcagaactcctccggcgcaggagcaccaaccagcgcggcgtcgcggggactgagcctctaaagccacccttaactcctcctcctagtgcgtgcgcacgcaaggccctgcttcgtcagccaccgggtggcggccgcgcargcgcactcgggccgtcgggctcctggttgccttagtaacccctcggctttctgttcctggacggtggcggccgccggctctatgatggagcccccgaagcccgagcctgagctccagcggttttaccaccggctgctgcgtccgctgtcgctcttccccactaggacgacgtccccagagcctcagaagcgccccccgcaggagggccggattctgcagtccttccctctggcgaagctgacggtggcgtcgctgtgcagccaggtggccaagctgctggccggcagcgggatagcagcgggagtgcctcctgaggcccgactacgtctcatcaaggtcatcctgg

SEQ ID NO: 943055 - DNA, 596 bp, Homo sapiens
catctggtcctggactttttttatgttggcagtttttttattaccatttcagtctcgctacttgttattggtctgttcatagtttctatttcttcctggtttaatctaggagggttgtatatttccaggaatttatccatcttctctaggttttctagtttgtgtgcataaaggtgttcatagttgccttgaatgatcttttgtatttctgtggtttcaattgtaatattgcccatttcatttctaattgatcttatttgaatcttctctcttcttttcttggttaatcacactaatgatctattggttttgtttattttttcaaagaaccasctttttgttgtatttatcttttgtgttgttttttgtttgtttcaatttcatttagtgttactctgatctttgttatttctttttttttctgtttggtttgggtttgattttttctttattctctagttttttgaggtgtgaccttagattatttatttgtgctctttcagactttttgatgtaggcatttactgctatgaactttccttttagcagtacttttgctgtatcccacaggttgtgattggttgtgtcactgttat

SEQ ID NO: 943056 - DNA, 596 bp, Homo sapiens
catctggtcctggactttttttatgttggcagtttttttattaccatttcagtctcgctacttgttattggtctgttcatagtttctatttcttcctggtttaatctaggagggttgtatatttccaggaatttatccatcttctctaggttttctagtttgtgtgcataaaggtgttcatagttgccttgaatgatcttttgtatttctgtggtttcaattgtaatattgcccatttcatttctaattgatcttatttgaatcttctctcttcttttcttggttaatcacactaatgatctattggttttgtttattttttcaaagaaccagctttttgttstatttatcttttgtgttgttttttgtttgtttcaatttcatttagtgttactctgatctttgttatttctttttttttctgtttggtttgggtttgattttttctttattctctagttttttgaggtgtgaccttagattatttatttgtgctctttcagactttttgatgtaggcatttactgctatgaactttccttttagcagtacttttgctgtatcccacaggttgtgattggttgtgtcactgttat

SEQ ID NO: 943057 - DNA, 502 bp, Homo sapiens
ggggtgctcccttgatgtggtgctctcccccttcctctaaggatacggcttctaaaaagccagactgcagtgattgttattgcctttctggttctagccatttagcaggattctggggctccagggtggtgctaagaactgtctgcaaagagtcctgtgatgtgattcatcttcacgtcttccagctatggataccagcacctgctctagtgaaggtggyggggagtaaagtggactctgttgggagtccttggttgtagttttgttttagtgtgctggttttagtccttggttgtagttttgtttagtgcggtggttttctcaaatgctggttatgctagcagtgaagttgtcacatggacagactcaggacctctggttaaccagggtgttgcaggtggtgaaattagctgttgttttctccttctttggagcagagttgttctcttatgagttgctgtaatggcttgagttgattggcctccagccagaaggtgctgct

SEQ ID NO: 943058 - DNA, 814 bp, Homo sapiens
tgggtttcaggaggctggctgagatagttaagccttagtcctggtcctttggagtctccgttggtgagatcaattgccagcagatagcaatgctgcaacgtaagagacgtaataaaggtctatgcgaagggcagaatcctctacacctggaatgagtcacagagggcttcagggaggaggtgagtttggagctgcaacttaaaaggagagtaggaggccaggcgcggtggctcacgcctgtagtcccaggactttgggaggccgaggcgggcagatcacgaggtcaggagttcaagaccagcctggccaacatggtgaaaccccatctctactaaaaatacaaaaattagccgggcatggtggcaagtgcctgtaatcccagctacttgggaggctgaggcaggagaattgcttgaacccaggaggcagaggttgcagtgagccaagatcgagccactgcactccagcctggtgatagagcaagactcyatctcaaaaaaaaaaaaagggagagtacgaatttttcaggcagtcacaggcgggatggttaccagggagcagcatggcagggcttggcattcatgggctcagagaagggtttagagggtcagatgtgagcaggggagtgacgggggatagatggggagaagggttgagtgtgccactgaggagtcagtagtcctttacctgtggctgcggaactcactggaggattctaagccgagaagcttcataacactgcttatgttagaaagtcagccctgacttggcgaggtggctgcatctagtgggaaactcaggcagtaaaggcaca

SEQ ID NO: 943059 - DNA, 814 bp, Homo sapiens
tgggtttcaggaggctggctgagatagttaagccttagtcctggtcctttggagtctccgttggtgagatcaattgccagcagatagcaatgctgcaacgtaagagacgtaataaaggtctatgcgaagggcagaatcctctacacctggaatgagtcacagagggcttcagggaggaggtgagtttggagctgcaacttaaaaggagagtaggaggccaggcgcggtggctcacgcctgtagtcccaggactttgggaggccgaggcgggcagatcacgaggtcaggagttcaagaccagcctggccaacatggtgaaaccccatctctactaaaaatacaaaaattagccgggcatggtggcaagtgcctgtaatcccagctacttgggaggctgaggcaggagaattgcttgaacccaggaggcagaggttgcagtgagccaagatcgagccactgcactccagcctggtgatagagcaagactccrtctcaaaaaaaaaaaaagggagagtacgaatttttcaggcagtcacaggcgggatggttaccagggagcagcatggcagggcttggcattcatgggctcagagaagggtttagagggtcagatgtgagcaggggagtgacgggggatagatggggagaagggttgagtgtgccactgaggagtcagtagtcctttacctgtggctgcggaactcactggaggattctaagccgagaagcttcataacactgcttatgttagaaagtcagccctgacttggcgaggtggctgcatctagtgggaaactcaggcagtaaaggcaca

SEQ ID NO: 943060 - DNA, 462 bp, Homo sapiens
cagttttcccacctttggctttgatgaccatgatcctttgccgcaagtcgatgaagggctggatcaggcagagccggggttcctgcttctgactcaggcaaacaccattgtgattcacaaccatccagctccggtcatatagcagcccttggtttcctacaggccacctggtcacctaaacaaaaaggtagacgtgtctcaggccagggctccccaaagttggtcttcacctatttgtacagtggctacacaaacacagataracttcatgaattcagcacctacactggaaggaagaaagggaggaagagaagaaactaaaacagagaggacagtgcaaagaagatgatgtaggagctggatatctcccattcagcctccaggtccacactccacccttctccacttcgagccatgttttaagtaggtaatgcctgacattcagagagtacaagagtctac

SEQ ID NO: 943061 - DNA, 491 bp, Homo sapiens
ttgatgtggtgctctcccccttcctctaaggatacggcttctaaaaagccagactgcagtgattgttattgcctttctggttctagccatttagcaggattctggggctccagggtggtgctaagaactgtctgcaaagagtcctgtgatgtgattcatcttcacgtcttccagctatggataccagcacctgctctagtgaaggtggyggggagtaaagtggactctgttgggagtccttggttgtagttttgttttagtgtgctggttttagtccttggttgtagttttgtttagtgcggtggttttctcaaatgctggttatgctagcagtgaagttgtcacatggacagactcaggacctctggttaaccagggtgttgcaggtggtgaaattagctgttgttttctccttctttggagcagagttgttctcttatgagttgctgtaatggcttgagttgattggcctccagccagaaggtgctgct

SEQ ID NO: 943062 - DNA, 625 bp, Homo sapiens
agggaggaagtaatactatgctacaaacagttagaaaaggctgtaactgcagcaggattaatcatagcccccaataaaatccaaacttctactccctttcaatatttagaaatgaaaatagaacaaaatactattaagcctcaaaaggttcaaattagaagagataattttaaaactctacatgattttcaaaaattattaggagacattaattggattcgtccaactttaggcattcctacttatgctatgtctcatctgttttctgccttacaaggtgattctgatcttttttttttttttttgagatggagtttccctttgttacccaggctggagtgcagtggcgccacctcggctcactgcaagctccacctcccaggttcatgccattctcctgcctcagcctcccaagtagctgggactacaggcacccgccaccatgcccrgctaattttttgtattttcagtagagatggggtttcactgttttagccaggatggtctcaatctcctgacctcatgatctgccacctcagcctcccaaagtgctgggattacaggtgtgagccactgcgcccagccaaggtgattctgatcttaacggtaaatgctctttatccaa

SEQ ID NO: 943063 - DNA, 572 bp, Homo sapiens
caagccaaaagagattgggggcatatattcaacattcttaaaaaaaaaaaatcttcaaccaagaatttcatatccaaccaaactaagcttcctaagcaaaggagaaataagatccttttcagatatacaaatgtcgagggagttkgttaccaccagacctaccttacaagctatcttgaaagaagcattaaatataaaaaggaaagaccactaccagctaatacaaaaacacacttaaacacacaaaccagtctcactataaaagaaccacacaaacgagccacataaatagctaacagcaaaatgacaggatcaaatccacatatatcaatactaatcttgaaagtaaatgagctaaatgccccacttaaaaggcacagactggcaacctgggtaaaaaagcaaaatccaatggtatactgtcttcaggagacccttctcacacataatgacacccatagactcaaaataaagggacggaggaaaatctaccgagcaaatgaaaaacagaaaaaaagcagggttgcaatcctaacttcagacaaaacagagttgattttctgaaaaaaaat

SEQ ID NO: 943064 - DNA, 543 bp, Homo sapiens
acaccagtgcttttcacactgggtcagctatgaaacaggtcgaataaacaaggctttatgagtggggtcttccagggaaccactggacaggtcaaataatgacagttctttgagaatggggcttcaaaggagatctaatccttttctgcctcctcttgtagctgccaggctattgatttttactgtggtaatgtacttttagttttcaaggttactgtggaactggggagggaaagatgggaatagagtaagttaagtcatcacaaagctcacttttcttcatgagattcagccatttcttgaataaacacttcctgggttgctgcaggcctttgattagtttctagtgttctgaaaaagttgattctgattatttatttattgagacaaggctggagtgcagtggcaggatcttggctcactgcagcctcaaactcctgrgcttaagtggttcccctgcctcagctacccaggtagctggggctacaagtgtgcgccagcatgcctggctaatttttgttttgggctcaagtgatcctccca

SEQ ID NO: 943065 - DNA, 463 bp, Homo sapiens; identical to SEQ ID NO: 926849

SEQ ID NO: 943066 - DNA, 744 bp, Homo sapiens
acactaaatccttattgtagactatggttttaaaaacttgggcatttctgagtctgtgcatattattttccgttttagtgaactattttgcccaaatcttgaaagagttttctctgatgtactcgtgatcgtatgtgtatgtgcgtgattgtmtatgcgcccccagatactgcgtatgtgtgtatatatgtattaggcttaaacggaatctcaattttgtgaaggaaaggagcttagagaagaaataccataccacctgtttgttgcatcttagttatgaacctcgaacagaaattgcctgtcattcttgttttgctttgctttgtctcaagaaagaaaacattgttgcgctcctctcagtccctgagaccctaacttgtgatgtttaccgtttaaatccacgggttaggctcttgggagctgcgagtcgtgcttttgcatcctggaaatttggtggaattttattctttaaagcaaaaacaaaagaaaagaaagtttgtctgaggtgattgagtatacctctgaggtttcattgttagatgggatcaggtgaccagagagtggcagctcctggatttctgttaaagtaggtatatattttgctttaatagcgtgttggctgctatgtgtatgtatgcatgttattgatgcctgaggcttgtggaactcatctgcctggtctattccttgagagcaacacgcagtagtatacgagcgtaacaagaacagctcagtacctggtgc

SEQ ID NO: 943067 - DNA, 824 bp, Homo sapiens
caagtggtcctttccagagttgcctaagtcataccacaagcaacctgtcaggtcccgtgcaggcagtctagggattgcagtaatccaatccctagattggctgcattcttgataaacgctcatggtaagtaaatcagtggttggagaatttaagacctaatgggggaaaatagggaggccttgaattggtgtgggtatggggaggtcagtctggttaggagttggacttgggttttattgttgctttcattaccttcactgtactacaggcctcaaaaccttctagaaggctgccaagaccttttgcctgagggtggggctggggtgccagagggtatttctcagcatctgtgcttccccctcagctttcagccttctctgccagcatgccccacaaagggcatctctctccaaattcttgcccccctctcctggtggcagcctgctgtctcttgtttcttagccttgggctggttagcagtacaggaggttccctgttgttctgggcctgccttaggcctaggctggacttgtgcacctgggctttggacacggggctttctcggtgttcctgccctccgtcatgtggtagccaaactctgccttctctctgtggtcagtcttgagccagtgtctcctgtctctgycttgataataggagcgctctctctggccttcagccctgcctccatctttcatgtgaggcacgtggaaaagtgtttgctaatgagtgcgaattctccttgggtctggagtcccaggtaattccagactgacatctagtgcacctttggcctttaccagtacgttaagattatagctgg

SEQ ID NO: 943068 - DNA, 663 bp, Homo sapiens
gaaagaattcaaggcaaattcatacggcaaagtgaaagtaagtttattaagaaagtaaaggaatagcaagcaggctctgtggtgcgatggataagtgcattggacttctagcctaaatcgaaagagattcaaagaaagtaaaggaatagagaatggctactccatagacagagcagccccgagggcctctggttgcccatttttatggttatttcttgattatatgttaaacaaggggtggattattcatgcctcctgtttttagaccatgtagggtaacttcctgacatgcccacggcatttgtaaagtgccatggtgctggtgggartgtagcagtgagaatgaccagaggtcactctcatcaccatcttggttttggtgggatttagcaggcttctttactgcatgcaacctgttttattagcaaggtctttatgacctgaatcttgtgctgacctcctgtatcatcctgtgactaagaatgccttaacttactgggaatgtaggctagcaggtcttagcgttatcttatcaagcccctatttaagatacaattgctcaggttcaagcacctctgacagtacctctgtcataggagtgcctcgcggtcagaacaaatttatagacaaaaatgtaatgtgatgtacagaaattggaagtga

SEQ ID NO: 943069 - DNA, 727 bp, Homo sapiens
gtgaaagtttattaaaaagcttaagagcaggaaagaaaggaaataaagtacacttggaagagggccaaacaggtgacttgagagattgtaacagcccaaggagttcaccttgcccgctgcctagacagagctgatccatcaagacaggggaattgcaatagagaaagactaattcacacagagctgcctgtgcgggggaccagagttttgttttttgtttttgttttttttttgagacagagtttcactcttgttgcccaggctggagtgcactggcgtgatctcggctcaccacaacgtccgcctcccgggttcaagcgattctcctgcctcagcctcccgagtagctgggattacaggcacgcgccactacgcccgtctaattttgtatttttagtagagatggagtttctccatgttagtcaggctggtctcgaaatcctgacctcagatgatcttcctgcctcgacctctcaaagtgctgggattacaggcatgagccaccgcacccggccaagaccagagttttattattactcaaatcagtccctyggagcactgggggagcagagtttttaaggataatttggtggatggggggaagccagtgagccaggagtgctgattggtcagagatggaaaataatagggagtcgaagccatcttcttgtactaagtccattcctgggtggggaccacaagatcagatgagccagtttattgatct

SEQ ID NO: 943070 - DNA, 595 bp, Homo sapiens
cacttcaaatttttgttggataaattagtgaatgaacacagaagggtaaaagctagcatacattcttattcatttggtttttataaagcatgtatgagtgtgaagagggtgcgttcttccaaactttgccttatgctctttgttttcctgttcaagtttttatgttgggaatactttgctttcttagaagaaagggcagattctgaggctcaaaagaagtaacagtgagcctggttattgggcacgatgcctccagggcartgatattctgactaggctctccaaccctctccctccaaaactctcctgtagggctgtctaggagttattggaaaatataagaaattgtatttatgccattttaggacaaaacaaatcttaagagacaagtgtcagtaattcaagcaaataatgtcaggttaaaacaagaaaggctggtgaatcagtactccaatgatggaaaactgctgtcatcttaaatcctccatcctcagcaaagatggattctacaactttcaagttacaataggagggtaggtcctgtgcagtatcacactggcacattctgaccacagaaccctcccttgaatgtgca

SEQ ID NO: 943071 - DNA, 826 bp, Homo sapiens
accctaaatcagatagttcagcaaatgttgataaacacctctgagaaattcttccaggttcccctgaatttgagaagcaactgtggccaagtatttttagcagatacagatggggaggtagtaataactttgataataaataaaaggctggcccacctctctcccgctgaggtccaccatgacagggtgtgcaggtgtgggctgcctcactgccacgggtcttggctccccatcaagcaggaagtgtctggcctcacaagccagggtacaggggaatctggtcactggcaaatgctggtagagtaagcaacttcaacaacagcaacaacaatggaatcaatagttacaactgagaacatcaaacggaatatcaaagtacatccccaaagactctcagtcattcagttcactcattcattcatcatccttcaataaactcttattaagtgtctgctacaagaattaagcaataaattttcatctgcatggggaagagaagaaacaaaggtccacaaacctggcttctattttaagctcttcctcccaccagatgtatgactgaccttgagggcattgacttgggcatgcatcaacattcccacatgctggagggtggtagccactcctaagccagctatggtgkgcaaagtgctttgtgaatcttacttgaagaacacaagtaagacatagaggaagataacaactaattatccagagcatcatgctgtcgttgtgatcctgagacacctcatgaaagcttgcattaaaggctcctaatttagaggaccccaatgatgcggctgcaccttctgccccacactgactt

SEQ ID NO: 943072 - DNA, 826 bp, Homo sapiens
accctaaatcagatagttcagcaaatgttgataaacacctctgagaaattcttccaggttcccctgaatttgagaagcaactgtggccaagtatttttagcagatacagatggggaggtagtaataactttgataataaataaaaggctggcccacctctctcccgctgaggtccaccatgacagggtgtgcaggtgtgggctgcctcactgccacgggtcttggctccccatcaagcaggaagtgtctggcctcacaagccagggtacaggggaatctggtcactggcaaatgctggtagagtaagcaacttcaacaacagcaacaacaatggaatcaatagttacaactgagaacatcaaacggaatatcaaagtacatccccaaagactctcagtcattcagttcactcattcattcatcatccttcaataaactcttattaagtgtctgctacaagaattaagcaataaattttcatctgcatggggaagagaagaaacaaaggtccacaaacctggcttctattttaagctcttcctcccaccagatgtatgactgaccttgagggcattgacttgggcatgcatcaacattcccacatgctggagggtggtagccactcctaagccagctatggtgtgcaaagtkctttgtgaatcttacttgaagaacacaagtaagacatagaggaagataacaactaattatccagagcatcatgctgtcgttgtgatcctgagacacctcatgaaagcttgcattaaaggctcctaatttagaggaccccaatgatgcggctgcaccttctgccccacactgactt

SEQ ID NO: 943073 - DNA, 569 bp, Homo sapiens
ctggtccagggcttttgtttgtttgtttgcttatttgtttgttttggtaggtttcttattatagattcgattttgcaactcaatattggtctgttcagggtttcaatttcttcctgatttcattttgagagattatgagtttccaggaatttattcattttctatagattttctagtttgtgtgcacaaaagtgttcataatagtctctgaggattatttgcacttttgtggggttggttgtaatgtcatctttgtmatttctgattgtgcttatttagatctcatctctttttttcctgttaatctagctggtggtctactgaccttgttttatcctttcaagaaaccaacttttggttttgctgagtatttgtataaattttggggtctcaatttcattcagttctgctctgatttagttatttactttcttctgcttgttttggggttagtttggtcttatttttctagttcctctaggtatcaagttagatttctaatttgagatctttctaactatttgaggtaggcatttattgctataaactttccttttaagactgttttt

SEQ ID NO: 943074 - DNA, 604 bp, Homo sapiens
ggttgtttctactttttggttatcataaataatgctgctacaaatatttgggttcatgtgtttgtgtggacatgttttcatttctattggatatatctaggagtggaattgctaggccatgtgataactctatgtttaacattttgagaaactgctaacctgttttccaaagcagcagaaccatctttcaatcccaacagcagygtataagggttttgatttttctacatcctcatcaacatgttgtctttttgatgaccgctatcctaatgtgtatgaagtggtatctcataatagctttaatttgcatctttttaatgattaattacgttgagcaaccttttatgtacttgttgggtatttgtatatcctcttagataaatgtctatttagatcttctacccattttttcaatcggattttttaaattgttgaatggtaagttttctattatatattctaggaacaagtccatcaccaacatcaaatgtattacttgcaaatattttctcccattctgtgggtgatatgtgacttccttgatggtgtattttcaagtacgaatgtttttaactttgacaaagttgaacttatgtatttggtt

SEQ ID NO: 943075 - DNA, 604 bp, Homo sapiens
ggttgtttctactttttggttatcataaataatgctgctacaaatatttgggttcatgtgtttgtgtggacatgttttcatttctattggatatatctaggagtggaattgctaggccatgtgataactctatgtttaacattttgagaaactgctaacctgttttccaaagcagcagaaccatctttcaatcccaacagcagcgtataagggttttgatttttctacatcctcatcaacatgttgtctttttgatgaccgctatcctaatgtgtatgaagtggtatctcataatagctttaatttgcatctttttaatgattaattacgttgagcaaccttttatgtacttgttgggtatttgtatatcctcttagataaatgtctatttagatcttctacccattttttcaatcggattttttaaattgttgaatggtaagttttctattayatattctaggaacaagtccatcaccaacatcaaatgtattacttgcaaatattttctcccattctgtgggtgatatgtgacttccttgatggtgtattttcaagtacgaatgtttttaactttgacaaagttgaacttatgtatttggtt

SEQ ID NO: 943076 - DNA, 758 bp, Homo sapiens
gctttttctgtcccatcagaacagtatttttttttttcaaattgatttaggaaaacccaccttccattacttttcctgatgaagtgtgatattgggtttttagccctttgttttctctggtaattttaccctgattccamatgtggtgtaaattccttaacaattcacctctttgatgtaagatctgggtagagagagcatacttgggggcgcagccttcaaataacacatcttgatgagacgtgtgcataaaatgcaaagaagaaataagtggccagagaaaatgatggtgcagaaaatgtgtttcttaaagaagggttgttaattttaatgtttggttctaaaactctttgctgcacccccatttaacagctaaaacataggactcaggagaaaatgaaggtgtcgggaaatttaggctgaaattcctgggttggaaggagcacagtaaatgaagcccagcctttttcgtgttttatattcattaagcatagcaatgtactgataacgttttttaagctgtcattacatctagttgatatttaatctgaattttaatatttaaaaggatactcaggatcttcattagagccataaaaaattcaagcagggctactgtttggaactgtaacaaagcaatttatactcctatcatttcacttaaattagagtgaggaaagaaatttagattttttgaaaagtgcaatcagcctcttaaataaaaaagcaactggtgtcaccattaggtggcaggcaca

SEQ ID NO: 943077 - DNA, 772 bp, Homo sapiens
ccgtgcaggcagtctagggattgcagtaatccaatccctagattggctgcattcttgataaacgctcatggtaagtaaatcagtggttggagaatttaagacctaatgggggaaaatagggaggccttgaattggtgtgggtatggggaggtcagtctggttaggagttggacttgggttttattgttgctttcattaccttcactgtactacaggcctcaaaaccttctagaaggctgccaagaccttttgcctgagggtggggctggggtgccagagggtatttctcagcatctgtgcttccccctcagctttcagccttctctgccagcatgccccacaaagggcatctctctccaaattcttgcccccctctcctggtggcagcctgctgtctcttgtttcttagccttgggctggttagcagtacaggaggttccctgttgttctgggcctgccttaggcctaggctggacttgtgcacctgggctttggacacggggctttctcggtgttcctgccctccgtcatgtggtagccaaactctgccttctctctgtggtcagtcttgagccagtgtctcctgtctctgycttgataataggagcgctctctctggccttcagccctgcctccatctttcatgtgaggcacgtggaaaagtgtttgctaatgagtgcgaattctccttgggtctggagtcccaggtaattccagactgacatctagtgcacctttggcctttaccagtacgttaagattatagctggta

SEQ ID NO: 943078 - DNA, 738 bp, Homo sapiens
actgccatgagccagaggtggagctctctggcccatgggaggcagggacttatactataaattccttttcttttttgtttttgtttttgtttttgtcttttgttttttttgagatggagtcttgctctgtcacccaggctggagtgcagtgggcatgatctcggcttactgcaacctccacctgccgggttcaggtgattctcctgcctcagcctcccaagtagctgggattacaggtgcgcaccaccacacccagataatttttgtatttttagtagaaacggggtttcaccatgttggccagactggtcttgaactcctgacctcaggtgatgtgcccgccttggccccccgaagtgctgggattacagacgtgagccaccacagccgaccctgatactagaattcagtgggaccagagacagtagggctttaggagaaatggtggtagggaatkggtgcagtttaagcgccagtcacagagggggtgggttggctcagagctaggttgacaaggatcagtcagaaaccaggaataaaggacaggcaccaggcccaggcccagaagcactccctaggattggaggagcacagttgagagagggaagtagtctgaagggctgggggcaatgggaccagggacaggactcactgtagcagttccagggaagggtgctcccgggcagctctggccagggccagggccgctgtgtcaccagcaccgttgtacgccacgtt

SEQ ID NO: 943079 - DNA, 641 bp, Homo sapiens
cacgcagaggccaagcccttccccctaggaccgctgtgccgcaccagctcatggaagtgcaggagccaggaggaagcgtagccatcaactatcacatcagacccatttggtttaatcctcatgaaattatgatatgctggccgggcgtggtgggtcatacctgtaatcccagcactttgggaggccaaggcgggtggatcacctgaggtcaggagttcaagaccagcctggccaacatggagaaaccccatctctactaaaaatacaaaaattagccgagggtggtggcacgcacctgtgatcccacctacttggaaggctgaggtaggaggactgcttgagccccagaggaggaggctgcagtgagccaagatccgagattgtgccactrcactccagcctgggcgacaagagcaaaactctgtctcaaaaaaaaaaaaaaaaaaaaagaaaagaaaataaaataaaaaaaagaaattatggtatgcttttgtttctaaactcggtgaagagacccagtagcagacagcttacttgacggacactgatcagctccacagactgtcctcgctcactgtctccaaacagcattttcagtgctcttatgtgtatcaggaagatcaaaatacactataccataa

SEQ ID NO: 943080 - DNA, 733 bp, Homo sapiens
ttgagatgaaggtgctcaccctccgggcttcactctgatacttgacagcctttttggtatctgccacggcccgctccacaaagcccactgactggtccatgttgttctcaatacggtcaatcatggatccctttccccagatgcaagaggtggtggcagcagaaacagagacagggagagggaagagaaagagcgagacacagcaaacaaaatggactctcttctctgaaggccacaggagagtctcaccttccgggcctgactctggtatttcacagcttttttcgtttcatctcgtgccttctccacgtggtccactgtgtgcatgacattcaactctatgttatctaacatctcaccctgcaaagaacagactctgatcacaccaagtaaacgtctcaggtcagtcctagccaatgcggggaagggattctctttcttacaatcttcagtggcaagaagagcatccacaaaccttgatgcatggccttccataggacacccattcacagtccttggtggtrgggtggcagtcacttgttcaagaaacattcagtgaattttactacttctctgtgaccagcactccaccaggcatccagaacatactatctagatacctagtaactacctataaatatactctgagatatccccagacaacctttgttattttttttacacttaagcacatggagaggaaccaaaataaggatatctcattgttattagg

SEQ ID NO: 943081 - DNA, 406 bp, Homo sapiens
agtctgtcactgccctggcccagctcagttcctacgctccctccccagcccctcctcagcccgagagccaacctccttaactcagcccccaaactcgacgagtttgtcttgcattctccagacaggtgatcttgccctctccagcctcagtttctcctcccgtggagacagaaaccccttcccgctcagtttctggctctggtaaggaactgaagaggcyagccggggtgcctctgacgcctggagagggcaagattcccctggcctctctacgcccggtgcctgatcccccagcccgatcctgccgcagggagcctcaggtcgctgcgctcccaccctccgcaccttcctggactcgggcctggctcctcacccagatttccaggtggatgtctcgcagggcaac

SEQ ID NO: 943082 - DNA, 582 bp, Homo sapiens
acagcagccctcaggcagaacattttcccaacaaccaccacttcaaagttttcgtaccagctccccgctcctaaggggtcttttgaggaaaggataagtttgtttggggcttaacctgcccacttggccccgcccctctcccctcagttggggaaatgaattccacgtgtgcctgatcttgcctgctctgaaatcacccgcgaggatttggtgagcactctttgatgttggaagccaatttaataagttggctgttgggtttttttttytctttttttttttttctgtaagacagaactctcatctcagtttcctgaaaactgaggaattctcaccttccctcctccatcttgagtttctgagttcctgtgtcccaaggcctggactcctgacacagtgctcacagacacccgaaggtttaggctgccttggggaggagaggcagggaaggaggcaacgtgctggtttggggaggagaggcagggaaggaggcagcgcactttgagcatttcctatgggccaggccctgtgttagaagctctgaatcctctcaatgcccctttcagagatgacaaaacagat

SEQ ID NO: 943083 - DNA, 582 bp, Homo sapiens
acagcagccctcaggcagaacattttcccaacaaccaccacttcaaagttttcgtaccagctccccgctcctaaggggtcttttgaggaaaggataagtttgtttggggcttaacctgcccacttggccccgcccctctcccctcagttggggaaatgaattccacgtgtgcctgatcttgcctgctctgaaatcacccgcgaggatttggtgagcactctttgatgttggaagccaatttaataagttggctgttgggtttttttttttytttttttttttttctgtaagacagaactctcatctcagtttcctgaaaactgaggaattctcaccttccctcctccatcttgagtttctgagttcctgtgtcccaaggcctggactcctgacacagtgctcacagacacccgaaggtttaggctgccttggggaggagaggcagggaaggaggcaacgtgctggtttggggaggagaggcagggaaggaggcagcgcactttgagcatttcctatgggccaggccctgtgttagaagctctgaatcctctcaatgcccctttcagagatgacaaaacagat

SEQ ID NO: 943084 - DNA, 740 bp, Homo sapiens
ctacaaatcctattagaatacaaccacccaggacaggaaatatcattgaagaaggcaaagagaatactgtcccagtgtatatctgcacccctttgtctgggcactgaaaggtcacagataccactggccttcctgttgagccactctgaatgtaatctgttgggtttgatttgctgaatgtatatgcacgtcaaagattgtgagcatggattatttataagatgttcacttccaattagtgtggcttaaaacgtgagcttcaacttggcacgcaggagctgcagcagcctgttctgagaaggttgggcaggtctgggggtaagcaagcctcttgctgagcaatggtgtgagccagtggctaaggtaacatttgggagcmgccctgttttgaaacaggttcttatttcagataaacagtcctgcaagtgacatgataaaatacatataagggtacattttccaagggctgcccagaaagcaatgcatataggcccagagactgttaggtcattttgacccattactcctcaagtacccacttggcaaattgatggagtcacatttaggacccatgtccgctttggtggaaaccccattttgtaccttgatggaggctcacagatagtggcttctaaattccaagatctggtatgaaggaacagcttctgggaaaatcagtttaatttacccattttttaaaccaaatctaattaaccaaatttaattaacccatttgctga

SEQ ID NO: 943085 - DNA, 620 bp, Homo sapiens
tggggaggcaaagctagagatgctggatgagcacaaagcaatcgtatatgtacccagcacaggaaacttggccaccttggagatgccaagaggaatcctgcccaattcaggtgctccacactgaatgcacctatgcaaactcaattaaatctctccttcagaaaaataaagaaaaggcaaataaagatcagagataataaagttccaaaatactttgtgggcatacctacttttcttatactctcattagactgaggcatatgatgttttctggccaatggactgcaactggaacatgcaacacttctgggccaaagcayataaaagtaggcagaattctccaagcacttgcttccctgctgtggtgatcatggaggactcatgttgagatggcggagcaagaggatcaaagcagcctggatcactgagtcaccgcatggagagtagcagtgtcttggagagttgcccaaacccacagcagagtttgagtgaaaaataaatgtttactgttatgagccactgagttttggggtgggagatagcctatcctgactagagcaggcaagttgttctaaaacactttcttgcatgcttatgaaatagaccactactcagtgtca

SEQ ID NO: 943086 - DNA, 541 bp, Homo sapiens
aattgttatttgtagggatgagagttctgtgcaaggctgggactggaaagtgcgagtggcccagcttgaaagggacaccaggtgactgcagcagggcccagcttgtgcttcaagccgcttcctgggaggctgctggtctgagtcccggctgaggtggtcacgagggctctctcttgagtttcagactgtttctgatgtcttcccggctaagtcccctcagccttgaccctcatgctatgatgctgtcgcaggccttgtgtgcttaggtgggggctttgcagggctcyggcctcaccacacctcagtcctgatgctgccagcttgttgctggtgctctgtgaggtcatggagactcctcctccatgaagcccttccctgggctcctgcccacgctggcctcctggtttggcctcgcctggtggcactgggaccctgctggaagcctgcggctcatgctgtctgctttatttccttgttgtctgcctttcccggctcacccacaggctttgccatagaagggactggaacctgccttctcacc

SEQ ID NO: 943087 - DNA, 763 bp, Homo sapiens
cagcctcctaatgggccatttcctgcagacgtcaaggtgtgacttggacagtaggccagggcctggggtccatgccagggacacctgactgcccagtcccaaccctggaagcacctcctaggcttccttttttttgaaacagggtctcattctgtcacccaggctggagtgcagtggcaccatctcggctcactgtaacctccaccycctgggctccagcgattctactgagtaggtgggattacaggcacttgccatcatgccgttttttgttttttttttttgagatggagtctcgctgtgtcgaccaggctggagtgcaatggcgcaatctcagctcactgcaagctccgcttcccaggttcacgccattctcctgcctcagcctcccgaatagctgggactacaggcacccgccaccacgcccggctaattttttgtatttttagtagagacggggtttcaacgtgttagccagaatggtctcgatctcctgacctcgtgatccacccgccttggcctcccaaagtgctgggattacaggcgtgagccaccgcacccggcctacatgtcaatttttttttgtatttttagtcaaagacggagttttaccgtgttggccaggctggtcttgaactcctggcctcaagtgatccatccacctcagcctcccagagtgctgggattacaggcatgtgccactgttcccagcctcctcctaggcttttgagagaaacagactgtgactgccccaagtcctagt

SEQ ID NO: 943088 - DNA, 596 bp, Homo sapiens
ggaggtctcagatggagatgacgaacttattgggaactggcatatggagatgacaaacttattgggaactggcgtaaaggtcactcttgctatgctttagcaaagagactggcagcattttgcccctgctctagagatctgtagaactttgaacctgagasaaatgttatagggtatctgtctgaagaaatttgtaagcagcaaagcattcaggatgtagcttggctgcttctaaaagccagtgctcatttgcataaacaaataaatggcctgaaactcaaacttatacttaaaagggaagcagaacataaaagtttgggaaatttgcagcctggtcatgtggtagaaaagaaaaacccatttgctcaggagaaattcaaaccaggtgcagaaatttgcataagtaaggaggagctgaatgttaatagccaagacaatggagaaaatgtctccagggcattccagagacctttgtagtagctcctatcatctcaggcctagaggcctggggtaaaaatggtttcatgggccagacccggggctccgttgctctgtgcagtctcaggacatggcatcctgcattacagcatccccag

SEQ ID NO: 943089 - DNA, 596 bp, Homo sapiens
ggaggtctcagatggagatgacgaacttattgggaactggcatatggagatgacaaacttattgggaactggcgtaaaggtcactcttgctatgctttagcaaagagactggcagcattttgcccctgctctagagatctgtagaactttgaacctgagacaaatgttatagggtatctgtctgaagaaatttgtaagcagcaaagcattcaggatgtagcttggctgcttctaaaagccagtgctcatttgcataaacaaataaatggcctgaaactcaaacttatacttaaaagggaagcagaacataaaagtttgggaaatttgcagcctggtcatgtggtagaaaagaaaaacccatttgctcaggagaaattcaaaccaggtgcagaaatttgcataagtaaggaggagctgaatgttaatagccaagacaatggagaaaatgyctccagggcattccagagacctttgtagtagctcctatcatctcaggcctagaggcctggggtaaaaatggtttcatgggccagacccggggctccgttgctctgtgcagtctcaggacatggcatcctgcattacagcatccccag

SEQ ID NO: 943090 - DNA, 574 bp, Homo sapiens
aagtatgtttaactttaaaaagcctgacccagtatcaaaattcaaaacgggagctataaaaacagaatttccctcagtgtacttaaactttgatctaatttagaagcatttgatttgcagacattttttgccagggtagaatcataggttcttagggtggaaagagattctaaatgtcacctgaccaggtattcctggatcctagttgccctattcagaagggctcttcctaaatttgtttggtgaggtcacctcattgacaccaagtgggaggatcaggatacggtttagctgtgaacagcggcctcccaagctgatctcattytccaaagctaatcccacgattctttagcattacaaatatggatgaagcatttcacaaacaagtgcttgcctttgttaacagtttcttttgattccatcagtaataccttagctgctttcttttataagaatgggggagaaaggcctgatttcttgacagacctatctggagagtggtagttggaaggaaagtgtgtatcccagagaacaaagatctcagcccttgagcaattcattcagattttgagtg

SEQ ID NO: 943091 - DNA, 542 bp, Homo sapiens
aaattgttatttgtagggatgagagttctgtgcaaggctgggactggaaagtgcgagtggcccagcttgaaagggacaccaggtgactgcagcagggcccagcttgtgcttcaagccgcttcctgggaggctgctggtctgagtcccggctgaggtggtcacgagggctctctcttgagtttcagactgtttctgatgtcttcccggctaagtcccctcagccttgaccctcatgctatgatgctgtcgcaggccttgtgtgcttaggtgggggctttgcagggctcyggcctcaccacacctcagtcctgatgctgccagcttgttgctggtgctctgtgaggtcatggagactcctcctccatgaagcccttccctgggctcctgcccacgctggcctcctggtttggcctcgcctggtggcactgggaccctgctggaagcctgcggctcatgctgtctgctttatttccttgttgtctgcctttcccggctcacccacaggctttgccatagaagggactggaacctgccttctcacc

SEQ ID NO: 943092 - DNA, 573 bp, Homo sapiens
cacttcaaatttttgttggataaattagtgaatgaacacagaagggtaaaagctagcatacattcttattcatttggtttttataaagcatgtatgagtgtgaagagggtgcgttcttccaaactttgccttatgctctttgttttcctgttcaagtttttatgttgggaatactttgctttcttagaagaaagggcagattctgaggctcaaaagaagtaacagtgagcctggttattgggcacgatgcctccagggcartgatattctgactaggctctccaaccctctccctccaaaactctcctgtagggctgtctaggagttattggaaaatataagaaattgtatttatgccattttaggacaaaacaaatctcaagagacaagtgtcagtaattcaagcaaataatgtcaggttaaaacaagaaaggctggtgaatcagtactccaatgatggaaaactgctgtcatcttaaatcctccatcctcagcaaagatggattctacaactttcaagttacaataggagggtaggtcctgtgcagtatcacactggcacattctgaccac

SEQ ID NO: 943093 - DNA, 619 bp, Homo sapiens
cgcatccaagaagaatgagattacactgacaactggatggtgaggagggcagagaagagttttattgagtgacaaaacagctctcagtggagaggggacatgagggtggtccaccacctgaagtcaggtggtctctctctcagtgtggctgggtccggggcttttatgggctaagaattggggactgcatgctgattggtttgtgagtatgcaaaaaagsctaaaacaaaagtgccactcaaaggtgggcacaacagtgtaataaactaattagggaagggcaggcatatgtaaaataggtgaagagtggggatcaatcagaggaaagtgtgccaaacaagaagaaaggttctcaatccagtccgtggatttatctgggacttatggctgggctttaaactgtcctcggcttgaaggtggggttccactgggaacccatccctgtctgcctaggatttgtctgcctcctgccactatccattcattcctctagggtttgttgagtgctggctctgtgccagccactccccaaggcactgggggtatagcagtggagtagacaaatctctgtcctgttggagattgtattctagaggggaggtggttggcagtcaaacga

SEQ ID NO: 943094 - DNA, 619 bp, Homo sapiens
cgcatccaagaagaatgagattacactgacaactggatggtgaggagggcagagaagagttttattgagtgacaaaacagctctcagtggagaggggacatgagggtggtccaccacctgaagtcaggtggtctctctctcagtgtggctgggtccggggcttttatgggctaagaattggggactgcatgctgattggtttgtgagtatgcaaaaaaggctaaaacaaaagtgccactcaaaggtgggcacaacagtgtaataaactaattagggaagggcaggcatatgtaaaataggtgaagagtggggatcaatcagaggaaagtgtgccaaacaagaagaaaggttctcratccagtccgtggatttatctgggacttatggctgggctttaaactgtcctcggcttgaaggtggggttccactgggaacccatccctgtctgcctaggatttgtctgcctcctgccactatccattcattcctctagggtttgttgagtgctggctctgtgccagccactccccaaggcactgggggtatagcagtggagtagacaaatctctgtcctgttggagattgtattctagaggggaggtggttggcagtcaaacga

SEQ ID NO: 943095 - DNA, 619 bp, Homo sapiens
cgcatccaagaagaatgagattacactgacaactggatggtgaggagggcagagaagagttttattgagtgacaaaacagctctcagtggagaggggacatgagggtggtccaccacctgaagtcaggtggtctctctctcagtgtggctgggtccggggcttttatgggctaagaattggggactgcatgctgattggtttgtgagtatgcaaaaaaggctaaaacaaaagtgccactcaaaggtgggcacaacagtgtaataaactaattagggaagggcaggcatatgtaaaataggtgaagagtggggatcaatcagaggaaagtgtgccaaacaagaagaaaggttctcaatccagtccgtggatttatctgggacttatggctgggctttaaactgtcctcggcttgaaggtggggttccactgggaacccatccctgtctgcctaggatttgtctgcctcctgccactatcyattcattcctctagggtttgttgagtgctggctctgtgccagccactccccaaggcactgggggtatagcagtggagtagacaaatctctgtcctgttggagattgtattctagaggggaggtggttggcagtcaaacga

SEQ ID NO: 943096 - DNA, 616 bp, Homo sapiens
gagacttaaaagtcataaaaatcaagtatgagaagcagctcttgtttggatcttgacctgaacaaaccaaaaaggcaattatcaggcaatgggaattttgagacaactgaatatggactgggatttggcgatattaaggaagtattgttgtcaggtgcggtgactcacgcctgtaatcccagaactttgggagcccaaggcaggcgaatcacctgtggtcaggagttccagaccagcctggccaaaatggtgaaaccccatctctactaaaaacacaaaattagccaggcacagtggcatgcgcctgtagtcccagctactcgggaggctgaggtgggagaatcacttgaacccaggaggcagaggttgcagtgagtcgagatcacaccactgcamtccaacctgggggacagagcgagactctgtctcaaaaaaaaaaaaaaaaaagtattgttaattcagttaggggtgataatgattttgagcttatgtaataaaatgtccttttttattttttagacacacaaatcagaattagttagaggttaactaatatgatgacatgacagggatttaaatactattgcaatctgaaaaaaaaaagaaaaggaaagag

SEQ ID NO: 943097 - DNA, 607 bp, Homo sapiens
gctgctgcaaaggacgtggtttcattcttttttatggctgcagagtattccgtgatgtgtatttgccatattttctttatccatccataacacatgttatttttaaatctcaaacagcttacaatctgcatagtgtacaatatatatgagtaaacacttgtgtaagtattgataattatcattcacagattatttaatacgtgtcytacattgttcaggacattcatacatatttcctcatttaattattaatatgctgtgatttattattattactcctactttttagatagaagcactcaacagttgagagccaaataatctgctaatattacagagtgtagaaatttcacacctggtactcaaacccaggccatcagacctcaatgcccttcctcttaaagtctaccccaggaaatcaaagagaaaactgaaaattggccaggagctagagggaatattacatacagtgcaacactgtcatacggctgacttcttagaagtaatggagactaaaatttaacaaaataacatatttagagttctaaaagattattttgtaatctgtcaacccagaactatctatctagtgggacaatcctttcaa

SEQ ID NO: 943098 - DNA, 582 bp, Homo sapiens
attgaaaaggagggacttcttcctcactcattctatgaggccaacatcatcctgataccaaaatctgtcacaggtacaaccaaaaatgaaaacttaaaggcaataaccctaatgaacactgatgcaaaaaattctcagtaaaatactagtaaaccaaatccagcaacacatcaaaaaagcttatccacggtgatcaagtcaacttcatcctcgggatgtaagtcaacatatataaattaataaacataattcatcacataaacagaactaaagacaaaaaccacatgattatctcaatagrtgtagaaaaggcctttgataaaattcaacatccttttatgttaaaaactctcaataaactaggtatttatagaacataactcaaaataataagagccatttatgacaaacccagacccaatatcatgctaaatgggctgaaaacattcccctcgaaaacttgcacaatacaaggatatcatctctcaccactcctattcaacatcgtattgaaagttctggccagggcagtcaggcaaaggaaataaataaagagtattcaaataggaatagaggaagtca

SEQ ID NO: 943099 - DNA, 582 bp, Homo sapiens
attgaaaaggagggacttcttcctcactcattctatgaggccaacatcatcctgataccaaaatctgtcacaggtacaaccaaaaatgaaaacttaaaggcaataaccctaatgaacactgatgcaaaaaattctcagtaaaatactagtaaaccaaatccagcaacacatcaaaaaagcttatccacggtgatcaagtcaacttcatcctcgggatgtaagtcaacatatataaattaataaacataattcatcacataaacagaactaaagacaaaaaccacatgattatctcaataggtgtagaaaaggcctttgataaaattcaacatccttttatgttaaaaactctcaataaactrggtatttatagaacataactcaaaataataagagccatttatgacaaacccagacccaatatcatgctaaatgggctgaaaacattcccctcgaaaacttgcacaatacaaggatatcatctctcaccactcctattcaacatcgtattgaaagttctggccagggcagtcaggcaaaggaaataaataaagagtattcaaataggaatagaggaagtca

SEQ ID NO: 943100 - DNA, 605 bp, Homo sapiens
tccccagaatatggatttttcttttctatcacatattcaggctgcatattttccaaactcttatgctctgcttctcctataaaactaaatgcctttaacagtacccgagatacctcttgaatgctttgctgcttagaaatttcttctgccagatactctaaatcatctttctcaagttcaaagttcaacaaatctctagagcagggacaaaatgccaccagtctctttgctaaaacataacaagagtcacctttactccagtttccaagaagttcttcatctccatctgagyccgcctcagcctggaccttactgtccatatcgctatcagcatttttggcagaaccactcaacaagtctctaggaagttccaaattttcccatattttcctgtcatcttctgagccctccaaactgttccaacctctgcctgttacccagttccaaagttgcttccacatttttgggtatcttttcagcaatgacccactctactggtaccaatctactgtattagtccattttcacactgctgataaacacatacctgggagtgggaagaaaaagaggtttaattggacttacagttccacatggctggggaa

SEQ ID NO: 943101 - DNA, 586 bp, Homo sapiens
gtcagtgtgcttttatttattggaggaaatagtcttataaagaagcagtttgattttccaggggtacattcatgtagagaaatagatttaatgtatggttatttcttattattgtttctattttaaaaacaaactgtttattctgatttcctcagaaggagacragatatttttcaatcaccttaaaatcatggatttaaatgtacactatagatttaaatccatgatcatacttgtccttattgaagtgaatattgtctgtttttgtccagggagtctactatttgattggcacagaactacattgtcgttggtaactttcttattgcttgctgttttcagaagcaaaagaaactattttttttttcattttctgacccatacataaaggcaaatatttctccaagaagcctccattacataagtggaaaatagtatcgctagattacaatctggtctgggtgttaaggatgcatattgattccagacttggtcatttaggtctatttggtacacaaggcagaataaagggattattgcttgataggtaggtaggtaggtaggtaggtaggtagatagatagata

SEQ ID NO: 943102 - DNA, 597 bp, Homo sapiens
aatagtaacttcatttctattacccttacgttttaagttgtagcgttatttcgagaggaatgaatacaagcattgagcaatcagccgaacgcatgggtaatcctttaagttctgaaatcaagactcaggggcgagggccctgctggagttctatagaacagcaaygtgtgtacataccaccagtggctgaatgacctagaggggttcatgtacagttttctttgcagaattctcagagggttttcagcaaagttgtaacaactatgtaacccagacctacatctccccctttctagtagattcaaagaaatctctataatcagttccttgaaattggaagtgagtccactgtgagaaaattgatgaatgtttgtttacctgctgggtgtaaaaatggaaaaatatcaacctaaggaagtatttgttttaatcttgtgttgtgcttgatgattatgcagcaactggaaacgggctatagggcaagaaatcaggaggcagccacacactcagaagttcagtgctggccaacagatatttatttgctgccaaaagatttctgctcaccagaaagcagggtagttccaggatatttatata

SEQ ID NO: 943103 - DNA, 677 bp, Homo sapiens
atttatagcttgggttctgaactgagctactttgatatgaatctaaaaagacatgccatattaaaatatgcctttagtctacagccaattaaagaaattagtgttaaaagaagaaatctgggtgattctgagatttagtttataatctgggaggagtgcaaatattattaatattataaattagtagtatgaaccataataataaaaataataaagcttctcatgtaaactccccaaatataataattgttttataggtatctgactcagggcagaaaatagatcagctttataatattgactgtctaatgactacaacttcctttgttttaataaaaaattaagatggccaaataacaatgaaattgtgacattcaaatatacttttcaattataagcactgaggcaccccaaactctgkgggcacaactttttttgttttactccaactttaacaatatttttttttaatcactcaaataaagaattaaattaaccaagtcaagatggattaaagacttaaacataagacctaaaaccataaaaaccctagaagaaaacctaggcaataccattcagaacataggcatgagcaaagacttcatgactaaaacaacaaaagcaatggcaacaaaagccaacattgacaaatgggatctaatcaaactaaaaagctt

SEQ ID NO: 943104 - DNA, 585 bp, Homo sapiens
aacatacatcacatatcaaacaaggtaatgttttcttgtaatgtcatgacttttctatgattctcaggaccacttcaagcatcactaacggcattttgtatgagtctcacgctgttaatcaaggttcacagtcttgcactaaacatgaaaatatgtgagaaccataggagatcactttttactatagtacacaatttactggagagatgaactgctcacatggagattattaacattgcatggcttttcttttttctttttttttgagatgcagtcttgctctgtcaccaggctggagtgcagtgatgcaatctcggctcackgcaacctctgcctcccgggttcaagcgattctcctgcctcagcctcctgagtagctgggactacatgcaggtaccaccatgcccagctaatttttgtatttttagcacagatgaggttttaccatgttggccaggatggtctcgatctcttgacctcgtgatctgcctgccttggccttccaaagtgctgggattacaggcatgagccaccgcgcctggcctcattgcatgacttttaagctgatattggcaacacttgagc

SEQ ID NO: 943105 - DNA, 624 bp, Homo sapiens
ttttggatacccatactcagtgagtcccaagctcttgaccaacatacaagaagaatgagctcacaggggcaatttaaggatggtgaaggtgtttaatttcattgagtgatgaaaagggctttcagtgcagaggggagttggagagggagtgggaagggcaggttatcttctccaaagtcagggtgtctcttccatgaagtcrggctttctccctctctactgactgagtctggggtctttataggcacagggaggggagtgcgtgctgattggtttgtgagtatgcaaaaaatgttaacttgatgacaccactcaaaggtgggcacaacactgtagaaaaaacaattaggaaatggtggggatatgtaaaacaggtggaaggtggggatcaatccgaggaaagcatgccacacgggagtacacgttttcaatccagtctgaggaggtctgaggatttaacttgtagtttgggtgtcaggctttaaactgtcttcagcttggaggtgggatttcactgggtacccgcccctatctgcctaggcatttggctgccttctgttgttatcagtattttcttgtagttaaagcttattttacctatgcattttatataaatagtatggt

SEQ ID NO: 943106 - DNA, 631 bp, Homo sapiens
caagattataggcatgaacccccacatcctgctgatgagtttagatatatgcatacatccttaataccttaaaccaaggtactaaatagattcactacacaattctcttgtctttatttattgagtttgtttttctttttttttgttttcagtcttttttcccccctttggtaagagtacttaacataagagttatcctctgaatatattttgaagtgtacaatactgtatcgttaactataggtactttgttatacacagwtctccagaacttattcatctttcatcacagaaattttaaacccattgagaaacaattatccatttcttccaacctccagcccctagcaactacctctttattatctgcttctatgtgtttgattatttcagatacctcatattagtggaatcatgcagtattttgtccttttgtgactggcttattttacttggcttagtgtcttacctatgttgctgcaaatggcagaatctcatttctcaaggctgaataatagtctgttgagtgtatataccatgtttcctttacctgttaattcatcaatagacccttggattgtttccgtatcttggcatttgtgaataacactgcagtgaacatgggtgcacc

SEQ ID NO: 943107 - DNA, 631 bp, Homo sapiens
caagattataggcatgaacccccacatcctgctgatgagtttagatatatgcatacatccttaataccttaaaccaaggtactaaatagattcactacacaattctcttgtctttatttattgagtttgtttttctttttttttgttttcagtcttttttcccccctttggtaagagtacttaacataagagttatcctctgaatatattttgaagtgtacaatactgtatcgttaactataggtactttgttatacacagatctccagaacttattcatctttcatcacagaaattttaaacccattgagaaacaattatccatttcttccaacctccagcccctagcaactacctctttattatctgcttctatgtgtttgattatttcagatacctcatattagtggaatcatgcagtattttrtccttttgtgactggcttattttacttggcttagtgtcttacctatgttgctgcaaatggcagaatctcatttctcaaggctgaataatagtctgttgagtgtatataccatgtttcctttacctgttaattcatcaatagacccttggattgtttccgtatcttggcatttgtgaataacactgcagtgaacatgggtgcacc

SEQ ID NO: 943108 - DNA, 693 bp, Homo sapiens
cattggtctcaccacaaaaactcctgtgctgagacccttccagacattgccctatatatctcttcatgtggatgttcacctgtattctcattatatctgttattaataaattgccaaacataagtacggtgtttccctgagttctctaagcaatgccaccagattaatggaacccaagaagggggttaagaaaaccctgatttgtagccagttggtcataagtacagtcatgtgctatataatgatttagtcagcaagagamcacatatacgatgatggtcccataagattataatgtatttttactacaccttttatatatttagatacatttagaaacacaagttcttaccattgtgtttcaattgcctacagtattgagtatagtaatatgctatgcaggtttgtggtctaggagcaataggctatactatatggcctggatgtttagtaggctataccatctagattaatgtaagtatagcacactctataatggtcatcaaatgacaagatcacctaaggaaaaatttgtcagaatgtatctctattgtttagcaacacatgactacataggtgacaacctattgcaatgagtatttgaagtggagggcagtcttttgggagtgggcccttaacgaatatgatctgatgctatctccagtaggtagtgtgagaattgaattgaattac

SEQ ID NO: 943109 - DNA, 771 bp, Homo sapiens
ataggtttccttgtagagagctttcacttctttggttatatacattcataagtagttttcttttttccaaaaatacttaaaatcccttttgtaaaagggattgagttcttgatttgattcatggatttgtccctgttggtgtatagcagtgctactgatttgtgtatattgatgttgtatcctgaaacttcaccgagtttatttatcagatcgaggggctttctggatgagtcttcagggttttccaggtatatgttcatatcatgagtgaacagcaacagtttgacttccactttactgatttggatgcccttcatttctttctcttgtctgattgcactggctaggacttttagtactacattgaatagaagtggtgaaaatgggcatccttgtctttcttgttccagttctcatgggggaaggctttcaactttttcccrttcagtataatgtaatagatggcttttattaccttaaggtatgtcccttctatgacagttttactgaggtttttaatcataaagtgaggctggattttgtcaaatgctttttctgcctttgagatgataatgtgatttttgtttttaattctgtgtatgtggtgcatcacatttattgacttgtgtatgtgaaaccaaccctgcatccctagtataaaacccacctgatcatggtgttggattcagttagctagtatttggttgatgatttttgcatctatgttcatcagggatattggctatagttttctttttttgttatgtcctt

SEQ ID NO: 943110 - DNA, 605 bp, Homo sapiens
gacaggaaaatgtgggaaagtttggaacttcctagagacttgttgaatggctttgaccaaaatcctgatagcgatatggacaataaggtctaggctgaggtggtctcagatggagatgaagaacttgttgggaactggagcaaaggtgactcttgttatgttgtagcaaagagactggcagcattttgcccctgccctagagatttgtggaactttkaacttgagagagatgatttagggtatctggtaaaaaaaattcctaagcagcaaagcattcaagagttaacttgggtgctgttaaaggcacttagttttacaagtgaagcagagcataaaagttcagaaaatttgcagcctgacaatgtgatagaaaagaaaaacccattttctgaggagaaattcaggctggctgcagaaatttgcaaaagttactaggagccgaatgttaatctccaagacaatggggaaaacgtctccagagcatgtcagaggtcttcacagcagcccttcccatcacaggcccagaggcctaagagaaaatggtttagtgggacaggccccctgtgctgagtgcagtctagggacttgatgccctgtgtcccagc

SEQ ID NO: 943111 - DNA, 536 bp, Homo sapiens
caatcagcccaggtaggattgtgagtctgtaaaatggtttggagcagatcaattaaggcctggggtttctcagtataagagggtgtattgtttttccaatttaagaaatcagcagaagtgaaaggctgatacagaaaggcacgtctttccaccatgtgcctgtcctcatcttccccagtacatcgctgctccctcaggggtgtttggattccagtcttaggtcataagtgggctgtcaagggagaagatttcctgcagcttcacttcctcttttgtctactctgggtggtctaggggtgtggatgtcttgcgagggtgtaggtgctatgggctcaggagtggggagccctccttctcagtaaggggggaccatcagtgccatctcctgycaggagtcatggggcatcgggtcagataggactttaggtgccgacctccctcagcaggtggagtgaaaaccttcctgaactgactatccctttgctactagtactgctgctgcctgccctcttagccactgagagggatctaaaagt

SEQ ID NO: 943112 - DNA, 710 bp, Homo sapiens
aacataaatatgtagaggtattggactagtttattctagcaggcccaacctccaagaccatccttgaacatcagtagactgtgagctgtatgtggacagtagcagtttcaccaacccctgcaaagtgactctgaagaggacaacaagccctgctccagtcacatccagaagctgactggtccacacatggccaaagcataagaaaactcatcatgggactcattttccttaaaatttgaacttgtacagtaaggacttcaactgaccttcctcagactgaggactgttcccagtgtatacaccaagtcactgaggtaggacaaaaagttgctatggtcctattattttatggttattataagtgtactggaactctgaaaataacttgtttgtataatgttattctatacaaggtatgtaacccaggaaatgacctgcgttatgtgtgttatgamccatctgagcttcccatgaccacagtttttgaaataagattaaggactgaggactcgtgggggctcataaatgacatgattaaagtgttagccaaaacagaagaaaaaggggtgcccaaaaaagtcaccttgaaatttgatgcctgtgctgtcattaatagtaataagttagaaataggatatggttctcttaattaaaaaagaggctatatgacaaaaaataagtacatttgtcatgaattaggactgtgtgaa

SEQ ID NO: 943113 - DNA, 498 bp, Homo sapiens
agtggccatagccaggtcagtgaatggaagtccatgttgctgagcccatgcatatcctccatccctgccaccatggccacttcrttcatggactcattgggcaatgacaggggtggctggagaaagaggctgactggtgtccatagaatgagtcatcctgtttacttgattattaaaatcctcctctgctgaggtcaccgtttgataagcactcacatgaaatacaaatatcttcacagtttttgaccactcggagaggtccattcacatacctcttcccaaaatttatttgtcaccaattttcctatcatgcttcttccaagtccctgactactcagccaaaccattggctatagcccatgaatcagtatataattgcagatctggccatttctccttccaagcaaagtgcacaatgaggtgcagtgctcaacattctgcccactgggacgattttccttcaccgctgtccttcagggatgtcctaggaaggggctg

SEQ ID NO: 943114 - DNA, 635 bp, Homo sapiens
gcctgcatatcgtgcagagccatctgtaaacagggcccttgtcttctcttcctgttaattgatcctggggaactccctatgagaccatcagtgcaggctgggggcagagaaggcagtgtggcrggaatggggatcatgagcatttgagccacttcctcatataacttactttgtgccctcaggagttgctcaagcctgatcacatatatgccacttccatttgatgatggaatgctgctgtgcatgccccactttatggctagacaagtcagaaagcactcaattcatgataggtagttcaggtcgcatggtgacttgatgacccatagccaaccgtttagtttctaccaaagtccagtaacagggcaagagctctttctaaaaaggaaagtagttatctgcagaagatggcagggccttcctccaaaatcctagaggcctctgctgtgattcatctatgggggacttccaaaggctcctaacagcatccctctctgctgctgacacctcaagcacaattagatctgctctgttctatggcccaagtgacagagcaacttgcatagcagtttggacctgttgcagagccttctcctgtcctggaccccactcaaaactggaagcctttcaggtct

SEQ ID NO: 943115 - DNA, 760 bp, Homo sapiens
gctagttctatcttctctctcacttctggacctgtctctattcactgatatttctagtcattatgggtcatatttatccactttttaagtgcctgctgatttttttattagatatcaagctttgttaatttcacaactttgggtgccagaaatttttacattcctatcaatattcttgagctttgttctagtatgttcatattttacatggaaaccattttatactttcgaagcttgcttttatttattaggtgggagcagaactagggctaattttgtcctactgcggaagaaataccttgcagagtagtctccctgatacttcatgaattatgaagttttctagtcggatttttgggaattgaaattatacacagtcctgtatgagcctcagaaattgttacatctgcttcttttgggtacttcttttcctgttccttttcaacagtttcgttccactcatgcattgaccaagctgaaatctcaagggatacccactgcagatctctsatactgtgtgctcctgtggctgtcttctccctagtactctgtcatacaagctccagtcatcttggcctcccaaaactccttgcttgtcttctcaaatcagggaaactactagactctgcctgtttctccttcctaagatatgccttggaaactccatacagtaagctaaatagccatagggcttacctcatatgattttcttctcagatatcagagatgaggtcccacaccacctgatctccagtgtttg

SEQ ID NO: 943116 - DNA, 561 bp, Homo sapiens
aaaataaagttcaagaatattgatgggaaggtaaaaatttctggcacccaaagttgtgaaattaacaaagcttgatatctaataaaacaatcagcaagcatttaagaagtggataaatatgacccataatgactaggaacatcagtgaatagagacagatccagaagtgagagagatgatggaactagtagtcagaaatattaaaagtcattaccttgaatttctggccaaaatggaagaacagggactggatttccccctagtctgaaagcaaaacaaaacaaaaatgggcaaaatatatgaaacaaygctttgcgaggaactggacatcatgcaattaaggatagtgacaactgagatgcatcctacaatccacgctagcagactaacttgaaggattccaggccagtgtcgcaaggaagggcagcaagacaaagccagttggaattctagatttgaggagacaaagcggagagaccagggtggcaagaggtcacgggccacagaccctggtgggagacctgcacagagagggaactccggatatatgaagagggttcc

SEQ ID NO: 943117 - DNA, 600 bp, Homo sapiens
agtgcttgctggttgttctgaggcaaaaactgcttcacagactaacccaaacaaatttgagctcctttgaggggatagctcccaaaatcagtgtttgagatttgttctgactccaaaagggctcttcctagcttccccttttcccatttctctctgggaaactcgtgggcctacagtttagcctgtatctaaaatgtatctgtgaacacctaccaagtgccttttaccacaacttccactgtttttgagagtacttgtaagcctaaacttctccacatgctacaaatgaagtcacctcctttgggaacagagtggagatttctattcyatagcctatttctctcccaacatctctgagctaaggatctggtgcaggggtgaggaagtgggtagggacaacggagtctttctctttaagagttgagggtttggtgaatgggggaggggacagaagccccagttcctctcaacttgcctctcatgatgtgaaacccttaccccaaagccagaaaaaggtcaattagagcccagtattatagagtcttcatcccatgagtaaaagctgggtagaagagatcacccatctcttggctgcattca

SEQ ID NO: 943118 - DNA, 608 bp, Homo sapiens
gcaaagacacaggagcacagctatgcaagtccttgggagtacacaccatgcactattgtgctctggatatgagacgtggagtccaaggagcctattttggaagtataagatttaatgtctgccctgctaggtttcagacttgcttggggtctctagcttctttcttwtggccgatttctcccttttggaacaggagtctttacccaatgcctgtacccccactctatcttggaagtaattaacttgtttttgattttacaggcttatagtcagaagggatttgccttgtctcagatgagactttggactttggacatttccgttaatgctgaaatgagttaagactttggggaacatttgagaaggcatgattatatgttgcaatgtgagaagggcatgagatttaggagggggccaggggaggattgatatggtttgggtctgtgtccccactcaaatctcacatagaattgaaatcctcagttttggaggtgggctctggtgggaggtgatttgcttgtagcggtggtttctcatgaatggttcagcaccatccccctagtgctgttcttgtgatagagttctcacaagatcttgttgtttaaaag

SEQ ID NO: 943119 - DNA, 643 bp, Homo sapiens
ctgaaaggtcttccaaagttagcttagtccaataatctgggaataattaagggaaaggcaagatggaggttaggctagcttagtttaccgttataattttctcatggatataacttttgcaaaggcagtttcaagattacccatgaatgagtagatatgggcaacacatacttcattattattattattattattattatatattttttggagacagggtctcactctgttgcccaggctggagtgtagtagygtgaccatggctcacttcatccttgacctaccaggctcaagcaatcctccccagtcagcctccccaggagctgggactacaggcacatgccattacacccagctaaatatacatttaaaaaaatttttttgttgggacagggtctcaccatcttgcccagactggtcttgaacccctgggctcaagcaatcctcctgccttggccttccgaagtgctgggattacagtcatgtaaccccactgtcagaggtgtgtggaccaaagcaactccatcttgaataggagctgggtaaaatgaggctgagacctactgggctgcattctcagacggttaaggcatcctaaatcacaggatgagatagggggtcagcataagatacaggtcataaa

SEQ ID NO: 943120 - DNA, 706 bp, Homo sapiens
aaagtgttaattaaatgcagatgccagagaggggcaacttcctgggcatacacatcaggagacaaaatggcagagtatgaccttctgggggcactccacaggaaaaagaaagccacagatgggcatgcgtacaacttcctaaacacactgctcatgctcacctcccaagcttaagaagggcactgtgcatgcaggcagcccaccctaagggatgaatcatggagaagggaggggtgcaagacgccagaagtgggtcagcctataaagtcctaggattacggttaaacactgcacttggctgggcacggtggctcacgcctgtaatcccagcactttgggaggccgaggcgggcggatcacaaggttaggagatcgagaccatcctggctaacacagtgaaaccccrtctctactaaaaatacaaaaaattagccgggcgtggttgcaggtgcctatagtcccagctactcaggaggctgaggcaggagaatggcgtgaacccaggaggcggagcttgcagtgaaccgagatcgcgccattgcactccagcctgggggacagagcgagactccgtctcaaaaaaacaaaaaaacaaaaacaaaaacaaaaaacactgcacttgaccttcacattgccctcttgggtctcttccaaatgtacttttctttctttcctgctctaaagctttttaataactttcactcct

SEQ ID NO: 943121 - DNA, 579 bp, Homo sapiens
ttcaatctttattctttatcaagattgttttgtgtatttgggggatccatttttgctccataaaaactttagatttttttttctatttctgtaataaattccatcagagttttgtagggatttcattaaatctgtatcttactttgggcagtatgaacatttgaacaatataatgttttccaatccatgagcacaagttgtcttttcatttatttgtatcttttgcttctgagggtgccaaaaatacacaatagaaaaagtgtagtttcttcaatgaataatattgggataattggatattaacatgcaaaaaagtgaaattggwtccttatctttcacaatgcaagagaatcaactgaaaatgaattaatattcaaacataaaatctgaaaatgtaaaatatgagaatcaattattaatgttgatcttttcaatgatttaatggatatgaaactgaaacacagacaacaaaagcaataataaagaagaatgaatatatcaagctaaaaagctttggtatagcaaaagaaacgatcaacagagtgaaaactcagacagtgaaatggaagaaaatatttg

SEQ ID NO: 943122 - DNA, 756 bp, Homo sapiens
ggtggagataattgaatcacaggggccgttttccccatcctgttctcatgatagtgggttagttctcagaagatctgatggtttttatgagagggttccccttcacttggtattcattcgctcccctgccaccaggtgaaaaaggatgtgcttgcttcttcctctgccatgattgtaagtttcctgaggcctccctagccatgctaatctgtgagttaattaaacctctctcctttataaattacccagtctcaggtatgtctttattcgcagtgtgagaatggattaatacagtaaattgataccaggtagtggagtgctgcttcaaagataaccaaaaatatggaagtggctttggaaccgggtaacaggcagaggatggagcagtttggagggctcagaaaagaggaaaatgtgggaaaggttggaatttcctagagacttgttgaatgtatttgaccaaaatgctgatagtaatatggacaataaagtccaggctgaagtggtctcagatgaagatgaagmacttcttgggaactggagcaaattgttgttatgtgttagcaaagagactggaggcattttgccctgccatagagatctgtggaactttaaactcaagagagatgatttggggtatctggaagaagacatttctaagcagcaaagcattcaagaggtgacagagcataaaagtttggaaaatttgcagccatatgatgcggtagaaacaaaaaaaaatttctggggagaaat

SEQ ID NO: 943123 - DNA, 342 bp, Homo sapiens
tggttaattttaagttcctaaattcgattcaacagtatttgttgcagctctgattcactaagaactgcagggcataagcagatgtgataagatggtctgtgccctcgaggagttgcaaacttagtcctgggaataagacaaatrcagtgtaattacgactacaaggaagaaagtgataaatggcacaaagcagtggttatcgaccttgactgcaggttggaatcacctggggagctttaaaaacaccagtaccagggtccttctcccagaggttctgatttcattggtctggggtacagcctgggattgggattttagaaaggcttttcaggtgactccaat

SEQ ID NO: 943124 - DNA, 764 bp, Homo sapiens
cagtgtgcctgccacctaatggtgacaccagttgcttttttatttaagaggctgattgcacttttcaaaaaatctaaatttctttcctcactctaatttaagtgaaatgataggagtataaattgctttgttacagttccaaacagtagccctgcttgaattttttatggctctaatgaagatcctgagtatccttttaaatattaaaattcagattaaatatcaactagatgtaatgacagcttaaaaaacgttatcagtacattgctatgcttaatgaatataaaacacgaaaaaggctgggcttcatttactgtgctccttccaacccaggaatttcagcctaaatttcctgacaccttcattttctccctgagtcctatgttttagctgttaaatgggggtgcagcaaagagttttagaaccaaacattaaaattaacaacccttctttaagaaacacattttctgcaccatcattttctctggccacttatttcttctttgcattttatgcacacgtcttatcaagatgtgttatttgaaggctgcgcccccaagtatgctctctctacccagatcttacatcaaagaggtgaattgttaaggaatttacaccacatktggaatcagggtaaaattaccagagaaaacaaagggctaaaaacccaatatcacacttcatcaggaaaagtaatggaaggtgggtcttcctaaatcatttgaaaaaaaaaaatactgttctgatgggacagaaaaagcagt

SEQ ID NO: 943125 - DNA, 735 bp, Homo sapiens
caggattggaaggtgtattagatcaggcatagataaactgctgtgacaaagagtctccaaaatgtggaggcttaagcaagataaatgtttatttttctcttacataacagtccatgaaagagtggattctctgctccaggaactcacccaggaaccctgctggcagggtggctctgcaccctttggggcagggactggcaaactttcattatcaagagccagatagcaaataatttggctttgtagaacctactgyttctgttgcaactgctcaaatgtgccatcgtagcccccaaacagccatagatgatatatacaaaagtgtacttggctctgttccaataaaactttatttgcccaaacaggtggtgggccacatttgtttctctatttttttttttttggagacagggtctcactgtgtcacccaggctggagtgcaatgccatgatcttggctcactgcaacctctgcctcccaggttcaagtgatcctcctgcctcagcctcccgagtagctgggattacaggcgcatgccaccatgcctggctaatttttgtatttttagtagagatgggctttcaccgtgttggccaggctggttttgtactcctgatctcatgtgatccacctgcctctgcctcccaaagtgctgggattacaggcatgagccactgcgcctagcccatatttgtttcacggacagtagttttctggcctctgctttagtccatt

SEQ ID NO: 943126 - DNA, 588 bp, Homo sapiens
gagtatccctcatccaaaatgcttgggaccagaagggtttcaaatttcagtttattgtttcctttttaattttggattatctgcatatacacaatgagatatcctggagatgggacctaagtctaaacacacaattcatttatgtttaataaagaccttatacacatggccyggaggtaattttaaacatgtttttaataattttgtgcacaaacaaagtttgtgtaaactgaaccatcagaaagcaacggtgtcactatcttagccacccatgtggaaaatctatggttgtttggcatcaccatcattcctgattgaacttacacgttactaataatcatttttattacacttattcacacataagtacttaacagtaaaagatacaacataccattaatacagtgaaaaaacataatgtactcagggtaaccaaccagcacagtaacatcacagaacacctctaccagttattaaataaaagcaacaaccaacaatggcaggctttcagtctcccacctacaatgttgtgtttgattaaaaagttactgaacacggtattttatttttttaggtgagaagaaacat

SEQ ID NO: 943127 - DNA, 679 bp, Homo sapiens
acacagagggagcatttagaccagccctaggcagaggggaatcacccatgccagtgttcagaacttgagttctgccaaaccttgccaccatggactaaagtgctctggagtcttaaataaacttgaaagtcagtccaggccacaagtactgcaagttttagtgctgagctgggcctggagccagtggacttgtgggagacacaacttactgagataccaacttgggcagctaagggaatgcttgcagcacccctccctcaaccccaggcagtgcaacttwcatctccaaaagagacttcttcctttcgcttaaggagaagagagggaaaagtaaagaggactttgtcttgcatcttggataccagctcagccacagtaggatagggcaccagtcagagtcatgaggcccccatttcaggcactagttcccagacatttctagacacaccatgggccacaaggggaacctactgtattgaagggaaggatccagtcctagctggacccatcacctaaagagcccttgggccctgaataaccaccagcgatacccagctactattctgtgggccttaagcaagactctaagatgcactggcttcaagtgagactcagcaatctcagttgtggaggctacagtgagcgacttcatctggttgagaaaagcagaggggaaagt

SEQ ID NO: 943128 - DNA, 727 bp, Homo sapiens
catccccagtctgcgggatatttctgtgcgatggattcctcctgccccactgagctgcggctttggtttttataataagatggtggcggcgggaggagccaagatggccgaataggaacagctcctgtctacagctcccagcgtgagcgacgcagaagacgggtgatttctgcatttccatctgaggtaccaggttcatctcactatggagtgccagacagtgggcgcaggtcagtgggtgcgcgcaccgtgcgcaagccgaagcagggcgaggcattgcctcacttgggaagcacaaggggtcagggagttccctttccgagtcaaagaaaggggtgacagacrcacctggaaaattgggtcactcccacccgaatactgagcttttccgacgggcttaaaaacggcgcaccacgagattatatcccgcatctggctcagagggtcctacgcccacggagtctcgctgattgctagcacagcagtctgagctcaaactgcaaggctgcagcgaggctgggggaggggcgcccgccattgcccaggcttgcttaggtaaacaaagcagccaggaagctccaactgggtggagcacaccacagctcaaggaggcctgcctgcctctgtaggctccacctctgggggcagggcacagacaaacaaaaagacagcagtaacctctgaagacttaaatgtccctgtctgacagctttgaagagaacggtgg

SEQ ID NO: 943129 - DNA, 727 bp, Homo sapiens
catccccagtctgcgggatatttctgtgcgatggattcctcctgccccactgagctgcggctttggtttttataataagatggtggcggcgggaggagccaagatggccgaataggaacagctcctgtctacagctcccagcgtgagcgacgcagaagacgggtgatttctgcatttccatctgaggtaccaggttcatctcactatggagtgccagacagtgggcgcaggtcagtgggtgcgcgcaccgtgcgcaagccgaagcagggcgaggcattgcctcacttgggaagcacaaggggtcagggagttccctttccgagtcaaagaaaggggtgacagacacacctggaaaatygggtcactcccacccgaatactgagcttttccgacgggcttaaaaacggcgcaccacgagattatatcccgcatctggctcagagggtcctacgcccacggagtctcgctgattgctagcacagcagtctgagctcaaactgcaaggctgcagcgaggctgggggaggggcgcccgccattgcccaggcttgcttaggtaaacaaagcagccaggaagctccaactgggtggagcacaccacagctcaaggaggcctgcctgcctctgtaggctccacctctgggggcagggcacagacaaacaaaaagacagcagtaacctctgaagacttaaatgtccctgtctgacagctttgaagagaacggtgg

SEQ ID NO: 943130 - DNA, 616 bp, Homo sapiens
agtggcctccatccttagattcagtcaccctgcatgtctggtcaaggctcccctggctcacctgggcagtggtgttaatatctttccggcggaagacaccatagctgagggcagtggcggtgttgtcattgatgagctgcagcactttgaggccagccatacgagcagcctgcagcacagctcggcgctcggcctgattgaagaagactggcacgktgatcactgcatccttgatgggctgctctacagatgacaacagaaaagggtcccgccggctccataccttagatgagggcttctaatctggtcactaatgacattttggactaggtaattctgtgttgtggggctgtcctgtgcactgtaggatgttgagcagcatccccggcctctacccactagatagcaggtgcacccctcagatgtgacaaccaaaatctatcttcagatgttgctaaatgttccctgggaggcaaacttgcccctgttggagaatcactgccctagatcctggggagcctggccctaagggccccaccttgaccactcacctgcaaaatcttcagctagagaacgagaataattgagaaccatgcccaacacttcctcaggtgag

SEQ ID NO: 943131 - DNA, 592 bp, Homo sapiens
aaaaggggatgggtaatgtaaaaatctggatcagtattccagttcagagaaattaccctgcaaatccttccaggtgataggaataaatagggtgcccatcaccccaggggttttccttggagacagtaacaccaagggaactaaccaaagctaagcaccatgcacccaaatcctaggaagaataactataggtaccggttatctgagtgtgttaacaagacatccttttctctcccttgttggaggaggactcagttccacagtttcacatcagcatgcgacttacattaaggagtccatgcaatcatccccccaagacacatttttgtcccrgactcaatcccaagcttcgggtcaaagccctaggaaagaaaactggatctgagggcttcagaggcagatgataacggaagttaaaaggcagcagcgcaggtgtgtgtggctgattcgtgccgattacgccaagccgaggctgtttcattgataaaggccacattaatattttaacagcccaatgggttcaccttgcccgctgcctagacagagccgatttatcaagatgggaattgcaatgacgaaagagtaattcaca

SEQ ID NO: 943132 - DNA, 592 bp, Homo sapiens
aaaaggggatgggtaatgtaaaaatctggatcagtattccagttcagagaaattaccctgcaaatccttccaggtgataggaataaatagggtgcccatcaccccaggggttttccttggagacagtaacaccaagggaactaaccaaagctaagcaccatgcacccaaatcctaggaagaataactataggtaccggttatctgagtgtgttaacaagacatccttttctctcccttgttggaggaggactcagttccacagtttcacatcagcatgcgacttacattaaggagtccatgcaatcatccccccaagacacatttttgtcccggactcaatcccaagcttcgggtcaaagcccwaggaaagaaaactggatctgagggcttcagaggcagatgataacggaagttaaaaggcagcagcgcaggtgtgtgtggctgattcgtgccgattacgccaagccgaggctgtttcattgataaaggccacattaatattttaacagcccaatgggttcaccttgcccgctgcctagacagagccgatttatcaagatgggaattgcaatgacgaaagagtaattcaca

SEQ ID NO: 943133 - DNA, 610 bp, Homo sapiens
taatttttgtatttttagtagagtcagggtttccatcatggccaggctggtcttgaactcctgacctcgtgatccacccgtcttggcctcccaaagtgctgggattacaggtgtgagccaccgtgcccagccagaataatagattaatctactaattgaatgataaaaattgtcaacaacacttaggaaatccttactattgtatctacatgtattaacacagttaatcctcaaaacagccctcttgtaaggaggactttacgaatgaggaaaccrgtttttgaaaggttaaataacttgtccaaaatcacacagccagtaggtggcgggaaagctaaggtttttcagtagactggggtcttgctcaccatactcattctgtgggccggccagtgtgtctggtgctgcaaaaatcagtcacttccctgaaggaacctactttctggtgggagagacaactagtgagatcaagggggatgggagagaagggcaagaactcgtgggttaaaaggcagagatttgtttttcattgcaagcatttcttaatttattaaaaagaatattccatgccaaaagccaggtgtgacatgtgcattttttctcaagatgg

SEQ ID NO: 943134 - DNA, 571 bp, Homo sapiens
tttagtagagtcagggtttccatcatggccaggctggtcttgaactcctgacctcgtgatccacccgtcttggcctcccaaagtgctgggattacaggtgtgagccaccgtgcccagccagaataatagattaatctactaattgaatgataaaaattgtcaacaacacttaggaaatccttactattgtatctacatgtattaacacagttaatcctcaaaacagccctcttgtaaggaggactttacgaatgaggaaaccggtttttgaaaggttaaataacttgtccaaaatcacacagccagtaggtggcgggaaagctaaggtttttcagtagactggggtcttgctcaccatactcattytgtgggccggccagtgtgtctggtgctgcaaaaatcagtcacttccctgaaggaacctactttctggtgggagagacaactagtgagatcaagggggatgggagagaagggcaagaactcgtgggttaaaaggcagagatttgtttttcattgcaagcatttcttaatttattaaaaagaatattccatgccaaaagccaggtgt

SEQ ID NO: 943135 - DNA, 598 bp, Homo sapiens
ccaggatgggatggctggaaaggacacagggaccgggaggagagggcaggagacgagggccagagaggaggagagggtgggagcaggagggggaagtgctggtcttgacctcccagttctgcctcctgcttcctggggaggggagggtggagtccagccaccgacttctgcttgtggatgctttgtcttcttttctttggacctttcccaccagtcctggataggctgaggaggggccgtgggacctgtctggggtgaggtgaggtcaggtrttgggctggatgtgggaggctgttccttggccgcagcctgtaactgaataaatgccattaaaaggggaatccatttcctccctcactcctggcttccattgccttcccccaggccccagccctggttccagaatccctctgaccactcctcttgtgctcaggagggcagaataactgcagcctttccctgtgccctgccaggctggtcccgggccccctctcagcccactcatccagggatgcagctctggccttggcccacccccatcagagggcctgtggccctgatcaccgcactccccactctgtgaccagacgttctctcc

SEQ ID NO: 943136 - DNA, 610 bp, Homo sapiens
gccctgggaccagtgttcatccccccacctcccaaaacagaggtgtgtaggggttccctgcctggagtcccaaccctgcaggatggagaaaatgggcaccagttactgtgacccattccggctccatatggatttggtttgacaacaaakctccctctgtgtgttcccaagccccttacataaccaggggctgtgggcagaggaggaaaggaggaggaggtggagatggggaccaggagacaccaggatgggatggctggaaaggacacagggaccgggaggagagggcaggagacgagggccagagaggaggagagggtgggagcaggagggggaagtgctggtcttgacctcccagttctgcctcctgcttcctggggaggggagggtggagtccagccaccgacttctgcttgtggatgctttgtcttcttttctttggacctttcccaccagtcctggataggctgaggaggggccgtgggacctgtctggggtgaggtgaggtcaggtattgggctggacttgggaggctgttccttggccgcagcctgtaactgaataaatgccattaaaaggggaatccatttcctccctcactcctggcttc

SEQ ID NO: 943137 - DNA, 603 bp, Homo sapiens
tggtacctacccacattgagggtgggtctgcctttcccgatccactgactcaaatgttaatctcctttggcaacaccctcacagacacccaggaacaatacttttgcatctttcaatccagtcaaattaacagttaatgttaaccattacaggaaggtactggagggttttaagcagagaagtggcataatctgacttaggtattcaatggatcattctcgctgttgtgtttttaaaaagacaggaggagggaaattttaaggagattatataggaagctattgtattaataagaaatggtggctggacatggtggctcatgcctgtaatcccagcacttttsgaggccaagacaggcggatcacgaggtcaggagttcgagaccagcctgaccaacatggtgaaaccccatatctactaaaaatacaaaaaaataaccaggtgtggtggcacccgtctgtaatcccagctattcgggaggctgagtcaggacaattgcttgaacccgggaggcaaaggttgcagtgagccaagatcgcaccactacactccagcctgggtgacagagcaagactccatctcaaagaaaagaaatggtggtat

SEQ ID NO: 943138 - DNA, 644 bp, Homo sapiens
cctgggttcatgtcattctcctgcctcagcctcccgagtagctgggactacaggtgcccaccaccacgcccagctaatttttttgtatttttagtagagatggggttttaccgtgttagccaggatggtctcaatctcctgacctcgtgatctgtccacctcgacctcccgaagtgctgggattacaggtgtgagccaccacgcctggccaatatgttgtttttcaaagactgccgtcctcatacagaccagcttggtactgacagaggaggtgaaatgggaaaagttcctttgtccccctcgcagggtgtacgatggggaagtggctcgtttcttcagtgccctgctgctcaggcctctaagggagcatacataygggcaggctgtggggctccaacaccagggcagtgtctaggggtgaatgtttacagcttttgaagccccagtaggcatgtgttacagggtgctcttttagtgtagccatccaaaggcagcttgtgttaactagcttaattacaccctctaccttgtggcaaagacagagggctttctgtatcctggggtgcttgctttggtgtagtggaagaatcagatcacacgtgggcttggagaatgagtgcaaggttttattgagtggaagaagc

SEQ ID NO: 943139 - DNA, 501 bp, Homo sapiens
gggtgctcccttgatgtggtgctctcccccttcctctaaggatacggcttctaaaaagccagactgcagtgattgttattgcctttctggttctagccatttagcaggattctggggctccagggtggtgctaagaactgtctgcaaagagtcctgtgatgtgattcatcttcacgtcttccagctatggataccagcacctgctctagtgaaggtggyggggagtaaagtggactctgttgggagtccttggttgtagttttgttttagtgtgctggttttagtccttggttgtagttttgtttagtgcggtggttttctcaaatgctggttatgctagcagtgaagttgtcacatggacagactcaggacctctggttaaccagggtgttgcaggtggtgaaattagctgttgttttctccttctttggagcagagttgttctcttatgagttgctgtaatggcttgagttgattggcctccagccagaaggtgctgct

SEQ ID NO: 943140 - DNA, 757 bp, Homo sapiens
acatctcaggtgattaaaagtaacccttaggtcacagtgaaagactctggcatggaacatttgttataacctgaggattatctccacatagatcttgagagataatgtcttgtcctcaatggtaaggcggcatgggatagttggaatagcaaggctgtagaattggattgacttaggcttaaaacctcctgtctcagttataagctgtgtgaccttggcaagtttaggaacccctctgaacctctatttactgtaatgtgcaaataagaaaatctgtctcttagagttgttgtaagaataaagtgaaatacatggcatatgaaaggcgataagtggatatttgtaaaccaacttcataacctgactagctataaaagaaaatatttagctaagatacttccggctgtaataattcttgattctctgattttatttgtataaaattaataaaatatgtattttaaagataactatataactacagagttcttggttgtcatgaattactgcttgctaaatcccctttgctggacatgtcaakttagagaaccaatggagaaggctttataccagatagtgcttgtagttctctgatctaagtccgtttcattatttcagtctttccagactctcctggggcttatgaagctgagtcaccatccccacctcctcctccgtctccacctcttgaaccagtgccaaagactgagcctgaacctccttctgtcaaggtaaaattatactgggattcttgcat

SEQ ID NO: 943141 - DNA, 719 bp, Homo sapiens
tggcctaatcatcacagaaatgtaatctatgttctggtgaaggtggaggagtaattctgagatggaattctgagatggaacaaacacagggtggttgattcagtggccaagtaatgttatcaaggatccagattgattccgtctttctgctctgccattctaagcgtgtcagtcactggatggctgcagcagctctgggcttcaaatcctcacacaccactctccagaggcagaacaagggaagtactgtgtctttgtgtcccttttttttattttttgagacagagtctcactctgtcgcccaggctggagtgcagtggcgcaatctcggctcactgcaagctccacctyctgggttcacaccattctcctgcctcagcctcccgagtagctgggactacaggcgcccgccaccacgcccagctaattttttgtatttttagtagagacggggtttcaccatgttagccaggatggtcttgatctgacctcatgatccgcctgcctcggcctcccaaagtgctgggattacatgtgtaccttttgaagaactaagaaacttttcctggaaatccctcagcagatgtgtcttcatgaatcattggtcacactgagtcacatgcctcttccgtgaggtaacatcaaggaaatggaatgtccacaactggcttaatcagagtagctgggaagggggcaaccttccccaaagctcatggcca

SEQ ID NO: 943142 - DNA, 582 bp, Homo sapiens
ggggtgttaagctccacttcctggagagaggagtatcaaataattggtggacatatgttaaaacaaccacagtaattaataaatattatagaggagataatttgaggctatgcagatatcttgtttcttcttaatatttcacctcctaattttagtattcatcagtgaatcttgcctgaagcaatcattactgtggtgtcctaatagtgattttcctctttattattycttttacatttattatttggaattcttctgtaaggaatatttgtcctttcttcttcacttatttatttattcagtcatttatttatatcagtatggactcacagatactcatttaattctttggatatcctttgggttataaccaatgctagtgttaattattttgtttcttcaatcattcttgctctggccattgggaattctttgaggttgtctcctgtgtcattttgacctgcccttgtcattgtggctgtggtgtctctgagtgtgttttgtgcacttccttaccttctggcattgcaagatgctccaggctcatattgtgtatgttgtatcttccctgtctcagccctg

SEQ ID NO: 943143 - DNA, 607 bp, Homo sapiens
ttaggcagttcctcaaaaagttaaatgttgaattaccataagacccaacaattccacttctaggtatgtaaccaaaagaattgaaaacacatgtttaaaaaaaacttgtatatatgttttcaccatagaaatatttacagtagccaaaaggtggaaacaactcaaatgtccatcaatggatgaatggataaatataatgcrgtatatccatacaatagaatattagtcagtcacaaaaggaatgaagtactgaaccataccacagcatactgaactttgaaaacattatgctaaatgaaacaagccagacacaatgggacacatattgtatgaaatgtccaggataggcaaatccatagaggcagaaggtggattagtggttgtcatagactggagaaggggtaagggagtgactgcttcatgggtagagcatttccgtttgagatgatattcttctccaactagatagtggtgatggttgtacattgtgagtgtactaaaggccactgaactgtactctttaaaatggtttaaatggtgagttttgtgttgtgtgatttttttttaccataattaaaaacaaaaagctgcatgacagcaagtgagg

SEQ ID NO: 943144 - DNA, 630 bp, Homo sapiens
aaattaaaactataagagataccactttaccttctagaatggcagaaatgaatatcttagtccgtttgggctgctacaacaaaatgccatcatctgggtggcttattaacaacagaaatttatttctcacagttctggaggctggaaagcccaagatcaaagcagatgcagtgtctgggcaggtcccgctttctggcttatacacagtgccttcttgttgtatcatcacatagtggaacatccaacaagctccactaggcgtcttttgaaagagcattgatcccaggatctcccaaaagccccactcttaatatcatcactttgagagtcaggatttcagcacgtgagttttaaggcgacacaaacattcagacaatagcaatcaaaaagattgacaacaccaattattggcaaaaatatagagaaactggattgctagtggaattgtaacatgatrcaggcagtttgacagtttcttttaaaagttacacaagagtagttatatgacccaatgatttgattcttaggtttccacccaagaaaaataaaaacaggtctatacaaagacatgtatgcaaatgttcatagcagcattattcatgataataaaaaaaactaatagcagtccaa

SEQ ID NO: 943145 - DNA, 613 bp, Homo sapiens
ggaggctgaagcaggagaattgcctgaacccgggaggcagaggttgctgtgagccagcatcacgtcacttcatcccagcctaagagacagagcaagactccatctcaaaaaaaaaaaaaaaaaatttgctgattatgcyatgtataaggagccagacacaaaatagtacatattacatgattccatttacttgaaatttctagaaaaggtgaaacaatggggatagaaagcagactgggattgcttggagtggtgagtctgagtggggactgactacaaacacatgtaaaggaacttttgggggtgatggagtgttctaaaactggaccatagtgatgattgcaaatccagaactcatcatgctgtacacttaaaatgggcaaattttattgtatataagttatacctgaatgaagctgtccaaaaaggataaaggagatgaacggatatttttaaatatggaaatagggatagtaaatagtcacatgagaaaaattcacagctttgttaacaaattaacaaataaacttacaatctttaatgttattaaaaaatagcaaaaatggaaatgataaaataagtttacagagttgtaaaaaatagaggtctattc

SEQ ID NO: 943146 - DNA, 576 bp, Homo sapiens
ttgagtttcttccggcctccttcacatcccagcctgggtgccagagacatctatcacttaatagaacagccacaccccagaaatgccaataaggcagatttttaaaaatcccccaagaaaaacatgctgtaagtataaggacttaaaacatgttctaagaacttaaaaaagagcagcccctttttaaaatatatacatattttaagttatagaatacatgtgcagaacgtgcaggtttgttacataggtataactgtgccatggtggtttgctgcacctatcaacstgtcatctaggtttcaagccctgcatgcattaggtatttgttctaatgctctcccttcctctcatcccccaaccccaccccccaacaggcccaagtgtgtgttgttcccctccctgtgtccatgtgttctcattgttcaacttccactgcagtgtttagttttctgttcctctgttagtttgctgagaatggtttccagcttcatccttgtccctgcaaaggacatgaactcactctgttttacggctgcgtagtattccatggtatatatgtgccacatattctttatc

SEQ ID NO: 943147 - DNA, 624 bp, Homo sapiens
cacaggcatgtacaccacacctggctaaatttattttatttttttgtagagatgggggtctcaccatgttgtccaggctggtcttgaactcctgggctcaagggatcctcccacctcagcctcccaaagtgctgagatcctctaggtttctttgggttcattctcagcattctttgggttcattctcttcatgtggggtaaggtggccaccagcaactacaggctcacatggtcctcgtgttttaaaatgcaggttttctggctgggcacsgtggctcacgcctgtaatcccagcactttgggaggctgaggatggtggatcacaaggtcaagagatggagaccatcctggccaacatggtgaaaccccgtcactactgaaaatacaaaaattagctgggcatggtggcgcatgcctgtagcctgtagtcccagctactcaggaggctgaggcaggaaaatcacttgaacctgacaggcagggcttgcagggtttggtggagctccgcagagcttggagtgttgaggtcgcgccactgcacttccagcctggagacagaaggagactccatctcaaaaataaacaaataaataaatataaataaaaaaataaaataaaatgcag

SEQ ID NO: 943148 - DNA, 685 bp, Homo sapiens
taatcccagcactttgggaggccaaggcaggcaaatcacttgaggccaggagttcgagacaagcctggccaacatagcaaaccccatctctactaagaatacaaaaaaaaaattgctgggcacggtggcgcatgccygtaatcccagctactcaggaggctgaggcaggagaattgcttctacccaggtggtggaggttgcagtgagctgagtttgttccactgcactccaacctgggcaacagagcgagactttgtctcaaagaaaaaaataaaagtaataaaataaaagagacccaagggagctcattccaccatatgaagacatagcaagaaggagccatcgatgagaaagtgagcccttaccagacaataaatttgcctaagccttgatcttggacttcccagcctccagaactgtgagaaataaatttctgttgtttataagtcacccagtctatggtattttgttgtagcagcccaaacagattaagacagaccccaagcccattgcaccacactgtgtccctccctacaccacatccttgaaaaccgaccctgttttcagccaaagaaattgctggtgctggatgttacaaaataaaccttctattgaaaaatatttttcttcgttttccaaaaacctcaagtttgcccgtgtgtgtgctgacacctacgtgtagtat

SEQ ID NO: 943149 - DNA, 618 bp, Homo sapiens
ggagtttcttccttctggtgggttcatggtcttgctggctcaggagtgaagctgcttattgcaaagagcggaagaacaaagcctccacagtgtggaaggggacccaagtgggttgccactgttggcttaggcaacctgcttttattctcttatctggccccacccacatcctgctgattggtccattttacagagagccaattggtctgttttacagagagctgattggtccrttttgacaaggtgctgattggtgcgtttacaatccctgagctagacacaaaaattctccatgtccccactagattagctagatacagagtgtcgattggtgtatttataaaccctgagctagacacagagtgctgattggtgcatttacaaaccgtgagctagatacagagtgccgattggtgcattcacaatcccttaactagacataaaggttctccaagtccccatcagattatctagatacagagtgctgattggtgcattcacaaaccctgagctagacacagggtgctgattggtgtgtttacaaaccttgagctagatacagagtgctgattggtgtatttacaatctcctagctagacataaaggttctctaagtcc

SEQ ID NO: 943150 - DNA, 690 bp, Homo sapiens
cttgctgaaagcaatgggaatatgagatgggcagtggaagaaagtagttttaaataccagttatgagcatgtaaccagttatagaaacagactgtgattgtcatgaatatgtcttccttgtgttgttatgaagatgcttgtgtttatatatatgtatacacatatttataaacatatatatacacacacatatgtatayacacacacacacacacacacacacaaatggtccctgacttacaatgctttgacatgattttccacttataatttttcaactttacactggcacaaaggtggtacccattcagtagaatccatacttcaagtatctatacaacctttctgcttctcactttcagcacagtattcaataaattacatgagctattaaacattttgttacaaaagaagtatttatgttagaagattttacccaactgtaggctaaggtaagtgttctgagcacatttaaagtaagctagctataacgtttggtagtttatgtgtattaaacgcatttttgacttagaatattttcaatttacaatgggtttatcggaacatatataatctttgtttttttctctcttatccccataggtaacataagatctattaactttatagtatagtatttaagtattgttaaattgacataatagtgtttaagttatgagatatatcaga

SEQ ID NO: 943151 - DNA, 690 bp, Homo sapiens
cttgctgaaagcaatgggaatatgagatgggcagtggaagaaagtagttttaaataccagttatgagcatgtaaccagttatagaaacagactgtgattgtcatgaatatgtcttccttgtgttgttatgaagatgcttgtgtttatatatatgtatacacatatttataaacatatatatacacacacatatgtatatacacacacacacacacacacacacaaatggtccctgacttacartgctttgacatgattttccacttataatttttcaactttacactggcacaaaggtggtacccattcagtagaatccatacttcaagtatctatacaacctttctgcttctcactttcagcacagtattcaataaattacatgagctattaaacattttgttacaaaagaagtatttatgttagaagattttacccaactgtaggctaaggtaagtgttctgagcacatttaaagtaagctagctataacgtttggtagtttatgtgtattaaacgcatttttgacttagaatattttcaatttacaatgggtttatcggaacatatataatctttgtttttttctctcttatccccataggtaacataagatctattaactttatagtatagtatttaagtattgttaaattgacataatagtgtttaagttatgagatatatcaga

SEQ ID NO: 943152 - DNA, 565 bp, Homo sapiens
ttccccactgtcagggacatttagcagagactggagatatttttgattgtcacactttcatgagactatgggagtgttgctgctggcagtcagtgggtagaaacaagagatatttctaaacatcctatgatgtgtagctaacaagtgttaaccaacctcaactgtcaacagtgccaggatgagaaacactgccctagagcatgcgaagtagatttctcttgaccagtgcatatcccgaactaagcaaacatttgtctgataacctttaaaaccctggaatctctcattacaattctgctaattctccatggaagcatgtgccaatactttcatttgaratgttatgtgaacatgtcattataaataacaacttgcatgtagtgcattagaatttgaatctatataaaattcatgaaaaatgatattgccaggttcatcatggatatgcaaaggtttaacctcaaagtgatccaactacaaaccaagtctttaggcttatctatcaggtttagttcatatgcccgcatataccaccacagaatgtcctatgcccagctggctgctt

SEQ ID NO: 943153 - DNA, 565 bp, Homo sapiens
ttccccactgtcagggacatttagcagagactggagatatttttgattgtcacactttcatgagactatgggagtgttgctgctggcagtcagtgggtagaaacaagagatatttctaaacatcctatgatgtgtagctaacaagtgttaaccaacctcaactgtcaacagtgccaggatgagaaacactgccctagagcatgcgaagtagatttctcttgaccagtgcatatcccgaactaagcaaacatttgtctgataacctttaaaaccctggaatctctcattacaattctgctaattctccatggaagcatgtgccaatactttcatttgagatgttatgtgaacatgtcattataaataacaacttgcatgtagtgcattaraatttgaatctatataaaattcatgaaaaatgatattgccaggttcatcatggatatgcaaaggtttaacctcaaagtgatccaactacaaaccaagtctttaggcttatctatcaggtttagttcatatgcccgcatataccaccacagaatgtcctatgcccagctggctgctt

SEQ ID NO: 943154 - DNA, 568 bp, Homo sapiens
accactcccactactaacttttttgttgttgttgttttgtttcgttttgagacggagtcttgctctgtcaaccaggctggagtgcagtggcacgatctcagctcactgcaagctctgcctcccaggttcatgccactctcctgcctcagcctcctgagtggctgggactacaggcgcctgccaccacacccggctaattttttgtatttttagtagagatggggtttcatcatgttagccaggatggtctcratcccctgatctcatgatccacccacctcggcctcccaaagtgacccactactaacttaaacaagctacttggaggccccaaaatcatccctccaggaccaactagcactggggccagtataggctgttctggggcctaaaaacaggcacatttaccccactctgccaccactggggtctgaagcctggttcagttagcatccaagtccccatcaaaactttgccacaacatcaactaataactaccttaagtcactgaggaaatcacagttaatacagactctgtgtactgctgaagaagtcatacaaaattata

SEQ ID NO: 943155 - DNA, 715 bp, Homo sapiens
cagaaaggttatctataggtgcacccacaccaagctccagtgagagaagccccagttatttcacagtcatggatgaggggtaaaagaagttcccttttccaaggcccttcatgagcaccagggctgcctgcctgttggggtattgttgcagactatcctagctgagcccagcgctgcaactgtgccactgctgaaacttctcaccagtggtaagatctgggactcaaggcttgccatctggattcttttgtactactggctgttcccttaatgtgggrcactccctcttccctaggggtaggagtccctgagagccagactactgtgactactgttgttcctcttggtctagccacccagtgagtctgccgtaattcaggctggtgctgggtaatgtctgcaaggaatccagtgatgtaacctgtcctcaaccctctcagcagtgggtaccagccagcacccattctgatgggggcgtgacatacactctgagatttcttggttataagtagtcttagtttgttggctttctcaaattctggttgtaatagtaatgaacttgtcctgtggacagacttaggaccttctggttagccagggtggtgcaggctatagtgatagctcatgcacaagttttctccttcctgggtgcagtgttattgtacctgtggatgctgtaatggtctgtgttggttggcttccagccagaaggtga

SEQ ID NO: 943156 - DNA, 623 bp, Homo sapiens
acagtaaaaatatataaaagatttaaaaaaatggtacccatgtatggggtacctatcaagaaaggagcctgaaggactagaagttgctctaggtgagtcagtgaatgagaagtgagtgaatgtgaatacctaggacattattggacactactgcagactttataaaccctgtagccttatgctacattagacttataaaaatatttttcttttttcaataacaagttatcttactgtgacttttttactttacaaacttctaaattttaacttttgactcttttataataacatttagcttaaaacacaaacaccttttggaggccgaggcaggcagattgcttgagcccmggagttagagaccagcctgggcaacgtggcaagaccccttctccacaaaaaatacaaaaattagtcaggtctggtggctcatagctgtagtcccagctactaaggaggctgaggtgggaggatcactccagcctgggaggtcgaggctgcagtgaaccatgattgtcctgctgcactccagcctgggcaacaaagtgagaacctgtctcaaaaataaaaaataataaataaataaataaataaataaataaattaatggaagaaaaaagtac

SEQ ID NO: 943157 - DNA, 465 bp, Homo sapiens
attttgtagttctgtgtcatttctggatcagcttccattgattaatcttactctatatgatggctaatctttacctatttctttgcatgcttggtaattttttatttgatgctatatattgagaattttactatatsggatgctgaaagttttatctattcttctataaatatttgaactttgttctagaatgcagttaagttacttagaaacagttgttcctttcaaggcttgctttcaacttttgttaggcagaactagagaggcctttaaggctaattttaccccactactgaaaccataccattccatatactctacttaaatgctctgtgaaattacaaggttttccactctggctggtttgaatacatactagttttagccttatgtgagctttaagcatcgttccctcggcttctttggatagttttttcctcatcattagctaatttcctcacatgt

SEQ ID NO: 943158 - DNA, 575 bp, Homo sapiens
ggtatacattagttctaccatggtaatttatagcagcttaaaactcagggccaccaaagaatttatgaaaattcctctaaatctattaagttttatcatactccatttctgaaaatatatatggaaatgaaaaatctcaagacatgaacatctatgttataaaaagaaatagggggaaaatgaatatcaattaatagcagcgaagcaatcattttattaatttgcaattccacatgcatttattttagaaaaattataggattcattccggagttccatctgtacacattctgaagtcatgctctaaattaacatgcatttcttatccaattggcttataaaacttgatttactctttaatctctgaagtaaataaraacaacatttttaacctttctttaagaaatctgctagtttaagatttcttgctagtttaaatacatgtacttttaataaaaactccaatttagtttttctaaactaattttacctaaaagatttggtcatgtaaacaagggtgtagttactctgtttcaagcatcttccacctgtgatcatgtaagtgctaggcagta

SEQ ID NO: 943159 - DNA, 456 bp, Homo sapiens
tgttggaggcagggcctggtgggaggtgattgggtcatgaatacagatccctcatgcatggtttaacaccatccccatggtgataagagagctctcactcaattatttcacacgagatcaggttgtttaaaagcctgggacctccccgaccccagtctcttgctcccaytctcatcatgtgatgtgcctgctcccccttcactttctgccatgattggaagcttccagaggccctcaccagaagcaaatgttggacccacactttctgtgcagcctgcagaactgtgagccaaagtaaaccacttttccttataaattacccagtctcgggtatttctttatagcaatgcaagaatgagttaattaaaaaattggtactgaggagtagggtgctgttataaagatactagaaaatgtggaagtcgctttggaactgggaaatgagcagaggttggc

SEQ ID NO: 943160 - DNA, 771 bp, Homo sapiens
accccaggtacagctcaggtcactgctccatagggcacaagtcataagcctcggcagcttccacatggtgttaaatctgcagttgcacagaatgcaagtatgaaggaggcttggcagatccccactagatttcagagttgtattggacagtctgggtgtctaggcagaaacttgctgtaaaggcagagcccctagaggatactctacatgggcaatgccaaggggaaatgtggggttggagcctccgcacagagtccccagtagggcactggctagtggaggtgtgggaaggaggccgctgccctccagacctgagaatggtagatccactgagagcttgcctcctgagcctagaaaagctgcaggcactcaacttcaaaccatgagatcagccatgaggctacaccctgcaaagtcacaggggtggagctgcccaaagtcttgggagacactcccttacaccastatgccctggaggtgggacatggagtcaaaggagttgattttggagctttaagattagtgactgccctgttgggtttcagacgtatagggggcctgttgcccctttcttttggctaatttttctcttttggaattagattgtacaccattgtatcctggaattaaataattttgttttttaatctcacaggctattggatggaaggcattcatctccagttgagactaacgacttgggactttggagttaatgctggaatgagttaatacgttgggggaactattgaaaaggcatgattgtatttt

SEQ ID NO: 943161 - DNA, 482 bp, Homo sapiens
gctgaaaaccactgggttaaaggaattttgcagaaatcaatcaacttgtaagtaacagacactaaattcagatctgtcagcttcaaataattttcttacttctacccccatacaacctcctaagacaaagtctcatctgagaaagtaataggaaaatgtcactatgttttccacttttatcactccttaccccaacatttaatcttctatatgtgtcactgggatcaactcatagatgattctgctccgagtctaacccacactctccaagtttacccacactcaattygaaagcattagcttgggtgcaccgtaaccacaggaactttcttttttccaatcaattgctcagtatcacttatttcaggcctgctgcagagaactagcagagaaaatggagaacagaccctcctcctccaagagcaaaaggtccaacttgggagccggggatacacatgaggagttctaacacttactgacaa

SEQ ID NO: 943162 - DNA, 667 bp, Homo sapiens
gtttatctctttgtcttgcatctttatttctacactctctcgatgccgcacatggggagagacccactgaccctgtggggctggtccctacagcttgagtctaggagttcaagacaagcctggccaatatggcgaaaccccatctccacagaaaatacaaaaatgagccatgcatggtggtgcatgactggagtagtcccagctactccagaggctgaggtgagaggatcacttgagcctgggaggtggaggcttcagtgagccaagatggcaccactgcaccccagcctgagcaacagaatgagaccccgtctcaaaaacaaacatgtattatgaccatatattcatcagagttcagagaaacagaagcaatgggagattttatatagatatatatggagagagagagagagacatatatgaaactggtccatgcaatcatggcggctgaggctggggagtcccacartctgttgtctgtagctgaagacccaggaaagctggaggtgtaagttccagtctgaggttaggagattggtgtcctagctccagcagtcagacagagagagaaaacgctctcttccttcacctttttgtgctattcagtctctgactatgatgctcacctgcactggggagggtcctctgctttcctcaatctatccat

SEQ ID NO: 943163 - DNA, 798 bp, Homo sapiens
gggaaaagcagcaatgagacccacagcccctgggttttcgtattttttgccccacaaagtgtctcagtattttttgaattggaatttgtatttccaactttttttttttttgaaacggtgtctgaccctgtcacccaggctggggtgcggtggtgcgatcttggctcactgcaacctccacctcccgggttctagcaattctcctgcctcagcctcctgagtagctgggactacaggcatgcaccaccatgcccggctaatttttgtgtttttagtagagacggggttttgccatgttgggccaggctgttctcaaactcctgacctcaagtgatccacctgcctcagcctcccaaagtgttgggattacaggtgtgagccactgtgcccagctcatatttccaacttctttkggaaaatcaggaaacccactcacactgagccagaatccctgcaaggcaacatcctgactggagcagaatggggcctgccctttggatacagctcacactttccagtgtacccctgtccccaccactcctgtttgtctcccatctggctccggtaggcatgtgcgtttgcagctctgtattagctgatcctgttctcccagcacaccccgcactcccacccctccccgcctggcacatgccctctctcgcccatgctgcctctttgcagcccttcatgatttgcctgcccgactcccccaccagaaggggcagggcctgggctgattcagatcccagtacaaagcctggcacacaggacatgacacacatttggggaaagagtgga

SEQ ID NO: 943164 - DNA, 619 bp, Homo sapiens
aaagattttccagttggcaattggttaaaagagttaagctttgtataaagacttgaagtcagtagaaagaggttttgagttaaggggggttgtggaagccaaggttcttgttatgtaaaagaggcctctcctagtagcaggcttcagagagaatagatggttaatttctcttttcagaccttaaaatgtgtcagactcttggttaaatctctcctggtggcatacacctatggtcccagctactccggaggctgaggcaggatgatcrcttgagccaaggaggctgagactgcagtgagctatgatcttgacactgcactccagcctgggtgacaaaaggagaccctgtctcaaaaaaaaaaaaaaattaaatatattctggatctgaaaaagatctagaaagggaaggggtttctcaacagatataaatttcccccacaagacagcttggaaagaccatttcaaaatatgtcaaagaaatatatttgagggtaaaatatttttatggccttcagggcctgtatctgtcatgcgatgctatcccagagtcccgttggaatttggtatctattgtcacaaagagtctgttgtgagtgttacaatcttcatgttattgtta

SEQ ID NO: 943165 - DNA, 575 bp, Homo sapiens
gctctatcttgggcctttgcctacggagctaggtgaggacaggcatttctgttttcatgcccaaatccaccctgacctgccttgccgtcatcctgtgcctgtaaaaaccccaagaccctagtgggcagagacacaagtggctggacttagagagaaacacaccagcccaagaagacacaagtgactggatgtcgagaggaacgcaccartgtaagagcacactgacaggtgcctgcaggccggcaggccatcagttggcaaaatgatgtggagtttggccagggcagtcggaggagaacccggctgctgagtagccccactccagaagaaaaccaccttcctcttccatctcccttctggctcctccatctgctgagactgcctgcactcaataaaaccttgcattcactcttcaagtccatgtgtgatccaattcttctggtacaccaaggcaagaaaccccggcatacagaaagccttctgtccttgcaataaggcagagggtctaactgagctgactaacacaagccacctatagttggctaaactgaaagagcatactgtaacacacgtcc

SEQ ID NO: 943166 - DNA, 566 bp, Homo sapiens
ataatagcatcaaaaagaataaaatagaaataaacataaccaaggaagtgacagacttgtatactgaaaactacacaatgttgatgagagaaattgaagatgacacaaataaatgaaaagctatcccatattcatggattggaagacaatattgcttaaatgttcatagtactcaaagtgacctacagattcaaaggaacccctataaaaattccaatggcattttctttacagaaatggaaaaaaaaatcctagaattcttatgtaaccacaaaagatctcaaatagccaaagaaatcttgagaaagaacaaagttggaggcatcacactttctgatttcaaaatatattacaaagcaacagtaattaaaacagtrtggtactggtataaaaaagatctatagaccaatagaacagagaacctggaaataaaggtatgcatatacagtcaactgatctttaacaagggtgccaacaaaacacagtggggaaaggtcaatctcttcaacaaatgatgtcgagaaaactgcatatacccacacaaaagaatgacattggaccattac

SEQ ID NO: 943167 - DNA, 566 bp, Homo sapiens
ataatagcatcaaaaagaataaaatagaaataaacataaccaaggaagtgacagacttgtatactgaaaactacacaatgttgatgagagaaattgaagatgacacaaataaatgaaaagctatcccatattcatggattggaagacaatattgcttaaatgttcatagtactcaaagtgacctacagattcaaaggaacccctataaaaattccaatggcattttctttacagaaatggaaaaaaaaatcctagaattcttatgtaaccacaaaagatctcaaatagccaaagaaatcttgagaaagaacaaagttggaggcatcacactttctgatttcaaaatatattacaaagcaacagtaattaaaacagtatggtactggtataaaaaagatctatagaccaatagaacagagaacctggaaatraaggtatgcatatacagtcaactgatctttaacaagggtgccaacaaaacacagtggggaaaggtcaatctcttcaacaaatgatgtcgagaaaactgcatatacccacacaaaagaatgacattggaccattac

SEQ ID NO: 943168 - DNA, 590 bp, Homo sapiens
ggacatccctgtttccccggggcaatgcagggttaatcttaaagatggaaaggctggtactggagtgtgtgggtaaaagtatgttgccactacggggggtggggatgccatttcctctggcaaaaaaggctcattagaatttaggagttaggtgtccctagcttcatcagagtcccccatattcccatcccaacttacagggtcccattctttcccaatcaaagccctccctttgacagtagacasttggtgaagctgagcatgaaccttccattgcaggtcagccacttgcataagagcttgtgtctgattttcagcaatttcagctctttgtccacagaagagaagattcttacccagggcaccctgagaaactttttggctatgtatgtgtatctagaaccaggaaatagaatccctcagctcatccttttcgttcatcactttgcccagtgaacttaggagcaaccagccaacttcattatattccttggttctccacaaatgttcaaaggtatcatatatagagtcactaaactccttgcctcttaggaacagggaatcagaaatatcaaatgcatttattttgc

SEQ ID NO: 943169 - DNA, 602 bp, Homo sapiens
ttaatttctttctcttgcctgactgccctgtcgaggccttctaatactatgttgaaaatgagggttagagagggcatgcttgtcttgtgccagttttcaagcttttgtctattaagtataatgttggctgtgggtgtgtcatagatagctcttattattttgaggtatgttccttcaatatctagtttgttgagagtttttaacatgaaggatgttgaattttaataaaagccttttcaacatctgttgagataatcatgtgcttcttgtctttagttctgtttatgtgatgaatcacatttattgatttacgtatgttgaaccaaccttgcatcccagggataaagcctacttgattgtggtagataagtttttctgttctgctggattcrgtttgctagtattttgttgagaatttttgcatcaatgttcgtcaaggacattggcctgaagttttcttttgtgtgtgctgtgtttctgcaggtatggtaactggatgatgctggcctcgtataatgagttatggaagaatcactctacctcaattcttaacacatagtttcagtagaaatggtaaccgctcttctttgtacatctggtga

SEQ ID NO: 943170 - DNA, 551 bp, Homo sapiens
gcctgagctgtcgaggagacattggcgttgctgagcagccctgtgagggttgcccgggcctggcaggggtgggctgccatggatctgagctctcccatagccacagggacaactggattcccgagtagcacaggtcaaagggcagcacttaactgtctgtcacaagcaagggggtgagaggatcagaatggacagcagggttgggacagccgcgggggagcctgccctgcccagcctatggagatggctcataggacatagcatttccagggggaaggtgtctaggcagccggcaaggattttgttcaacaaatagaatgaaaagcaaccaagaatcgatgagcagaagtccaaggccggatgccccaacagaaaggaatgatcccctgctgtttccaartctgaacttgttctcaatctcagaatccatcagtggaagaggggcaggtcccaagaggaaggaccccgcagccataccatcccccaggactgtatcggtttcctggggctgctgtaaaaacctgccccagactgggtggcttaaacaatag

SEQ ID NO: 943171 - DNA, 797 bp, Homo sapiens
atttgaataaaaaatggtctctaaagccatgatcttaatcccttctctattttagtttgcaatctatgctaagaggttttgttgatattaaagcactttacacatacaaggtgattataaatgtagttactattattagtcataataacactaacaataatgacatcaggaacttagtaatacaatttttttttttttgggtcttcaacttttaraagtgtgcctttgacaatggtgaagatgaaagaggacttctacatgtacataaaactaaaatctcagggagctcctctaatcaatgctctaggacaagtacccatttgatgcaatagattaatgcaaaatactttctttcaagggtaaatattatagtgggtcaaactacttcaatcccactttagaaaattaattatgtgaccagaaaattccttgctatcttaatcttgattttcaaggattattttgggattgtgataatttgtcaacgtttattcaaaagatgcagtacaaccagcatattcaagtaaatttaaattaaaaggatactataaagaaagtccttttggccaggcgtggtggctcacgcctgcaatcccagcactttgggaggccaaggcaggcagatcacgaggtcaggagttcaagaccagcctggctaacacaatgaagccccatttctactaaaaatacagaaaaattagccaggcatgatggcgggtgcctgtagtcacagctacctgggaggctgaggcaggagaatggcatgaacttgggaggtggagcttgcagtgagctga

SEQ ID NO: 943172 - DNA, 493 bp, Homo sapiens
gggttgtttctactttttggttatcataaataatgctgctacaaatatttgggttcatgtgtttgtgtggacatgttttcatttctattggatatatctaggagtggaattgctaggccatgtgataactctatgtttaacattttgagaaactgctaacctgttttccaaagcagcagaaccatctttcaatcccaacagcagygtataagggttttgatttttctacatcctcatcaacatgttgtctttttgatgaccgctatcctaatgtgtatgaagtggtatctcataatagctttaatttgcatctttttaatgattaattacgttgagcaaccttttatgtacttgttgggtatttgtatatcctcttagataaatgtctatttagatcttctacccattttttcaatcggattttttaaattgttgaatggtaagttttctattatatattctaggaacaagtccatcaccaacatcaaatgta

SEQ ID NO: 943173 - DNA, 718 bp, Homo sapiens
cccccaacactcacgcagggcccctgctaccctcgcaccctagtttcatcccatggccccaggccccaacccaagtgcccactccttctcctcttcccaaggtaacgatcatcccaggggccgaggctctctgcccggcgaggctccacacgaagcctcgaccctcaccgtgcagagggtcccctggttccccgaatccgaagccattctggacccagtcaccaccccgagacgcagaactcctccggcgcaggagcaccaaccagcgcggcgtcgcggggactgagcctctaaagccacccttaactcctcctcctagtgcgtgcgcacgcaaggccctgcttcgtcagccaccgggtggcggccgcgcargcgcactcgggccgtcgggctcctggttgccttagtaacccctcggctttctgttcctggacggtggcggccgccggctctatgatggagcccccgaagcccgagcctgagctccagcggttttaccaccggctgctgcgtccgcctgtcgctcttccccactaggacgacgtccccagagcctcagaagcgccccccgcaggagggccggattctgcagtccttccctctggcgaagctgacggtggcgtcgctgtgcagccaggtggccaagctgctggccggcagcgggatagcagcgggagtgcctcctgaggcccgactacgtctcatcaaggtcatcctg

SEQ ID NO: 943174 - DNA, 644 bp, Homo sapiens
gaaattccaggctagtgtgcagtgatcacatctgtgaacagccactgcactccataccgggcaacatagtgagagtctgtccctttaaaaaaaaaaaaagttacttaaaaacataaagtagcatgtacataactgaaaaatcaaccatgattatacggtggaaaaatcagtctccctcccacccctgttttttcrtcacccagttttcctctgtagtgaacgttgtattactagttcctcatgtgtccttccaggatgtttctttttaatgctgccattaacatttggattttgttttgcctcttagaaacgagacagagttttgctcttactgcccaggctgcggtgcagtggcgggatctcggctcactgcaacttccgcctcccaggttcaagcgattcacctgcctcagcctcccaagtagctgggattataggcatgcgccaccatgcctgtctaattttgtattttttagtagagacagggtttctccatgttggtcaggctggtttcgaactcctgacctcaggtgacccgcccgcctcggcctcccaaagtgctgggattacaggcatgagccaccatgcccggccacctcttacagacttttaaacatcagagtaattagtaactttatgcagac

SEQ ID NO: 943175 - DNA, 586 bp, Homo sapiens
tcttggagatttgagacaatctgaaaaaaactcataaaccaggtagcctagaaacactgaaaaaaactaagaaaaaggtatgttataaagcataaaagatatgtagatactactctatcatttaccatcatgaaatacaaaaatctactataaaaagttaaaatttatcaaaacttacacaaacacagaccatacatggagccatttacagttgagaaatgtaaacattcagatgaagtattaaatcattaactacataaaattaacggtagtacatactgtactactgtaataatttcatcgccacctcctgttgctatcacggtgagcggaagtgttgcgagtatccactgtgtgaggctaatcatctctgcatgagcagttcttctctccagtaaattatcacagtaaaaagtgatstctcacatttctcatgtaattttcaccatgtgtagtgcaataccataagccttgactaataccatgagatccatacgatgtgccactagtgatgctgacagtgctcccaagaagcagagaaaaatcatgacattacaagaaaaactccaattgcttggtatgtacc

SEQ ID NO: 943176 - DNA, 746 bp, Homo sapiens
aaggggttataacatggtgtcactcacccaaagtcactgaaactgaggtaggaggcaggacttgactccagaggtgggactcaagacaccagaccagattgaggagtacctaaaacagggccagggcagaagcagctttccaatcagacacacctagcagtgtgccatgtcartttatcattgccatggcaacacctgggagttactaccccattccttagtgatgacccaatgaaccaaaagctacgaccccttccctagaaatttctgcataaaccaccccttaacctgcatgcaattaaaagtgggtataattatgactgcaaaactgccctgagctgctactctctgcccatggggtagccctgctctgtaggaacagtcacagagttgtaacactgcctctttaataaagctgttttcttctacctctggtttgctcttgaattccctcctgggcaagtccaagaacgcttgtagaccaagcctcactttggggcttgccttccctgaatcaaaactgtaacagggcagctcatacctgagccactacgttaaaattaagaacacaatgatgtgtttcttcggaagaaatgcagtgggagtctccatgaaaacgtcatagtccagctcaaatagttacactggatgatggtacacccatccttctttccctcaccactgaagatggctaagccaggattctgcagcccaaccccgaaagactcacaccgttcctctctaga

SEQ ID NO: 943177 - DNA, 536 bp, Homo sapiens
tcttgattatatgctaaacaggggtggatttttcatgagttttctgggaaagaggtgggcaattactggaactgagggtttctccaccttttagaccatatagggtaacttcctgacgttgccatggcatttgtaaactgtcattgtgctagtgggagtgtcttttmgcatgctaatacattataattagcatataatgagcagtgaggatgaccagaggtcactttagtggccaccttggttttggtggatttcggttggcttctttactgcaatctgttttatcagcaaggtcttcgtgacgtgtaccttgtgctgactccctatctcatcctgtgactaagaacacctagccacctgggaatgcagcccagtgggtctcagccttccttcacccagtcccattcaagagagagttgctctggttcaaatgcctctgacgggctgagagaggctccagggctaccacctggtttgagaaggtttatgaacagaaaaaggaaaggaagaaaaaagaaagtgccctacagaaaaca

SEQ ID NO: 943178 - DNA, 825 bp, Homo sapiens
gcatggcgggctgcaggtcccaagccctgccccgcggggaggcagctactaaggcctggcgagaaatccagcacagccccagtgggctggcactgtgtccggaattggtgggttcttggtctcactgacttcaagaatgaaaccgyggacacttgcggtgagtgttacagctcttaaggtggcgcctctggagtctgtcccttctgatgttcagatgtgttctgagtttcttccttctggtgggttcgtggtctcgctggctcaggagtgaagctgcagaccttcacagtgggtgttacagctcttaaggcagcgcgtctggagttgttcgttcctcccggtgggctcgtggtctcgctgggctcaggagtgaagctgcagatcttcgcagtgagtgttacagctcataaaagcagcgtggacccgaagagtgagcagtagcaagatttattgcaaagagcgaaagaacaaagcttccacagtgtggaaggggacctgagcgggttgccaatgctggctcgggcagtctgcttttattctcttatctggccccacccacatcctgctgattggtagagccgaggggcctgttttgtcagggcgctgattggtgcgtttacaatccctgagctagatacaaaggttctccacgtccccatcagattagttagatacagagtttcgacacacaggttctccaaggccccacgagagcagctagatacagagtgtcgactggtgcattcacaaaccttgagctaaacacagggtgctgattggtgtgtttacaaaccttgagctagatacagagtgctgattggtgta

SEQ ID NO: 943179 - DNA, 825 bp, Homo sapiens
gcatggcgggctgcaggtcccaagccctgccccgcggggaggcagctactaaggcctggcgagaaatccagcacagccccagtgggctggcactgtgtccggaattggtgggttcttggtctcactgacttcaagaatgaaaccgtggacmcttgcggtgagtgttacagctcttaaggtggcgcctctggagtctgtcccttctgatgttcagatgtgttctgagtttcttccttctggtgggttcgtggtctcgctggctcaggagtgaagctgcagaccttcacagtgggtgttacagctcttaaggcagcgcgtctggagttgttcgttcctcccggtgggctcgtggtctcgctgggctcaggagtgaagctgcagatcttcgcagtgagtgttacagctcataaaagcagcgtggacccgaagagtgagcagtagcaagatttattgcaaagagcgaaagaacaaagcttccacagtgtggaaggggacctgagcgggttgccaatgctggctcgggcagtctgcttttattctcttatctggccccacccacatcctgctgattggtagagccgaggggcctgttttgtcagggcgctgattggtgcgtttacaatccctgagctagatacaaaggttctccacgtccccatcagattagttagatacagagtttcgacacacaggttctccaaggccccacgagagcagctagatacagagtgtcgactggtgcattcacaaaccttgagctaaacacagggtgctgattggtgtgtttacaaaccttgagctagatacagagtgctgattggtgta

SEQ ID NO: 943180 - DNA, 825 bp, Homo sapiens
gcatggcgggctgcaggtcccaagccctgccccgcggggaggcagctactaaggcctggcgagaaatccagcacagccccagtgggctggcactgtgtccggaattggtgggttcttggtctcactgacttcaagaatgaaaccgtggacacttgcggtgagtgttacagctcttaaggtggcgcctctggagtctgtcccttctgatgttcrgatgtgttctgagtttcttccttctggtgggttcgtggtctcgctggctcaggagtgaagctgcagaccttcacagtgggtgttacagctcttaaggcagcgcgtctggagttgttcgttcctcccggtgggctcgtggtctcgctgggctcaggagtgaagctgcagatcttcgcagtgagtgttacagctcataaaagcagcgtggacccgaagagtgagcagtagcaagatttattgcaaagagcgaaagaacaaagcttccacagtgtggaaggggacctgagcgggttgccaatgctggctcgggcagtctgcttttattctcttatctggccccacccacatcctgctgattggtagagccgaggggcctgttttgtcagggcgctgattggtgcgtttacaatccctgagctagatacaaaggttctccacgtccccatcagattagttagatacagagtttcgacacacaggttctccaaggccccacgagagcagctagatacagagtgtcgactggtgcattcacaaaccttgagctaaacacagggtgctgattggtgtgtttacaaaccttgagctagatacagagtgctgattggtgta

SEQ ID NO: 943181 - DNA, 776 bp, Homo sapiens
ctgggagaaccactgctctcttcaaagctgtcagacagggacatttaaatctgcagaggttactgctgtctttttgtttatctgtgccctgcacccagaggtggagcctacagaggcaggcaggcctccttgagcagtggtgggctccacccggttggagcttcccggctgggctgctttgtttacctaagcaatcctgggcaatggcgggygcccctcccccagcctcgctgccgccttgcagtttgatctcagactgctgtgctagcaatcagcgagactccgtgggcgtaggaccctccgagccaggtgtgggatataatctggtgcggcgttttttaagcctgtcggaaaagcgcagtattccggtgggagtgacccaattttccaggtgtcgtctgtcacccctttctttgactaggaaagggaactccctgaccccttgcgcttcccgagtgaggcaatgcctcaccctgcttcggctcgcgcacggtgcgtgcacccactgacctgcgcccactgtctggcactccctagtaagatgaacctggtactgagatggaaatgcagaaatcacccgtcttctgcgtcagtcacgctgggagctgttgaccggagctgttcctattcggccatcttggctccacattcagcggtttagtttattttaaaaagagaaaagattaaaaggaaaaaagaaaccaaaaggcagatatagttctaatgaattagtcttagaagtaaatcagcccactgggaatgaacttcttttgaaa

SEQ ID NO: 943182 - DNA, 776 bp, Homo sapiens
ctgggagaaccactgctctcttcaaagctgtcagacagggacatttaaatctgcagaggttactgctgtctttttgtttatctgtgccctgcacccagaggtggagcctacagaggcaggcaggcctccttgagcagtggtgggctccacccggttggagcttcccggctgggctgctttgtttacctaagcaatcctgggcaatggcgggcgcccctcccccagcctygctgccgccttgcagtttgatctcagactgctgtgctagcaatcagcgagactccgtgggcgtaggaccctccgagccaggtgtgggatataatctggtgcggcgttttttaagcctgtcggaaaagcgcagtattccggtgggagtgacccaattttccaggtgtcgtctgtcacccctttctttgactaggaaagggaactccctgaccccttgcgcttcccgagtgaggcaatgcctcaccctgcttcggctcgcgcacggtgcgtgcacccactgacctgcgcccactgtctggcactccctagtaagatgaacctggtactgagatggaaatgcagaaatcacccgtcttctgcgtcagtcacgctgggagctgttgaccggagctgttcctattcggccatcttggctccacattcagcggtttagtttattttaaaaagagaaaagattaaaaggaaaaaagaaaccaaaaggcagatatagttctaatgaattagtcttagaagtaaatcagcccactgggaatgaacttcttttgaaa

SEQ ID NO: 943183 - DNA, 776 bp, Homo sapiens
ctgggagaaccactgctctcttcaaagctgtcagacagggacatttaaatctgcagaggttactgctgtctttttgtttatctgtgccctgcacccagaggtggagcctacagaggcaggcaggcctccttgagcagtggtgggctccacccggttggagcttcccggctgggctgctttgtttacctaagcaatcctgggcaatggcgggcgcccctcccccagcctcgctgccgccttgcagtttgatctcagactgctgtgctascaatcagcgagactccgtgggcgtaggaccctccgagccaggtgtgggatataatctggtgcggcgttttttaagcctgtcggaaaagcgcagtattccggtgggagtgacccaattttccaggtgtcgtctgtcacccctttctttgactaggaaagggaactccctgaccccttgcgcttcccgagtgaggcaatgcctcaccctgcttcggctcgcgcacggtgcgtgcacccactgacctgcgcccactgtctggcactccctagtaagatgaacctggtactgagatggaaatgcagaaatcacccgtcttctgcgtcagtcacgctgggagctgttgaccggagctgttcctattcggccatcttggctccacattcagcggtttagtttattttaaaaagagaaaagattaaaaggaaaaaagaaaccaaaaggcagatatagttctaatgaattagtcttagaagtaaatcagcccactgggaatgaacttcttttgaaa

SEQ ID NO: 943184 - DNA, 564 bp, Homo sapiens
accagaatacaaaaacacaaaagaccgactgacctttctgtccagacaatgttgtaatttttctaggtaccgttctgggtagatctatcccagaaaaaaaaaaaagccgctaaagaataggtagtaaaattgttaatatattgtcttgcctcaagtgataacagcactttttcttttatttaaatgttaccaactttcagaaaagaactaccctgttaaaaagtggagattaaagcacatgaatcttgaatgctcattagctgcacaaatatgagaaaaaatatgtaagtggccttggtaataaaatgaaaagtcatttctgtttagttatgcatctaaaatacttaatatcaatcattttrttccaactgtgttatcatttttaaactatttagtattcactataatttatccaatcataataaattcatttgacatttgcagattgttgcacgaataatgtcatccaatttttatatgttccaagatcaattgcttaccaatgctgtaaatttttgtttcctaatttgaaaactgtgaaacaatagtttttaataatggaca

SEQ ID NO: 943185 - DNA, 652 bp, Homo sapiens
aatcatgggggcagtttcccccacgctgtttttatgatagtcagttagttctcacaagatctgatggttttataaggggcttcccccttcaccagacactcattctctcccctgctaccctgtgaagaggtgccttctactgtgattgtaagtttcctgaggcctcctcagccaygcagaactgtaagccaattaaacctccttcctttataaattacccagtctcaggtatttcttcatagcagcgtgagaacagactaatacagtaaattgctactgggtagtggggtactgctgcaaagatacctgaaaatatggaagcaactttagaactgggtaacaggcagaagatggaacagtttggagggctcagaagaagacagaaagatgtgggaaagtttggaacttcctagagacttgttgaatacctttgaccaaaatgttgatagtgatatggacaatgaagtccaggctgaggcggtctcagatggagatgaggaacttgttgggaactggagtaaaggtcactcttgctatgcaaagagactggtggcattttgccccttccccatagatctgcgggacattgaacttgagatagatgatttagggcatctggtgaaagaaatttctaagcagaaacgcattcgag

SEQ ID NO: 943186 - DNA, 652 bp, Homo sapiens
aatcatgggggcagtttcccccacgctgtttttatgatagtcagttagttctcacaagatctgatggttttataaggggcttcccccttcaccagacactcattctctcccctgctaccctgtgaagaggtgccttctactgtgattgtaagtttcctgaggcctcctcagccatgcagaactgtaagccaattaaacctccttcctttataaattacccagtctcaggtatttcttcatagcagcgtgagaacagactaatacagtaaattgctactgggtagtggggtactgctgcaaagatacctgaaaatatggaagcaactttagaactgggtaacaggcagaagatggaacagtttggagggctcagaagaagacagaaagatgtgggaaagtttggaacttcctagagacttgttgaatacctttgaccaaaatgttgatagtgatatggacaatgaagtccaggcygaggcggtctcagatggagatgaggaacttgttgggaactggagtaaaggtcactcttgctatgcaaagagactggtggcattttgccccttccccatagatctgcgggacattgaacttgagatagatgatttagggcatctggtgaaagaaatttctaagcagaaacgcattcgag

SEQ ID NO: 943187 - DNA, 612 bp, Homo sapiens
tggaacagtttggagggctcagaagaagacagaaagatgtgggaaagtttggaacttcctagagacttgttgaatacctttgaccaaaatgttgatagtgatatggacaatgaagtccaggctgaggcggtctcagatggagatgaggaacttgttgggaactggagtaaaggtcactcttgctatgcaaagagactggtggcattttgccccttccccatagatctgcgggacattgaacttgagatagatgatttagggcatctggtgaaagaaatttctaagcagaaacgcattcgagaggaagcaaagcataaaaatttggaaaatttgcagcctgacaatgtggcagaagagaaaaacccatttactggggggaatacaagctggctgcagaaatttgcrtaagtgatgaggaaccagatgttaatcactaagataatggggaaaacatctccagggcatttcagagactttcatgacagcttcccctattacaggccccaaggcctaggaaggaaaaatggtttcctgggccgagtccaggaccctctgctgcgtgcagcattgggacttggtgccttgcatcctagccactctagccatggctaa

SEQ ID NO: 943188 - DNA, 759 bp, Homo sapiens
gtagtggggtggactggggaaaataatccctcaaacaggtcatctgtggccctagcaatgagccttaatcacctacgtgattcccaggactcaatataacagtctcctttcaggactattggttccaaatcaggacgaaggtcttcgaactggactcctttcaagaaagagttgtttcaaatagagacatacctcattttattatgctttgctttagatactgcacttttacaaattgaaggtttgtggcaaccctgcatcaaacaagtctattagagccatttttctaacagcacgtgctcacttatgtatctgtgacacattttggtaattcttgcaatatttcaagctttttcattattataatatcctttataatgatctgtgatcagtgatctttgacattacttttgtaattgctttgaggtgcccatataagacagcaaacttaactgataaatgcgtgtgttctgactgttctaccaacyagtcattctcccatttctctgtgggcccccctgttctctgagacagaataatattaaaattaggccaattaataaccttacaattgcttctaagtgttcaagtgaaagagtcatatgtctctcattttaaataaaaagctaaaagtgattaagcttaatgaggaaatatgttgaaagccaaaataggaggctagacctcttccaccaaacaatcaagttgtgaatgcaaagggaaagttcttgaaggaaattaaaagtgccgcttcagtga

SEQ ID NO: 943189 - DNA, 726 bp, Homo sapiens
tttactgtgttcagtaaatagaattatgtgaaaccaacacagtaaagttgtgaggttttgccccaaaacttagtagtttaaaacaccaaacatttatttctgagttaggaattcaggaatggcttagcttagtggtttaaacaccagacatttatctctgagtcaggaatgcaggagtttcaggagtggcttagctgtgtagttctggatcagggtccatcttgaagtttgcagtctggccctaggggctggagttctctggatttgaccgtggctggaggatgtttctttttttttttycctctttttttttttttgacagagtcttgctctgttgcccaggctggagtgcagtggcgcgatctctgctcactgcaagctctgcctcccaggttcacgccattctcctgcctcagcctccggagtagctgggactacaggcgcccgccaccacgcccggctaattttttgtatttttagtagagccggggtttcaccgtgttagccaggatggtctcaatctcctgacctagtgatcgcctgcctcagcctcccaaaagtgctgggattacaggcttgagccaccgcgcccggccttgaggatgtttctaatatggcctgctcacatggctgttgttaggaggccttagttccttgctggctgttggcaggaagtttcagttcctcaccttgttggccttttcaaaggattgtatgagtatcctc

SEQ ID NO: 943190 - DNA, 723 bp, Homo sapiens
tcctcggactgccctagattctacttttttttttttttttttttaaatttgcaaaaaattttccccccgtggggggccccctatggctaaattcccaaagtgtttatatttacccccagtgcgggaaaaaaggacctcttgcaaggtgtggaaggaaggaaagaaggaaggaagaggatctggtcttttctttagagcgcggtgcagcccctggagttgagcwcgctttgttttcccctgctctggtgctcgctttaatctgatgactgggtgttctgtcataggggttaggagggggaagagatcatttccaactaccttcctttcatttttctcactctaccaatggaaagtgtcctctttctcttacgcacttattcttacttaaccttagcagtaattcttcggataccagttacatgggcttaggcttgtccgtaccattatctctgatttcttgtgcagtcaagcacacttttctgtccccagtccagcctctcctggctatttaactggcgccatgcctcccccacctcgcccattcaatttagtcaatgtttaaaaccgaattctatgctaataattctgacagcaattatggactcctgttaagttccagataccatcctatgttgcttacctaacattaatgcattttaaaagttctaactccaaccccaaagctccccagatccagggctgcttggatgaccatttcatggt

SEQ ID NO: 943191 - DNA, 627 bp, Homo sapiens
ttaaaataatttttattttagaaaatgccaaagatatggaatggctgctgggttgggatcaaaatctttttttttttttttatgttgagggtattatagcatgtgcatttgctaatgggaataatctaatctagagagagktacaaactagttaaacaggagaggagtatatttgaggaggccatgtcctggagcggattagaggaaattagatagagcatacaaatgggaagtttggtgttaagaacgtggagtaattctctataaaaacagacagaataacatatgggtatccattagacacatagatatgatggaaccagtggatggcagttgtcttataattacatatcttttgtaagtgaaatagaaaaacccccgcaatctcaacagataaggcagagctgaataagatatgaaaattttgaagatagctaatgtatgggattattcagtagaatgtttgtgatttaatcagggaaaaatattaatttccctatggtagagttggcttggctacattaaagcccatatgaggttcagagtcaagaaactgaagtgagaccagatagcaatgggtgtgttttctcaaagcctgatcaagagtgtaggtgcagacatggagca

SEQ ID NO: 943192 - DNA, 511 bp, Homo sapiens
ttttttttttttttttgagacagagtctagctctgtcacccaggctggagtacagtggtgcgatctcggctcactgcaagctccgcctcccgggttcacgccgttctcctgcctcagcctcccaggtagctgggactacaggcgccygccaccacgcccggctaattttttgtatttttagtagagacggggtttcaccatgttagccaggatggtcttgatcgcctgacctcgtgatccacctgcctcggcctcccaaagtgctgggattacaggcctgagctaccacgcccggcctacgtctggctttttaaatttatcataatgttttcaaggttcatgcacattgtagcatacatcattacttcacacctttttgggtacttcattcctttttggcctgtctggtatttgttcatttctacatctgctggtggatgttgagtcgtttctacctctagctcttttgaatagtgctgctgtaatcatgcatgcacatgtattatttgaa

SEQ ID NO: 943193 - DNA, 511 bp, Homo sapiens
ttttttttttttttttgagacagagtctagctctgtcacccaggctggagtacagtggtgcgatctcggctcactgcaagctccgcctcccgggttcacgccgttctcctgcctcagcctcccaggtagctgggactacaggcgcccgccaccacgcccggctaattttttgtatttttagtagagacggggtttcaccatgttagccaggatggtcttgatcgcctgacctcgtgatccacctgcctcggcctcccaaagtgctgggattacaggcctgagctaccacgcccggcctacgtctggctttttaaatttaycataatgttttcaaggttcatgcacattgtagcatacatcattacttcacacctttttgggtacttcattcctttttggcctgtctggtatttgttcatttctacatctgctggtggatgttgagtcgtttctacctctagctcttttgaatagtgctgctgtaatcatgcatgcacatgtattatttgaa

SEQ ID NO: 943194 - DNA, 787 bp, Homo sapiens
cctcacttaggtcctttagcacacactgtattctttttttagataatagctttgttgatatataattcacatgccataaaattaacactataaaagtatacaattcgttttttagtaccttcacagagttgtacaaccatcaccatcatctaattttagaagatttccatcatcccaaaatgaagcaccatacccattccctcccactcctaggccctgrcaatgactcatccactttgtctctatgagtttgcctattctgggtgacatggtaattgtgtgtgtagtattttgaggaactgccaaactgctcctcaaagtggctgcaccactttacattcctgccagcaactaatgagggttccaatgtctccacatcctcaccaacacttgttactgtctgccctttgtattgcagccatcctactgggtgtgaagtagtatctctggttttaactggcattcctctactgactaatgacgttgagcaacttttcacatgcttattggccatttgtatatcttctttgggtaaatgtctactcagatcctttacctacctttttcctaggtttagttgttgagttataaaagttactattttggtgcccgagttgaaaatcaatgtgttataaatttaaaggtttatttctggactctcaattacactgatctatgcacctatctttatgtcagtaccatactgtcttgatcatgcagtttgtaataagtttgggaatgggaaagtgtgagttctccaactttgatctacttttttctatgacgt

SEQ ID NO: 943195 - DNA, 542 bp, Homo sapiens
gatgtaaggcaatttaaatataagggggaaagtgttcctgaataatcgataatttagaaactatttcgcgtacatagaaatgctattgagtaaagctcctagttactgtctcccaaggacttctgtttgcttctccctcgttgtgcaatatttgccagtatgctttcctcacatttttgtcctcaaaaattccccatatttcattttcctttttagctctactactcagtgaggcttaaacatactgttttcgttacagtgtttatgtatccttggggctcatgccttttactgctagcatggaagtcgcctgactcccctgtatagtggtttctggctgcatgatccaggggcagttctggtgcacctgcaggcctttcacacctcatgcctgttgcragtgtattcattcagttttgtatagtagcacatgatatgatagtggcgtcttaaccactactttattctgtctgtacacaataaaattattagtagcacagtgatacaaataacataatttatatcatcaaagtctaggcatc

SEQ ID NO: 943196 - DNA, 772 bp, Homo sapiens
ttttacaaatttgttaaggaaaaagggacataggcaacatatgtaaaagaaaaaccggctggacgcggtggctcacgcctgtaatcccagcactttgggaggccaaggcgggcggatcacgaggtcaggagatcgagaccatcctggctaacacggtgaaaccctgtctctactaaaaatacaaaaaattagccgggcgtggtggcgggcgcctgtagtcccagctactcgggaggctgagacaggagaatggcgtgaacccgggaggcggagcttgcagtgagcagagatcgcgccactgcactccagcctgggcgacagagtgagactctgtcttaaaaaaagaaaaccaaaccaaacaaaaccgtagtgtcagcttgtcctcggtgccgcagctccccatgctggtcgttcctctgatagccccggggtccaagaagctcctaggttctttctccggctcagtgcttcccccaggcgtctccctcgtcggactcctsgtccctcccttaaaattgccggtgagtcgtcttccttgctggaaaagaattagggttatgatgattttgagggcaaatcagtgactttgtccccctccccagtggatatatttataattgcatctggagggacccgttgggaggccgggccgaatctagtcatgaaagaatgaagcctaggcagtcgctgctgtctagggagggatacacttccggggcaagggagacccacttcctgcgagaatgactggcgcccccagctactctgtctc

SEQ ID NO: 943197 - DNA, 635 bp, Homo sapiens
taggcctgtttcactcagagacgtcacgttatggcttgtgctgtttctagggcactaggtaagcacccacatccttttgacatgcgaagctaatacatatgtaacaaacttgcacgttgtgcacatgtaccctaaaacttaaagtataatttaaaaaaaaaaaagtaaatagtcaagccagaaaagcctaacaggaacctgccagataccttcaccccagtaccgctcattaaagggggatgacttaatgggaggaccctgtacacttccagggaatcccaataacatatttaactgagaaatgatagttttaagtaactgaagccacaaaaacagatctgytttctcaatgatgaatatttgagcaactacttgagctgggataagtggcttctcaggaacctcatgagcccccaacagaattcagggcggttattaaaaaagaaagacaaatggatgctgggagatgcccaatgttgactgcgaactgtgatccaggaatgctgatcttctcaacctgtaactacaaattaagtggtcatatttccactaaaataggctttcattcatttgtcaaatagatgttaagcactcaataagtgccagaaagtgtgcaaggggacagatacacaatg

SEQ ID NO: 943198 - DNA, 468 bp, Homo sapiens
gaaaagcctaacaggaacctgccagataccttcaccccagtaccgctcattaaagggggatgacttaatgggaggaccctgtacacttccagggaatcccaataacatatttaactgagaaatgatagttttaagtaactgaagccacaaaaacagatctgttttctcaatgatgaatatttgagcaactacttgagctgggataagtggcttctcaggaacctcatgagcccccaacagaattcagggckgttattaaaaaagaaagacaaatggatgctgggagatgcccaatgttgactgcgaactgtgatccaggaatgctgatcttctcaacctgtaactacaaattaagtggtcatatttccactaaaataggctttcattcatttgtcaaatagatgttaagcactcaataagtgccagaaagtgtgcaaggggacagatacacaatgtgatatacaagac

SEQ ID NO: 943199 - DNA, 728 bp, Homo sapiens
gagtttgatgacagaagccactgagatatctgaacctggacccattatatggatttttatggagggctgataatttatacaaaagtgcaagtttagaaagtcttgtttagtttcgaatatctgagacacacattagagggagaactataactgctcataaattggcaaccccactgtttatgagaattcaggttaaaaaatatatgccacatcatactgcaggtttaatggatcaaggacaaagggaaaatataatggaggttaagcccaactattctctcaaaatatgtacagtcagattctgaatcttcctcagtaatcaatttcagtgtctcgcagttctagcaaaatatttttttcatgagctatagctttatgttgtttctacctatacaatgctcagaagaaatggtgaacaatcagtcctgccctcctacatttgaactcacatgtgtgataaagacaagttacttgttmaagcaaaccattgcttgggcgctctgggctttttatagctttgtactgacctttaaaaatgtaaatttgaagttgttaaactcaccaaagcattcacaggaggatttctgtgaaatgaccaccttatatactttaattgattaaaagtatacatgccttttgctgttgaattgtgataatataggtaatatttcactttcttttcccatttttatactctctaaaatttcttcaaaccctttaggtagtga

SEQ ID NO: 943200 - DNA, 512 bp, Homo sapiens
tataaagagaaaatagcagaaggattatgtgaagacgtaatgactggaaagtctttagttcaatgaaaaccattaatctatacatctaaaaaacttaacaaaccacaagtaaggtgaacccaaagagattcacactgagacacatcataatcaaactgttgaaacatgacgatgaaggtagaatcttgaaggcagcaaaagataaacaactcattacatgcaagtgattttcaatgatattaatagcttattcctcattagaaaccatggaagccagaaggcmatgagaagacattattaaaagcactgaaagaaaaagactggcaaccaagattccatatccagcaaaattatccttcacaaatgaaggagaaatgaagccattccatgaacaaaaatggagagactttgttgctagcagacttgtactccaagaaataataaacggagtccttcagactaaaataaaaagacactagatagtaactcagatgagaacaggtgtgttcagg

SEQ ID NO: 943201 - DNA, 619 bp, Homo sapiens
ctaatactataaagtttcttttttttttctaatcttatattttttattttttttgagatgaagtctcactctgtcatccatgctggtgtgcaatagagccatctcggctcactgcaacctccgcctcccaggttcawgcaattctcctgcctcagcctcccaagtagctggaactacaggtgcctgccaccacacccagctaatttttgtatttttagtagagatgggatttcaccatcttggccaggctggttttgaactcccatagtgctgggattacaggcatgagccaccacgcctggcccttatgtttggtttttgctcttctcacagatatgcattatttcaaaactatttgccagtaaatgaaagtatttactattcaagttaaaaatatttcctattgaatttaaaaaaagtgaaaggaaattgacaagagcagcattagcattatttcaactgcaagagccagaaaccaatttattttttattttattttgttattactattatttttgagacagggtctttctctgtcacccaggctggagtgcattggcacaaacaaggctcaatgcagcctcagcctcctgggctcaagtgatcctcctgcttcagt

SEQ ID NO: 943202 - DNA, 675 bp, Homo sapiens
agctgtctgtatttttgagctcatgaataggatccatcctgaaaccatggtccctttgttgctgggttcccaagcaagcacaatgatggttggggaggttggtgattgacagtcataggtagcagggccttaatacaaatgatcgggacccttctccgcagtaaagacttattggtgagcatttgcgtggaccacaggtattcgcacacccagcgctcattcctaagggtcttctttctgaatttattgacgccaatcatccaactgtgcttcttccaagaccctggctgcccagtcmaaccaatagtcactgcctatgttctggtctagctatttcttcccctaggcaaagtagacaatgagagaacccttgaagttatgtctactaaaaatatttaccttctccaccatctttcagaatcatctctggtttgttttgggaaatgtttaacaacaggctctctggaaaaatagaagctgtaatttgtagtatttgccaatttctgtggtataaatattcccacagtcaccagtctcaagctactggcttgacgtcactgactgcagagttgggaagagaggtgccattgtcttccattagatagcatttccaccaggcatatacaatagatgtcagtgacctcaagaacagagataatagtgaaatacataaag

SEQ ID NO: 943203 - DNA, 718 bp, Homo sapiens
aagttttattggaacataaccacattcatttgcaagttgtccacggccactttggtgctactgtggcagaattgagtagttgctgcagagaccgtatgatgagaatatgtggcattctcatcattttgccctgccgctctgtgcaatgtaaattgcagtgacacagttataactcagcagcattttgaatgccacttgtattccatgctacaacattttattttttattaccaatatatacaagaaaagtggatttcaaatatcattgtgcttttaaggtacaatggagtatgaattgttactgaattaggcagcaaagtgcaatgacatggtagctgtcctaaggaacacaatacaaccaggtgcagtggctcatgsctgtaatcccaacgatttgggtggctgaggtgggagaatcacttgaacccaggatttggagaccagcttgggtggtatagtgagaccccccatctccacaaaaagtaaaaaaaaaccaaaatacatgttgttacttcccatcttagcactcatcaagatatttctaattcacaagaaagcaatggtcagaaaaattagaaaatttaaaattgaatatctcatcacagaatttattcacaaaaataaaaaatgaaaatgaagctacaaccaaagtaagtttcagatggctcatttgttagccaagcaaggaaagtcacttatggtgaattaattaaatcat

SEQ ID NO: 943204 - DNA, 567 bp, Homo sapiens
tgatcctcccacctcagcctcctgagtagctgggaccacagttgcacaccaccatgctcagctaatttcttattttttgtagagatgaggtcttgttttgttgtctaggctagtctcaaactcttggagtcaagcaatcctctctccttggtctcctaaagtgctgggattaaaggtatgagccactggccaataaatcattttaaaaaatcattttttccctttctgttatggactgaatgtttgtgacccaacccccraattcatatgttgaaaccccaatccctaatgtggtggcatttggaggcggggtctttgggaggtaattgggtttgaatgaatctcgaggtggagccggtgaagggattggtgcttttataaggaggtgaagggaccagagctctctctgtcatgtgaggatatggcaaggaagcagctatctgcaagcttgggaccaaagctaagaaaagactatgctgccactctgatctcagactttgagccttgagaactgtgagaaatacagagttatcgctgaagccaccctgtctgtggcattctgttgta

SEQ ID NO: 943205 - DNA, 443 bp, Homo sapiens
agttgaaatacacacctggcattctacaaaaggaatcgaagtattgtctcaaaagactatcttcataattaatcaaggcccactgagccatagggcctccagcctttccctaactgagggatacttctgctaatggtgaagcttggtgttaaaaataatgtttagacctgttttgtgatattctgaatgtagaacagccaaagccatttagattagtgtcatttgttctcataaatgtgaataaaatgctttgtgggactaycaaattctttaaaacacgttacataaaatgtgcagataatcttaagagattccttttagagttggtgtgtttcattcaataaacttgttttatcaaatcacataacatttatttaattgtcaccaatcattcttttatttcatcatatagagtattgcatatttgtcttatttattttttt

SEQ ID NO: 943206 - DNA, 587 bp, Homo sapiens
gccaacatgatgaaaccctgtctctactaaaaatacaaaaagttagctgggtgtggtggtgtgcacctgcaatctcagctactcaggaggctgagacaagagaatcgcttgaacccgggagggggaggctgcagtgagctgagatcgcgccayggcactctagcctgggcaacaagagaaaaactccatcaaaaaaaaaaaaaaaagaagaagaagaatcactttttcttcccagtaggcttctttccttctttggagatgagcaaaaagtataaaaacatctgtggaaacctcctgtttgtatgttttacattggaatgggtgcaaaaaatacactcactattcctttacatccttctaagagggctgtttctactcttgacactcaatacttgtttttgtttctctaatcactgttatacgttactcacgaatattcatcaaaacccttttccttattttttatctagttttaaataattcatttgagataaaaagaagtttttctttgctttttttaatcactcagtggaggatgaacatgaagctgtaccaatggataggagaccgtctggtagagcacggga

SEQ ID NO: 943207 - DNA, 587 bp, Homo sapiens
gccaacatgatgaaaccctgtctctactaaaaatacaaaaagttagctgggtgtggtggtgtgcacctgcaatctcagctactcaggaggctgagacaagagaatcgcttgaacccgggagggggaggctgcagtgagctgagatcgcgccacggcactctagcctgggcaacaagagaaaaactccatcaaaaaaaaaaaaaaaagaagaagaagaatcactttttcttcccagtaggcttctttccttctttggagatgagcaaaaagtataaaaacatctgtggaaacctcctgtttgtatgttttacattggaatgggtgcaaaaaatacactcactattcctttacatccttctaagagggctgtttctactcttgacactcaatacttgtttttgtttctctaatcactgtyatacgttactcacgaatattcatcaaaacccttttccttattttttatctagttttaaataattcatttgagataaaaagaagtttttctttgctttttttaatcactcagtggaggatgaacatgaagctgtaccaatggataggagaccgtctggtagagcacggga

SEQ ID NO: 943208 - DNA, 587 bp, Homo sapiens
gccaacatgatgaaaccctgtctctactaaaaatacaaaaagttagctgggtgtggtggtgtgcacctgcaatctcagctactcaggaggctgagacaagagaatcgcttgaacccgggagggggaggctgcagtgagctgagatcgcgccacggcactctagcctgggcaacaagagaaaaactccatcaaaaaaaaaaaaaaaagaagaagaagaatcactttttcttcccagtaggcttctttccttctttggagatgagcaaaaagtataaaaacatctgtggaaacctcctgtttgtatgttttacattggaatgggtgcaaaaaatacactcactattcctttacatccttctaagagggctgtttctactcttgacactcaatacttgtttttgtttctctaatcactgttatacgttactcacgaatattcawcaaaacccttttccttattttttatctagttttaaataattcatttgagataaaaagaagtttttctttgctttttttaatcactcagtggaggatgaacatgaagctgtaccaatggataggagaccgtctggtagagcacggga

SEQ ID NO: 943209 - DNA, 648 bp, Homo sapiens
aacttaaaaaaaaaaaaaaagccaacataacaatgacagcaaaataagacaaaagtctacacactcagagagagagacaggagagagaagagagaaaactagattattctcatttgtaaataccagtgcaaaggtcctaaataaaatattagcaaatgcaatccagtagcaacttaaaacaacactayacataaccaagtagaattcagtcaaggaatataagcatagtttaataatgagaaaactggtaatacaactcatattaatagctattaagagaaaaattatatatagtcatctccatagatgctgaaaaggcatttgaaaaaatttatgcattcttgataaaattcttagtaaaataatagaaggatgaccaaatatatctaccttaccccaaagccagcatcaaacttaatgagaaaacaagatatcatccatttaagtcaggaataaaagaaggatgtccactatcaccacaattaacgttctgcaagtactagttaatacaataaaactagagagagaaagaggtaattcaaaggcaggaggtaaaatgatcactacttgcacaatgagtgtatacctgaagaaacccaagggaatccactgaaaaactactatcaacatgaagagagtttcagaaaa

SEQ ID NO: 943210 - DNA, 648 bp, Homo sapiens
aacttaaaaaaaaaaaaaaagccaacataacaatgacagcaaaataagacaaaagtctacacactcagagagagagacaggagagagaagagagaaaactagattattctcatttgtaaataccagtgcaaaggtcctaaataaaatattagcaaatgcaatccagtagcaacttaaaacaacactatacataaccaagtagaattcagtcaaggaatataagcatagtttaataatgagaaaactggtaatacaactcatattaatagctattaaragaaaaattatatatagtcatctccatagatgctgaaaaggcatttgaaaaaatttatgcattcttgataaaattcttagtaaaataatagaaggatgaccaaatatatctaccttaccccaaagccagcatcaaacttaatgagaaaacaagatatcatccatttaagtcaggaataaaagaaggatgtccactatcaccacaattaacgttctgcaagtactagttaatacaataaaactagagagagaaagaggtaattcaaaggcaggaggtaaaatgatcactacttgcacaatgagtgtatacctgaagaaacccaagggaatccactgaaaaactactatcaacatgaagagagtttcagaaaa

SEQ ID NO: 943211 - DNA, 723 bp, Homo sapiens
caggagctgtctcttcaaaggcacttgctcctagcaaacttatgcctttccaaagtctcctctaaaaatgagtagaggacactttgttttacttttactgaagtgaaaacaccaaggcatgctttaggggtctctagcacttctgtgggtacatcagtccccattctccccatctgtctctctctctytttttttttttttttgagactgggtcttgttgtattgcccaggctggtcttgaaatttggggctcaagtgatcctcttgccttggactcccaaagtgctgggattacaggcatgagtcactgtgcctggcccagaaaaagatgttctctatgcccatgaggcttcaagagaagctggtttccttatcttcactatttagagctagatcccaagtacctccaggattgagccctaatcctgaccccaaacataatttgtgtacagaaactccgtgtaggagtgttagaaaagctggaggccctattgataggtgattcagatatgctgggaataatgtaaagtgtgtgtctggtggaaagagctgtatttttaacgtgatgctgaaatcaccaagaaatactctacttcacttgatacgaaaaacagaagttaccattatacagaaaaaaagtggaggaggccttatgcaaatattttcagataaccgtatatactgtttttttgcccagtcgtgtcccatcatgtccacccccag

SEQ ID NO: 943212 - DNA, 634 bp, Homo sapiens; identical to SEQ ID NO: 942306

SEQ ID NO: 943213 - DNA, 639 bp, Homo sapiens
cagatctaatcatgagaaaaacatcagacaaatcccaattgagaaacattttacaaaataccccatgaatactcctcaaaactgtgaaggtgtcaccggtggagggtgtacaggttcttggcatctaaaataatgggacaaaacggctgggcgcggtggctcacgcctataatcccagcactttgggaggccgaggcgggcggatcacgaggtcaggagattgagaccatcctggccaacacggtgaaaccctgtctctactaaaaataaatacaaaaaattagctgrgcgtggtggcaggcgcctgtagtcccagctactcgggaggcagaggcaggagagtggcgtgaacccgggaggcagagcttgcagtgagccgagattgcgccactgcactccagacagagcaagactctgtctcaaagaaaaagaaaaaaaaaaaagaattggacaaaatgcacaaagcaaggaaggaatgaacgatttattgaaaatgaaagtacactccagtgtttggggccggctgagcataggtgctcaagggcccagttacagaatttgttggagtttaaataccctttggaggattccattggttatttgggatatgccatatgtaaatgaagaggatgaagtaaa

SEQ ID NO: 943214 - DNA, 654 bp, Homo sapiens
gtttatctctttgtcttgcatctttatttctacactctctcgatgccgcacatggggagagacccactgaccctgtggggctggtccctacagcttgagtctaggagttcaagacaagcctggccaatatggcgaaaccccatctccacagaaaatacaaaaatgagccatgcatggtggtgcatgactggagtagtcccagctactccagaggctgaggtgagaggatcacttgagcctgggaggtggaggcttcagtgagccaagatggcaccactgcaccccagcctgagcaacagaatgagaccccgtctcaaaaacaaacatgtattatgaccatatattcatcagagttcagagaaacagaagcaatgggagattttatatagatatatatggagagagagagagagacatatatgaaactggtccatgcaatcatggcggctgaggctggggagtcccacartctgttgtctgtagctgaagacccaggaaagctggaggtgtaagttccagtctgaggttaggagattggtgtcctagctccagcagtcagacagagagagaaaacgctctcttccttcacctttttgtgctattcagtctctgactatgatgctcacctgcactggggagggtcctctgctttcc

SEQ ID NO: 943215 - DNA, 612 bp, Homo sapiens
ggcgtgagccactgcacccagctgatcagtcatttcttaatctgtttttatatcaaagtcatgtgaagggctttaaaaatatgtgaactcgattcccaggcaagatggcccaataggaacagctccagtctgcagctcccagtgagaccaacgcagaagatggatgatttccacatttccaactgaggtacccagttcatctcactgggactggttagacagtgggtgcagcccacagagggcaagcaaaagcagggtggggagttgcctcaccaggaagcacaaagggtcggggaactccctcccctagacaagggaagccgtgagggacttgccatgaaggatggtgctatctagtccagatagtccagatactatggttttccctcagtcttcacaacccacagaccaggagattccctcaggtgcctacaccacaagggccctgggtttcaagcacaaaactggatarctgtttgggtagactgagctagctgcagaagtttttttgttgttgtttttgtgttttttttttccccctggtggcacctggaacaccagtgagacagaactgttcactcctctggaaagggggctgaagctagggagaca

SEQ ID NO: 943216 - DNA, 621 bp, Homo sapiens
gccaagctaacattaagaggaatttagtttatagtttaaccttaaagcagagatgataataaccctttcccacactaccccctccttgcttggggactgagattacctttgtaaaattaacaaattagtcactaggttaaaattacggctcaggagtcatgcagacagaagctgcaagatttctaacctccccaatggctcctatcgataacattactattgtaaaacctaagactggtgttcaaggtatttttaagaccctgcattctgatggacctgctgstatcacacagtctgataaactggcttaattagttttgtgattctatccaggaactgaagacagcaagaagccaatttgactcccgatgatttcattcctaacccaaccaatcagcattccccattccctagctccttgcctactaaattgtcctttaaaaaaccctagacttcaaattttgggggagatagattagggtaataactcctatccttcctgtcagttgccttgcaataattaaactctttctctactgtactaatactgtctcagtgaattgggcttatctgtacagcaggcaaaaagaacccattgggtgatcataattctacgaggat

SEQ ID NO: 943217 - DNA, 592 bp, Homo sapiens
aaggagcaacgccgggaacacaacactcgtcagctctcagttcctgccctaggtgtggtcccctgcatgcagagggacagaatgggtgcttgagggaaccctaagcacccaccttggtgtgactccttcatgaggcccaccaccaaacagggaccctgcatgcttgaaggccagcagcaggcaccactctgacctcatgccctcagcacctccaaaagccctccaccctcttaagaagggcctagcctcatgaccctggtctgcctttgggccagatctccctgtgcaggggtggccaaggtccccacttgcccacacctcagaatttgcagcctaggaygcagccactcttttgtaaactgcaccctaaatcacacagcatttgtgtaaccacccattcaccccaaacttccagcttccttttacaaattactcttaaaacagtctgactttgggaggccgaggtgcgcggatcacgaggtcaagagatcaagaccatcctagcaaacatggtgaaaccccgtctctactaaaaatacaaaaattaggcatgttggcacatgcctgtagtcccagcaacttgggaggctga

SEQ ID NO: 943218 - DNA, 620 bp, Homo sapiens
agcagcaatgaacaatgataaactttcagtctccacctatgatgttatgttttgattaaaggcttaccgtacagtgtgtgtgtgtgtgtgtgtgtgtgtctgtgtgtgtgtgtgtgtgtgtgtaaacatcatcagcagttgagggaccagaaagtgggtcctgtagggatgaggaggcattctgctggatggcttcttagaatatttccttcagagtcatctgcctgattgacaatatatttttcctcagaaatctctctttgattttattaatggacatgatttcttgtttgattataaatatacacttcactagtccttcaattagcccatcacacactttcaccatgtaatccattggaacattttctgaagtgttaacaacgtcatctttactgtacctataataagaatcaamcttcgttcagaaaaatttaggctatttcactatcagtcaataaatgaacaaccagaacctcattattgatgttaaaagcttcttcaatatccacatctttcagattgctgacatactatgaaggtataatttttgcataagtaaggtggtaagaccattttttattctcaatgacaccaccttgttcatcatcatcatcact

SEQ ID NO: 943219 - DNA, 730 bp, Homo sapiens
gacttcactacctaaagggtttgaagaaattttagagagtataaaaatgggaaaagaaagtgaaatattacctatattatcacaattcaacagcaaaaggcatgtatacttttaatcaattaaagtatataaggtggtcatttcacagaaatcctcctgtgaatgctttggtgagtttaacaacttcaaatttacatttttaaaggtcagtacaaagctataaaaagcccagagcgcccaagcaatggtttgcttkaacaagtaacttgtctttatcacacatgtgagttcaaatgtaggagggcaggactgattgttcaccatttcttctgagcattgtataggtagaaacaacataaagctatagctcatgaaaaaaatattttgctagaactgcgagacactgaaattgattactgaggaagattcagaatctgactgtacatattttgagagaatagttgggcttaacctccattatattttccctttgtccttgatccattaaacctgcagtatgatgtggcatatattttttaacctgaattctcataaacagtggggttgccaatttatgagcagttatagttctccctctaatgtgtgtctcagatattcgaaactaaacaagactttctaaacttgcacttttgtataaattatcagccctccataaaaatccatataatgggtccaggttcagatatctcagtggcttctgtcatcaaac

SEQ ID NO: 943220 - DNA, 600 bp, Homo sapiens
gaggatgtaccctgcaaagccataggggtagagctgcccaaggccatgggagtccacctcttgcatcagcatgacctggatatgagacatggaatcaaaggagatcattttggaaatgtaaggtttggtgactgccctgttgaatttcagacttgtgtgggacctgtagttctttgttttgacccaatttctcccaatttgaacaggtttttccccaaggcctgtaccctcattgtatctgggaagaaactaagttacttttgattttgcaggttcataggcaaaagggacttgccttgtctcagatgagaccttggacttggactttgggttaatgctggaatgaattaagactttggaggactgttggaaaggcacgattgtgttttgaaatgtaaggacatgagatttggcaggggcgggggaggaacgatatggtttgactgtgtccccacgccatgtctcatcttgaattgtagttcccataatccccatgtgtcatgggagggaccsagtgggagataaatgaatcataggggtggttacctccatgctgttctcatgatagttagttctcatgagatctgatggttttataag

SEQ ID NO: 943221 - DNA, 611 bp, Homo sapiens
tggatatctacatgcaaaagaatgtgacaaaaatgaaataaaagtcatcatacattataccatttataaaattatcacatacaaaaaaagatcataactaattctaagagctaagatagtaaaactcttagaagaaaacattgaactaaatctttgtgatcttggatttgtcaatagtatcttagatgtgataccaaaaacacaagtaacaaaagaaaaaatagacaatttggactttatcaaaattaaaaccattcttgctacaaaagacatcatgaagaaagtccaaaagacaacccacagaataggaaaaaatgtttataaatcawaatctgataaaagatttgcattgcgaatatataaagaaccctcacaactcatcaataaaaaacaaataaacctatttaaaataggcaaagaatttaaagagagatttttccaaagaatatatatgaatggccaataagcgcataaaaagatgctcaatcttattagtcattagggaaatgcaaatcaaaactacaatgagatactcacacccacttaggatagctatataatttaaaacacagacaataacaagtgttggttaggatgtggagaaataggaa

SEQ ID NO: 943222 - DNA, 611 bp, Homo sapiens
tggatatctacatgcaaaagaatgtgacaaaaatgaaataaaagtcatcatacattataccatttataaaattatcacatacaaaaaaagatcataactaattctaagagctaagatagtaaaactcttagaagaaaacattgaactaaatctttgtgatcttggatttgtcaatagtatcttagatgtgataccaaaaacacaagtaacaaaagaaaaaatagacaatttggactttatcaaaattaaaaccattcttgctacaaaagacatcatgaagaaagtccaaaagacaacccacagaataggaaaaaatgtttataaatcataatctgataaaagatttgcattgcgaatatataaagaaccctcacaactcatcaataaaaaacaaataaacctatttaaaataggcaaagaatttaaagagagatttytccaaagaatatatatgaatggccaataagcgcataaaaagatgctcaatcttattagtcattagggaaatgcaaatcaaaactacaatgagatactcacacccacttaggatagctatataatttaaaacacagacaataacaagtgttggttaggatgtggagaaataggaa

SEQ ID NO: 943223 - DNA, 721 bp, Homo sapiens
acctaaagggtttgaagaaattttagagagtataaaaatgggaaaagaaagtgaaatattacctatattatcacaattcaacagcaaaaggcatgtatacttttaatcaattaaagtatataaggtggtcatttcacagaaatcctcctgtgaatgctttggtgagtttaacaacttcaaatttacatttttaaaggtcagtacaaagctataaaaagcccagagcgcccaagcaatggtttgcttkaacaagtaacttgtctttatcacacatgtgagttcaaatgtaggagggcaggactgattgttcaccatttcttctgagcattgtataggtagaaacaacataaagctatagctcatgaaaaaaatattttgctagaactgcgagacactgaaattgattactgaggaagattcagaatctgactgtacatattttgagagaatagttgggcttaacctccattatattttccctttgtccttgatccattaaacctgcagtatgatgtggcatatattttttaacctgaattctcataaacagtggggttgccaatttatgagcagttatagttctccctctaatgtgtgtctcagatattcgaaactaaacaagactttctaaacttgcacttttgtataaattatcagccctccataaaaatccatataatgggtccaggttcagatatctcagtggcttctgtcatcaaac

SEQ ID NO: 943224 - DNA, 809 bp, Homo sapiens
cttttcttctcactctatactttctatcctggcaagtttcatcatatctgtggcttcagttattacctaatatgcaaaagcctcaacaaattatagctccaaatccacatatgtaactcgaacctttataaatctacrtggacgtttcaaagacactcaactaagtaggtttaaaaccaaattcataacatttcccatgagccttgtctactacctactaaatccttagtgttcacaatctcagtaggtggcaccaccttcccaccaagtatgtaagtctgagaaataggcattgttctttacaccctattcttcccctttatttaatctaacaattgtccactttgtgtttcttgaatctgttcatttgtcttaatctccattgacacctctataatttaagatgtataccatctcttatgcgaactactgcaatgcaggaataggtcacccctatatactctaacccttctctgatccatttcttgccatgtagccagagtattacttgcttttcttttttcaaaagaaaatctgaacatcttaccccttgtataaaactctccagtgccttctgtgaagcattcactgtctttaaagtcaaaagacacgtttgcaacaacacggatgttcctgaagcctggtatgctaagtgaaataagccaggtgcagaaacacaaatactgcatgatttcactcctatgtggaacttaagaaagttgaccccactgaattagaagcagaatggtggtaaccagaggctggggtagttccacagcggggggcaattgtagagatactgatcaaag

SEQ ID NO: 943225 - DNA, 575 bp, Homo sapiens
tccaaagtcttatctagagatgggttccttccacctatgaggctgtgatatcaaaagcaaattatttactttcaagatgcaatggtagtataggcattgaggatacagtcccatcccaaaagggagaaatcagccaaagaaaggggtaataggcytcaaacaagtctgaaacccagttgggcagtcatttaatcttaaaattctaaaataatctttgactctatatcccacatcctgggcacaattgtgaaaggggtgggctctcaaagctttgggcagctctgtctctgtggctttgcagggtgcagcccatgtggctgttctcatgggttggaattgagtgcttgtggcttttccagacagaggatgcaagctgccaatgaatcaaccattctcaggtctggagggtggtggcctccttcccaccactccactaggcagtcccttggtaggcactctgcatgaagtctccaaccccacgtttctcctttgcaccaccctagtagagtttctctggtgggggctccacctctgcagaaggcttctgcctgggcacccaggcttttccacccatc

SEQ ID NO: 943226 - DNA, 441 bp, Homo sapiens
agggcagagagagctgagcaatgatttttttttttttttttgagacagagtcttgctctgttgcccaggctggagtgcattggcgctatcttggctcactgcaaactccacctcccaggtccacgccattctcctgcctcagcctcctgagtagctgggactacaggtgaccaccaccacgcctggctaattttttgtatttttagtagagacagggtttcaccgtgttagccaggatggtctcaatctcctgacctcgtgatccacccgcctcggcctcccaaagtgctgggattacaggmgtgagacaccgcgcctggcctaagcaatgattttaagttgggttccatgatgtagcagccaaaattagccctgataaaagctcctttatagccaactgaaatctacatctcagagaaactatccatacaacttcccaat

SEQ ID NO: 943227 - DNA, 441 bp, Homo sapiens
ttaactgccaagtttctgttttggtgactactcttcttctagctgctgttttggtcttcaggggaatggagaggaggaagctgaagccaggctgatggccagactgtgtttaaaaaatatatttaggaaatgtgttttttgrtatttgaagtaattacctaacccaggttcttgagaagcttgaacaaaatttgcattgtggatcaatgactttgctattatatttgtgttttctgagatggcaggatgaaatggtttctgagaccagtctataaacaggtccacggtgagagaagaagctgcacaggatcctttcgaacaggttacacttacagaatcttatttaatccttgagaaattggatcaagcagtataacgagcaattggcagagaaatcaagctcagaaaggccattttggccgggtgcggtggctcacgtct

SEQ ID NO: 943228 - DNA, 441 bp, Homo sapiens
ttaactgccaagtttctgttttggtgactactcttcttctagctgctgttttggtcttcaggggaatggagaggaggaagctgaagccaggctgatggccagactgtgtttaaaaaatatatttaggaaatgtgttttttggtatttgaagtaattacctaacccaggttcttgagaagcttgaacaaaatttgcattgtggatcaatgactttgctattatatttgtgttttctgagatggcaggatgaaatggtttctgagaccagtctataaacaggtccacrgtgagagaagaagctgcacaggatcctttcgaacaggttacacttacagaatcttatttaatccttgagaaattggatcaagcagtataacgagcaattggcagagaaatcaagctcagaaaggccattttggccgggtgcggtggctcacgtct

SEQ ID NO: 943229 - DNA, 746 bp, Homo sapiens
attttatttttgggaggaaaggttttgtttttattttaaaataccaacactggtaaatgtccttttggaggactggctgaagccaggtaaccaagggcaaggcactttgagccacagtttcctcacttatacagtggggctaaatgatataatgtatgcaacttgctacctggggtagataaggaacattcacaaaagtaaggataattatactttaaaagcgtgtaattaagtgctcctagaggtctggggtgttcacatttctaacaacttgcttatktagtaataatagcctatgagagttccctgactcccctcatgggatgtgtgactgggtgtggcttgtctgttcggctgccatgcatgctcaaaccccttatgggtgggggagcacaaagatgggcaggtgcagaagctggggcaagtgcccctgggctccggcctcacggcagcatccaggggtgggtgtctgtgactcccaaagcccaagtggcatgtgttgtgttacagtgcgctcttttaaccttgccatccgtggatggcttaagtgttaaccagcatagtgtcctcttggtacccaggcccttgtccagtgtccaggaagaatcaggttgcacatggacttgaaggatgaatgtgggggctttattgaatggtggaggtggctctcagtgggatgaatggggagctggaagggggatggagtgggaagatgatcttcccctggagtgtggttgtccagcagc

SEQ ID NO: 943230 - DNA, 583 bp, Homo sapiens
gtctgaccacagagccggcgagatggcacgttggtgcagctctgaggcactgcttcaatacacggttgtgttagaatgaatacgcctcatctttatccccaaccctgtgagctcttcccatatttctagtagacttttccctccctcccccaaccccttgctcctggaatggagccaccattcacccaaggtgggtrcccctcctttcttccacgcggagtgggggcagctcctttgatggctggtttgcacgtcgaccatcccttcccataggtctcctggggaagtgacaccttccctcctcctgtcagccccaggaccgactggccccacacacagacccgcgcaggagcagcagggtctggaccccaggcagtttggtccatcctgggcttagggggcctcctgctgatcttcattctcttccttggagaggacagggcaggagcaaacacctccaagggagtgacctcttcacagagtgacctctccaagggagtgacctcctcacgggagtgacctctccgggggagtgacctcctcacgggagtgacctctccgggggagtgacctcttcacggga

SEQ ID NO: 943231 - DNA, 583 bp, Homo sapiens
gtctgaccacagagccggcgagatggcacgttggtgcagctctgaggcactgcttcaatacacggttgtgttagaatgaatacgcctcatctttatccccaaccctgtgagctcttcccatatttctagtagacttttccctccctcccccaaccccttgctcctggaatggagccaccattcacccaaggtgggtgcccctcctttcttccacgcggagtsggggcagctcctttgatggctggtttgcacgtcgaccatcccttcccataggtctcctggggaagtgacaccttccctcctcctgtcagccccaggaccgactggccccacacacagacccgcgcaggagcagcagggtctggaccccaggcagtttggtccatcctgggcttagggggcctcctgctgatcttcattctcttccttggagaggacagggcaggagcaaacacctccaagggagtgacctcttcacagagtgacctctccaagggagtgacctcctcacgggagtgacctctccgggggagtgacctcctcacgggagtgacctctccgggggagtgacctcttcacggga

SEQ ID NO: 943232 - DNA, 477 bp, Homo sapiens
gcgcctggcactctgcgcatgatttaggatgctgggtcttgattaaacctgctgtacattgttaccacctggcattctctccaggtggtatggaacggcactctcagaggaaggaaatgtacctctatatgtttctgtactataaagattctataaagagccaatttcctttctgccttcctgatgaccaagcttccratggcatgtgctttgtacacagatttcacattggacacttgtactcatacaaaggccatccttgatgttttccattcattcatacagaacaggatgtgaatctatttagtgcaccagatacttaggtaaatgagttaattgctcatcaaggacactgttctcttgcggctctttctgcccatgagagcttggaggcagatctgcatctgctgaaatcactgcatgaggcgggtctggctgcatcccatctgtattaactactttcccttcaggagtgtg

SEQ ID NO: 943233 - DNA, 621 bp, Homo sapiens
acactacacttttccaacggtcttagcaaatggcacaccaggagattatgccccgcgcctggctcagcgggtcccacgcccacagagccttgctcactactagtgcagcagtccaagatcaaactgcgaggcagcagcctggctggggaaggggcgtccgccattgctgaagcttgagtaggtaaacaaagcggctgggaagctcgaactgggtggagcccaccacagctcaaggaggcctgcctgactctgtasactccacctctgggggcagggcatagctgaacaaaaggcagcagaaacttctgcagacttaaatgtccctatctgacagctctgaagagagcagtggttctcctagcatggagtttgagctctgagaatggacagactgcctcctcaagtgtgtccctgacccctgtgtagcctaactgggagacatctcccagtaggggccgaatgacacctcatagagctgggtgcccctctgaaatgaagcttccagaggaaggatcaggcagtaatatttgctgttctgcaatatttgctattctgcaatatttgctattctgcaatatttgctattctgcagcctctgctggtgatacacaggtaaacaga

SEQ ID NO: 943234 - DNA, 789 bp, Homo sapiens
tgcacaagggaggttccttatacaaggccgtatttgaaagggtccacagcatctgctcacatcccactggccaggactcagtcacgtggccacatctaactgcaagggaggctgggaagtgtattccagtgtgtgcagccagggaagagaggaggccatgttgctctgggcaacaacatcaggttctatcccctcttctctccccacttacggggtgaccctcttggaggcctctcagttgcrcaacctcacaccccaatgccatacagagtttcttacgaagtggctctttctcaccaccctttttatttttccctggagcccagagacacagcccggttgtaggcatgggggtgaggggtgttaccagccaaggacacaacagcgtactggaatacagtggcttctaaaaccacctgtgggaaagaaccaaatgcaatatccccatcagtctcccacagcccaaacactgcaaaattctagaggtcgccaaggaccacaggtcgccagaaacaatgacttcatttgggtctttctcatttagtctttctgaggtgttggacggcagtgacaccttctcaaggtcactctccgggccgcatgacctggcgctccccaggcttccctgctgtttccaactttacctcctccaccccctgtgagggctcctttccttactcctaatgatgctgtttcccaggcggccacttccaccctctgcttctctcttctcatctccaccctctgcctccctgggactctcatctgcaccctacctcagatgcccct

SEQ ID NO: 943235 - DNA, 672 bp, Homo sapiens
ccctccaaaaaaaaaaaaaaaaagaagaagaaagaatctgacagtatatattcttttgcatctggtaaatttcactcagagattcattcatattcttgtaattgtagattgttcattgtctttgctgtataacattctattgtgtgaaaaactaccatgtagctactcattcaaccattgataggyctttgagtattttccagtttggggctattatgaatagtggtgctctgtaagttattgtccttttgggttttttttttttttttttttggaaaagggttttggcttggccccccaattgggagtgcagggggttaaccccggcccatggcaccctccacctcccaggttcaagcaatcctcccacctcagccccctgagtagctgtgaccataggcactccccaccacgcccggataatttttgtgtttttagtagagatggggtttcctcatgttgcccaggctagtcttgaactcttaggtcaagcaatccaccagccttggcatcccaaaatgctgggattaccggtgtgagccaccgtacctgtcctgtccttatcttttgtaacaacatgtctgcatttctgttgaatatatatataggaatggaattgctgggtcctgggaatgtgtgtgcccagctttagcatgtgctgtgctggctgac

SEQ ID NO: 943236 - DNA, 595 bp, Homo sapiens
tgccacaggtgcagtagcatgtgcctgtagtgtgagctgcttggtaggctgaggcaggaggatcacctgagcccaggagttcaaggctgcgttgcactatgatcacgcctgtgaatagccactgcactttagcctggraaacatgagagaccccatctcttaaaaaaaaaaaaaaaagtaaaaaacttagaacactagttcaggaaattcaacatcaataacaaaataaaaacaaaaaatagagaaaaataaatcgataaaataactcatgagatttcccaaaaacaaaagaacatgaatttccaagctgaaagaccaccatatgttaagtacaattgatgaaaataagtgaacactaagacacatcattatgaagtttcagaacactaaggttaaagataaaattcaaatagaaaaaaaatgggaaggtcacaatgaaagaatcaagaattagaatggttttaaacttttcaacagccatactaaagaaggcaaaggagtgacatgtttaacgttctgaagaaaaacaatttacaaattagaattctgtattagtcaggatgggcttggttatactacaataacagacaactcc

SEQ ID NO: 943237 - DNA, 595 bp, Homo sapiens
tgccacaggtgcagtagcatgtgcctgtagtgtgagctgcttggtaggctgaggcaggaggatcacctgagcccaggagttcaaggctgcgttgcactatgatcacgcctgtgaatagccactgcactttagcctgggaaacatgagagacyccatctcttaaaaaaaaaaaaaaaagtaaaaaacttagaacactagttcaggaaattcaacatcaataacaaaataaaaacaaaaaatagagaaaaataaatcgataaaataactcatgagatttcccaaaaacaaaagaacatgaatttccaagctgaaagaccaccatatgttaagtacaattgatgaaaataagtgaacactaagacacatcattatgaagtttcagaacactaaggttaaagataaaattcaaatagaaaaaaaatgggaaggtcacaatgaaagaatcaagaattagaatggttttaaacttttcaacagccatactaaagaaggcaaaggagtgacatgtttaacgttctgaagaaaaacaatttacaaattagaattctgtattagtcaggatgggcttggttatactacaataacagacaactcc

SEQ ID NO: 943238 - DNA, 584 bp, Homo sapiens
aatttctacaaaaaacaaaatttaataattagctggatgtaaaaaaaattacctgggtggcatgcacctgcagtcccacctcagaaggctgaggtgggaggattgcttgagcccaagagttcaaggttacagtgaactatgattgtgccactggactccagcctgagtgacagagcaagaccttrtctctaaaaagaaaaaaacaaaaaacaaacaaaaaagggagtttggacaagaagtaaatatgccaatcaggtaacacacattgctatgacattataggatgttttctgtattttcctttttaaaaattatttaattactttattttttataaatagagacgagatctcactgtgttacctaagctggtctcaaactcctgtactcaagcgatcctccctcctcagcctccgaaagtgctgggattacaggcatgatccactgcacctggcctgtattttcaatagacataagtgaggcacacactgtcttagctcaggctgctataagaaaatatcatagactgggtggcttaaacaacaaacatttatttctcactgtcttagaggctgggaagtcca

SEQ ID NO: 943239 - DNA, 586 bp, Homo sapiens
agtctatggcataggttaaccatttgagctctgaatttttcttgtaatttgcctatcagtttaaaatgtacacaaaaatgagccataatatgtaatcagctatagtttcaaagggaacaacaaaattagaagataggatgttcgaaaccgttttttcttttcttttctttttttttttttaaatacagagatggggtttcactatgttgcccaggctggtctcaaattcctgggctcaagcgatccacctaccttggcctcccaaagtgctaggattacagggatgagccaacatgcccggcctgtttttccctttaagtctgagcycctggattgaacagaaaaagagaaaaagaaaagaaaggaatgcagaggaaaagattaagctttataggagggcttgtgagcctttcagccactgcatgatgtggggccagcacccctgccatccttgtttatctcgtgtcacagagaaccttagcaccccagacctacacagtgtggaacaaattccttccacccctgcaagtcactagttaaggtgagctgtttacagggggagtagagagccccttcagctcaaggc

SEQ ID NO: 943240 - DNA, 688 bp, Homo sapiens
cagcctcattgatagtcctgagatcttgcactaacctccactgtccattgggtttctgtactcctaaaattggagtattgcaggggctattgcatggttttactaggctaggccttgggcttttaggtccttaacaatcttttggagtccttgttgggcctcaggtctaagggggtcctgcatttcgcagggaaaggaggtggcatcctttagtttamcttgaacaggatgggcattctttgcttatccatattgtccttctgttgcccagacttcaggattaattccttcctcaagcaggggacaacaaacgggtgttctttcccctatgttcaggtgtataacggcccctgcttttgctagaatgtctctccctaacaagggaatggggctttcaggcataattagaaaagcatatgaaaaaagtaaagttccccagccatgacttagtggctgggagaagtatctagtgactggctgtcctagcaccccttggatagtgacagatctggatgacagttgtccaggacaggagagtaagactgagaaggctgcaccagtgtccaggagacagttaacctcctggcccttgatggtcaagcatacccggggctctgtgagggtgatggcatgggctggtgcttgccccagacaccctcagtcctgctgctgggtcatctggttagtg

SEQ ID NO: 943241 - DNA, 688 bp, Homo sapiens
cagcctcattgatagtcctgagatcttgcactaacctccactgtccattgggtttctgtactcctaaaattggagtattgcaggggctattgcatggttttactaggctaggccttgggcttttaggtccttaacaatcttttggagtccttgttgggcctcaggtctaagggggtcctgcatttcgcagggaaaggaggtggcatcctttagtttaacttgaacaggatgggcattctttgcttatccatattgtccttctgttgcccagacttcaggattaattccttcctcaagcaggggacaacaaacgggtgttctttcccctatgttcaggtrtataacggcccctgcttttgctagaatgtctctccctaacaagggaatggggctttcaggcataattagaaaagcatatgaaaaaagtaaagttccccagccatgacttagtggctgggagaagtatctagtgactggctgtcctagcaccccttggatagtgacagatctggatgacagttgtccaggacaggagagtaagactgagaaggctgcaccagtgtccaggagacagttaacctcctggcccttgatggtcaagcatacccggggctctgtgagggtgatggcatgggctggtgcttgccccagacaccctcagtcctgctgctgggtcatctggttagtg

SEQ ID NO: 943242 - DNA, 656 bp, Homo sapiens
ataattagaaaagcatatgaaaaaagtaaagttccccagccatgacttagtggctgggagaagtatctagtgactggctgtcctagcaccccttggatagtgacagatctggatgacagttgtccaggacaggagagtaagactgagaaggctgcaccagtgtccaggagacagttaacctcctggcccttgatggtcaagcatacccggggctctgtgagggtgatggcatgggctggtgcttgccccagacaccctcagtcctgctgctgggtcatctggttagtgacttctgactcaaaggaacttcatcccctggggcagtgggccttccagtgattcycttaacataaggggcatggaagagggggcagcttacttctacttggacaatcttttttaaagtgtccttgtagaccacactggaagcaagccctattaggtattcgatttgcccagcttttcccttttccagagcctccaaagtccgcttgcctgtgggccatgagtaaagcggtggccttttttaaaatcctgtttgtcccattctacctgctcctcctgatctctattataaaaaactgaggttgccaagttcaacagggtttctaagtttcgctccgggcctaaggcagacttttgaagtttttttctaa

SEQ ID NO: 943243 - DNA, 757 bp, Homo sapiens
cctgattctaaaattgcaaataaagccaattaaaatatttaaaaatttgtggtaattttgttttttgacacttctgacctttggttaattgctacttactgtctaatgggcactgtgctcagggatttacgtacagtatcccctttagcctgcaaaacaaccctgttacagtttagccccctttcatagatgaggctgagagaagttacctgaattgcctaaggtcatgtggtctgtgaaaatcagaggtggaatttgaacacagctcttcctaactccaaaacccacgattttaagccccgcacttattgcccaccatgtgatgtatacggtctattcagttaagaaatatatatggagttcttaacatatgccagagactattctaggtgacaaagatacagcagtgaagaatgcagcgactgccctcgttctagtgtggtttttgtgtgtgaagttgggggagagggccagttgtgatacaggggagtaagagatgataaataaatacatgccgatgctggatagtggaaactgccgtggaaacatcaagtgctgtgagaagatrcagaatgatggtggcttgtggtgacagggtggtcaggtaagacctccttggtgaggtgtcactggaccagagtgaagcgaggagcaaagtcattgatccttggattggatggcatgtggtgggtgggggtggcatagagaccaaagggaacagcggctgcccaggtctccgggggatgtgtgcttggtg

SEQ ID NO: 943244 - DNA, 726 bp, Homo sapiens
tctggattttgtagaagattgcatccccatggtgatgttgacatatcctgtttttttgtttgtttgtttttttgtttgtttgtttttgtttttgagacagggtctcactctgttgcccaggctggagtgcagtagtgtgatctcagctcattgcaatctctgcctcccaggttcaagcaattctcctgcctccggagtagctgggattacaggcacacgccaccacacctggctaatttttgtattttttggtagagacagggtttcaccaggctggtctcaaactcctgacctcaagtgttctgcccacctcagcctccctaagtgctgagattacaggtatgaaccactgtgcctggcctacatatcctgttttctgtatttcctgtttgatctagaggcgtaatcaaattcagattcaacttttttggcaaatacttagtcattttkggctacccttcctattttaggggacacatttctagttttgtccccgcctttcattccagaacctgaaaagggagcagatgttccagggaagccaattcctggacgtatgtccttggctgggccaatccgacactccctccagtctctgaatctgaaatgagtggcacaaagaaacaggcaagagctgaagactcattcccgggtggcagcagtggccagacgagcaacagtatcctgacctactcttcttgtgatgtgattttgaacttttgactg

SEQ ID NO: 943245 - DNA, 641 bp, Homo sapiens
aaagatttggtgtggcggtagcccacagtgagagagagacacggatcagaccgagagaaaaaaggctgtagactttattaagcagtgacagtacaaagcttccacagcgtggaaggggtcccgagcgggtagccagtgttagattttttgatcaccttttaaactctttaaggmgggaactacgtgcagcgggaagatgttaccagagcaagaaacaaagacaattaacatgtctcagatcttgaggaaaaccggaattgtaacttaagttttatctactttatgaccttgcagcggcatggcaaaggagacaggatctcacaggatttcacaaattgtgtttacaaggaattggaattgggagcatagacaaggtatgctggtcacagaaaaacaggcttttaacatttcttttagtttcaggggagggggaagggagagagggagagaggacacagggaagcttacaacaaaattttcgctgtttatagctttcttggggaagaaaacacaggcacaaattctgatgttaggaatattttaagcatgtatcttcaatattattcatccaggaccaaagtaagtcctgatgcaggaaatgactgagtttcacagctttctgagcccctactcgacccagg

SEQ ID NO: 943246 - DNA, 641 bp, Homo sapiens
aaagatttggtgtggcggtagcccacagtgagagagagacacggatcagaccgagagaaaaaaggctgtagactttattaagcagtgacagtacaaagcttccacagcgtggaaggggtcccgagcgggtagccagtgttagattttttgatcaccttttaaactctttaaggagggaactacgtgcagcgggaagatgttaccagagcaagaaacaaagamaattaacatgtctcagatcttgaggaaaaccggaattgtaacttaagttttatctactttatgaccttgcagcggcatggcaaaggagacaggatctcacaggatttcacaaattgtgtttacaaggaattggaattgggagcatagacaaggtatgctggtcacagaaaaacaggcttttaacatttcttttagtttcaggggagggggaagggagagagggagagaggacacagggaagcttacaacaaaattttcgctgtttatagctttcttggggaagaaaacacaggcacaaattctgatgttaggaatattttaagcatgtatcttcaatattattcatccaggaccaaagtaagtcctgatgcaggaaatgactgagtttcacagctttctgagcccctactcgacccagg

SEQ ID NO: 943247 - DNA, 564 bp, Homo sapiens
ttcagaaaaggccaaatagggagcccagacattcaccgtcatcctccccattccctgcagtgtcacagagcgtgtgaggatccaggactttcacctccatcaggcagtactgagagtaacgaggcttcccttacccatcctgcctgggtggtgtcagaggaggcagaatggatgtttgaaactttcaccaaccccagcagcaagacatccccactgtggtgtcagaagaggcyacatcaggaggagtaggtagacatgcctcctcctgccgctcaggtatgtgtgaagatctagaaggaagctataacccccttccctgctccaacccagcagtgacaagtattcctttccctaagtgtcaaagaggcaaagtggggaacctgggcttctccctttacttggcaggagcaaagtggcagcccaccaaacccatctcaaaatgttcagatttcaatctcaaatcacttatcacagcagaaaccagaaaaccacaatttaaatgaaaatggacaactgttgcaaaccaactcggagggaacagagatgttaggattatctggaaga

SEQ ID NO: 943248 - DNA, 540 bp, Homo sapiens
gtttgtgtttaagctaagagttattacaaaaaagtctaaaagctacataattaaaatgtatataaagtaagaaagtcacaataaattaaggttgatttattatcgaagaaatacattttaataataaatttagtgtactctaagtgttaaatgtttacaaagtgatgtcctaggccttcacattcactcaccacttacyctctcactcacccagagcaacttccagtcctgcaagcttcatttgtgttgtgtcctatattccatcttttatcttttacaccatatttttactgtaattttgctgcaattacctacagcattcagtaaagtaacatgctgtacagtgttgtagcctaggagtaataggcaacaccacatggcccaggtacagtaagctgcatcatctaggtttgggtaagtacactctatgaggctcacacaacaaaatctcctaacaacccatctctcagaacatatcttccttattaagcaatgcatggtggaagattgatttgtaaaactcttcccaaccactggttt

SEQ ID NO: 943249 - DNA, 540 bp, Homo sapiens
gtttgtgtttaagctaagagttattacaaaaaagtctaaaagctacataattaaaatgtatataaagtaagaaagtcacaataaattaaggttgatttattatcgaagaaatacattttaataataaatttagtgtactctaagtgttaaatgtttacaaagtgatgtcctaggccttcacattcactcaccacttaccctctcactcacccagagcaacttccagtcctgcaagcttcatttgtgttgtgtcctatattccatyttttatcttttacaccatatttttactgtaattttgctgcaattacctacagcattcagtaaagtaacatgctgtacagtgttgtagcctaggagtaataggcaacaccacatggcccaggtacagtaagctgcatcatctaggtttgggtaagtacactctatgaggctcacacaacaaaatctcctaacaacccatctctcagaacatatcttccttattaagcaatgcatggtggaagattgatttgtaaaactcttcccaaccactggttt

SEQ ID NO: 943250 - DNA, 540 bp, Homo sapiens
gtttgtgtttaagctaagagttattacaaaaaagtctaaaagctacataattaaaatgtatataaagtaagaaagtcacaataaattaaggttgatttattatcgaagaaatacattttaataataaatttagtgtactctaagtgttaaatgtttacaaagtgatgtcctaggccttcacattcactcaccacttaccctctcactcacccagagcaacttccagtcctgcaagcttcatttgtgttgtgtcctatattccatcttttatcttttacaccatatttttactgtamttttgctgcaattacctacagcattcagtaaagtaacatgctgtacagtgttgtagcctaggagtaataggcaacaccacatggcccaggtacagtaagctgcatcatctaggtttgggtaagtacactctatgaggctcacacaacaaaatctcctaacaacccatctctcagaacatatcttccttattaagcaatgcatggtggaagattgatttgtaaaactcttcccaaccactggttt

SEQ ID NO: 943251 - DNA, 605 bp, Homo sapiens
atcccagcagttggaacttcagttcctacaagcttcaccactgtgagataaaattctctggggccctaaataaacttggaaggtagtctagaccacaaagattgcaactcctaggtgagtcctagtgctgaactaagcccagagacaacgcactggaatgacaggtgacctactgagacaccagtctgaaaagctaaaaaggagtgctggcatcaactcttccctaactctgggctgcacagcccatggctcygaaagagacccgttccttctgcttaaggaggaaaaagagaatagtggggaggactttgtcttgtttcttggatattagcccagctacagcaacccagggtaactgtcagagtcatgaggtcccttttccaagcccagctcctagacaacatgtctagacacaccctggatcagaagggaagctgctgccttgaagtaaaggactcagtcctcacaggattctcacctgctaactaaagagctctagggccctgaataaccagcagtgacaaccaggcactacgttgagggcgtttggtgaaaatctgaaacttgctggattcaggtcagactcagcacattcccagttgttt

SEQ ID NO: 943252 - DNA, 605 bp, Homo sapiens
atcccagcagttggaacttcagttcctacaagcttcaccactgtgagataaaattctctggggccctaaataaacttggaaggtagtctagaccacaaagattgcaactcctaggtgagtcctagtgctgaactaagcccagagacaacgcactggaatgacaggtgacctactgagacaccagtctgaaaagctaaaaaggagtgctggcatcaactcttccctaactctgggctgcacagcccatggctccgaaagagacccgttccttctgcttaaggaggaaaaagagaatagtggggaggactttgtcttgtttcttggatattagcccagcyacagcaacccagggtaactgtcagagtcatgaggtcccttttccaagcccagctcctagacaacatgtctagacacaccctggatcagaagggaagctgctgccttgaagtaaaggactcagtcctcacaggattctcacctgctaactaaagagctctagggccctgaataaccagcagtgacaaccaggcactacgttgagggcgtttggtgaaaatctgaaacttgctggattcaggtcagactcagcacattcccagttgttt

SEQ ID NO: 943253 - DNA, 514 bp, Homo sapiens
cctcacaggattctcacctgctaactaaagagctctagggccctgaataaccagcagtgacaaccaggcactacgttgagggcgtttggtgaaaatctgaaacttgctggattcaggtcagactcagcacattcccagttgtttcgactgcaaggtgagattccttctacttgagaaaagtggagagcagaataaagggggctttgtcttgcaccttaggtaccagctcaaccacagagggttaaagcagtaagcaggctctkgaggttcctgattccagaatgtggctcttggacagcatttctggacctgccctaggggagcccactatcctgatggctgagtcccaggccaggtagcattcaccacaagttgactgaagaatccctgagccataaggtagcattggtggtagtctggcagtactcgctgtgggcctgtgatgacagtgaccatgaggcgagggtcacctgccattcaaaagggaagaaaaggatagaaaggactatgtatt

SEQ ID NO: 943254 - DNA, 779 bp, Homo sapiens
atcatgttttggagactggaggatacgagttggaagaatcagtcaaaagaggtggaagcggctgcctccaaaggacaggcagtgaatacacactctgggctcggcgacttttcctccctgttatcctctcaaacacaagcttctcttcctcatccttatggcctttcccagctaataaacccactccccactggtgctggtcctcacacccacctcgacctcacagagctgagccctcactccccttctccactgccctccagaaacttcctgttcttggaagagattctggacttacgagtggtgcccatgaggccctgctgaaaaacacacagaactcatttctattgtctttttagatgggttgggccttacaatatggtttttgtctgatttcctctaagaataaatgaatccacataaatcacacaggatgcatttctctcacaagataaccagaacacaacttccagcctagaggaaaccctgcgcccatcatggtggagcttctatggtagccaagttgtgctctctgctctttgaaagtcactaaatattgctcaatcatttaaaatgactgcttttgccagactgcgtatcrtattacccttggattcaagatacacatacaatggcagggaccaaaagtttaagataatgtctacaggagaaattctttaaatgcttttttaaaaaatgtatctattccttgattttcctttcctggaattaggaaaaccagactattattccattttagtggcaaaacctgtccagtc

SEQ ID NO: 943255 - DNA, 708 bp, Homo sapiens
gtgcctttctcaatggtaacttttaatcatctttcctatctcttctatagtaattggtctattcaacttttccatgcttcttggatcaactttggtaatttgtattttcctaagaagtcagccctatattttcaaatgtgttgccacagggctgcatgtaatgttttcttataaagtctattgatatctcctgtgtctcctttctcattcctattatctatttctttcttttttgttgttgttgatgttgagacgaagtgtcgcttttcttgcccaggctggagtgcaatggagtgctcttggctcaccgcaacctctgcctcccaggtttgggcaattctcctgcctcacctcctgagtagctgagattacaggcataagccaccaygcccggccaaatttgtatttttttagtatggatgggtttctccatgttggtcaggctagtctcaaactcccgacctcaggtgatccgcccgccttggcctcccaaagtgctagaattacaggtgtgagccatcatgcccggcctctcattcctattatctagttctaagttaggatgatttctttctgttcctgagttaggataatgagagtttactttattggtcatttcaaataaccagctattggatttacataacttttaaatcttatcatctcctaattcctccctcctagtttttatatttttgtttaattagt

SEQ ID NO: 943256 - DNA, 839 bp, Homo sapiens
actctgtcacacaggccggagtgcagtggtgcaatcacagctcactgcagccttgacctcctgggctcaagcgatcctactgcctcagcctctcaagtagctgggactacaggtgtgtgccaccacgccctgctcatttttatttcttgtagagatggggatctcactatgttgccagggctggtcttgaactcctggcctcaagcaatcctcctatcttggcctcttgaagtgctaggattrtgggtgtgagccaccatacctgacctaggatctttaaagaggcagatttattggattatctagacaggcccaaggcaatcacagagttatttcaagagggaggctgtgggtcagagtcagaagagatgatggatgacagagcagaggtcccagtgacgtggaactgtgaacccagggatgcaggcgggctggagaagctggaagaggcaaggaaacagattctcccccagagcctccagaaagaacttatccctccccacaccttgattttagtccactgagactgatttaggacttctgacctcccaggctattggataataaatttgtgatgttttaagccaccaagttcatggtcatttgttacagcagccagaggaagctcatacaagcacctactatgtgccaagtgcactgccagagcctgggaaggcagcctgaacaggagagcaggggcccctgctctcatggagtttgtcttccacaacagacaaacatggcaaacaaggtaatgtcaggctgggaggaacaccgggaagcgaatgaaacaaagaagcagctttgggataggcagtcgggaaaggcctctagaacgg

SEQ ID NO: 943257 - DNA, 689 bp, Homo sapiens
ttcaaaatgtaaatccaatctgtcatgcacctgcacacaactcttccttggcctcccattgcatttggaaagaaagctcaacctctcaccatgggcctcaggggcatgtgtgaccagtccctgtcttttatgcagcctcacgccctcacccgtcctctcacttagcagacgtggactttcctatgactctgtactcaattcatcaaagataaaatctagtcatgtgtgtatgcatgactcgttaccacttactttattttcttaaaaaattttgacttagaaactttttttaaaattattaaawttttttcaaagatggtgccttactctgtcaccgaggctggagtgcagtggcatgataatggctcactgcagccttgaactcccacctcatcctcctgagtagctgggactacaggtgcatgctacgaccaccagctaattttttaaatttttaatctttttgcagagatagggtctcactatgttgcccaggctggtctcaaacttctggcctcaagtgatcctcctgcttccacttcccaaagcactgggattacaggtgtgagacaccaagcccagctctgttacaactgactgtggtatcttgaacaagtcagtttcctcacctctaaaatgggtacaataatggcacgccctcacaaggttgttgcagcctgtgtccccta

SEQ ID NO: 943258 - DNA, 589 bp, Homo sapiens
tgtgcatagatgcagggcacaggggcagcctgcaggaggccatggcaacaatcaatccaggctggaggcgacgggggctgggaaagggagtagccatgagggcagagataagttgtcagattctggataggagtgggggccacagcattgatgtggggcgtgatgtagggggtgaggagaggggaggagtggaaggtgtcaccaaggcatttgtcctgagtgacaggaagatggggaaggctttgggaaaagcaggcatccaggggaaggggcaggagcttggttttgtacatgtgaagtctgaggtgcctatgagacttcctcatgcagaccctcactaggcaaccggaaattctagtctagaattcaagagagagatccaggctagagatgtaaacgttagagtaatcawcataaaatatcgcattcaaagctttgaggctgcctgagaccctgagggagcagggtagaaagagaagagtcggccttttgcaggatcaagcaggctgtagaaacgcctgggtgggtggtggcctggacaccaagggaagaaggtgttttggggcaggtgggagagggaaggaaccgt

SEQ ID NO: 943259 - DNA, 782 bp, Homo sapiens
ttgaagttctgaggatcacacggctgagatcacataaacaacacctttactactgattaactggagataatgtcttggaacaaggcctctttgtgactctgcagctcacaggcaaaatgactgtagaagcttttctagtctgactgggcccagtttatgaagtggtgatgttagtgcttatggcacagggttttgtgaagcctgggtgtagctttgctrtctccttcttctactgaacacacctgagagaccctcgctttattcgtctgatttcccttgtccccatcccactccctacagggcaaccaagtcatcctatcagttgaaatcattgtgctttttatttttttgcagaaaaatctggttttctcctgattctcctgcaaattagtggaagcctgtgtcacagattagactccattcaaagctgacttcaaggtgaagatcagcatgtcagggcttatttacatgaagggagctctcttgggatcaattttagagagaaggtaaaagccgggctgagacacagcctcaagagggacaattcccaccgacacggggagctgggatggtgttgagttgttctgaattaggctgaggggctgggcttttcacatgctgtcgggagtggaggctgccccaggaaggccatgaccttgggggccaggcagctctccacagcagggacatgggaggcacctgacggctgaggaccgtggggaatgcatcctctgtcctggaggggaaactgctgcccacccccagtgcccaccagagcctgt

SEQ ID NO: 943260 - DNA, 782 bp, Homo sapiens
ttgaagttctgaggatcacacggctgagatcacataaacaacacctttactactgattaactggagataatgtcttggaacaaggcctctttgtgactctgcagctcacaggcaaaatgactgtagaagcttttctagtctgactgggcccagtttatgaagtggtgatgttagtgcttatggcacagggttttgtgaagcctgggtgtagctttgctatctccttcttctactgaacacacctgagagaccctcgctttattcrtctgatttcccttgtccccatcccactccctacagggcaaccaagtcatcctatcagttgaaatcattgtgctttttatttttttgcagaaaaatctggttttctcctgattctcctgcaaattagtggaagcctgtgtcacagattagactccattcaaagctgacttcaaggtgaagatcagcatgtcagggcttatttacatgaagggagctctcttgggatcaattttagagagaaggtaaaagccgggctgagacacagcctcaagagggacaattcccaccgacacggggagctgggatggtgttgagttgttctgaattaggctgaggggctgggcttttcacatgctgtcgggagtggaggctgccccaggaaggccatgaccttgggggccaggcagctctccacagcagggacatgggaggcacctgacggctgaggaccgtggggaatgcatcctctgtcctggaggggaaactgctgcccacccccagtgcccaccagagcctgt

SEQ ID NO: 943261 - DNA, 575 bp, Homo sapiens
ctcttcctctccactccctaataattggcaactactcatttgtttcccatctccacaaatgcagcattttaagaatgctatataaatggattcagacaatagggaattctttgagactggcgtagttagcataattcctgtgacgtccgctcgagttgttatgtgtaccaatactttgctcctttttattgctgagtagtattttttgctgtgaatgcactgcagtttattcatccatggaaggacagttaggatgttttcagtatgggctcttgtgagtaaaacttctatgttcatataggcttcgtgtgaacatgcttccatttctctgggtcaactgccaagagtaagaagccgccatgctgttttcctgagtgkctgttccatgttaaattcccaccagcaatgtatgagtgacccagtttctccaccttctcaacagcatttggttttatgactattttttttacgttagccacagtgatatctcaccgtggttttattttgtgttttcctgctgctaatgttgttgaacatctttgcatgcattgatttatcatctgcataaccacttc

SEQ ID NO: 943262 - DNA, 717 bp, Homo sapiens
gatttctcgaagaacttaaaacagaattaccatttgactcagcaatcccattattgggtatatacccaaaatatacaaattgttgtaccataaagacacatgcacacatatgttcatcatgatactattcacaataacaaatacatggaatcaacctaaatgstcatcaacaatatactggatttttaaaatgtagtacatatatacaatgtaatactgtgcagccataaaaaagaatgagatcgtgtcctttgcagcaacgtggatggggctatacaggttattatcctaagaaaactaacacaggaacagaaaaccaaatacatcatgttcccacttataagtgggaggtaaactttgagtaaatgtggacacaaagaaggaaacaacagacactagggcttacttcagtgtggagggttagaggagggtgacaatcaaaaaactaccaatcaggtactatgcttattacctgagtgatgaaataatttgtacaccaaaccaccatgatacacattttacccatgtaagaaacctgcacatgcacccctgaacctaaaataaaagtttaaaaagtaaataaataaatattaaaatgttttcattgttcctatagtaaccaggaaagcttttaaaatactgatgcctgtattcaaaatgctgatgccacagattacgatttaattgagctttgattgggctggagcattaagatat

SEQ ID NO: 943263 - DNA, 671 bp, Homo sapiens
tgctctaattcaggaggcagtaatgtagcctgacctagcttccagttttgccctccttttgttgctataagtctggcctaggtccctatacatttttctttttttcctcttttttcctttcctccctattttttatcttcgtgggacatgatctcctaggaatgagcattcctcgtgacggaggacttgaacttctaggaataaaccatcccagcaacaacaaaccagcaggtgggaagaaaggaggaagcagcaacctgaggccaggaacccacattcctttttaaaatgcttttctccaaaagattttaaagaaaaaaaaggggggaaatgtgaaaggaaattaaattttgggacgccaaattcacttagccaaagggaagagtcaagctgggaactgggtcacgcaaacctgtctcscccttttggttcctaaataagatggctacaagatgaaaggctacacgcctcccccatattttgcccacaaggagattcctggtgagctgttgaaatttcaccatggtggccaggcgcggtggctcacgcctgtaatcccagcactttggaaggccgagttgggcggatcacttgaggtcaggagtttgagaccagcttggccaacatggggaaacaccgtctctattaaaaatacaaaaagtagctgggtg

SEQ ID NO: 943264 - DNA, 559 bp, Homo sapiens
ttgattgacatttgggttgtttgcatttttttactattatgagtaatgctgctatgaacattcatgtacaagcttttgtgtggacttaagttttcatgtggtaactgtttaacatttttaagtattgctaaattgttttccaaattggctacaccattttacattctcaccaggaatgtgtgagggtttcagtttttccacattcttgcccatgcttgttatttatgtacctcgtgaaccmcaaaaatctgagacaggtctcaattaatttagaaagtttatttttccaaggttgaggatgcatccatgacactgcctcaggaggtcctgatgatatgtgcccgaggtggtcggggcacagcttagttttatacattttagggaggcatgagacatcaatcaatatatgtaagaagaacattggttcagtctggaaaggcgggacaacttgaagcaaggacaggaagactcaaagcgggaagggggcttccaggtcacagatatgtgagagatgaacagttgcattcttgtgagtttctgatcagcctttccaaaggag

SEQ ID NO: 943265 - DNA, 554 bp, Homo sapiens
aatattgcagttgatgctaagcgaacaaatgcttctgactttgtcagattttagacaagggtggtcattatcaccacttctattcaacactgcagtgaaattctacccagggctcttaagacataaaatgcaataaatggcatacaggttggaaagaaagataaaacaagctctatttgaagatgacataatcttgtatattaaaaaatcctaagacatccactaaaagtttaccagaattaataaacaaatttggcaagtttccaggatgcaaggtcaatacgcaaaagccagttgtrtttctgtacactttcaatgaacaatccaaaaatgtaattttttaaaaagtcaatttatactagcattaaaatgaatgaaataattaggaataaatttaactgaagaattaaaacactcacactgtgaaactgcaaaataaagaagacctaaataagtgttaagttaccccattttgatggatcagaagacttcatattgttaggataacaatatctgccaaattgatgcacagctacaattcaatccctatcaaa

SEQ ID NO: 943266 - DNA, 671 bp, Homo sapiens
atccagctgatttacttgccaaaatcaacaagcaaatactaaaattcatatggaaattcaagctgaccaataacagtcaaaacaattttgaaaaagaagaacaaatttggaaaagaagaacaaatttggagggcacacagttcttggtcataaaacttagtataaaactgtgtaatcaagactgagataaagttatagggtaaatatatagaccaatggatggaaatgaaagtctctaaagaaatcctcacatttacagtcaattcatattgaacaatggtcacaaaacaattmgggggggaagaatggtgctgggatatcagaatattcataaacaaaagaatgaagttgggcaccttcctcacaccaaatgccactcacaaactttaactcaaaatgaacacagacttaaaatgtaagagcttaaattatacaaacttagaagaaaatatccgagtaaagatttgcaactttagttatgcaaagtccctttagatagggcagtgaagtactagtgacataagacaaaaaatagataaatttgcctttgtcacattaaaaagttctttgctcacaggataccatcaaaaaagtaaaaagacaacccacagaatgaatggtaataaatatttgaaaagtatatgtattataagggacttgtacttaggatg

SEQ ID NO: 943267 - DNA, 671 bp, Homo sapiens
atccagctgatttacttgccaaaatcaacaagcaaatactaaaattcatatggaaattcaagctgaccaataacagtcaaaacaattttgaaaaagaagaacaaatttggaaaagaagaacaaatttggagggcacacagttcttggtcataaaacttagtataaaactgtgtaatcaagactgagataaagttatagggtaaatatatagaccaatggatggaaatgaaagtctctaaagaaatcctcacatttacagtcaattcatattgaacaatggtcacaaaacaattagggggggaagaatggtgctgggatatcagaatattcataaacaaaagaatgaagttgggcaccttcctcacaccaaatgccactcacaaactttaactcaaaatgaacacagacttaaaatgtaagagcttaaattatacaaacttagaagaaaatatccgagtaaagatttgcractttagttatgcaaagtccctttagatagggcagtgaagtactagtgacataagacaaaaaatagataaatttgcctttgtcacattaaaaagttctttgctcacaggataccatcaaaaaagtaaaaagacaacccacagaatgaatggtaataaatatttgaaaagtatatgtattataagggacttgtacttaggatg

SEQ ID NO: 943268 - DNA, 632 bp, Homo sapiens
gtatttacccaatgcctgtacccccactgtatctaggaagtaactaacttgcttttgattttacaggcttataggcagaagggacttgccttgtctcagatgagactttggaccgtgttcttttgggttaatgctgaaatgagttaagactttccatgactgttgagaaggcatgattggttttgaaatttgaggacatgagatttgggaggtgccagaggcagaatgatgtggtttggttgtgtcctaacccaaatcccatcttgaattttaatccccatgtgtcattggagggacctggtaggaggtaattgaatcatgggagtagtttccccagtgctrttctcgtgatagtgagtgagttatcatgagatctgatggttttataagcatccagcatttcccctgcaggccctcattctctctcccaccaccctctgaagaggtgccttctgccttagttgtaagtttcttgaggcctccccagccatgctaaactgtgagtcaattaagcctctttcctttctaaattacccagtcacaagtatgtcttcatagcagcatgagaatggactaatacagagggattgatcacaaatatgtttgctgttcccctaaaatgatctgaggag

SEQ ID NO: 943269 - DNA, 715 bp, Homo sapiens
ggccataccctgcaaagccacaggagcagagctgcccaagaccataggaacactcctgttgcatcagcgtgacctggatgtgagacactgagtcaaaggagatcattttggaactttagtgtttaatggttgccctattggattttggacttgcatgaggcctgcagctcctttgttttggccagtatttcccawttggaacaggcatgtttacccaatgcctgcacccccattgtatctaggaagtaacctaacttgcttttggttttacaggctcataagtggaagggacttgccttgtctcagatgaaactttggacttggatttttgggttaatgctagaatgagttaagacattgttagactgtttggaaggcatgattgtgttttgaaatgtgaggacatgagatttgggaggggtcggggtggcatgatatggtttggctgtgtcctcacccaaaatgtcatcttgagttgtaagtcccataatccccacatgtcaagggtgggaccaggtggtggtaattggatcatgggaatggttccctacatgtttttttcatgatagtgagtctcaggacatctgaagtttttatgagtgtctggcatttcccctgcttgcactcccttcatcctgccacactgtgaagaaggttcctacttctttttttgccttccaccataattgtaagtttcccgaggcctcatcagcca

SEQ ID NO: 943270 - DNA, 715 bp, Homo sapiens
ggccataccctgcaaagccacaggagcagagctgcccaagaccataggaacactcctgttgcatcagcgtgacctggatgtgagacactgagtcaaaggagatcattttggaactttagtgtttaatggttgccctattggattttggacttgcatgaggcctgcagctcctttgttttggccagtatttcccatttggaacaggcatgtttacccaatgcctgcacccccattgtatctaggaagtaacctaacttgcttttggttttacaggctcataagtggaagggacttgccttgtctcagatgaaactttggacttggatttttgggttaatgctagaatgagttaagacattgttagactgtttggaaggcatgattgtgttttgaaatgtgaggacatgagatttgggaggggtyggggtggcatgatatggtttggctgtgtcctcacccaaaatgtcatcttgagttgtaagtcccataatccccacatgtcaagggtgggaccaggtggtggtaattggatcatgggaatggttccctacatgtttttttcatgatagtgagtctcaggacatctgaagtttttatgagtgtctggcatttcccctgcttgcactcccttcatcctgccacactgtgaagaaggttcctacttctttttttgccttccaccataattgtaagtttcccgaggcctcatcagcca

SEQ ID NO: 943271 - DNA, 716 bp, Homo sapiens
gtaattggatcatgggaatggttccctacatgtttttttcatgatagtgagtctcaggacatctgaagtttttatgagtgtctggcatttcccctgcttgcactcccttcatcctgccacactgtgaagaaggttcctacttctttttttgmcttccaccataattgtaagtttcccgaggcctcatcagccatgtgtaactgtgaatcaattaaaattctttcttttgtaaattactcagtcttgggtattccttcatagcagtgtgagaacagactaatataggcagcatacactgttctggtaccaaagtggtatcagagaaggccagctaaaatagtgtgtttaaataaggtccacagtacttaaaatatccagattttattcaaaaagtcattaatcataccagaaccaggaatatcttaagtgagaaagaaaacaaaatgaccgaggtgtgttgacaaaaagatactaattctgtaaaatatttgaagagatttattctgagccaaataggagtgaccatggcccgtgacacagacttaggaggtcctgagaacatatgcccaaggtggttggggtgcagcttggttttataaattttagggaggcttgagacatcaatcaaataaatttaagaaatacattggtttggtccagaaaggcaggacaagtcaaagagggggcttccagactgtaggtaaatttaaacattt

SEQ ID NO: 943272 - DNA, 716 bp, Homo sapiens
gtaattggatcatgggaatggttccctacatgtttttttcatgatagtgagtctcaggacatctgaagtttttatgagtgtctggcatttcccctgcttgcactcccttcatcctgccacactgtgaagaaggttcctacttctttttttgccttccaccataattgtaagtttcccgaggcctcatcagccatgtgtaactgtgaatcaattaaaattctttcttttgtaaattactcagtcttgggtattccttcatagcagtgtgagaacagactaatataggcagcatacactgttctggtaccaaagtggtatcagagaaggccagctaaaatagtgtgtttaaataaggtccacagtacttaaaatatccagattttattcaaaaagtcattaatcataccagaaccaggaatatcttaagtgagaaagaaaacaaaatgacmgaggtgtgttgacaaaaagatactaattctgtaaaatatttgaagagatttattctgagccaaataggagtgaccatggcccgtgacacagacttaggaggtcctgagaacatatgcccaaggtggttggggtgcagcttggttttataaattttagggaggcttgagacatcaatcaaataaatttaagaaatacattggtttggtccagaaaggcaggacaagtcaaagagggggcttccagactgtaggtaaatttaaacattt

SEQ ID NO: 943273 - DNA, 599 bp, Homo sapiens
tcaaactcttatgaaagctgagagtggtgatcatgtaccagctaagagaaagagcccctggctcagtctctttcaaaatggctgctgtttgaatcatgtcaaaaaccccaatgtcctgtcatagcccccataattccaatttggttttgaatgcaactatttttatctggcgacttgaacacagttgttgttccrccctgaagtgacataatgagttctttgagcaggtcaaacaagtaagcaagttttgcaacccattctgtgtcactgaaatgttctgccaattgtaactgtttttctaaaagaaatctctagagcacctctcaagactcaaaaactctgaccagtgatctacatttagaaaggcatctcactactatgtataagagaagatgtttgtgctctgtgtccatctcacagagctgtgcaaacagacatgagttaaggacatgtactttaatgtggttgacaactgaaaagcactgttaagttcaggtgaattgttttggctagccagcatttctctatggatgacacagtgcatagactcgcattcaaaagtgaccgctttgacctgagtattgaaatcagaaagctgt

SEQ ID NO: 943274 - DNA, 633 bp, Homo sapiens
aaaggtcttccaaagttagcttagtccaataatctgggaataattaagggaaaggcaagatggaggttaggctagcttagtttaccgttataattttctcatggatataacttttgcaaaggcagtttcaagattacccatgaatgagtagatatgggcaacacatacttcattattattattattattattattattatatattttttggagacagggtctcactctgttgcccaggctggagtgtagtagygtgaccatggctcacttcatccttgacctaccaggctcaagcaatcctccccagtcagcctccccaggagctgggactacaggcacatgccattacacccagctaaatatacatttaaaaaattttttttgttgggacagggtctcaccatcttgcccagactggtcttgaacccctgggctcaagcaatcctcctgccttggccttccgaagtgctgggattacagtcatgtaaccccactgtcagaggtgtgtggaccaaagcaactccatcttgaataggagctgggtaaaatgaggctgagacctactgggctgcattctcagacggttaaggcatcctaaatcacaggatgagatagggggtcagcataagatac

SEQ ID NO: 943275 - DNA, 633 bp, Homo sapiens
aaaggtcttccaaagttagcttagtccaataatctgggaataattaagggaaaggcaagatggaggttaggctagcttagtttaccgttataattttctcatggatataacttttgcaaaggcagtttcaagattacccatgaatgagtagatatgggcaacacatacttcattattattattattattattattattatatattttttggagacagggtctcactctgttgcccaggctggagtgtagtagtgtgaccatggctcacttcatccttgacctaccaggctcaagcaatcctccccagtcagcctccccaggagctgggactacaggcacatgccattacacccagctaaatatacatttaaaaaawtttttttgttgggacagggtctcaccatcttgcccagactggtcttgaacccctgggctcaagcaatcctcctgccttggccttccgaagtgctgggattacagtcatgtaaccccactgtcagaggtgtgtggaccaaagcaactccatcttgaataggagctgggtaaaatgaggctgagacctactgggctgcattctcagacggttaaggcatcctaaatcacaggatgagatagggggtcagcataagatac

SEQ ID NO: 943276 - DNA, 692 bp, Homo sapiens
ttattaaaaagctttagagcaggaaagaaagaaaagtacatttggaagagacccaagagggcaatgtgaaggtcaagtgcagtgttttttgtttttgtttttgtttttttgtttttttgagacggagtctcgctctgtcccccaggctggagtgcaatggtgcgatctcggttcactgcaagctccgcctcttgggttcacgccattctcctgcctcagcctcctgagtagctgggactataggcacctgcaaccacgcccggctaattttttgtatttttagtagagayggggtttcactgtgttagccaggatggtctcgatctcctaaccttgtgatccgcccgcctcggcctcccaaagtgctgggattacaggcgtgagccaccgtgcccagccaagtgcagtgtttaaccgtaatcctaggactttataggctgacccacttctggcgtcttgcacccctcccttctccatgattcatcccttagggtgggctgcctgcatgcacagtgcccttcttaagctttgggaggtgagcatgagcagtgtgtttaggaagttgtacgcatgcccatctgtggctttctttttcctgtggagtgcccccagaaggtcatactctgccattttgtctcctgatgtgtatgcccaggaagttgcccctctctggcatctgcatttaattaaca

SEQ ID NO: 943277 - DNA, 604 bp, Homo sapiens
acaactctctagctcccaagccatctgtgctggtgctggtggtggctggaatgggctgggtaggccagtccccagacctgcaggtggcatatgcaggtgggtggcagctctggtattaaaagctggttgggtgggtccaacctcaggcccctgggaagaatgcccatataacaatggtggtggactgagctgggcaatcccctagtcctcacgtggcatgtctgggcactggaggaggtgtggctcctggctggtaggacctgtccttaggccccctgtagtgcatgcaggcactggctgtggtaggaggggagggaagtgatcctcaagcccctggtggaatgcttggatggggtgatagtggtttcacttcagccctgctactggggaaggtggggttgttttcagtggaaacaactgtakgcatgtgggtagggagcttgttcttcactcatgcatcagccttggcagtggcagtctacagtggtggcagttagaggtgttgggatctgtcttcaagtcacatgaaaatgcatggtggctccactgctggggacaatgaggtcattgacagtggcttgcactttcgccctgacaggagaag

SEQ ID NO: 943278 - DNA, 546 bp, Homo sapiens
catggtggtacatacctataatcccagctacttgggtggctaaggcaggagaattgcttgaacctggaaggcagaggttgcagtgagctgagactgcaccactgcactccagcctgggtgacagactaagactctcaaaaaaaaagagaaagttttgaggaaatagcagcaaccttgcttttgaaaatttgaatacaacaatgtaattatctgataaggaactactgtgagaaaggaaaatgttttctttccattatagtagcacagtcttgctgcacacaattagtaccttaaacaaagagtgcaacttaatttataggagtcctttgtgtcttgactatgtggaagcccagagctagatgttttgctcagttttggcaactatccttaataasatttttttcagcagtactatattcacctgttcatcactggctctttttaaatttattatttatttctatttctatttgtttagagacagggtttcattctgtcacctgggctggagagcagtggtgcaatcatagctcactgcagcctcag

SEQ ID NO: 943279 - DNA, 532 bp, Homo sapiens
gtcatctatgacctcctcctgcagcatctaactctgtaggtgattgataaacataaatatctggtgaatggatgcaaaatagtgaaagtggttggctatgttaatagaattgaagaaggaaaatactaagaggtgcacatccagatgagagaatgtatgatttgacgacaaccaagaccagatagaagaaacaaattgaatatgtttgcatgtgtgtgtatgtgtgttggggggacttccttctgtgtagataaatctgaatatagaaagtttgttttaaggcctggtrtggtgacctgtaatcccagcactttggaaagccaaggagggcagattgcttgagcccaggtgtttgagaccagcctgggcaacatgttgaaactccgtctctacaaaataatacaaaaattagctgagtgtggtggcatgtggctgtagtcccagctactcgggaggctgaggtgggaggatcacttgagccgggagggagtggctgcagtgagccatgatcacgccactgcacttcagccta

SEQ ID NO: 943280 - DNA, 651 bp, Homo sapiens
cccctctggtgggggatgttgatgatgggggaggctgtgtgtgtgggtgaggaggggagtacgtgggaactgtctgtactttctgctcaattctgctgagaacctaaaactgctctacaaaataaatgtattaattttttaaaaaaaggattctcgtgatcaaaaaatgtttagaagccccagcattctgggtcaagtctagactcctccgtgtrcagggctgtgatgattaggctctgtgcccacactgccccacacctagtgggacagactgtgccccggccccactggttgtcttgttgtcgcattcgtccttgcattgtgcctccatcgctccctttccttcagggctctgcctggtggaatccacaagttcctaggctcagctcacatgcctggtccaccgtagaagattccttggtgcattctgttctgggcgctactttgcccccaaagccctttcatcagcatgctttagagcagcatcttttggcagacacaactgtgcttagattctattcttgttctttatccatgatttatgtttctttctctccagctagattgtccttttatttaaagggtgagggcctggaatggggtggggtccatggatgagaaggtctgtgtgacataggaccacgcaagaat

SEQ ID NO: 943281 - DNA, 754 bp, Homo sapiens; identical to SEQ ID NO: 942933

SEQ ID NO: 943282 - DNA, 555 bp, Homo sapiens
tccaatcaattttgttcccttgctggcgaggaatatgatcctttggaggagaagagacattctgattttggaatcttcaggctttttgcgctggtttctccccatctttatggatttatctacctttggtctttgatgttggtgaccttcagatggggtctttgagtggatgtgctattcctttctgtttgttagttttccttctaacagtctggcccctctgctgcaggtctgctgtagttttctggaggtccgctccagaccttgtttgcctgggtatcaccagcggagacagcagaccagcaaagattgctgcctgttccttcctctggaagcttcataccagaggggcaaccacgagatgccgctcagagctstcctgtatgaggtgtctgtcggcccctactgggaggtgtctcctagtcaggatacacgggggtcagggacccacttgaggaggcactctgtcccttatcagagcttcaacactgtgctggtagatctgctgttctcttcagagctgccaggtagggacatttaagtctgctgaagctg

SEQ ID NO: 943283 - DNA, 558 bp, Homo sapiens
catgacacgaccaaattcacatataacggtattaactttgaatgtagatgggctaaatgctccaattaaaagacacagactggcaaattggataaagactcaagacccatcagtgtgctgtattcaggaaacccatctcacatgcagagacacacatagactcaaaataaagggatggaggaagatctaccaagcaaatggaaaacagaaaaaggaaggggttgcaattctagtttctgataaaacagactttaaaccaacaaagatcaaaraagacaaagaaggccattacttaatggtaaagggatcaattcaacaagaagagctaactatcctaaatatatatgcacccaatacaggagcgcccagattcataaagcaagtccttagtgatctacaaagagacttagactcccacacaataataatgggagactttaacaccccactgtcaacattagacagatcaaagagacagaaagttaacaaggatacccaggaatttaactcagctccactccaagcggacctaatagacatctacagaactctccaccc

SEQ ID NO: 943284 - DNA, 558 bp, Homo sapiens
catgacacgaccaaattcacatataacggtattaactttgaatgtagatgggctaaatgctccaattaaaagacacagactggcaaattggataaagactcaagacccatcagtgtgctgtattcaggaaacccatctcacatgcagagacacacatagactcaaaataaagggatggaggaagatctaccaagcaaatggaaaacagaaaaaggaaggggttgcaattctagtttctgataaaacagactttaaaccaacaaagatcaaagaagamaaagaaggccattacttaatggtaaagggatcaattcaacaagaagagctaactatcctaaatatatatgcacccaatacaggagcgcccagattcataaagcaagtccttagtgatctacaaagagacttagactcccacacaataataatgggagactttaacaccccactgtcaacattagacagatcaaagagacagaaagttaacaaggatacccaggaatttaactcagctccactccaagcggacctaatagacatctacagaactctccaccc

SEQ ID NO: 943285 - DNA, 492 bp, Homo sapiens
ccagcaatatacctttactgtcctacctcaggggtatgccaactctctggctttgtgtcataatctcattcagagagacgttgatcactttttgcttccacaagatatcacattggtccattacattgatgacattatgctgactggatccagtgagcaagaagtagcaaacacactagacttattggtgagatatttgcgtgccacaggatgggaaataaatccgactaaaattcagggatcttcyacctcagtaaaatttctagcggttcagtggtgtggggcctgtcaatatattccttctaaggtgaaggataagttgctgcctttggcccctcctacagccaagaagaagccacagtgcgtagtgggcctatgtggattttggaggcaacacattcctcatttgggtgtgttactcaggcccatttgtcaagtgacccgaaaggctgccagttttaagtagggtccagaacaggagaaggctctgca

SEQ ID NO: 943286 - DNA, 492 bp, Homo sapiens
ccagcaatatacctttactgtcctacctcaggggtatgccaactctctggctttgtgtcataatctcattcagagagacgttgatcactttttgcttccacaagatatcacattggtccattacattgatgacattatgctgactggatccagtgagcaagaagtagcaaacacactagacttattggtgagatatttgcgtgccacaggatgggaaataaatccgactaaaattcagggatcttctacctcagtaaaatttctagcggttcagtggtgtgrggcctgtcaatatattccttctaaggtgaaggataagttgctgcctttggcccctcctacagccaagaagaagccacagtgcgtagtgggcctatgtggattttggaggcaacacattcctcatttgggtgtgttactcaggcccatttgtcaagtgacccgaaaggctgccagttttaagtagggtccagaacaggagaaggctctgca

SEQ ID NO: 943287 - DNA, 590 bp, Homo sapiens
cttgaagtcaggtagtataattcctgtaattttttttttttttttgagactgactctcgctttgttgcccaagctggaatgcgatggcaccatctcagctcactgcaacctctgcctgccaggttcaagtgattctcctgcctcagcctaccaattagctgggattacaggtgcctgccactacgcccagctaatttttgtagttttagtagagctgaggtttcaccatgttggccaggctggtctcaaactcccgacctcaagtgatacaaccatttcagcctcccaaagttctgggattacaggtgtgagccaccactcctggccaattactgtaattttcttcttgagattatttgagttactctaggccctttgcatttcattttagaatcagctcatcaattttttttwaaaaaaagctttctagttggattaccttgaatatgacaacttaactatattgagtcttccaatctatgtatatagtaggtatgtatctacatctacccatatacatgggtagatataagtatatagatatgtgtattaatatatgtatctatgtgtagatgtatatatatatgtgt

SEQ ID NO: 943288 - DNA, 511 bp, Homo sapiens
aatcttaaaactctaaaataatctcctttgactccatgtctcacatccaggtcacgctgatgcaagaggtgggttcccatggtcttgggcagctctacccctgtggctttgcagagtataacccccctcctggctgctttcatgggctggcgctgagtgtctgttggtttyccaggtgcacagtgcaagctgtagatggatctaccattctggggtctggaggttggtggccatcttctcacagctccactaggtggtgccccagtagggactctgtaccggggctctgaccccacatttcccttctgcactgccctagcagaggttctccatgagagccccaccccagcaacaaacttttacctggacatccaggcatttccatacatcctctgaaatctaggcagaggttcccaaatcccaattcttgacttctgtgcacctgcaggctcaacaccatgtggaagctgccaagcttgggcttgcaccctctgacgccatggcccaagct

SEQ ID NO: 943289 - DNA, 764 bp, Homo sapiens
accacagtgtggttccaacacaattctgtggaggggttctgggattccagactaagtgaatatccatggaatgatgaaaattaaaatttacttgattatggaagtctctgattcattccagccaatgtattagatgagccactgagaatcacctcaaagcaattgctctcacggccctcgccagggcagtggggcagcaggaggacaggtggctaggccagcagctctagctcttcacctctgcggcctccttctcagtcttctcctccatcttctcttctttctccaaggtcgctacaatcttggccacctggctggtggaggcatgaacatctttgtccaccaactcaatcacattgatgaggtcattgatgttgaccttgccattcttgtcttcatccagtgctgaggccaggctggtgagcttgctttctggaatgtgcctgacttgcttcatggtgctgatgagctcagtgacactgatgatgttctcccctacgggcgcgccctaggccaggcccagcttgcaggccctggtccatctccaggtgtgagatcaagmcctcgatctgcccgatcatctgctgcaccctctgtcagtctcttggtggctttagatgctttcacatatttttcttcacctaccagtctttgagagttccttcttgatctcttgcatgttctcgctgtagtcctgcacgtcctccttcagcagctccagctcctccttctctttggtgagcgacttctgctccttcagctta

SEQ ID NO: 943290 - DNA, 629 bp, Homo sapiens
aagatacccaaaaatgagggaaccactttggaaatgggtaacaggtagaggttggaacagtttggagggctcagaagataggaagatatggaagtttgaaacttcctagagacttgttgaatggctttaaccaaaatgctgatagtgatataaacaatgaagtccaggctgaagtggtctcaaatggagatggggaactggttgggaactgaagtaaaggtcattcttgctatgtaaagaaactggcggcattttgccccgtcccagagatctgtggaactttgaacttgagagagatgatatagggtatctggcagaagaaatttctaagtggcaaagtgttccagaggaaacagatcataaaaatttggaaaatttgcagcctgatgctgcaatagaaaagaactattttctgggaagaaattcaagsctgctgcagaaattcgcataagtaacgaggagctgaatgttaatcaccaagacaatggggaaatgtctccatggcatgtcagagaccttcacagcagcccctgccatcaaaggcctggatgcctaggagggaaaaatggttttgtgggccaagcccagggcctccctgccctgtgcagccttgggacatagtgccctgt

SEQ ID NO: 943291 - DNA, 718 bp, Homo sapiens
tcagaatggacgttcgctataaacaggcttgcttaccctctattgcatgcaaagcagaggttcctgtgtttataatattgaatgcacacgttaatgatgggcgaagagagacacacgcagactgaccttcacacttgacatccactgagagggaaaaacagggaaggcaaattatggcaggggagggtctgctggccaaaaatactcagctctgtttsagaaatgttgagtttgattcttggaagttgtccatatatctggatctcaggaaagaacatagctagaaatatagattttggtagtggtgagcatacgaaagataattttagtcactgaatttaacttttagtaagtggatttccttggcttttcttctttctggctaaactgtttaccatttgttacctgcttataccagaggaaaagggaattgatttttcactttttaatgtcggtggtaaaggtgtagaggaatacttctggttttcatctatcttaatttttcccctttgtactacgacattttccaggaattggagtgcttttcatatttctaatgtgaaattaatagttatatatatatatttacttttgtatgaaaaatatatacttttctgaatattgaagaagtagcacagttctactcaatggttaaatttattaaaactagaagttttaaaacacagtatatctctagtcaaaaatgtactcaggagag

SEQ ID NO: 943292 - DNA, 436 bp, Homo sapiens
attagccgggtgtggtggcaaatgcctgtaatcctagctacttggaaggctgaagcaggagtatcacttgaacctgggaggcagagtttgcagtgagcggagatcgcaccactgcactccagcctgagcgaccgagtgaaactctgtwtcaaaaaaaaaaagaaagaaattccaaaaccgttttcaaagtggttgttttatatttccaccaatgatatatgagagcgtttgttaatctttatcctcaccgacatttagtattatcatagtggctaaaatgtgaaatcaagtgaaattgtatcttgtgattttaacttgtattttccctgttattaatgatgttgaccatcgttttatataattattggccacttatacgtcttgttttgtgaatagcctgttcaaggtttttgcttatatttaactggtgtgttta

SEQ ID NO: 943293 - DNA, 766 bp, Homo sapiens
cccacaggcttcatttgctagcctaatttttcaaaatagaaataagttaattgcttctaatcagtaggtagccatgagacacatagcaatttttcgttaatatctctaaatttttcccaaatgatgaaattcctcttaaaagtaaaaacattgctgccagtccacacatagggcatgcgtgggaaggaaagaaggagactgagaaatgttggaaggtctgttctgtaacagcttttataccgcaagatgtcatttgcatagtcttcgaaaacacttattggatgatagaattaataatatactttcaaagatcttattttaaaaaatttttaattgtttttctctggctcctcatttgctcagagctgctggggagcttcccccgactccttgaaacaaaccttaatggcttggttagcaaagtgtcattcaaacctgagcgtaaaacctgccggttgggattattgacattcgtgaacaaatgcaaatgttataaatttcttaaccttcataaagatttactatgatgtgaccttggacctggccatagatctcatgagaacagtatggggaagtagtactcatgctgtkatattaggaagataacttgtgaacacagactgaagccaacatctgggaggcctgggttattgttttatttttgttttggctttattgttttaagacagctaagttgtatagagtagtgattggaccaaaatattaaaaatataaaaatagtcgagcccactggaggccatgagaa

SEQ ID NO: 943294 - DNA, 640 bp, Homo sapiens
tgtggatggcaggataatggtggccggaggcagacaagctcctgggaagaaaggggagggtccctggtgaaactccaccttcagcttacagagggcttaaggcctggggcccaggctgtcagttccacagaccggagtgagaacttacggtgcttttccagggctcacccgtgactgcccatgcaccaatcagcacacactttcctctgaagcccataaaaacccccggactcagccagacttgggcagaagacaggaygacctgcttatggagaatagctgcccactgtgggtctctctgagctgttctgtcactcaatgaagcacctcttcacattgctcaccttccacttgtccacgcacctcattcttcctggacatgggagaagaactcaggacctgctgaatggcaggtctgaaagagctgtaacacaaacagggctgaaacacacccattgtttgccacattgcaggcaatgaggagaggaggagagaaggagagaagagctgcagcccttcaaggagcccagacctaggagctccctgagccagggcagtgatgccccctttggggccctgcggttcctggtgtttccaagcttctgggcactaccgtattccctggtttcagccatggaag

SEQ ID NO: 943295 - DNA, 530 bp, Homo sapiens
caaatgcccatcaatgacagactagataaagaaaatgtggagctctcaggctccgcctaatttattggtttataagctctttgttcctaaggcagatgagagcaggaggaagggatgaggaaaaggattaatcagtgaaagagaactcatgagtcattcaataagatgtagagcagtagcggtttctgggaatttctttgagcaaaggcatgtgtctaaactacgtaagatctttaacttatagggactgaaatgggygggagcgggtttcaggaggagccaagacgtttgattatactcccctgcttcaagggactgttatctccctgagcaacctgtggaataccgctgagctgttatgctctcggggcataaagacatgaaggcataaggagacttttctcctcagaggctgcccatggctacgcatgggtgtctcacacaggggagaccaactcaactggcaccccagaaactctctttcccacaagaagtacatggtatacttgcatagccaaagaaattaaaat

SEQ ID NO: 943296 - DNA, 579 bp, Homo sapiens
aatattaggaaacttcattttggagatgtcagaagattcttgatcatccctaacaattcttttttttttttttttttttttggaaacgggtttttgctatgtcacccagactggaatgcagtggtgggatctcggctcactacaacctctgcgtcccgggttcaagcaattctcctgcctcagcctcccgagtagctgggattacaggcrcccgccaccatgccaggctaatttttgtatttttagtagagacagggtttcaccatgttggccaggctggtctcgatctcctgacctcgtgatctgcctgtcttggcctcccaaagtgctgagattacaggcgtgagccacaacgcttggccaatcatccctaacaattttacaagatttgaatcgtatcctaacaaatcagcaaccactaaacagataagctctctgttatcaacaccttgaattcagttagacagtctgggcttcccctttctaaactgtagcttagatcttctgggaaaccagctcaacacaagttgtatttttaaccatctgatatatgtagtacacaggctttttcatctcctt

SEQ ID NO: 943297 - DNA, 579 bp, Homo sapiens
aatattaggaaacttcattttggagatgtcagaagattcttgatcatccctaacaattcttttttttttttttttttttttggaaacgggtttttgctatgtcacccagactggaatgcagtggtgggatctcggctcactacaacctctgcgtcccgggttcaagcaattctcctgcctcagcctcccgagtagctgggattacaggcamccgccaccatgccaggctaatttttgtatttttagtagagacagggtttcaccatgttggccaggctggtctcgatctcctgacctcgtgatctgcctgtcttggcctcccaaagtgctgagattacaggcgtgagccacaacgcttggccaatcatccctaacaattttacaagatttgaatcgtatcctaacaaatcagcaaccactaaacagataagctctctgttatcaacaccttgaattcagttagacagtctgggcttcccctttctaaactgtagcttagatcttctgggaaaccagctcaacacaagttgtatttttaaccatctgatatatgtagtacacaggctttttcatctcctt

SEQ ID NO: 943298 - DNA, 579 bp, Homo sapiens
aatattaggaaacttcattttggagatgtcagaagattcttgatcatccctaacaattcttttttttttttttttttttttggaaacgggtttttgctatgtcacccagactggaatgcagtggtgggatctcggctcactacaacctctgcgtcccgggttcaagcaattctcctgcctcagcctcccgagtagctgggattacaggcacccgccaccatgccaggctaatttttgtatttttagtagagayagggtttcaccatgttggccaggctggtctcgatctcctgacctcgtgatctgcctgtcttggcctcccaaagtgctgagattacaggcgtgagccacaacgcttggccaatcatccctaacaattttacaagatttgaatcgtatcctaacaaatcagcaaccactaaacagataagctctctgttatcaacaccttgaattcagttagacagtctgggcttcccctttctaaactgtagcttagatcttctgggaaaccagctcaacacaagttgtatttttaaccatctgatatatgtagtacacaggctttttcatctcctt

SEQ ID NO: 943299 - DNA, 552 bp, Homo sapiens
atgaggaggattggggagaagaggaagaagaaaaagaagaggaagaagaagaggacagaggaggaggatggaggaaggggagaagaagaaggaggaggagaagaagaagaagaagaggaagagggaggaggaggaagaggaggagaagaggaacaagaagaagaggaggtaggaggaagagaaggaagtagaagaagggggaggaggaggaagaggaggagaaggggaagaagaagaagaagaggaggaggaggaagagaaggaagaaggaaggggagaaggaggaggagaaaatattattcaattgagtagtataattcaattcaattcaagcaattrgccaaaaattccactgaaatattgactgaattcaatttatccacattcaaagtatccttttataagccatttgattgctgccatgttacaagtcttcacagagctttaaggtatttcatgcatttattattctcaacagagaattttgaactaaaactcaccacattctatttacatatgcaaggaaaatatttaaaaatccaagcaaagttg

SEQ ID NO: 943300 - DNA, 711 bp, Homo sapiens
caccacgcacagctaatttttgtatttttagtagagtcggggtttcaccatgttggccaggctggttttgaattcctgacctcaagcaatccacctgccttggcctcccaaagtactgggattacaggtgtgagccaccacaccaggtcaagattaaatattttaaaatatacagttcagtggtatttagtacatccacagtgttctgtgatgaccgcttttatcagattccaaaacattttcatcattttaaagaaaaccccataccttaaacagtcactccctattccctccttccaacagtcaatcaattggcaaatcaccaatctgctttccatctccatggatttaactatctggatatttcatataaatggattcttacaaaatgtggccttttgtttctgcaytctttgacttagcataatgttatcaaggcttattcatgttgtagcatgcattagcccttcattcctttttatggctgagtaatattccattgtatggatttgatcacaatttgttcattcattcattcacctgttggcagacgcttggatcgttaccaccttctggcttttgtgaataatgctgctgtaaacattggtctacaaatattggtttgagtatattcttttgagtatatacctaggaataaaacttctgggtcatacagtaatcctgttgaacgttttgaagaatctctaaact

SEQ ID NO: 943301 - DNA, 492 bp, Homo sapiens; identical to SEQ ID NO: 943285

SEQ ID NO: 943302 - DNA, 492 bp, Homo sapiens; identical to SEQ ID NO: 943286

SEQ ID NO: 943303 - DNA, 616 bp, Homo sapiens
ttctgtatccccaggttcttgccttagtgtactggaaaaatcggatcactcatgggcttggagggtgggtgcaagatgttttattgagaggtggtagctctcagtgaggtggatggggaggccaggaggggaatggagtgggaaggtggtggtggtttttctccgtgtggttccctccgttgatggcctgcctcgtctgctggagcctgtcagtgtgctcttccgccggtgtgttcctctggacatccagccacttatgtctctgcctgctagggtctcgtggttttgataagcacaggataggggtgtggtgggccagggtggtcatagaaaatacaacatttaggcgcaaaaacagaaatgcttgtcctcatctaggtccgtgggcacaagcccaggggtgaagccctagctagggaccctcccttctctacccagcacgtccttgccctgcttccktatcatttgtttgagttccctaaaagtaaagcctatgttgaaggttcaggaacccgtgactagcctcagttgatccctgcagaactctggaacatgaattgctccagaattggtctcattctctggcaagttgctggtcttttcttgtcccaggtca

SEQ ID NO: 943304 - DNA, 580 bp, Homo sapiens
aaaagcttatccaccatgatcaagtgggcttcgtccctgggatgcaagcctggttcaacatatgcaaatcaataaatgtaattcatcacattaacagaaccagtgaggaaaaccacatgattatctcaatagatgcagaaaagggcttcgataaaattcaacaccccttcatgctaaaaactytcaataaattgggtagtgatggaacacatctcaagataataagagccatttatgacaaacccatagccaatatcatactgaatgggcaaaagctggaatcattccctttgaaaactggcacaagacaaagatgccctctctcaacactcctattcaacattcaattgcttaccagagcaatcaggcaagagaaagaaataaaggatattcaaataggaagcgaggaagtcaaattgtctctttttgcagacgacatgattgtatattcagaaaaccccatcatctcagccccaaaactccttaagctgataagcaacttcagcaaagtctcaggatacaaaatcaatgtgcagaaatcacaagcattcctatacaccaataacagacaaacagagag

SEQ ID NO: 943305 - DNA, 565 bp, Homo sapiens
agcatcactaaaaggaaagtaaatagcaataaatgcctacattgaaaaagaagatatatctcaaataaacaacctaactttatgcttcaaggaactagaaaagtaaacgaagtaagcttaatgttaggagaagaaaataaagattagagcagaaataaataaaataggaaaagaaataacaaatgtgaattgctttttgtaaatgacaaatagaaatagcaaattattgggtaaactataagaaaagacagagaagacaaataaaattagaaattaatgaggaaacattacaaatgtcatcacataaattaaaagrattgtaaaagattactataaaaattacatgccaacaagttggataacacagaataagtgaataaatttcattatgtatgtttctcttatatttacaaaaactgaatccagaagaaatagaaaatctgaacaaacctacaactagtaaggagatggaatcagtaatcaaatatcaaattcctcctaacaaataaaaaagtcaatgactggatgaattcacttgttaattctagcaagcatttatagaatt

SEQ ID NO: 943306 - DNA, 608 bp, Homo sapiens
tcagttctgcaggtgcctctccccatatcacattaagactcctttttatatatagtttgaagtttaaggatccataaggatgaattggaatcttcttcttaagaggtatgggcttaagaaagttgaactgtaaaaggatcagtttcattctattcagcccagcgtgtaagcctagtgactgtgtgttcattcacattttcatcaggcagctctggccagaggccctgaaagggttgagtatggtggaagattccatcgttttcaatgacagtactgctcataagttctagtggttctgaaaagaataggtttaaaagtgaggtataagattatgtatgatgttgatgttatgtgtgaggttgatgtttacctttyttggttgacaaatctggtattggtcctctgacaagaatggaaactgtatgtttggacaaaaatactgaagatacagatactgaagttcacaagtatcatgatgtgagaggatagatcattttcatttcaaggacttggttcatggaaaaaccttttttttttttattcctttgagacagttttcctcttgtcacccaggctggagtgcaatgtcatgatctcagctcactgca

SEQ ID NO: 943307 - DNA, 608 bp, Homo sapiens
tcagttctgcaggtgcctctccccatatcacattaagactcctttttatatatagtttgaagtttaaggatccataaggatgaattggaatcttcttcttaagaggtatgggcttaagaaagttgaactgtaaaaggatcagtttcattctattcagcccagcgtgtaagcctagtgactgtgtgttcattcacattttcatcaggcagctctggccagaggccctgaaagggttgagtatggtggaagattccatcgttttcaatgacagtactgctcataagttctagtggttctgaaaagaataggtttaaaagtgaggtataagattatgtatgatgttgatgttatgtgtgaggttgatgtttacctttcttggttgacaaatctggtattggtcctctgacaagaatggaaactgtatgtttggacaaaaawactgaagatacagatactgaagttcacaagtatcatgatgtgagaggatagatcattttcatttcaaggacttggttcatggaaaaaccttttttttttttattcctttgagacagttttcctcttgtcacccaggctggagtgcaatgtcatgatctcagctcactgca

SEQ ID NO: 943308 - DNA, 724 bp, Homo sapiens
aaaaactacacacctcactcactattcccaagtgtgctttttctcttcaaaatgtgtttacccttatgtacatgagtgtgtgcgtgtgtgtctgtgtgtggacatatgtgtgtgtggacacgtgtgaatgtgtgttcggaaatgggtgggatgatgtcacatggtcttgggaaggagacttacatttccaatgttcagggtctcgagggtgaactcatccacccggccacgttcaaagtagtctttgaggttrttgtcagagacaagaagaacttgcttgatggtgtcagatttatccccatagagcttgatgtagactctagaatccgtgctggccccagagacatccccagtcttcaagctgatgtgatagcgaaagtctgaacagcccaaggcagagggaggaagggaaggggttagtgcagggggtgacaggaagcagggtgcgtgtataggagggcagcctggagctggaggtttgtggggaacacacgctgggaattgaaaatccaggctcctgttctaaccagccctgcaacttggggcaggggttccttccatctctgtgaggtctcctcaactgtaatggcagaattctagtaggttctctgtctgctccagaaggtgtgaatgggcttagagcaggaaagcgtgtaaatcacaagcaagaacatcaaaacataagagcctgaaaggatttcccacaatcatctggtctagcttc

SEQ ID NO: 943309 - DNA, 737 bp, Homo sapiens
tgattcatgtgccatacaatttacccatttaaagtgtacaagtcaatggcttttagtatattaataaaatcgtgcatccatcaccactatcaaattccagaacactttcatctcccccaaaaagaaaacccatacccgttagcagtcattcccatttccccactttacccctctgccttctgacaaccactaatctactttttgtctccacagattggcctaatctggatatttcatatatagagtcatacaatatgtgacctttttaaatttagtttatttcaattaacataatgttttcaagattcatccatattgtagcattatcagtactccgttctttttattgctgaataatatagtccattgtatcgatgtaccaaattcaactgttaaagagcatttatgtwgtttctactttttggttatgtaaataatgctgccataaacatccatgtacaagtttttatgcagacatattttcagttctcttgagcatatacctaagagtgaatttgctgggtcatttggtagctctttggttcactttttgagaaactgccaaactatcaaaatagctgtaccattttaaattcttattagtaatgtgtgagagttccaatttttctacatccttgtcaacacttgttcttctccttgattattcattctcagggttgttttggctattctgggtcccttgcagttctatatgaattttagaatcagcttgtcaa

SEQ ID NO: 943310 - DNA, 594 bp, Homo sapiens
ttaaaaccttctcatcacctaaaaagaaacacaacctgaatcccctagcccttccatccctaaataatcattacaatcatgaatttgctttatgtctctgtgtgttttcccattcttgacagttcaaataaatggaatcatatactatatggcttttgtgaccagcttctttcacttatcatgttttcaagcttcctctatattttagcatgtatcagtacttcctttttatggctgaataatatcacatcatacgaatataccacatttcgtyatttattcgtcagttgatgaacacttgggtgtcaccttttggcaattatgaataatgctgagtattagtcagggttcttcagagaaacagaaccaatgggaggttatctatccatcaagatttcttttttttttttttttgagatggagtctcgctctgtcacctctgctggagtgcagtggcgccatcttggctcacttcaagccccgcctcccgggttcatgcagttctcctgcctcagcttccggagtaggtgggactacaggtgcccaccacaacgcccagctaattgtttttttttgtattttttagtagagacg

SEQ ID NO: 943311 - DNA, 571 bp, Homo sapiens
acatcatacgaatataccacatttcgtcatttattcgtcagttgatgaacacttgggtgtcaccttttggcaattatgaataatgctgagtattagtcagggttcttcagagaaacagaaccaatgggaggttatctatccatcaagatttcttttttttttttttttgagatggagtctcgctctgtcacctctgctggagtgcagtggcgccatcttggctcacttcaagccccgcctcccgggttcatgcagttctcctgcctcagcttccggagtaggtgggactacaggtgcccaccacmacgcccagctaattgtttttttttgtattttttagtagagacggggtttcaccgagttagccaggatggtctcaatctcctgacctcgtgatccgcccgcctcggcctcccaaagtgctgggattacaggcgtgagccaccatgcccggccccatcaagatttcttacaaaaaattagctgctgcagcaatcacagaggctgagaagtcccaccatctgctgtttgcaggctagagaccctggagactcaggaaaggcagtggtat

SEQ ID NO: 943312 - DNA, 564 bp, Homo sapiens
taattttttttttttttttgagactgactctcgctttgttgcccaagctggaatgcgatggcaccatctcagctcactgcaacctctgcctgccaggttcaagtgattctcctgcctcagcctaccaattagctgggattacaggtgcctgccactacgcccagctaatttttgtagttttagtagagctgaggtttcaccatgttggccaggctggtctcaaactcccgacctcaagtgatacaaccatttcagcctcccaaagttctgggattacaggtgtgagccaccactcctggccaattactgtaattttcttcttgagattatttgagttactctaggccctttgcatttcattttagaatcagctcatcaattttttttwaaaaaaagctttctagttggattaccttgaatatgacaacttaactatattgagtcttccaatctatgtatatagtaggtatgtatctacatctacccatatacatgggtagatataagtatatagatatgtgtattaatatatgtatctatgtgtagatgtatatatatatgtgt

SEQ ID NO: 943313 - DNA, 569 bp, Homo sapiens
aagaatggaatgaagtcaacacaataaaacactctttcaaaaaagttttctacaaagataaatacaggtatgagatgatatctgaaaggaatatactgccagcatatatttttaatggaaactattacaatgtttttaggctgttgagaacaatctaatatatagtgaagcaaatgatgaaggaggggaagagaggaatacacctcrgttggaaagaggggagggcatgtggaatgtatgttgagaggttgtttagatagaagtaacgtggtgccactcaggtaacaagggggaagtggagccattggcatagatgcagataggatagtaggtttgatgttgaaagaatgacagcattcttttttctgatttcttcactttctttggtaactagaaaatgaatgtagtagataaggaagaggaaagaagaaagagtattagagtttagagaagagaagagaaactatgaaataacgtcataaaatgagagaacaaattcagcacgaaaacagagtaaacccacttcttagggttgccttgagataagggtcccagatgttgcaattttt

SEQ ID NO: 943314 - DNA, 626 bp, Homo sapiens
aagcctcattgaagggggctaaagccggaatgaatgatgaagggagacaagaatggaatgaagtcaacacaataaaacactctttcaaaaaagttttctacaaagataaatacaggtatgagatgatatctgaaaggaatatactgccagcatatatttttaatggaaactattacaatgtttttaggctgttgagaacaatctaatatatagtgaagcaaatgatgaaggaggggaagagaggaatacacctcggttggaaagaggggagggcatgtggaatgtatgttgagaggttgtttagatagaagtaacgtggtgccactcaggtaacaagggggaagtggagccattggcatagatgcagataggatagtaggtttgatgttgaaagaatgacagcattcttttttctgatttcttcactttctttggtaactagaaaatkaatgtagtagataaggaagaggaaagaagaaagagtattagagtttagagaagagaagagaaactatgaaataacgtcataaaatgagagaacaaattcagcacgaaaacagagtaaacccacttcttagggttgccttgagataagggtcccagatgttgcaattttttttctccag

SEQ ID NO: 943315 - DNA, 447 bp, Homo sapiens
actggttgaattcatattgtttagacaaaatgtgattgcattagtgattagttattgattaatcatcttataaagattaaattatttgatttctttaattagttgattttttaaaaattggcagtgaaatccttgaaaaacattagacctatgtaaatagagcctgagtamatactcacataatatttaaccaatatttggacacactaccaaggcatcttgttaaggtattgaaataatgactgaattctccaaccactgaaaaaaatgagtgatggactaattatgtaaaaatgtcttttatcctgcatgtgattaaattggtctgttatttgaatgaaggaacaaacctttctggtcgtactatccaaatcattatcatgcaggcaccatttctgttatttaaatgtaattttgtcaactgtagacatcattgttgcttctcca

SEQ ID NO: 943316 - DNA, 598 bp, Homo sapiens
tatgggaaaatacacaatcacttttaaaagttatcaaacaaaaattaagttgaaaaaagggttaaccagtttccaacttccgtatatagctagccagttatcccaacatcatttattaaatagggagtccttttcccattgattgtttttgtcaattttgttgaagatcagatgattgtaggtgtatagcattatttctgaattctctattctgttctgttggtctatgtgtctgtctgtttttgtatcagtatcatactattttggttactgtattcctgtgatacagtttgaaggtgggtaatgtgatgcctccagctttgttccttttgcttaggattcaattggctattcaggctccctttgggtttcatatgaattctaaaatactttttttctagctctgtgaataawgtcattggtagtctgatagagcaaattcctgaatctgtaaattgctttgggcagtatagtcagtttaatgacattgagtctttctattcatgagcatggagtgtttttccatttgtttgtgtcattttttgagccatgttttgtagttctccatgtagacatctttcacctccttgattagctg

SEQ ID NO: 943317 - DNA, 482 bp, Homo sapiens
agaggtgaatatcaaagacatttttaatatcaataatgaggctctagttcattcactgatgatgaaatagctgaaatggttctgaatcaaggtgatcatgaaaacagtaacaatgaagatgatgtcaacactgcagaaaaggtgcctatagacaacatggtgaaaatgtgtgatgggcttattgaaggactaaagcagcatgcatttgtaacaggacaggaaatcatgtcagtttataaagtcagtgagaggcttctaagacaaaagctattgttaaggaggcagatgackctggaggaaacattttaaaaagccatccagcagaatgctcttatccctagaggacccgtttcctggtccctccactgcttctgacatttcttctcacctaaaaaaataaaatacagtgtatagaaaccttttaattaaaacacagcatagtaggtggaaatggaaaggctgccattgtttgttcctgctgt

SEQ ID NO: 943318 - DNA, 627 bp, Homo sapiens
tgctattaactgctcctccttgataatgacttgcccaagataatgcagcaatcaatagattagacattgtatcaggagtctatggcttctcttattggattagttcctgatatggtttggctctgtgcctccaccaaaatctcatgttgaattgtaattcccagtgttcgggcagggagctggtaggaggtgattggattatggggacggatttctcccttgctgttctcgtggtagtgagtgagttctcatgatatctgtttgtttagacgtgtgtagcaccaccccctttgctcgcttcctcctgctccagccatgtggacatgcctccttagtcttcgccttctgccatgattgtaaatttcctgaggccttcccagccatgcttccagtacagcctgtggamctgtgagccagttaaacctcttttctttataaactacccagttctttatagcaatgtgagaacagttccctttaaagtttgtgaatttgaggcttttagcattatctattacacaattaatggcttgtttttttttcctccaaaatgaccaaattaagagtaactctgtagacctttgatgctatccaaaaatctctttagagactcttggttaggaaatt

SEQ ID NO: 943319 - DNA, 773 bp, Homo sapiens
tgtgagtatttgcagaaaagagcatggattcttcaaaatccctagggttttacactgtgactctcatcccggcttgccccaagctccacacagaatcttaagctgccatagacaccttgaacactgttttatctgctaggttatgaagcccaaatggcagaacagtttgcactttagcctgaaccagctagaagtcttttcttggtatggcccacagtgaaagctgccattcttacaggatgcttggtaaatgggtcaaaagggcttacccaaaattatttgcctgcaaaatacaaaaaagaacattattcctctttcttagtggaaaggagtacaagatagaataaatttgatttcccattgtattgggatatttttctattccccagaccctcggactttttaacactttcctaaagtagcacacatctaattttttttatgtgtgagattattctccatgtatatttgtcttaccagagccatgaaactcgttacttcttgatcatcaggcacttttggcccattttcatccaatagagtgaarcagcttattggcctatgtcctgtggatatgagacaataagattcttgtgaaataaatagtaagagtcaaaaactgatgtaaccttgtccagaatagggaagatgcattgccattgtggacaaatgaaaagaaatcactctgatgacttagatgttatatctgacagatacagagaaacaataattgcataggaagagttatatactgttgatttattacagtaaaa

SEQ ID NO: 943320 - DNA, 629 bp, Homo sapiens
tgctattaactgctcctccttgataatgacttgcccaagataatgcagcaatcaatagattagacattgtatcaggagtctatggcttctcttattggattagttcctgatatggtttggctctgtgcctccaccaaaatctcatgttgaattgtaattcccagtgttggggcagggagctggtaggaggtgattggattatggggacggatttctcccttgctgttctcgtggtagtgagtgagttctcatgatatctgtttgtttaaacgtgtgtagcaccaccccctttgctcgcttcctcctgctccagccatgtggacatgcctccttagtcttcgccttctgccatgattgtaaatttcctgaggccttcccagccatgcttccggtacagcctgtggamctgtgagccagttaaacctcttttctttataaactacccagttctttatagcaatgtgagaacagttccctttaaagtttgtgaatttgaggcttttagcattatctattacacaattaatggcttgttttttttttcctccaaaatgaccaaattaagagtaactctgtagacctttgatgctatccaaaaatctctttagagactcttggttaggaaattg

SEQ ID NO: 943321 - DNA, 544 bp, Homo sapiens
attttatttctcctttgcttatgaagcttagtttggctggatatgaagttctgggctgaaaattcttttctttaagaattttgaatattggtccccaatctcttttggcttgtagagtttctgctgagaggtccactgttagtctgatgggcttccctttgtaagtgacctggcctttctctctggctgtccttaatrgtttgtccttcatttcgaccttggagaatctgatgattatgtgtcttgcggttgactttctcatggagtatcttaatagtgttctttgtatttcctgaatttgcatgttggcctgtcttgctaggctagggaagttctcctggataatatcctgaagcgtgttttccagcttgtttccattctcctcatctccttctggtactccaatcaattgtaggttcagtcttttcattgaagtcccttatttctgggaggctttattcattccttttcattctttttcttgtatgcataccttatttcagtaaggtggtcttcaaactctgatatcctctcttctgcttgg

SEQ ID NO: 943322 - DNA, 612 bp, Homo sapiens
tgagtggggtccagaacaggagaaagctctgcagcaggtccaggctgctgtgcaagctgctcttccacttgggccatatgacccagcagatccaatgttgcttaaggcttcagtggcagataaggacgctatttgaacatttggcaggcccccataggtgaatcacagaggaggcctcaaggattttggggcaagtccctgccatcttctgcagataactactctccttttgagagacagctcttggcctgttactgggctttggtggaaacygaatgtttgactatgagtcatcaagttaccatgcaacctgaactgcctatcatgaactgggtgctttctgacccatctagccataaagtgggtcatgggcagtagcatcccatcatcaaatggaagtggcctatacgtgatcgggctcgagcaagtcctgaaggcacaagtaagttatataaggaagtggctcaaatgcccatggtctccactcctgccaccctgccttctctcccccagcctgcactgatggcctcatggagagttccctaagatcagttgacagaggaagagaagactagggcctggttcacagatagttctgcttgacatgcaggc

SEQ ID NO: 943323 - DNA, 488 bp, Homo sapiens
tttgaacatttggcaggcccccataggtgaatcacagaggaggcctcaaggattttggggcaagtccctgccatcttctgcagataactactctccttttgagagacagctcttggcctgttactgggctttggtggaaactgaatgtttgactatgagtcatcaagttaccatgcaacctgaactgcctatcatgaactgggtgctttctgacccatctagccataaagtgggtcatgggcagtagcatcccatcatcaaatggaagtggcctatacgtgatcrggctcgagcaagtcctgaaggcacaagtaagttatataaggaagtggctcaaatgcccatggtctccactcctgccaccctgccttctctcccccagcctgcactgatggcctcatggagagttccctaagatcagttgacagaggaagagaagactagggcctggttcacagatagttctgcttgacatgcaggcaccaccc

SEQ ID NO: 943324 - DNA, 614 bp, Homo sapiens
aagtaagtgcctgggaagtgtagccctcctgtcaagaaaatgtggcacatatacaccatggaatactatgcagccataaaaaatgatgagttcatgtcctttgtagggacatggatgaaattggaaagcatcattctcagtaaactatcacaagaacaaaaaaccaaacaccgcatattctcactcataggtgggaattgaacaatgagatcacatggacacaggaaggggaatatcacactctggggactgttgtggggtggggggacgggggagggatagcatcgggagatatacctaatgctagatgacgagttagtgggtgcagcgcacgakcatggcacatgtatacatatgtaactaacctgcacaatgtgcacatgtaccctaaaacttaaagtataattaaaaaaaaaaaaagaaaagaaaattgcaccaggaacaaaaaaaaaataagaaaaaaataaaaaaataaaaaataaaaaggcacatcagtttagaaaaaaaaaaaaagagggaatagggagttactgtttaacatgtacagagttttagtacaggatgatgaaaaaccctggagatgtatagtggcgatgatcaatgtgaatgtactc

SEQ ID NO: 943325 - DNA, 605 bp, Homo sapiens
acctcaataagcagatgagtagccctggctttgggtccactaggtgcagcctgatgcctgggtctgcaggagtaggcagacatggaatttgggtttgcgtagatgggcctagtgcctcagtgcacaggggtaagcctgaagcttgggtctacaggtataagcctggatcctgggtacatggggtctagtgtgttgctggggtccactggggtggacctagtaactgtgttcatggttacaggactggagtctaagtccattgggatgggcccagagccygagtctatgaaggcaggtatggggccaacatctacaggggctggcctgaatcctgaggctgcaggagctagcctggcactggggtgggtctgaaagctggccctgaaggggcatggtggcgaagaccacagtaaagtcatgtgttaacttcactcttcttccgctctgtggaggatatcactgttggcactgtgctgtgcgaaacaggcttgggggagaggagatgtgagtaatgtgaaactgtccttactcccatcttcaatccatctttctttatttctgtactttacccaggtgttgtaatctgtcatatggattccttagct

SEQ ID NO: 943326 - DNA, 752 bp, Homo sapiens; identical to SEQ ID NO: 924824

SEQ ID NO: 943327 - DNA, 610 bp, Homo sapiens
acctcaataagcagatgagtagccctggctttgggtccactaggtgcagcctgatgcctgggtctgcaggagtaggcagacatggaatttgggtttgcgtagatgggcctagtgcctcagtgcacaggggtaagcctgaagcttgggtctacaggtataagcctggatcctgggtacatggggtctagtgtgttgctggggtccactggggtggacctagtaactgtgttcatggttacaggactggagtctaagtccattgggatgggcccagagccygagtctatgaaggcaggtatggggccaacatctacaggggctggcctgaatcctgaggctgcaggagctagcctggcactggggtgggtctgaaagctggccctgaaggggcatggtggcgaagaccacagtaaagtcatgtgttaacttcactcttcttccgctctgtggaggatatcactgttggcactgtgctgtgcgaaacaggcttgggggagaggagatgtgagtaatgtgaaactgtccttactcccatcttcaatccatctttctttatttctgtactttacccaggtgttgtaatctgtcatatggattccttagctcttgg

SEQ ID NO: 943328 - DNA, 588 bp, Homo sapiens
tattgtgtctagaatttattccttccagtgggttcttggtctcgctggcttcaagaatggagccgcagacctttgcagtgagtgttacagctcataaaggtgttgcagacccaaagagtgagcagcagcaagatttactgtgaagagcgaaagaacaaagcttccacagcatggaagggcacttkccgctgctggctcaggtggccagcttttattcccttatttggccccacccacatcctgctgactggtccattttacagagccctgattggtccattttacagagtgctgattggtgtgtttacaatcctttatctagacactgagcactgattggtgcgtttttacagagggctgatcagtgcgtttattttcctttagctagacacagagcgctgattggtgcgtttttacagagtgctgattggtgcattgacaatcctttagctagacacagagtgctgattggtgcatttttacagagtgctgattggtgcatttacaatccttgagctagacacagagcgctgattgcgtttacaatcctctagctagatagaaaagttctccaagtccccacttgac

SEQ ID NO: 943329 - DNA, 669 bp, Homo sapiens
ctgtgcccacccagattgagggtgggtctgtctttccaagtccactgacttaaatgttaaactcctttggcaacatcctcagagacacatccaggaacaatactttgcctctttcaatccaatcaagttaacactcaatattaaccatcactgtaccagaatctctgggatgcagctaaagcagtgttaaaagggaaatttacagcactaaatgcctacatcaaaaagctagaatgatctcaagttaacaacctaacatcacaactaaaaacactagagcccagatgtgatggctcacacctgcaatctcagcacttcgggaggccaaggcgggtggatcatctgaggtcagaagttcgagaccagcctgaccaacatggtgaaagctcatctctagtaaaaatacaaaattagctgggtgtggtggcccatgcctgtaatctcagctacttggggggccraggcaggagaattgcttgaacccacgaggcggaggttgcaatgagctgagatcatgccattgcactccagcctgggcaacaagagcaaaactccatctcaaaaacaaagcaaaacaaaaaaataaaacaaacaaacaaacactagagtaccaagagcaaacaaacctcaaagctagcggaagacaagaaataaccagtatcagagctg

SEQ ID NO: 943330 - DNA, 596 bp, Homo sapiens
actgcttttgaagaacaggcatcactgcaaaaagaacaggggaaattctggtcacgatagtgcggagtcacctgcctctcacatgcttagaaatcagtcatttcttccgatgttccctctcctgtcttctgagacatagaagggtctgctagttacaactccaataaggtaagtaaatccatatagggacagtggcaaagaccagacactgagccaaggtacgcggctcacatccccacagtgtgaccttgggcaagttacttaacctctcttaaaattgtaccagctcctaggacggttgtgagggtaagyatacaataatgctagttttgtttttcctcttggaatttaaaatcatcttctaatttttaaggaagccatttggaaacctctgggctcctataactgctttaaatttgtagtgttgaaagcaatataaccaatagtttccctaggattagaagaaacgtaagagttactcatttgggagtcaaacatcccaggttatggatgaagaggaagtaactgatgcattttgtcctgcagtgaatttcccaggctatgctgagaagggaagacgcggcccctggcatgca

SEQ ID NO: 943331 - DNA, 594 bp, Homo sapiens
tgcttttgaagaacaggcatcactgcaaaaagaacaggggaaattctggtcacgatagtgcggagtcacctgcctctcacatgcttagaaatcagtcatttcttccgatgttccctctcctgtcttctgagacatagaagggtctgctagttacaactccaataaggtaagtaaatccatatagggacagtggcaaagaccagacactgagccaaggtacgcggctcacatccccacagtgtgaccttgggcaagttacttaacctctcttaaaattgtaccagctcctaggacggttgtgagggtaagyatacaataatgctagttttgtttttcctcttggaatttaaaatcatcttctaatttttaaggaagccatttggaaacctctgggctcctataactgctttaaatttgtagtgttgaaagcaatataaccaatagtttccctaggattagaagaaacgtaagagttactcatttgggagtcaaacatcccaggttatggatgaagaggaagtaactgatgcattttgtcctgcagtgaatttcccaggctatgctgagaagggaagacgcggcccctggcatgca

SEQ ID NO: 943332 - DNA, 604 bp, Homo sapiens
gccagctgctgtggatatctattccaattatgcatctggaacaaggaaataaccataggatgggtttgagaaccaatggacccactgtaagctggacatgggctaaaactcctttcatcacctgtcctccataagccmctactctgattgaagggccacacagacatttttagtctcctggaatcaatgccagtttagacgcagtgtccagtcatctccaaaaggtctgattcttacctttcccacaatgcacagtcactctggtaaaaggccagaggtccctttcctttgggaaaggatgggagaaaggctaacaggatccattttcaatagtgtcctgggatccttcctcaaggggacccagtcttcccttcactcaaagggttctgggttgtaaactggctcaagcctgggaattgattgaggggcatgagtctccgttttgatgattcaggttaggcctgctcacttgccctagaacttgtctgctcatacaaatcaagtaagggtttagtaggcttcccatctagttcatgtctcaagacaccatgaatagttcatgccatagatccacatgagtcggactattctgatttttgtttta

SEQ ID NO: 943333 - DNA, 604 bp, Homo sapiens
gccagctgctgtggatatctattccaattatgcatctggaacaaggaaataaccataggatgggtttgagaaccaatggacccactgtaagctggacatgggctaaaactcctttcatcacctgtcctccataagcccctactctgattgaagggccacacagacatttttagtctcctggaatcaatgccagtttagacgcagtgtccagtcatctccaaaaggtctgattcttwcctttcccacaatgcacagtcactctggtaaaaggccagaggtccctttcctttgggaaaggatgggagaaaggctaacaggatccattttcaatagtgtcctgggatccttcctcaaggggacccagtcttcccttcactcaaagggttctgggttgtaaactggctcaagcctgggaattgattgaggggcatgagtctccgttttgatgattcaggttaggcctgctcacttgccctagaacttgtctgctcatacaaatcaagtaagggtttagtaggcttcccatctagttcatgtctcaagacaccatgaatagttcatgccatagatccacatgagtcggactattctgatttttgtttta

SEQ ID NO: 943334 - DNA, 604 bp, Homo sapiens
gccagctgctgtggatatctattccaattatgcatctggaacaaggaaataaccataggatgggtttgagaaccaatggacccactgtaagctggacatgggctaaaactcctttcatcacctgtcctccataagcccctactctgattgaagggccacacagacatttttagtctcctggaatcaatgccagtttagacgcagtgtccagtcatctccaaaaggtctgattcttacctttcccacaatgcacagtcactctggtaaaargccagaggtccctttcctttgggaaaggatgggagaaaggctaacaggatccattttcaatagtgtcctgggatccttcctcaaggggacccagtcttcccttcactcaaagggttctgggttgtaaactggctcaagcctgggaattgattgaggggcatgagtctccgttttgatgattcaggttaggcctgctcacttgccctagaacttgtctgctcatacaaatcaagtaagggtttagtaggcttcccatctagttcatgtctcaagacaccatgaatagttcatgccatagatccacatgagtcggactattctgatttttgtttta

SEQ ID NO: 943335 - DNA, 604 bp, Homo sapiens
gccagctgctgtggatatctattccaattatgcatctggaacaaggaaataaccataggatgggtttgagaaccaatggacccactgtaagctggacatgggctaaaactcctttcatcacctgtcctccataagcccctactctgattgaagggccacacagacatttttagtctcctggaatcaatgccagtttagacgcagtgtccagtcatctccaaaaggtctgattcttacctttcccacaatgcacagtcactctggtaaaaggccagaggtccctttcctttgggaaaggatgggagaaaggctaacaggatccattttcaatagtgtcctgggatccttcctcaaggggacccagtctycccttcactcaaagggttctgggttgtaaactggctcaagcctgggaattgattgaggggcatgagtctccgttttgatgattcaggttaggcctgctcacttgccctagaacttgtctgctcatacaaatcaagtaagggtttagtaggcttcccatctagttcatgtctcaagacaccatgaatagttcatgccatagatccacatgagtcggactattctgatttttgtttta

SEQ ID NO: 943336 - DNA, 601 bp, Homo sapiens
tggcctgggatatggtctatcttggtaagcatgctacatgtacttggaaagaatgtgtatttatttgtcagtagttgggtggagtgtcagtaattgtgaactgggcaagcaggttgatagtggctagtactttgttcctgagtaaggaacatattcttactaacttcctgtctacttgttctatcaattactgagaagaatgtttaattgccaactctaattgctgatttgtctgttccttctttgagatctgtcagcttttcctttatgtatttttggagttctataattargtacattgacatttagaattgttatatcctcataatacatttcttcctttatcattctgaaatgtccctccctatccctggtaatattccttgttctaaagtctactttgcctgatgttaacatagctatgccagctaatttcatgcctagtatatgcatggcatattttttctcatgtttttaatctttaatctatctgtgtcattatgtggatttaaagtcagtttcttgtagacagcataaatttgggccctgctttcttgtccagtttgacagtctttgtcttttaattgcagtgcttagcctg

SEQ ID NO: 943337 - DNA, 601 bp, Homo sapiens
tggcctgggatatggtctatcttggtaagcatgctacatgtacttggaaagaatgtgtatttatttgtcagtagttgggtggagtgtcagtaattgtgaactgggcaagcaggttgatagtggctagtactttgttcctgagtaaggaacatattcttactaacttcctgtctacttgttctatcaattactgagaagaatgtttaattgccaactctaattgctgatttgtctgttccttctttgagatctgtcagcttttcctttatgtatttttggagttctataattaagtacattsacatttagaattgttatatcctcataatacatttcttcctttatcattctgaaatgtccctccctatccctggtaatattccttgttctaaagtctactttgcctgatgttaacatagctatgccagctaatttcatgcctagtatatgcatggcatattttttctcatgtttttaatctttaatctatctgtgtcattatgtggatttaaagtcagtttcttgtagacagcataaatttgggccctgctttcttgtccagtttgacagtctttgtcttttaattgcagtgcttagcctg

SEQ ID NO: 943338 - DNA, 601 bp, Homo sapiens
tggcctgggatatggtctatcttggtaagcatgctacatgtacttggaaagaatgtgtatttatttgtcagtagttgggtggagtgtcagtaattgtgaactgggcaagcaggttgatagtggctagtactttgttcctgagtaaggaacatattcttactaacttcctgtctacttgttctatcaattactgagaagaatgtttaattgccaactctaattgctgatttgtctgttccttctttgagatctgtcagcttttcctttatgtatttttggagttctataattaagtacattgacatttagaattgttatatcctcataatacwtttcttcctttatcattctgaaatgtccctccctatccctggtaatattccttgttctaaagtctactttgcctgatgttaacatagctatgccagctaatttcatgcctagtatatgcatggcatattttttctcatgtttttaatctttaatctatctgtgtcattatgtggatttaaagtcagtttcttgtagacagcataaatttgggccctgctttcttgtccagtttgacagtctttgtcttttaattgcagtgcttagcctg

SEQ ID NO: 943339 - DNA, 602 bp, Homo sapiens
tgctgggtcccatccctcccaggtttggactggtacacgggctacttttctgatgtttgaagcgatttccagaacctcttctccattattgcctatgttaagacagcaattggagatgttaaacttaccacagcccgcaccctcttctgctaataagtagtctagggccagcctgttttgataaattgccgcgygcatttggttttgttgttgcgcgagcatttctagggctgaggcagtttggttagtgattatctctagaacagcttgtagtctaatcgctctatttggcatatatatgggagtgcgataaccccatgaaccatcctctgcccaagtggcaggaccatagtattcaatgatccgttgcagaggccactcgtcctctcacaatctttggctccctcctacctccaaggatcatttttctctggttatcatacacagggactctgagggtgttgcccgcctgcttcggaagtaaaaagaatccaggttgaattgtgcctaggaagcaagtaccttgccagtgataaggtagctgtgagtaagcctgggttccccatatccacaggaatccgtcagtggcagtccattgtcag

SEQ ID NO: 943340 - DNA, 602 bp, Homo sapiens
tgctgggtcccatccctcccaggtttggactggtacacgggctacttttctgatgtttgaagcgatttccagaacctcttctccattattgcctatgttaagacagcaattggagatgttaaacttaccacagcccgcaccctcttctgctaataagtagtctagggccagcctgttttgataaattgccgcgcgcatttggttttgttgttgcgcgagcatttctagggctgaggcagtttggttagtgattatctctagaacagcttgtagtctaatcgctctatttggcatatatatgggagtgcgataaccccatgaaccatcctctgcccaagtggcaggaccatagtattcaatgatccgttgcrgaggccactcgtcctctcacaatctttggctccctcctacctccaaggatcatttttctctggttatcatacacagggactctgagggtgttgcccgcctgcttcggaagtaaaaagaatccaggttgaattgtgcctaggaagcaagtaccttgccagtgataaggtagctgtgagtaagcctgggttccccatatccacaggaatccgtcagtggcagtccattgtcag

SEQ ID NO: 943341 - DNA, 597 bp, Homo sapiens
tgcttttccccagggcccgctgggcacccctgagcctctgcccagcctccgctcagataccacgtcttcagtgagggctgcccccacctacgcactgtggtaaaatgtaccatcttaaccatttttttttttttgagacggagtctcactctgtcgcccaggctggagtgcagtggcgggatctcggctcactgcaagctctgcctcctgggttcacgccattctcctgcctcagcctctggagtagctgggactacargcgcccgccaccacgcccagctaatttttttctatttttagtagagatggggtttcaccgtgttagccagcatggtctcgatctcctgaccttgtgatccgcccacctcggcctcccaaagtgctgggattccaggcgtgagcagccgcgcccggccccatcttaaccatttgtaaatgcatagttgagtagggttaagtacgttcatgttgtgtaaccatcaccaccatccatctccagaactttctcactttcccgaactgaaactgttctcagccaacaatgattcctcatccccctcctcagcccctggcaaccactgttctcgttgcctctct

SEQ ID NO: 943342 - DNA, 597 bp, Homo sapiens
tgcttttccccagggcccgctgggcacccctgagcctctgcccagcctccgctcagataccacgtcttcagtgagggctgcccccacctacgcactgtggtaaaatgtaccatcttaaccatttttttttttttgagacggagtctcactctgtcgcccaggctggagtgcagtggcgggatctcggctcactgcaagctctgcctcctgggttcacgccattctcctgcctcagcctctggagtagctgggactacaggcgcccgccaccacgcccagctaatttttttctatttttagtagagatggggtttcaycgtgttagccagcatggtctcgatctcctgaccttgtgatccgcccacctcggcctcccaaagtgctgggattccaggcgtgagcagccgcgcccggccccatcttaaccatttgtaaatgcatagttgagtagggttaagtacgttcatgttgtgtaaccatcaccaccatccatctccagaactttctcactttcccgaactgaaactgttctcagccaacaatgattcctcatccccctcctcagcccctggcaaccactgttctcgttgcctctct

SEQ ID NO: 943343 - DNA, 597 bp, Homo sapiens
tgcttttccccagggcccgctgggcacccctgagcctctgcccagcctccgctcagataccacgtcttcagtgagggctgcccccacctacgcactgtggtaaaatgtaccatcttaaccatttttttttttttgagacggagtctcactctgtcgcccaggctggagtgcagtggcgggatctcggctcactgcaagctctgcctcctgggttcacgccattctcctgcctcagcctctggagtagctgggactacaggcgcccgccaccacgcccagctaatttttttctatttttagtagagatggggtttcaccgtgttagccagcatggtctcgatctcctgaccttgtgatccgcccacctcggcctcccaaagtgctgggattccaggcgtgagcagccgcgcccggccccatsttaaccatttgtaaatgcatagttgagtagggttaagtacgttcatgttgtgtaaccatcaccaccatccatctccagaactttctcactttcccgaactgaaactgttctcagccaacaatgattcctcatccccctcctcagcccctggcaaccactgttctcgttgcctctct

SEQ ID NO: 943344 - DNA, 567 bp, Homo sapiens
atctcaacagtgggtttaaaatattcagtaatgtgttattccatttccagagcacaggcaagagtagacgtaacataattcttcagaaccctaggattttcagaatggtcaaagaccactggcttcagcttaaagtcaccagtgacatttgcccctaacaagagagccagcttgccctttgaaactaagcactgagttctctctaggtatgaaagtcctagatgtcatctccttccaaaggaagtcttttgtctatattgaaaatctgctttttcgtctcgctgccttcatcaatgatcttagctagacctggataacctggtgttgcttttctgttaggtagcacttgctgcttyaccttgtactttcgtgttatggggacagcttctttccttaaacctcatgaaccagcctctgctgcttccaactttttttttttttttttttttttttttgagatggattttcactcttgttgcccaagctggagagcaatggcgtgatctcggctcactgcaacctccacctcccgggttcaagcgattctcctgcctcagcctccgtagt

SEQ ID NO: 943345 - DNA, 588 bp, Homo sapiens
ccagggcccgctgggcacccctgagcctctgcccagcctccgctcagataccacgtcttcagtgagggctgcccccacctacgcactgtggtaaaatgtaccatcttaaccatttttttttttttgagacggagtctcactctgtcgcccaggctggagtgcagtggcgggatctcggctcactgcaagctctgcctcctgggttcacgccattctcctgcctcagcctctggagtagctgggactacargcgcccgccaccacgcccagctaatttttttctatttttagtagagatggggtttcaccgtgttagccagcatggtctcgatctcctgaccttgtgatccgcccacctcggcctcccaaagtgctgggattccaggcgtgagcagccgcgcccggccccatcttaaccatttgtaaatgcatagttgagtagggttaagtacgttcatgttgtgtaaccatcaccaccatccatctccagaactttctcactttcccgaactgaaactgttctcagccaacaatgattcctcatccccctcctcagcccctggcaaccactgttctcgttgcctctct

SEQ ID NO: 943346 - DNA, 588 bp, Homo sapiens
ccagggcccgctgggcacccctgagcctctgcccagcctccgctcagataccacgtcttcagtgagggctgcccccacctacgcactgtggtaaaatgtaccatcttaaccatttttttttttttgagacggagtctcactctgtcgcccaggctggagtgcagtggcgggatctcggctcactgcaagctctgcctcctgggttcacgccattctcctgcctcagcctctggagtagctgggactacaggcgcccgccaccacgcccagctaatttttttctatttttagtagagatggggtttcaycgtgttagccagcatggtctcgatctcctgaccttgtgatccgcccacctcggcctcccaaagtgctgggattccaggcgtgagcagccgcgcccggccccatcttaaccatttgtaaatgcatagttgagtagggttaagtacgttcatgttgtgtaaccatcaccaccatccatctccagaactttctcactttcccgaactgaaactgttctcagccaacaatgattcctcatccccctcctcagcccctggcaaccactgttctcgttgcctctct

SEQ ID NO: 943347 - DNA, 588 bp, Homo sapiens
ccagggcccgctgggcacccctgagcctctgcccagcctccgctcagataccacgtcttcagtgagggctgcccccacctacgcactgtggtaaaatgtaccatcttaaccatttttttttttttgagacggagtctcactctgtcgcccaggctggagtgcagtggcgggatctcggctcactgcaagctctgcctcctgggttcacgccattctcctgcctcagcctctggagtagctgggactacaggcgcccgccaccacgcccagctaatttttttctatttttagtagagatggggtttcaccgtgttagccagcatggtctcgatctcctgaccttgtgatccgcccacctcggcctcccaaagtgctgggattccaggcgtgagcagccgcgcccggccccatsttaaccatttgtaaatgcatagttgagtagggttaagtacgttcatgttgtgtaaccatcaccaccatccatctccagaactttctcactttcccgaactgaaactgttctcagccaacaatgattcctcatccccctcctcagcccctggcaaccactgttctcgttgcctctct

SEQ ID NO: 943348 - DNA, 731 bp, Homo sapiens
gctgtaatcctgtttatgggatatttgttccacttaccatgatgaatttggctgcagaaatatcagtatatttgcctttggagtcctgcctcagacccctgatgagggctatgcaatctatagtacttgcttttatttgtttattctgctgtaaatggtttgtttgaattttttttttttttttttttttttttttgagacggagtctcgctcygtcgcccaggccggactgcggactgcagtggcgcaatctcggctcactgcaagctccgcttcccgggttcacgccattctcctgcctcagcctcccgagtagctgggactacaggcgcccgccaccgcgcccggctaattttttgtatttttagtagagacggggtttcaccttgttagccaggatggtctcgatctcctgacctcatgatccacccgcctcggccttcctaagtgctgggattacaggcgtgagccaccgcgcccggcctgtttgaatgttttgtttgcgaaaatagccttaattttcccttcactgtttccatgcaccttagaaataggacttcgtagccggttgtggtcatacacacctacggtcccagctacttgcaaggctgaggtgggggtgtggcaggccaggtctcactaacacaggcctccataacaactgtttcagtactgaccaagtggtaaagttaaatattaaaagctgaaagagccagcgcccttatacaaag

SEQ ID NO: 943349 - DNA, 625 bp, Homo sapiens
tctgttggagtttgctggaggtccactccagaccctgtttacctgggtatcagaagcagaggctgcagaacagcgaatattgctgaacagcaaatgttgctgcctgatcgttcctctggaagtttcatctcagaggggtacccggccatgtgaggtgtcagtctgcccctactcaggggtgcctcccagttaggctactcagggttcagggacccacttgaggagacagtctgtccattctcagatctcaaactctgtgctgggagaaccactactctcttcaaagctgacagacagggacatttaagtctgcagaggtttcttctgccttttgttcagctaggtcctgcccccagaggtggagtctacagaggcaggcagccctccttgagctgcggtgggctccacccagctcgagcttctcggccgctttgtttacctactcaarcctcagcaaaggtgggcacccctcctccagccttgctgccaccttgcagttcgatctcagactgctgtgctagcaatgagtaaggctccatgggcatgggaccctccaagccaggcatgggatataattgtgccatttgctaagaccattggaaaagcgcagtattagggtgggagt

SEQ ID NO: 943350 - DNA, 421 bp, Homo sapiens
aacatactttgtaagatctcaatttctttaaatgtattaagacttactttgtagcctaatatatggtctgttttggagaatgttccatgtacacttaagaatatattgtgctgatgttgggtgagtttaggtgttgacatgttacatttgagcatacatgtaggtggagatgtgagatattcatttaggagaaaagccaagggaagaaatttgttaatgaactgtaaagaggggttgacattcacaagaatatgtaatttttwaaaaaaaaacaaatttagagcgatagaacagccttgaatatattcttatttagaaggctgaagtttgaatatagcctggagtgttagaaaaggatggaacagtttatcatagaccagagccaagagagtataatatttagattttaaatatcaaaaag

SEQ ID NO: 943351 - DNA, 421 bp, Homo sapiens
aacatactttgtaagatctcaatttctttaaatgtattaagacttactttgtagcctaatatatggtctgttttggagaatgttccatgtacacttaagaatatattgtgctgatgttgggtgagtttaggtgttgacatgttacatttgagcatacatgtaggtggagatgtgagatattcatttaggagaaaagccaagggaagaaatttgttaatgaactgtaaagaggggttgacattcacaagaatatgtaatttttaaaaaaaaaacaaatttagagygatagaacagccttgaatatattcttatttagaaggctgaagtttgaatatagcctggagtgttagaaaaggatggaacagtttatcatagaccagagccaagagagtataatatttagattttaaatatcaaaaag

SEQ ID NO: 943352 - DNA, 710 bp, Homo sapiens
gttttcagccagtggatgtgagcacacccacagccaagctccctgctccagaggtctggaaaccccggggtgggggtctggtggtggccacactcaggcaggtgctgccgctccggtgagcaggtagggctccctccctggctacagccccccaccctggcctcactgggccacaggctgggcacagcctcagagactacctcttccctcgcaccctatkcatcatgcagatggggaaactgaggcctggggaagggaaggaacctgccccaggccacctagtgagtttgtgacccttgtcctcccctgccgcctggtccccttggtcacgcaaagtgccctaagtgctgagcacctgccctttcagcagaggtagcacacaggcggacgggactggggctggggtcggggagcaccggggctgccgcagtggggttgggaacccacccctgcaccttcagaggttccacgctctcactctgagctgtcctttcggggtggaggtggggtaactcatttactcaaggctgcctgctgcctttcatcacagagccgagaattcgctccatatccctcagatgaaagaaataccatattgcctctgttttaaatagcataaagtctagctttgaatccttatgtttgaggggagcctttttttctctctaaggctgcgcaatagtccaagagatcttatagagtccccgaaa

SEQ ID NO: 943353 - DNA, 710 bp, Homo sapiens
gttttcagccagtggatgtgagcacacccacagccaagctccctgctccagaggtctggaaaccccggggtgggggtctggtggtggccacactcaggcaggtgctgccgctccggtgagcaggtagggctccctccctggctacagccccccaccctggcctcactgggccacaggctgggcacagcctcagagactacctcttccctcgcaccctattcatcatgcagatggggaaactgaggcctggggaagggaaggaacctgccccaggccacctagtgagtttgtgacccttgtcctcccctgccgcctggtccccttggtcacgcaaagtgccctaagtgctgagcacctgccctttcagcagaggtagcacacaggcggacgggactggggctggggtcggggakcaccggggctgccgcagtggggttgggaacccacccctgcaccttcagaggttccacgctctcactctgagctgtcctttcggggtggaggtggggtaactcatttactcaaggctgcctgctgcctttcatcacagagccgagaattcgctccatatccctcagatgaaagaaataccatattgcctctgttttaaatagcataaagtctagctttgaatccttatgtttgaggggagcctttttttctctctaaggctgcgcaatagtccaagagatcttatagagtccccgaaa

SEQ ID NO: 943354 - DNA, 710 bp, Homo sapiens
gttttcagccagtggatgtgagcacacccacagccaagctccctgctccagaggtctggaaaccccggggtgggggtctggtggtggccacactcaggcaggtgctgccgctccggtgagcaggtagggctccctccctggctacagccccccaccctggcctcactgggccacaggctgggcacagcctcagagactacctcttccctcgcaccctattcatcatgcagatggggaaactgaggcctggggaagggaaggaacctgccccaggccacctagtgagtttgtgacccttgtcctcccctgccgcctggtccccttggtcacgcaaagtgccctaagtgctgagcacctgccctttcagcagaggtagcacacaggcggacgggactggggctggggtcggggagcaccggggctgccgcagtggggttgggaacccacccctgcaccttcagaggtkccacgctctcactctgagctgtcctttcggggtggaggtggggtaactcatttactcaaggctgcctgctgcctttcatcacagagccgagaattcgctccatatccctcagatgaaagaaataccatattgcctctgttttaaatagcataaagtctagctttgaatccttatgtttgaggggagcctttttttctctctaaggctgcgcaatagtccaagagatcttatagagtccccgaaa

SEQ ID NO: 943355 - DNA, 575 bp, Homo sapiens
ccagtgattggtaagatgagggacacaggtgatctccaagtcctctccatcctctcacttcagtagcgcaatgagtccaaaatgtggggatccaggaatcccaagagaccagcccctgaggcagtgataccatatgagttgtgctattccaaaaggacatctcaaatccatatttatgcttgatgcccaatcctactcaatcctctatacttgtgagagtagctcagttgctggaaatcattttttcagtttcgttgaagattagttggcctcgaggctctggtctagtagaagagaagtccagcgtttgaatcagatcatggaagatggctctrgaggaagctgatgtgcacatgtgtggagcctgggggtcaccagcccagtcacagccacggcccacgagggtcaccagcccagtcacagcacggcccacagagtacggtcttcccatggccacagaaggaagggctggcctccctggccatgatggtgctctcagtgcccacgtgacggggatggcaccatgttcttccccagggctgccataacaaggaaccacacccaggaagacttag

SEQ ID NO: 943356 - DNA, 564 bp, Homo sapiens
atgcatctgacaaaggactaatatccggaatctacaaggaactcaaaggaatcagcaagaaaaaacaaccccatcaaaaagtggccaaaggacatgaatagacaattctcaaaagaagatatacagacatccaacaaacatatgaaaaaatgttcaacatcaccaatcatgagaaaattgcaaattaagaacacaatgaaataccaccttactcctgcaagaatggccataattaaaaagtcaaaaaataatagctgttggcatggatgtggtaaaaagggaacacttttatgccactggtgggaacataaactagtacaactgtgggaaacagygtggagattccttaaagaatgacaagtagaactaccatttgatcaagcaatcccactgctgggtatctacccagaggaaaagaaggcattatatgaaaaagacacttgcacacacatgtttacagcagcacaactcgcaattgaaaagatacggaaccaacctaagtgcccatcaaccaatcagtagataaagaaaaggtagtatatgtaaaccatgaaatactactca

SEQ ID NO: 943357 - DNA, 605 bp, Homo sapiens
tgtttgccctagccagaacttccaatactattttgaataggagtggagaggaagggcatccttgtcttgtgctggtcttcaatgggaatgctttcagcttttgcccattcagtataatgttggctgtaggtctgtcatagatggctcttattattttgagatatgttcctttaatacctagtttattgagagtctttaacctgaatgggtgttgaatgtcatcaaaatacttttctgcatctattgagataatcatgtggttttggtctttagtttgtttaygtgatgaatcatatttttgatttgtatatgttgaaccaaccttgcacctcagagataaagcctactggattgtggtgaataagctttttgatgtgttgctggatttgatttgccagtattttgttgagaatttttgcatcgatgttcatcaaggatattggacttaactcttctttttttgttgtatatctgacaggttttagtatcaggatgatgctggcttgttattaatagaatgagttagggaggggtctctctggctcaattttttggtatagtttcaataggaattgtactagcttgtcttcgtacatctgacagaa

SEQ ID NO: 943358 - DNA, 625 bp, Homo sapiens
atttttacacatggttcttcttcctatttgttttcacccaaggtaacattattctaacaatgctggcagaaatagtttcatttatgctatctggagaagcaagagcttcaaactctctactaaagagttaagggctagggcataagaatcatatataagaaaaaaattaactctctagtttgggagagaaatgaatttgttaagctagaagtgggtcttatccataaaagttcttaagagaggaagatgwtgttaaaatcattatatgtactatatagtcgtaaaaatacataatattacttaacttctacatttgccccagtaaaatattcctaattctcataattctgccagatgggtattatctctgccttataggtaaggccaaagaaaattaaatattttgcctaagtacatttagttattaaatgcactgaaatcacctgtggagcaacagaatataaagaatatttttaaaagaacaaaattaggacttcaacctatgtctgctttactgcaaagcctacagtagttcagctcaacttttatatactggtttcttcagtcttccttccatttcacctaaaagaatggtatcaaataataactggaaagcaaaataagg

SEQ ID NO: 943359 - DNA, 475 bp, Homo sapiens
gagtttgaagggctcagaagacaggaatatgagggaaaatttggaacttcctagagactggttaaatagttgtgactgaaatgcttaaagtgatatggacaataaagtccaagctgttgaggtctcagagggagatcaggagcctattgggacctggagcaaaggtaacttttgttatgcattagcaaagaatctggtggtattgtgcccctgccctaaggatctgtggaattttgaacttgagagtgatgatttagagtatctggaagaaaaaatttctgaacagcaaagcwttcaagatgttgcttggctgcttctaacaacctaagttcacatgtgtgagccaagaagttatgtaaaactggaacttatatttaaaaggaaagtagaccataaaagtttgaaaaatttgcaacctgtccataaatagtaggccatatcatagaaaaggaaagcccattttctggggaggaat

SEQ ID NO: 943360 - DNA, 620 bp, Homo sapiens
agacagctcagaggatctctgtttgccaggtaaaatttctggaggtctctctccagcccctttcttctagttgtgccaattcccaccctatccttagcttggttggaataaagaatggatttcctctttttatctactctcacctcccagcccttatttttatccttcctgataycttttttttgtattcattcactcatttagtaaacatttactgaacactactaggtgtgaggcactgtcctgaggacacagtaacgaacaagacagaaagtgttctatgcacatggagtctccattctaaagggagaagacatataataaacaagtaaaatgactaaataactactaaaatatcaaatataaacatgtttaatagagagaattaaagttaggtgttgtgcaatagcaaagacatgaaatcagcccaaatgcttatcaatgatagactggatagagaaaatgtggtacatatacaccatgaaatacaatgtagccataaaaaggaatgagatcacatcctttacagggacatgaatggagctagacaccattatccttagcaaactaatgcaggaacagaaaaccaaacactgcatgttctcacttataagtgggag

SEQ ID NO: 943361 - DNA, 511 bp, Homo sapiens
gaatttttcaaccttaagaaaatcagtccacattgattaatttcaccaaattcataaccaacctgctatttaaaatgtaggtttgggtcctatttaaaaggccaaaatcactttgcatttcttccttctcccattccttttttccctccatagkccccagggatctaaggttagggttatctgtttgcctggtgaaaaaacccagaaggatggaagtaaaatgcttctatttacgtttcgtgactaaaatcgagagctctgtgatctatcttcctggagacttaaatttaagcgtcattttttatatttttttgtcatgagccaaactcaaaatatacttttaacatatagtcatttaagattaacaaagaataattttcaggatacagtaaacatgaaaatgtggggggtggggtgcaggggatgagtgtgtgtgttcaactgatgtgttggcaaaaagagagcctgtgcagatttaaacagatgaaaaagaagagaggagagagggaaa

SEQ ID NO: 943362 - DNA, 612 bp, Homo sapiens
cagccatagctgcagacctaggcatccctgtgctcttgtgggcctgggaagctcccttcccctcacaggctcagaggtgtctgctccctctgcctggcctcttcccactcctggcacctgctctgattttggagcaaagttgtggctgagcctgggtgctgttgccactcttccaggtatgcctgaactcctggtggcactgayacaccagtcccctgctgccttggccccctccagaccttgggtgcccaccagcacaggagggaggccaagtagtggctgagggtaactcagcacgggcctgcaggtgcccctcagcacaaacagcctgggagccatggatgacatatagatggtggcaagggacaggtccctggtgaaggcccaccttcaagccaaggatggcctgaagcctgagggccaggctgtcagttctaggtggaatctgcaacccagagtgagaacttacggtgcttttcccgggctcacccatggctgcccactgatcagttagcatgcactccctcccttctgaagcctataaaaacccctgactcagtcagacccacagagagaacaggtcaacctgcctgcagataggagctatccact

SEQ ID NO: 943363 - DNA, 609 bp, Homo sapiens
gctgggagtgaagaggtgaatctcactgaggttggagcttttcaagaagagtataataaagcaagaaagggaaaatatagttgaagagagaaattatgatgatgagaatatgctctaagctagatatggaagggaggggagtgaagcctccacaggtactgatagttggggcgrgggggtggtgaaaaggagtggtatctgtagattggaggtctctgtggggtcaaaaacttgctggaattgggacactcaaactggaaagataagaggggggatgatcagagagtgggttgcttgaaactcaaattaggtaaaatttgcaagtattgggaataataaggtgcagtacatgaccatgggaatgatggctagacgagggtgtgagacaatggaggagatgaggtcaatgaatacatgagccaggatacagggaggaagagctgcatgattatttaaattatgtctcagtgaaattattgatttaaactaaatgagagcaaaagtgagatataatcttcaagaaatgagggagcatgacttagaggtcagtagatgacagcaatgaagtgggaataggggattgtatagcctggtgatgtgattaaaagc

SEQ ID NO: 943364 - DNA, 557 bp, Homo sapiens
catgctgtctcttacctgcttaaaatcctgctatttagaatgaagcctcaatatctcacaatggtctgtgcagccctgggtcatgtagatcttgccaatccctgacctcactttgtaccactctcctcctcaatcactgtatttcaagccatgctggccttctttctgctcctcaagcacaccaaacgatttcccttctcaggcttttgtgcttactattctctttggctaygatattcttcccttaggtcttggaatagtcggttctttattgtccttcaatctgtaactctaatgttatcccttcagagagccccactttagctcaagtagaatcctccttcctcttagtttctatggcatcacctgttttatccttcatggtactaaccctgctggatagtcatcctatgtatgtctttgcttacttatttttgttcatctacccatcactagcctaagtttcataaagacggggacctagtccaccctgttctctactgtaaccccagtgcttagaacagtgctcagtacacagtaagttcacaataaatatt

SEQ ID NO: 943365 - DNA, 895 bp, Homo sapiens
ggcctcaaaggacctttcctttaggtcatattcctcagaaagtcttcgctcttcagtttttattttttcttaaagaatatttttaaagctcaaatttgtgtaataatttgggactttatttagaattattggctgctggcagcagcaggctattctgaaatgtctcataatatacatatacacacacacacacacacacttttttttttcttttttttttggcagggtcttgtcctgtcatccaggctggagtgcagtgatgtgatcttggctcagtgcaatctctgcctcccaggctcaagtgattcttgtgcctcagcctcctgagtatctggaattacaggcatgtgccaccatgtctggctaattaaaaaaaaatttttttttttggtagagacagggtttcaccatgttggccaggatggtctcaaactcttggcctcaagtgatcagcctgcctcccaaagtgctgagattacaggcatgagccactgtgcctggccaaatatatacacacacgcacacacacacacacacacacacacacacacacatatatatatgtgtatatatatatatgtatacatttaataaatatggtgtkggtgaaaaaaaccaaatatctaaaaatattatggaaatgcttgggaactgggtaatgattacaggctggaagagttttgaggtgcatgctagaaatatgaatgttagaatgattctgctgagatatcagatggagatgaagaacacgttactggaaactggaggaaaagtgatgctcgttctaaagtggcaaagaacttggctcaactgtgttctagtatttttgtggaaggtagactgtgtgagcgataaaatcagatatttagctgaagagatttctaagcaaagtgct

SEQ ID NO: 943366 - DNA, 662 bp, Homo sapiens
ttcaccctgcgcaagcttccagcttgcttatctgtgtctgcagctcgattttacaggctgctctttgttagaaaagaaattatttggggttgctttttgttaaaaggcaagccttgccaaggactcctttaccctcactatctgcctaaataacttctttttagctcctgtagcaaaatgaccttttctgggtggttatgaagtagatccctggagaggggcatgtggtggctgytgaatgagccaatgtctgttctgggaagtcagggaccctgaacggaggtaccggctgaagctgtggcagaagaacataaattgtgaagatttcatggacatttatcacttctccaatcaatactcttataatttcctatgattgtctttactttaatctcttaatcccaccatctttgtaagctgaggatgtttgccacctcaggaccctgtgatggttgctttaactgtacaaattgtttatcaaacgtgtgtttgaacgatatgaactctggtcatcctgaaaaagaaaaggataacagcgattttcagggaacaagggagataaccacaaggtctgactgcccacagggccgggcagaacagagtcatattttcttcttgcagaaagtgaataagagaaatatcactgaattcttttctcagca

SEQ ID NO: 943367 - DNA, 632 bp, Homo sapiens
atcccagctacttgggaggctgaggcaggagaatctcttgaacctgggaggtggaggttgcaatgagccaagatttcaccactacactccagactgggcaacagagcaagactctgtctcaaaaaataaactaaaaaaaaaaataaaatatacattaaaaaaaataaatattttttaaagaagttctggagctgaaaacgcgattggcacactcaagaatgcatcagagtctttaaatagtagaactgattaagcagaagagagaactgatgagcctaaaatcagtctatttgaaaatacacagagragacaaaagaaaaaagaataaaaaacaataaggcacacctacaggatctagaaaataccctcgaaagggcaaatctaagagctacttaaaaaagaggcagagaaaaaaataggggtaggaagtttattcaaagaaataacagagcttttcaaacctagagaagttaggtttgagaagataaagatgtcaatatccaagcacaagaaggttatagaataaagagcagatttatcacaaagattacctcaaggtgtttaataatcaaattcccaaagatcaaagataaagaaatgatcctaaaagtagcaagataaaataaacaaat

SEQ ID NO: 943368 - DNA, 747 bp, Homo sapiens
ctttgctaaaacctctcaaggcataaaaccagcagttttatggaaaaatgtgaacagtaataaatggtgtggtccaaataaattattaacatgagaaagaatgtgtgcatatgtccacccctagaaagagaaataaagggaaagaatgatttaaaaagaaactagaagaaacagatcagaaagagacacaaaaagaaagactaaggaaagaaagtgggaagaaggaaaaggaaatatttwaaaagttattaatataagaatgcacccttagtaaggaagattacaaaacagagttaaaaagttaaggcatgtcaaaaattgtctgtgaaagtcgtgaagaatgttataaaagggattcatgcaggaaatgtataatttttgttttgaaagtctaagcaagttgtaaaatgttaattgtaaaaaattctatatgtaaacatattggctaaatttaaaaaagtatccagtttttttctgtaaactagacattaaaatgaagcacaagtttttcttgaagtactatcctgctctttaaagattataaagatctcttagcacaggtaccacccctagaatttccagtacaccagcaccagcctggagactgtatcctcatccaaggatggaaagaaaaaaaactcaagccagcctaggaaaaaccctaaggacccacagcctcaacaatgtggcttccaggaacagcacaggcctcacacattatgctaaggaagcagaaggctaagccaa

SEQ ID NO: 943369 - DNA, 730 bp, Homo sapiens
tgtaattcaagagcctatctgcacaaatggccaataagcacataaaaaatgttcaatattatgagtcattagggaaatgcaaaccaaaaccacaatgaaatatcattttacatttactagaatggctataattcttttaaaggggataaataacagttattgacaaggatgtggagtgaaaagggaacgcttgtgctttgctggaaggaaagaaagagtgcaaccactgtggaaaacagtttggcagttcctccaaaagctaaacatagaactaccatgtaattcagcagcttcactcctagacatatacctcaaagaaytgaaagtaaggcctcaaacatatttgtatactcacattcatagcaacgttattcacaatagccaaaggtgaaaacaacacaaatgtccatcaacagatgaatggaaaaacaaaatatggtgtatatatacagtagaatattattcagccacaaaaaagctaaattttgatatatgctacaatattaatggaccttgatgacgttatgctaagtgtaataagtcagatacaaaatgatatatacatattgtatgaatccacttttgtgacatgcccaaagtagagaaattcatggagaccatagaatagaggttaccaggatctgggagggaggggagtatgaggagttgtttaatgggtacagagttcatgctggagatgatgaaaaagttttaggtgtacgtaatagtg

SEQ ID NO: 943370 - DNA, 730 bp, Homo sapiens
tgtaattcaagagcctatctgcacaaatggccaataagcacataaaaaatgttcaatattatgagtcattagggaaatgcaaaccaaaaccacaatgaaatatcattttacatttactagaatggctataattcttttaaaggggataaataacagttattgacaaggatgtggagtgaaaagggaacgcttgtgctttgctggaaggaaagaaagagtgcaaccactgtggaaaacagtttggcagttcctccaaaagctaaacatagaactaccatgtaattcagcagcttcactcctagacatatacctcaaagaactgaaagtaaggcctcaaacatatttgtatactcacattcatagcaacgttattcacaatagccaaaggtgaaaacaacacaaatgtccatcaacagatgaatggaaaaacaaaatatggtgtatatatacagtagaatattattcagccacaaaaaagctaaattttgatatatgctacaatattaatggaccttgatgacgttatgctaartgtaataagtcagatacaaaatgatatatacatattgtatgaatccacttttgtgacatgcccaaagtagagaaattcatggagaccatagaatagaggttaccaggatctgggagggaggggagtatgaggagttgtttaatgggtacagagttcatgctggagatgatgaaaaagttttaggtgtacgtaatagtg

SEQ ID NO: 943371 - DNA, 596 bp, Homo sapiens
acctgaatgaagtgatgtaatggaaaatagaagtgtttgaaggaagattgctttagtaactgaggaggagagaggaaagaggagaaactgcacaagtgggtagagatgggaaagtccatggcctatggggaaggtgaggaagttgacttttattttcaatgtgccgtgaggctgttgagatcactcagaattggaaaagaaacagaccatgtgttccaatagaataccattagctgttgttataataattcactgttatttattgagcagttatattttgtcaggcactattggtgctgctggttttacatatcttattattaattcttcataacaaccatgtgaaataggttgattggacrtcattttacaaagtgagatctggaaagattaagcagtttaacaaatattatatgttcgcttaattgaaagtaactaattcaaacaaagatctgttaggctcaagcacatgcactgagggaacaactagcagttcgctagtcctaattttcttatttttaccattaaaaatttgaagcttacatacaaagctgtgagtcaactaagggagatatttaagtactgtgggtattaat

SEQ ID NO: 943372 - DNA, 764 bp, Homo sapiens
tcgttaagcatacacaagtatcaacagtcaaattgatcaagtggaagaaaggatatcagaaattgaagatcaacttaatgaaaaaagcataaagacaagattagagaaaaaaagaatgaaaacatatgaacaaagcctccaagaaatatgggactacatgaaaagaccaaacctacatttgtttgttgtacctgaaagtgacggggagaatggaaccaagttggaaaacacttttcagggtattatccaggagaacttccccaacctagcaagataggccaacattcaaattcaggaaatacagagaacaccacaaagatactcctcsagaagagcaaccccaagacacataatcgtcagattcaccaaggttgaaatgaaggaaaaaatgttaagggcagccagagagaaagatgaggtacccacaaagggaagcccatcagactaacagtggatctctttgcagaaaccctgcaagccagaagaaagtgggagccaacattcaacattcttaaagaaaagaattttcaacccagaatttcatatccagccaaactaagcttcacaagtgaaggagaaataaaatcctttacagacaagcaaatgctgagacattttgtcaccaccaggcctgccttaaaagaactcctcaaggaagcactaaatatagaaaggaaaaactggtaccagccactgcaaaaacataccaaattgtaaagaccattgacactatgaagaaactgcaacaactaacgggcaaaata

SEQ ID NO: 943373 - DNA, 623 bp, Homo sapiens
tctgttggagtttgctggaggtccactccagaccctgtttacctgggtatcagaagcagaggctgcagaacagcgaatattgctgaacagcaaatgttgctgcctgatcgttcctctggaagtttcatctcagaggggtacccggccatgtgaggtgtcagtctgcccctactcaggggtgcctcccagttaggctactcagggttcagggacccacttgaggagacagtctgtccattctcagatctcaaactctgtgctgggagaaccactactctcttcaaagctgacagacagggacatttaagtctgcagaggtttcttctgccttttgttcagctaggtcctgcccccagaggtggagtctacagaggcaggcagccctccttgagctgcggtgggctccacccagctcgagcttctcggccgctttgtttacctactcaarcctcagcaaaggtgggcacccctcctccagccttgctgccaccttgcagttcgatctcagactgctgtgctagcaatgagtaaggctccatgggcatgggaccctccaagccaggcatgggatataattgtgccatttgctaagaccattggaaaagcgcagtattagggtggga

SEQ ID NO: 943374 - DNA, 575 bp, Homo sapiens
accactcccactactaacttttttgttgttgttgttttgtttcgttttgagacggagtcttgctctgtcaaccaggctggagtgcagtggcacgatctcagctcactgcaagctctgcctcccaggttcatgccactctcctgcctcagcctcctgagtggctgggactacaggcgcctgccaccacacccggctaattttttgtatttttagtagagatggggtttcatcatgttagccaggatggtctcratcccctgatctcatgatccacccacctcggcctcccaaagtgacccactactaacttaaacaagctacttggaggccccaaaatcatccctccaggaccaactagcactggggccagtataggctgttctggggcctaaaaacaggcacatttaccccactctgccaccactggggtctgaagcctggttcagttagcatccaagtccccatcaaaactttgccacaacatcaactaataactaccttaagtcactgaggaaatcacagttaatacagactctgtgtactgctgaagaagtcatacaaaattatactatcac

SEQ ID NO: 943375 - DNA, 423 bp, Homo sapiens
aaaacatactttgtaagatctcaatttctttaaatgtattaagacttactttgtagcctaatatatggtctgttttggagaatgttccatgtacacttaagaatatattgtgctgatgttgggtgagtttaggtgttgacatgttacatttgagcatacatgtaggtggagatgtgagatattcatttaggagaaaagccaagggaagaaatttgttaatgaactgtaaagaggggttgacattcacaagaatatgtaatttttwaaaaaaaaacaaatttagagcgatagaacagccttgaatatattcttatttagaaggctgaagtttgaatatagcctggagtgttagaaaaggatggaacagtttatcatagaccagagccaagagagtataatatttagattttaaatatcaaaaag

SEQ ID NO: 943376 - DNA, 423 bp, Homo sapiens
aaaacatactttgtaagatctcaatttctttaaatgtattaagacttactttgtagcctaatatatggtctgttttggagaatgttccatgtacacttaagaatatattgtgctgatgttgggtgagtttaggtgttgacatgttacatttgagcatacatgtaggtggagatgtgagatattcatttaggagaaaagccaagggaagaaatttgttaatgaactgtaaagaggggttgacattcacaagaatatgtaatttttaaaaaaaaaacaaatttagagygatagaacagccttgaatatattcttatttagaaggctgaagtttgaatatagcctggagtgttagaaaaggatggaacagtttatcatagaccagagccaagagagtataatatttagattttaaatatcaaaaag

SEQ ID NO: 943377 - DNA, 612 bp, Homo sapiens
ggagacatgtcagcccatcacacttctgaatttacatgtgattcctctatgcagacaactttgcatcccctgaggaaagatagtggtttttcttaagagaaaatgacatttgtaataggaattttaagattttattacttcttctttcatctcctcaaaggaatgaagaaatgktggtgggcagatcttcctttcccatgcagtattttccaattaataatacttctttacctcaagaatattttctctttcagaagatggtaagtttaatatgcattttatttagtatataatatgatacaaactatgaagaacataaaggctatttgtaacatatggtgcccaaatctaaactgggatgaaggcacaagatgtcccagcactgtcctccagtggtgtcctggcctaacaccatcatcctaaatttcagttctaatgccttagcaaatggccagggtgtcaacagaaaagggatggacggcagtgacgacatactgcagtccaagtgaaatttgagtagagagttctaatgtaaatgactattttaaaagacgtttgcagtggccagacatggtggttcacacctataatcacagcattttgggaggccag

SEQ ID NO: 943378 - DNA, 612 bp, Homo sapiens
ggagacatgtcagcccatcacacttctgaatttacatgtgattcctctatgcagacaactttgcatcccctgaggaaagatagtggtttttcttaagagaaaatgacatttgtaataggaattttaagattttattacttcttctttcatctcctcaaaggaatgaagaaatgttggtgggcagatcttcctttcccatgcagtattttccaattaataatacttctttacctcaagaatattttctctttcagaagatggtaagtttaatatgcattttattyagtatataatatgatacaaactatgaagaacataaaggctatttgtaacatatggtgcccaaatctaaactgggatgaaggcacaagatgtcccagcactgtcctccagtggtgtcctggcctaacaccatcatcctaaatttcagttctaatgccttagcaaatggccagggtgtcaacagaaaagggatggacggcagtgacgacatactgcagtccaagtgaaatttgagtagagagttctaatgtaaatgactattttaaaagacgtttgcagtggccagacatggtggttcacacctataatcacagcattttgggaggccag

SEQ ID NO: 943379 - DNA, 579 bp, Homo sapiens
ctgaagaaccagtcctgcaatatttaaactttatcatcacccatttgctcctgttatttattacatatatacaactgtaattatagtttggaccaaatatccatgtagttaaactcagttgtcactttattttctaaaactccttctggatggcaaaaattttctggtttaaagcaaaataattaagccattgcgttttacataggatagttagggatgattcttaaatttttttttttttttttttttttttttttttttttttttgagacggagtctcgctctgtcgcccaggctggagtgcagtggcrcgatctcggctcactgcaagctccgccccctgggttcacaccattctcctgcctcagcctcccgagtagctgggactacaggcgcccaccagcacgcccagctaattttttgtatatttagtaaagacggggtttcaccatgttggccaggatggtctcgatctcttgacctcatggtccacccgcctggtcctcccagagtgttgggattacaggcgtgagcccccgtgcccggccaattcttaaaaattttaaactcaacatttta

SEQ ID NO: 943380 - DNA, 580 bp, Homo sapiens
aagttccaatactatgttgaataggagtggtaaaagagggcatccttgtcttgtgctggctttcaaggggagttcttccagcatttgcccagtcagtatggtgctggttgtgggtttgtcacagatgactctcattattttgaggtatgatccatcactacctagtttattgagagtttttaaaatgaaggaatgttaaattttatcaaaacacttttctgcatctattgagataatcatgtggtttttgtcttagttttttgcctttgtttacgtgatgaatcacatttattgatttgcatatgatgaaccaacctagcatctaggggatgaatcctacttactcatagtgaatacactttttgatgctgaatttggtttgccagtatttttytggattttttgaattgatgttcatcaaggatattggcctgaagttttcttattttgttgtatctctgccaggttggtaccaggatgatgctgatctcatagaatgagttatggatgagtcctcttcttcacttctttggaatagtttcagtagagatggtatcagctcttctttgcacttctggta

SEQ ID NO: 943381 - DNA, 639 bp, Homo sapiens
tgtcttaccctgagctttttaaggttagtaggctatttattactacctcaatttgaaaacacacttttggtctgttcaggaattccatttctacctggttcagtattgggaaggtgtatgtgcccgtgaatttattcatttcttctagattttctagtttgtgtstatagaggtatttataatattctccgatggttgtttgtatttctgtggggtcagtagcaatatctcccttatcatttctgattgtgtttatttgaatcttcccctcttctttattagtctagctggtggtctaactctttcacttatttattcaaaaaaaaagaaaacacctcctgaatttgttggggttttgaatggtctttcatgtctctatctcctccagttcagctctgattttggttacttcttgtcttctgctaagtttgaaatttgtttactctttgttctctagttcttttagatatgatgttgggttgttaagatctttctaattttttgatgtgggcacttaatgctataaattttcatcttaacactgccttagctgtgtcccagagattctggtaggttgtatctttttttctcattagtttcaaataacttcttgctttctgccttaatttcattattttc

SEQ ID NO: 943382 - DNA, 820 bp, Homo sapiens
aagttgaatctctgaatagaccaataacaggctctgaaattcaggcaataattaatagcctatcaatcaatcaaaaaaagcccaggacctgatggattcacagccaaatactaccaggggtacaaagaggagctgttaccattccttctgaaactattccaatcaatagaaaaagagggaatccttcctaactcattttatgaggccagcatcatcctgataccaaagcctggcagagacacaacaaaaaaagagaatttcagaccagtatccctgatgaacatcgatgcaaaaatcctcaataaaatactggcaaacagaatctagcagcacatcaaaaagcttatccagcacgatcacgttggcttcatccctgtgatgcaaggctggtttaacatacacaaatcaataaatgtaatctgtcataaaaactgaacaaaaacaaaaaccacatgattatctcaatagatggtgaaaaggcctttgacaaaattcaamaatgcttcatgctaaaaactctcaataatctaggtattgatgggatgtatctcaaaataataagagctatttatgacaaacccacagccaacagcatactaaatgggcaaaaactggaagcattccctttgaaaactggcacaagacagggatgccctctctcaccactcctgttcaacatagtattggaagttctggccagggcaatcaggcaggagaaagaaataaacggtattcagttaggaaaagaggaagtcaagttgtccctgtttgcagataacatgattgtatatttagaaaaccccattgtctcagcccaaat

SEQ ID NO: 943383 - DNA, 756 bp, Homo sapiens
tctatcagacattcaaagatttgataccaatcctattgaaactatttcaaacgatagagaaagagggactctccctaattatgttatggagccagtgtcaccctactaccaaaaccaggaaataacataacaaaaaaagaaaactagagacaaacgtctctgatgaatgttaatgcaaaaattctcaacaaaatattagctaaccaaatccaacagcatatcaaaaagataatccaccatgatcaagttggtttcataccagsgattcaaagatggtttaatatacctaaatcaataaacatgatacaccacataaacagaatcaaaaagaaaaatcacatgatcatctcaatagattcagaaaagcatttgataaaatccaacattgctttatgattaaaactctcagtaaaactggtgtagaagggacataccttaaagtaataacagatatctatgacagactcacagccaacattatactgaatgtgatagtgttaaaagcattcccctgagaacttcgacaagccaagaatgcccactttcaccacttctattcaacatagtattggaagtcctacccaaggcaatcagagaagagaaaaataaagggtatccaaatcggtaaagatgaagtcaaactgttgctgttcaccaatgatattatcatataactagaaaaccccaaagactcatccaaagagctcctaggtctgataaatgaaagtttcaggatacaaaatcaatgtacataaa

SEQ ID NO: 943384 - DNA, 756 bp, Homo sapiens
tctatcagacattcaaagatttgataccaatcctattgaaactatttcaaacgatagagaaagagggactctccctaattatgttatggagccagtgtcaccctactaccaaaaccaggaaataacataacaaaaaaagaaaactagagacaaacgtctctgatgaatgttaatgcaaaaattctcaacaaaatattagctaaccaaatccaacagcatatcaaaaagataatccaccatgatcaagttggtttcataccagcgattcaaagatggtttaatatacmtaaatcaataaacatgatacaccacataaacagaatcaaaaagaaaaatcacatgatcatctcaatagattcagaaaagcatttgataaaatccaacattgctttatgattaaaactctcagtaaaactggtgtagaagggacataccttaaagtaataacagatatctatgacagactcacagccaacattatactgaatgtgatagtgttaaaagcattcccctgagaacttcgacaagccaagaatgcccactttcaccacttctattcaacatagtattggaagtcctacccaaggcaatcagagaagagaaaaataaagggtatccaaatcggtaaagatgaagtcaaactgttgctgttcaccaatgatattatcatataactagaaaaccccaaagactcatccaaagagctcctaggtctgataaatgaaagtttcaggatacaaaatcaatgtacataaa

SEQ ID NO: 943385 - DNA, 537 bp, Homo sapiens
atgcccatgctgctatctggaaagagagaaactttctcacagctaatgggtctcccattaaataccaacaggaaattaattgactatcatcctcagttttcatcccwtaggaagtagcagtaacacaatgtgaaggcccccaaaaggaatggataaagtaactgagggaaataggttggaagactaagcagctaagtcagcagagagagggcctcagatttctgatccacttgaagccccactggtctgggagggcctcataggagaaataaaacttcagtattctcctatggaaatagaatggggcacctcttggggttacatctttcagtcctcaggatggccacaattggaggatgccaagcttcatctactggctgccaaacaatggaaagttcttaaaagccttcaccaggcctttcacctgggtaaagataaaacctttcaaatggttcagagattgttctcaggtaaaaacctgacacaaatagttaaacaggttgttaatgcttgcaagatttgccttaaaaatcatcc

SEQ ID NO: 943386 - DNA, 602 bp, Homo sapiens
aagcctgaaaactgagttaccagcgtccacaaccagagtgagaacttcctcagtgccttttagccaatttaatggtgctttgtccaggcccacttatggaccaatcagcacacactcccccattctgatcccataaaaaccctggactcagccacatattgggactacatgctttcaggtaggggctacccacttcaggtcccctcttgtgtcaagagctgttctgttgtctcttctctgccttgcttattctccagttgtccatgtaacctcattcttcttggacatgggacaagaacccagtacccaccaaatggcaggtgcaaaaaatgctgtaacactgtagccctccaaccctcygctggcaccaggctgttgcttcatgtaacaggaagcagtggcaatggggccaggccagccaagaagctatgagctggaatgtgggcagcaggactgaacaagctgtaaaacaaatgagctgaaacttgctgccctcccacccccattcactgtgctgcaggcagtggaaagaagagagagatgtatcactccttgagggctcagacctcaggactccccaagcaactgtaacaccccttggg

SEQ ID NO: 943387 - DNA, 602 bp, Homo sapiens
aagcctgaaaactgagttaccagcgtccacaaccagagtgagaacttcctcagtgccttttagccaatttaatggtgctttgtccaggcccacttatggaccaatcagcacacactcccccattctgatcccataaaaaccctggactcagccacatattgggactacatgctttcaggtaggggctacccacttcaggtcccctcttgtgtcaagagctgttctgttgtctcttctctgccttgcttattctccagttgtccatgtaacctcattcttcttggacatgggacaagaacccagtacccaccaaatggcaggtgcaaaaaatgctgtaacactgtagccctccaaccctctgctggcaccaggctgttgctycatgtaacaggaagcagtggcaatggggccaggccagccaagaagctatgagctggaatgtgggcagcaggactgaacaagctgtaaaacaaatgagctgaaacttgctgccctcccacccccattcactgtgctgcaggcagtggaaagaagagagagatgtatcactccttgagggctcagacctcaggactccccaagcaactgtaacaccccttggg

SEQ ID NO: 943388 - DNA, 628 bp, Homo sapiens
gccaagagagcgttgacatcaccccttctctaaccccaggatgcacagctcacagctcgaaaatagtccccatccttccacttgaagagaagagaggaagagtgtgggtgactttgtcttgcattttggatgctagctcagccacagcaggatggggcactagttagagttgtaagtccttygatacaggccttagctcccagaccacatttctagacacggcctgagccagaaaataaatcctctgccttgaagtcaagaaacaagtcctgacaacatttatcacctaactgaagaaccgttgggccctgaacaaccagatctacacccagatactgtcaagggccttgggtgagcctctgaggcttactggctttaggtgagattcaacatattaccagcagtggtggtgaagggatgaaattccttctacttgagaaaagcagaggaaaaagtaaaggagactttgtcttgcacctcaggtactaactcaaccacggcagggtagagcaccaagcaggctcctgggggtgtgggggggggggggtccccgatttcagcactggattctcggacagcatctctggacctgccctgggctggaggggagcttcctgccctaaaggtt

SEQ ID NO: 943389 - DNA, 628 bp, Homo sapiens
gccaagagagcgttgacatcaccccttctctaaccccaggatgcacagctcacagctcgaaaatagtccccatccttccacttgaagagaagagaggaagagtgtgggtgactttgtcttgcattttggatgctagctcagccacagcaggatggggcactagttagagttgtaagtcctttgatacaggccttagctcccagaccacatttctagacacggcctgagccagaaaataaatcctctgccttgaagtcaagaaacaagtcctgacaacatttatcacctaactgaagaaccgttgggccctgaacaaccagatctacacccagatactgtcaagggccttgggtgagcctctgaggcttactggcttyaggtgagattcaacatattaccagcagtggtggtgaagggatgaaattccttctacttgagaaaagcagaggaaaaagtaaaggagactttgtcttgcacctcaggtactaactcaaccacggcagggtagagcaccaagcaggctcctgggggtgtgggggggggggggtccccgatttcagcactggattctcggacagcatctctggacctgccctgggctggaggggagcttcctgccctaaaggtt

SEQ ID NO: 943390 - DNA, 600 bp, Homo sapiens; identical to SEQ ID NO: 942927

SEQ ID NO: 943391 - DNA, 702 bp, Homo sapiens; identical to SEQ ID NO: 942915

SEQ ID NO: 943392 - DNA, 577 bp, Homo sapiens
tgacaccagtttcttttttcttttttttttttttttgagacagagtctcgcactttcgtccaggctagagtgcagtggcgggatctcggctcactgcaagctctgcctcccaggttcacgccattctcctgcctcagcctcccgagtagctgggtctacaggtgcccgccaccrcgcccggctaatttttgtatgttttttttagtagagacagggtttcaccgtgttagccaggatggtctcgatctcctgacctcgtgatccacccgcctcggcctcccaaagtgctgggattacaggcgtgagccaccgcacccggccgacaccagtttctaaatgctttgctgcatttccccctatttttttttttaataattcatcctcctgaaacataaaccccaaaatgtcatccacttgctgaaaaccttggtttgcataactctctgtttgcaacaactgttttctctggggttgtccatattttgggttaagaccttcactaatggccaggactcagcccacagaaaagggagtgtcagggtttggcagatcgttaggccccagtcaagtaattaag

SEQ ID NO: 943393 - DNA, 657 bp, Homo sapiens
aagaccgctcaaggagagtctgaggtcagacacgcctgccactgcctctacctgatggtccttccctacctaccctggtaactgaagacaaagggcatatactcttgggagttcaagggggtggtggtgccccccaccacctgttcctccccattctactaccgctgatgctcttgaaatcaccaccttccgcaggaggacaaccarcccaaaaatagtgcattaagcaaccaaagccaaggaccctcacagagcccattttactcccccaccacctccaccagagcagatgctggtatcaatggcagaaagactcacagatggttcacatcagaggattctgtgcagacaacctccagtaccagcccagagcctggtagacttgctgggttgctagatccagaagagagataacaatctttacagcttggctctcaggaagccacatccctaggaaaagggggagagtactacatcaagggaacactccatgggacaaaacaatttgaacaacagcctttggccttagacctctgtgacaaatgagaagaaaccagaaaaccaactctggcaatatgacaaaacaatgttcttcaccacccaagaaaaaatcacactagcccaccagcaatggattccaaccaagaagaagtccct

SEQ ID NO: 943394 - DNA, 658 bp, Homo sapiens
cagctgcaccattttacattcccaccatcagtgcacagggtttccaatttctccacactctcaccagcatttgttattttctaatttttggataatggccattctaatagttaggaggtgatatctcactgtggtttttgatttgcatttctccaatgattagtgacattgagcatcttttcatttgcttgttggtcctttgtatatcttctttagagaaatgtctattcaagtcctttgctcacttttaaatcacgtttttgtgtttttttgatgttgagttgtaggagttcttatatattctagatattaaccccttatcagatatatcatttgcaaatattttctcccattctttttttttttctttttctcccattcttcaggatgcctttttactttactagttgtttcctttgctgcacaggagtttttaaatttgatatagtcccatttgtctatttttccttttatcacttggggttaycaggtcatatccaagaaatcattgccaaatacatgatcacaaagcttctgccttatgttttcttatagttagtcgttttatagtttcagatcttatggttaggtggttaatccatttcgaattgatttttatatatgttatagggtatccaacatttttcttttgcaattg

SEQ ID NO: 943395 - DNA, 632 bp, Homo sapiens
gcggaggggctcctcacttctcagacggggtggttgccaggcagagggtctcctcacttctcagacggggtctcggccgggcagaggcgctcctcacatcccagatggggcggcggggcagaggcactccccacatctcagatgatgggcggccgggcagagacgctcctcacttcctagatgtgatggcggctgggaagaggcgctcctcacttcctagatgggatggcggccgggcggagacgctcctcactttccagactgggcagccaggcagaggggctcctcacatcccagacgatgggcggccaggcagagacactcctcacttcccagacggggtggcggccgggcagaggctgcaatctcggcactttgggaggccaaggcaggcggctgctccttgccctcgggccccgcggggcccgtccgctcctccagccgctgcctccygggcggccgaggtgaaatatttctacaaggaaaactacaaaatattgatgaaagaaattgtagacgacacaagcaaatggaaaactatcttatttaatggatcagaagaattagtatcattaaaatgaccataatgcccaaaacaatctacagatttaatgcaatttccatcaaaatgc

SEQ ID NO: 943396 - DNA, 711 bp, Homo sapiens
tggatcatgggaatggttccctacatgtttttttcatgatagtgagtctcaggacatctgaagtttttatgagtgtctggcatttcccctgcttgcactcccttcatcctgccacactgtgaagaaggttcctacttctttttttgmcttccaccataattgtaagtttcccgaggcctcatcagccatgtgtaactgtgaatcaattaaaattctttcttttgtaaattactcagtcttgggtattccttcatagcagtgtgagaacagactaatataggcagcatacactgttctggtaccaaagtggtatcagagaaggccagctaaaatagtgtgtttaaataaggtccacagtacttaaaatatccagattttattcaaaaagtcattaatcataccagaaccaggaatatcttaagtgagaaagaaaacaaaatgaccgaggtgtgttgacaaaaagatactaattctgtaaaatatttgaagagatttattctgagccaaataggagtgaccatggcccgtgacacagacttaggaggtcctgagaacatatgcccaaggtggttggggtgcagcttggttttataaattttagggaggcttgagacatcaatcaaataaatttaagaaatacattggtttggtccagaaaggcaggacaagtcaaagagggggcttccagactgtaggtaaatttaaacattt

SEQ ID NO: 943397 - DNA, 711 bp, Homo sapiens
tggatcatgggaatggttccctacatgtttttttcatgatagtgagtctcaggacatctgaagtttttatgagtgtctggcatttcccctgcttgcactcccttcatcctgccacactgtgaagaaggttcctacttctttttttgccttccaccataattgtaagtttcccgaggcctcatcagccatgtgtaactgtgaatcaattaaaattctttcttttgtaaattactcagtcttgggtattccttcatagcagtgtgagaacagactaatataggcagcatacactgttctggtaccaaagtggtatcagagaaggccagctaaaatagtgtgtttaaataaggtccacagtacttaaaatatccagattttattcaaaaagtcattaatcataccagaaccaggaatatcttaagtgagaaagaaaacaaaatgacmgaggtgtgttgacaaaaagatactaattctgtaaaatatttgaagagatttattctgagccaaataggagtgaccatggcccgtgacacagacttaggaggtcctgagaacatatgcccaaggtggttggggtgcagcttggttttataaattttagggaggcttgagacatcaatcaaataaatttaagaaatacattggtttggtccagaaaggcaggacaagtcaaagagggggcttccagactgtaggtaaatttaaacattt

SEQ ID NO: 943398 - DNA, 565 bp, Homo sapiens; identical to SEQ ID NO: 943152

SEQ ID NO: 943399 - DNA, 565 bp, Homo sapiens; identical to SEQ ID NO: 943153

SEQ ID NO: 943400 - DNA, 631 bp, Homo sapiens
gtacagctgggtatagagggacaacggcctcattgataaccctgagatcttgcactaacctccactgtccgttgggtttctgtactcataaaattggagtattgcaggtgctactgcatgcttttactaggccttgggcttttaggtccttaacaatcttttggagtccttgttgggccttgggtctaaggggtactgcctttggtagggaaaggaggtggaatcctttagtttaacttgaacaggatgggcattctttgctcatctatattgtccytccgttgcctagacttcaggattaattccttcctcaagcaggggacaacaaatgggtgttccttctcctatgttcaggtgtataatggcccttgcttttgctagaatgtctctccttaataagggagtggggctttcaggcataattagaaaagcatgtgaaaagagtaaagctccacagtcacagcttagtggctgggagaagtatctagtgactggctgtcctaggactcctcagatagtgacagatctggaggacagttgtctgggacaggagagtaagactgagaaggccgtgccagtgtccaggagacagttaacctcctggccctcaatggtcaagcatatctggggc

SEQ ID NO: 943401 - DNA, 631 bp, Homo sapiens
gtacagctgggtatagagggacaacggcctcattgataaccctgagatcttgcactaacctccactgtccgttgggtttctgtactcataaaattggagtattgcaggtgctactgcatgcttttactaggccttgggcttttaggtccttaacaatcttttggagtccttgttgggccttgggtctaaggggtactgcctttggtagggaaaggaggtggaatcctttagtttaacttgaacaggatgggcattctttgctcatctatattgtccctccgttgcctagacttcaggattaattccttcctcaagcaggggacaacaaatgggtgttccttctcctatgttcaggtgtataatggcccttgcttttgctagaatgtctctccttaataagggagtggggctttcaggcataattagaaaagcatgtgaaaagagtaaagctccacagtcacagcttagtggctgggrgaagtatctagtgactggctgtcctaggactcctcagatagtgacagatctggaggacagttgtctgggacaggagagtaagactgagaaggccgtgccagtgtccaggagacagttaacctcctggccctcaatggtcaagcatatctggggc

SEQ ID NO: 943402 - DNA, 658 bp, Homo sapiens
gattgtgcatacccagattgggagtgagtctgcctttcccagtccactgactcaaatgttaatcttctttggcaacaccctcatagacacacccaggaacaatactttgcatccttcaatccaatcgagtcaaccttcaatgcatcacaccctccattccccaaagttccccagaatatttagyctttttcttcttttcttttttgtgtatctatagttggaattttatccacctataaaagccaatgaagtactaatacatgctacaatttagacacaaaaatatgaacctaggtgaaagaaaccagacacaaaggtcacagatggtgtgatcacatttatatgaaacattcagaagctggaaatgcagagacagaaagcaggttgatggttgtcaggggcttgcatgaggaaggagtggagagtgattgctccatggaactcagttccttgttggcatgatgagagtcctttggactagatagaggtggttgttgcaacactgaaaatgtactaaatgccaccgaattatatactttaaaagagggatttcctaagtcccaggccatggaccagtactagtctgtggcctgttaggaactgggtcgctcagtaggaggtgaggaaggggccagcaagcattaccacctgagctctg

SEQ ID NO: 943403 - DNA, 658 bp, Homo sapiens
gattgtgcatacccagattgggagtgagtctgcctttcccagtccactgactcaaatgttaatcttctttggcaacaccctcatagacacacccaggaacaatactttgcatccttcaatccaatcgagtcaaccttcaatgcatcacaccctccattccccaaagttccccagaatatttagtctttttcttcttttcttttttgtgtatctatagttggaattttatccacctataaaagccaatgaagtactaatacatgctacaatttagacacaaaaatatgaacctaggtgaaagaaaccagacacaaaggtcacagatggygtgatcacatttatatgaaacattcagaagctggaaatgcagagacagaaagcaggttgatggttgtcaggggcttgcatgaggaaggagtggagagtgattgctccatggaactcagttccttgttggcatgatgagagtcctttggactagatagaggtggttgttgcaacactgaaaatgtactaaatgccaccgaattatatactttaaaagagggatttcctaagtcccaggccatggaccagtactagtctgtggcctgttaggaactgggtcgctcagtaggaggtgaggaaggggccagcaagcattaccacctgagctctg

SEQ ID NO: 943404 - DNA, 615 bp, Homo sapiens
ttgttgctgtatctaaaaaggcatggccataccctaggtaatcttggttttctcctatgttatctcctagaaactttatagttttatacattaaacaacgttaatgtctataatctattttaacttagtcactgtgaataatgtaaggcactgtgtctacaaaartgtatatttttttgcctgtggatgtccaaatgtcccagcaccatttattgagatgatttttttaactttattgttttgattcctttgtcaaagatcaattaactatatttatgtaggtttattttgggtggattgatctatttgtctattctttttcacaaccacactgtattgattgccatagctttatagtatgccttaaaatcaggtagtttcagtcttcctaatttgttctactccttcaatatcaagttggctattctaggtcttttgcctcttcatattaactttaatatcagtttgccaatatccacaaaatagcttcttaaattattactgggggtggattgaatctatacagcaaattggaaaaactgacatagtgacaatcttgatttttcctatccataaatttggaatatctctcaatttatttagtactttaatttc

SEQ ID NO: 943405 - DNA, 638 bp, Homo sapiens
tctcacgtggtggcagacaagagaagagagattgtgcaaagaaactctccttttttaaaaccatcagatctcatgagacttattcactatcatgagaaaagcagagaaagacctgcccccataattcaattacctcctaatgggttcctcccacaatatgtgggaattcaagatgagattttgttggggaaacagccaaaccaaatgatctgcccctggccactccaaaatctcatgtcctcacatttcaaaatgaattatgccttcccaacagtcccccaaagtctaactcatttcagcattaacagaaaagtccacagtccaaagtctcatctgagacaagtcaagtcccttgcagctatcagcttgtaaaatcaaaagcaagttagctacttcctagatataatgagagtagaggcattgggtaagtactgccatttgaaagggtagaaattggccaaaacaaaggggttataggcctcaygcaggttcgaaatccagaggggcagtcacatattaaaactccaaaatgatctcctttgactccatgtctcacatccaggtcacgctgatgcaagaggtgggttcccatgttctggcacaactccacccctgtgactttgtagggtacagccttc

SEQ ID NO: 943406 - DNA, 562 bp, Homo sapiens
aaattgtctcaacagtagagagccagcttgcccaaggtgatgtttccttcccagagatgtctgtatgcaaagatggtttctagtggtgagtgagattggtgtaaagtgagactcctgactaaaatgttagacaatactgaagggccatgctgtcttccaaaatccccatgtggatgttggagtccatcacttagcatgtatcgtggttcaacttctccctttgcccaatgtattagtctgttctctcgctgctataaggaaatacttgagactgggtattttatttaaaaawatgttttaattggttttgcaggctgtacaggaagcattatgctggcatcttctcaacttctggggagccctcagaaaacttaacaattatagcagaaggcaaagggggagccggcacttcacatggctggcaaaggagaaagagagaggggggaaggtgccacacacttttaaacaaccagattccctgagaactcactattgcaatgacagcaccaaggcgggtggtgttaaaccatgagaaactgcccccatgattcaatcacctctc

SEQ ID NO: 943407 - DNA, 621 bp, Homo sapiens
ataagtgatggcacaaaggttgtgttattgctgaagcatatttgaatcttgctccatgccttcttttacttgttccatcagttctagctgccgactcaattctctcctccatgatgtattttgtgtttatcgctaattcaaaatgtatcacattgtatcataatttatggcttatctattctgttaaaaacttaatccattaagtaaagagttttattgactcatctattttcagtgcccaggaaratgcttagcatatagcccaatacatatactgaacgaaataattttaaaaatgaaattacattgttaatttttgtataatgagaaatgattaaattgaataaaagaccaatgtggaaaacacatctaaggattagcaaacgtgagcatgtcaaattattcctaaaacatgaaggtatacgtggaaattgcctaattatctaataaaaatataagtcaaataaaaattaaaaagctctttcattgcctttttaaaagtagaaatgcttaggcgaaattctatgccaaaagtcaataataataaaggtagatggccaaattaacatataaacatttaacatttgtatatgtgtacatatatatgtgtgtgtgtgtgtc

SEQ ID NO: 943408 - DNA, 535 bp, Homo sapiens
caatcagcccaggtaggattgtgagtctgtaaaatggtttggagcagatcaattaaggcctggggtttctcagtataagagggtgtattgtttttccaatttaagaaatcagcagaagtgaaaggctgatacagaaaggcacgtctttccaccatgtgcctgtcctcatcttccccagtacatcgctgctccctcaggggtgtttggattccagtcttaggtcataagtgggctgtcaagggagaagatttcctgcagcttcacttcctcttttgtctactctgggtggtctaggggtgtggatgtcttgcgagggtgtaggtgctatgggctcaggagtggggagccctccttctcagtaaggggggaccatcagtgccatctcctgycaggagtcatggggcatcgggtcagataggactttaggtgccgacctccctcagcaggtggagtgaaaaccttcctgaactgactatccctttgctactagtactgctgctgcctgccctcttagccactgagagggatctaaaag

SEQ ID NO: 943409 - DNA, 608 bp, Homo sapiens
gaagacaggaaaatgtgggaaagtttggaacttcctagagacttgttgaatggctttgaccaaaatcctgatagcgatatggacaataaggtctaggctgaggtggtctcagatggagatgaagaacttgttgggaactggagcaaaggtgactcttgttatgttgtagcaaagagactggcagcattttgcccctgccctagagatttgtggaactttkaacttgagagagatgatttagggtatctggtaaaaaaaattcctaagcagcaaagcattcaagagttaacttgggtgctgttaaaggcacttagttttacaagtgaagcagagcataaaagttcagaaaatttgcagcctgacaatgtgatagaaaagaaaaacccattttctgaggagaaattcaggctggctgcagaaatttgcaaaagttactaggagccgaatgttaatctccaagacaatggggaaaacgtctccagagcatgtcagaggtcttcacagcagcccttcccatcacaggcccagaggcctaagagaaaatggtttagtgggacaggccccctgtgctgagtgcagtctagggacttgatgccctgtgtcccagc

SEQ ID NO: 943410 - DNA, 586 bp, Homo sapiens
aacatacatcacatatcaaacaaggtaatgttttcttgtaatgtcatgacttttctatgattctcaggaccacttcaagcatcactaacggcattttgtatgagtctcacgctgttaatcaaggttcacagtcttgcactaaacatgaaaatatgtgagaaccataggagatcactttttactatagtacacaatttactggagagatgaactgctcacatggagattattaacattgcatggcttttcttttttctttttttttgagatgcagtcttgctctgtcaccaggctggagtgcagtgatgcaatctcggctcackgcaacctctgcctcccgggttcaagcgattctcctgcctcagcctcctgagtagctgggactacatgcaggtaccaccatgcccagctaatttttgtatttttagcacagatgaggttttaccatgttggccaggatggtctcgatctcttgacctcgtgatctgcctgccttggccttccaaagtgctgggattacaggcatgagccaccgcgcctggcctcattgcatgacttttaagctgatattggcaacacttgagct

SEQ ID NO: 943411 - DNA, 625 bp, Homo sapiens
ttttggatacccatactcagtgagtcccaagctcttgaccaacatacaagaagaatgagctcacaggggcaatttaaggatggtgaaggtgtttaatttcattgagtgatgaaaagggctttcagtgcagaggggagttggagagggagtgggaagggcaggttatcttctccaaagtcagggtgtctcttccatgaagtcrggctttctccctctctactgactgagtctggggtctttataggcacagggaggggagtgcgtgctgattggtttgtgagtatgcaaaaaatgttaacttgatgacaccactcaaaggtgggcacaacactgtagaaaaaacaattaggaaatggtggggatatgtaaaacaggtggaaggtggggatcaatccgaggaaagcatgccacacgggagtacacgttttcaatccagtctgaggaggtctgaggatttaacttgtagtttgggtgtcaggctttaaactgtcttcagcttggaggtgggatttcactgggtacccgcccctatctgcctaggcatttggctgccttctgttgttatcagtattttcttgtagttaaagcttattttacctatgcattttatataaatagtatggtc

SEQ ID NO: 943412 - DNA, 614 bp, Homo sapiens
gctgctgcaaaggacgtggtttcattcttttttatggctgcagagtattccgtgatgtgtatttgccatattttctttatccatccataacacatgttatttttaaatctcaaacagcttacaatctgcatagtgtacaatatatatgagtaaacacttgtgtaagtattgataattatcattcacagattatttaatacgtgtcytacattgttcaggacattcatacatatttcctcatttaattattaatatgctgtgatttattattattactcctactttttagatagaagcactcaacagttgagagccaaataatctgctaatattacagagtgtagaaatttcacacctggtactcaaacccaggccatcagacctcaatgcccttcctcttaaagtctaccccaggaaatcaaagagaaaactgaaaattggccaggagctagagggaatattacatacagtgcaacactgtcatacggctgacttcttagaagtaatggagactaaaatttaacaaaataacatatttagagttctaaaagattattttgtaatctgtcaacccagaactatctatctagtgggacaatcctttcaaatgaagc

SEQ ID NO: 943413 - DNA, 577 bp, Homo sapiens
attgaaaaggagggacttcttcctcactcattctatgaggccaacatcatcctgataccaaaatctgtcacaggtacaaccaaaaatgaaaacttaaaggcaataaccctaatgaacactgatgcaaaaaattctcagtaaaatactagtaaaccaaatccagcaacacatcaaaaaagcttatccacggtgatcaagtcaacttcatcctcgggatgtaagtcaacatatataaattaataaacataattcatcacataaacagaactaaagacaaaaaccacatgattatctcaatagrtgtagaaaaggcctttgataaaattcaacatccttttatgttaaaaactctcaataaactaggtatttatagaacataactcaaaataataagagccatttatgacaaacccagacccaatatcatgctaaatgggctgaaaacattcccctcgaaaacttgcacaatacaaggatatcatctctcaccactcctattcaacatcgtattgaaagttctggccagggcagtcaggcaaaggaaataaataaagagtattcaaataggaatagagga

SEQ ID NO: 943414 - DNA, 577 bp, Homo sapiens
attgaaaaggagggacttcttcctcactcattctatgaggccaacatcatcctgataccaaaatctgtcacaggtacaaccaaaaatgaaaacttaaaggcaataaccctaatgaacactgatgcaaaaaattctcagtaaaatactagtaaaccaaatccagcaacacatcaaaaaagcttatccacggtgatcaagtcaacttcatcctcgggatgtaagtcaacatatataaattaataaacataattcatcacataaacagaactaaagacaaaaaccacatgattatctcaataggtgtagaaaaggcctttgataaaattcaacatccttttatgttaaaaactctcaataaactrggtatttatagaacataactcaaaataataagagccatttatgacaaacccagacccaatatcatgctaaatgggctgaaaacattcccctcgaaaacttgcacaatacaaggatatcatctctcaccactcctattcaacatcgtattgaaagttctggccagggcagtcaggcaaaggaaataaataaagagtattcaaataggaatagagga

SEQ ID NO: 943415 - DNA, 637 bp, Homo sapiens
atgtatgtgtatttgaaaagtcattttatcagttgatatagtttggatatttgtcccctgaaaatctcttgttgaaatgtgagcccccatggccgggcgcggtggttcacacctgtaatcccagcactttgagaggcccaggcgggcagatcacaaggtcaggagatggagacaaacctggctaacatggtgaaaccctgtctctactaaaaatacaaraaaattagccgggagtggtggcgggcacctgtagtcccagctactcaggaggctgaggcaggagaatggcgtgaacccaggaggcggagcttgcagtgggccaagatcgtgccactgcactccagcctgggcgacagagcaaaactccgtatcaaaaaataaaaaataaaaaaaaaagaaatgtgagcccccagtgttggagtgggtcctagtgggaggtgtttgcgtcacaggggccgatccttcgtgaatggctggacgtcctccctgtagttatgagtgacttctcacactactattagttccctgaacagtcagtttttcctctccacaatctccacactcttgctccctctgttgccatgtgacatgccagttccccttgacttctgccatgagtaaaatcttcttgagtgct

SEQ ID NO: 943416 - DNA, 600 bp, Homo sapiens
tccccagaatatggatttttcttttctatcacatattcaggctgcatattttccaaactcttatgctctgcttctcctataaaactaaatgcctttaacagtacccgagatacctcttgaatgctttgctgcttagaaatttcttctgccagatactctaaatcatctttctcaagttcaaagttcaacaaatctctagagcagggacaaaatgccaccagtctctttgctaaaacataacaagagtcacctttactccagtttccaagaagttcttcatctccatctgagyccgcctcagcctggaccttactgtccatatcgctatcagcatttttggcagaaccactcaacaagtctctaggaagttccaaattttcccatattttcctgtcatcttctgagccctccaaactgttccaacctctgcctgttacccagttccaaagttgcttccacatttttgggtatcttttcagcaatgacccactctactggtaccaatctactgtattagtccattttcacactgctgataaacacatacctgggagtgggaagaaaaagaggtttaattggacttacagttccacatggctg

SEQ ID NO: 943417 - DNA, 550 bp, Homo sapiens
gattctcctgcctcagcctcctgagtagctgggattacagtcaagcaccaccacactcagctaatttttatatttctagtagagatagggttttgtcaagttggtcaggctggtcttgaactcctggcctcaagtgatctgcccacctcggcctcccaaagtgctgggattataggcgtgagtcactgtgcccagccaagtcttgtttttgaagaaagaagatgatatttatcatcccattactggrtatatacccagaggagtataaatcattctactatgaagacacatgcacacatatgtttattgaagcactatttacaatagcaaagacagggaaccgacccaaatgcccatcaatgatacactggataaagaaaatgtggtacatatacatcatggaatactatgcagccataaaaaaggaatgatattatgtcctttgcagggacatggatgaagctggaaaccatcatcctcaggaaattaacacagggaccaagcaccacatgttctccctcataagtgggagttgaacaatgagaatgca

SEQ ID NO: 943418 - DNA, 583 bp, Homo sapiens
ttcccctctgggacgaagcttccagaggaaggaacaggcagcaatctttgctcttctgcagcctctgctggtgatacccaagcaaacagggtctggagtggacctccagcaaactccagcagacctgcagcagagggccatgactgttagaaggaaaactaacaaacagaaaggaatagcatcaatgtcaacaraaaggatgtccacacagaaatcccatttgaaggcaaccaacatcaaagaccgaaggtagataaatccacgatgatgaggaaaaacctgcacaaaaaggctgaaaattccgaaaaccagaacaccttatctcctccaaaggatcacaactcctcgccagcaagggaacaaaactggacagagaatgagtttgatgaattgacacaagtaggcttcagaaggtgggtaataacaaactcctctgagctaaagaagtgtgttctaacccaatgcaaggaggctaggaaacttgaaaaaaagttagaggaattgctaactagaaaaacccatttagagaagaacataaatgacatgatggagctgaaaaacacagcacgagaacttcgtgaag

SEQ ID NO: 943419 - DNA, 634 bp, Homo sapiens
agggggagcaacaatgatggggatataaacccaggcatttgagcagggagcggcaacccgctttggatcccctccaatcgcatgggagctctgttttcactctattaaatcttgcaactgtacactcttctggtcagtgttttttacagctctagctgagcttctgcttgcagtccaccactgctgatggttgtcatcgcagacccgcggctgatgtccaccactccagatccggcagggtgtcctctgtgctcctgatccagcgaggcgcccattgccactcccaaccaggctaaaggcttgccattgttgctgcacagctaagtgcccgggctcgtcctgctcgagctgaacactggttgctgggttccacggttctcttctgtgacccayggcttctaatagagctataacactgcatggcccaagattccattccttggaatccgtgaggccaagaaccccaggtcagagaacaaaagacttgctgccatcttgggagcagcctgccccatcttaggagccctaagaacaaagatcgtccagtaacataagcacttttaattcacccatagcttttattataaaatatttaataacataataactttgtatcaacttaaaaagtgcagtg

SEQ ID NO: 943420 - DNA, 479 bp, Homo sapiens
tcctatcttagggcctttacactttctgaaacttctactgaaaagcctttctgcagacactttcagaactcagcttcttcattccttactcagttcttttctgaaatgttttcttctttgtgaccgttcctttagtccttcaatgtttcttatcctcttccttcrttttttttcctgcacaatatttatcaccatcagacagatcttgtattaatttatcagtctgctgcctgtctccctgtcccataggatgtaatctctgttaccacaggaaataatttttgtttaatattgttcacagccagccttggtggcttatgcctataatcccagcaatttgggaagctgaggtgggaggattgcttgatcccaggagtttgagaccagcctgggcaacatggtgagaccaccatctctaaaaaaaaaaaaaaaacaaataaaaatattgctcattactgtatcccgagcacctggaatag

SEQ ID NO: 943421 - DNA, 709 bp, Homo sapiens
tccactggcaggtcatcctgacatctgtccaactctggctgagtcggggttttatgggctcagagggaggaagtgctgattggtccatggttggccatgggtaggcctggaaaaagcaccagaagttatcactctgggccacgattccacccagaacttatagccctaactccaggcttcaggctctccttggcttgaaggtggaccctcagctttctgcccagaaggctgtctgcctcctgctgccatcaacatgttgtatatggcccccaggctgttcatgccaaggggtgcctataggcccctgctgagccacatttagtcttccctcagcctccctcctatgctcctaggtgcccaatgtccagagggggttgaggtagcaggggkctggtgtgtcagcacctccttgagtgtgcacacacctaggtgggatgggacggcacctgggctgggccacaactttgctccaaaatcggagcaggcaccaggaatggagagaggtcagggatgggagcaggcacttcccagcctttgggggaagggggagttcctcacctcctgagagcagagcgcgactgtgcggctgcacatgcaccagggagtgcagggctcccaccccacctactcggtaggaggcagggcttcttcctgttcctggcccctgccggctctgtggagtgcacaaacctggccagacctccccaac

SEQ ID NO: 943422 - DNA, 715 bp, Homo sapiens
ttcaattcttttggataaatactcagaagtgggatacctggatcacatggtagtattattttgagctattgagaaatgtctatactgtttttgacggtgacattttgcctattccattctcacaaacagtgcataagggttccagtttccccacatcctcaccaacacttgctgttttgttcttttgataatacatcaccttaactgtgtgtgagacagttctattgatgagcttggactgatcttcttctgctgctttctcttagtaattctcaagaattacagtagaatgtgcwagaaatgcagccctgagatagggaagaacttgctagaacaggatgtcctttttttttttttttttttttttcagatggagtctctctctgttgcccaggctggagtgcagtggcacaatcttggttcactgcaaactctgcctcccgggttcacgccattctcttgcctcagcctcctgagtagctgggactacaggtgcccgccaccaagcctggctaattttttgtatttttagtagagatggggtttcaccatgttagccaggatggtctcgatctcctgacctcgtgatctacccgcctcggcctcccaaagtgctggaattacaggcgtgagccaccgtgccaggcctcaggatgtcctttaatgaatgaccacagcatgtcatgtttctccaaggtcatataatccaggccag

SEQ ID NO: 943423 - DNA, 586 bp, Homo sapiens
ccctttccttctacaattcggtgggttcttgtctgcagctcatcctgctacgaggtgttttgacctacgttttctgatagtgtctttttctggctttgatatcagagtaatattggcctcatagaatgagtttggagaagttctttcctctttaatactttggaagagtttgagaatgattgtcattaatacttctctaaatattttatagaattcaccattgaagtaatctagtcctgaagtaatttaccttttttgttgggaggtttttgattagtaattcggtattcttaatagttagtattatcttcaaattttctatttcttcatgattcattgttggtaggttacatctttcatggaatttatctatttcttctagkttatgccattgttgacatataattgttcttagtagtttcttataatcagttttacatctgtggcactggttgcaatgtctctttcatttacatttccatttactcaaatcttctctttttttcttagtatagctaaagatttggcaactttgcttgtctttaaaaagacaactcaatttgttacctctttttattgtttttcc

SEQ ID NO: 943424 - DNA, 541 bp, Homo sapiens
aaacaagcaatgaggaaaggactccatgtataaataatggtgctgggataacaggttagtcttatgcagaaaatagaaactggaccctttccttacaccatgtacaaaaatcaatgcaagatgtattgaagacttaaaagtaaaacccaaaattataaaaactctggaagacaacctaggcaatacaatcttggatatagtaatgggcaaagatttcatgacagtctccaaaagcagttgcaacaaaagcaaaaattcccaatggaatgtaattaaactaaagagtttctgcacarcaaaagaagctatcaatagagtaaacagataacctagagaatgggagaaaattttagcaaacttcatctaacaaaagtctaatagccagcatctatcaggaacttaaacaaatgtataagaaaaacaaacaaccccattaaaatatgagcaaaggacatgaacacttttcaaaagaaaacatacgtgcagccaatgatcatatgaaagaaagctcaacatcactgatcattagagaagtgaaaat

SEQ ID NO: 943425 - DNA, 642 bp, Homo sapiens
aagcaaataaccacattaaaatatgtttagcatcatgagtctttagaaaaatgcaaataaaatccacaatgtggtagccctaaaatatccattagaatggctagtattaaaaaaataatttgggaggccgaggcaggtggatcacctgaggtcaggagttcgagaccagcctggccaatatggtgacaccccgtctctactgtaaatacaaaaattagccaggcatggtgatgtgcacctgtagtcccagctactcggggtgctgaggcaaaagaatcgcttgaacccaggaggcggaggttgcagtgagctgagattgcaccactrcactccagcctgggcaacagatggagactccatctaaaaaataaattaattaattagataaaataaaataaacatcccaagtgttgccaagtctgtgcagcaacctaaattctcatgcacttctggtaggaatatgaaatgtatacctacttctaagaaaaaacttgacactttttaaaataataatcattcacctatatgaacgtgccactccacttctattattcatcctccaaaaatattaaaacatatatattcacacaaagccttgtacacaaaggtttataacagcttcatataatagttcccaaatgg

SEQ ID NO: 943426 - DNA, 653 bp, Homo sapiens
ctggaattcctaagctacctttgtcaggtcacaggattaatggagcacaccagctttttattcttataaactaactttttgaattttaggcttcctggtattttaagtatgctgactatactctcataaatagaatttgagtcatatttctttctctctgcctagtttctccaaaattgtaaactatttataaatattcttaattcatggcaatgtgtttgtttacatacagtcaagcatgatccctaaggctgctcagggagagagaacytagaaacctggcatgctggcaaaagggtaagaatttcttgccagtcagtctctggcctctttctttctgtgcaaactggttacattaaagataaaaatcactgtttgtctcctctgtaaagttttgacttaatttgtttaataataataagagcttaaatcaaatgtttcatcagaaatgtgaaaaacataatgccttttattttgttcatgtgacttgagtaatcgttggcaaataaagacagttttaaagattattggtaaaatacaatgtcttcaaaatgtaaacatgtggtgtaagttatgttcaaacattaggtttgctaaaagctttaagatcataaactgcttctttggtttttgaaaattgtttaacttgcctg

SEQ ID NO: 943427 - DNA, 653 bp, Homo sapiens
ctggaattcctaagctacctttgtcaggtcacaggattaatggagcacaccagctttttattcttataaactaactttttgaattttaggcttcctggtattttaagtatgctgactatactctcataaatagaatttgagtcatatttctttctctctgcctagtttctccaaaattgtaaactatttataaatattcttaattcatggcaatgtgtttgtttacatacagtcaagcatgatccctaaggctgctcagggagagagaacctagaaacctggcatgctggcaaaagggtaagaatttcttgccagtcagtctctggcctctttctttctgtgcaaactggttacattaaagataaaaatcactgtttgtctcctctgtaaagttttgacttaattkgtttaataataataagagcttaaatcaaatgtttcatcagaaatgtgaaaaacataatgccttttattttgttcatgtgacttgagtaatcgttggcaaataaagacagttttaaagattattggtaaaatacaatgtcttcaaaatgtaaacatgtggtgtaagttatgttcaaacattaggtttgctaaaagctttaagatcataaactgcttctttggtttttgaaaattgtttaacttgcctg

SEQ ID NO: 943428 - DNA, 638 bp, Homo sapiens
cctcccgggttcaagcgattctcctgcctcagcctcctgagtagctgccattacaggcgcccaccaccacaccgagctaatttttgtatttttagtagagagggggtttcaccatgttggctaggctggtcttgaactcctgacctcaggtgatccgcccaccttggcctcccaaagtgctgggattataggcrtgagccaccacatctggccaacaataataatattaataactattcttggtattattattattaatagtgatattcccattacttttatctttctctcaaaatcgagataaaatgtgatataatggacatgcaatcacaagttttattttatttttaattataattcccccagcatatacatttcacaaaactaaaattaattttgcctcaatatctttattttttaaataaaatggtgatgtagccttacagatcaatgagactctgtagtctgttaaaataattaaataggagctaacggacagaaaaagattctaattatttaatgtgcattaaaaatatcaggttaacaaagcttttgcgtaatcttatgcaatacaaatgttagttttaatctttttgcatggctgtatcttgtatctgcagcatctctatttcacaatc

SEQ ID NO: 943429 - DNA, 638 bp, Homo sapiens
cctcccgggttcaagcgattctcctgcctcagcctcctgagtagctgccattacaggcgcccaccaccacaccgagctaatttttgtatttttagtagagagggggtttcaccatgttggctaggctggtcttgaactcctgacctcaggtgatccgcccaccttggcctcccaaagtgctgggattataggcgtgagccaccacatctggccaacaataataatattaataactattcttggtattattattattaatagtgatattcccattacttttatctttctctcaaaatcgagataaaatgtgatataatggacatgcaatcacaagttttattttatttttaattataattcccccagcatatacatttcacaaaactaaaattaattttgcctcaatatctttattttttaaataaaatggtgatgtagccttacagatcaatgagactctgtagtctgttaaaataattaaataggagctaackgacagaaaaagattctaattatttaatgtgcattaaaaatatcaggttaacaaagcttttgcgtaatcttatgcaatacaaatgttagttttaatctttttgcatggctgtatcttgtatctgcagcatctctatttcacaatc

SEQ ID NO: 943430 - DNA, 590 bp, Homo sapiens
atggacttacagaataccttatccaccatcatggtattctgtatctcattgcatcctatcaaggaactcacttcatggccaaagaagtgtagaaatgggctcatgatcatgaagttcactggttttaccatgctccctaccatccttaagcagttggcttgattggatcgtgatatggcgtttttaagactamgttattgtgttcattaggtgataactggggcacttgcaagtatgggataaaattctgcagaggatcatatatgctctgaatcagcatctgatgaaacaggaaacatggtgctgtttcactgatagccaggattcaacagtctaggaatcaagaggtggaaatgagagtggccctactccctattactcctgttaacccactagcaaaatgtttgcattctgtttctgtgactttatgctctgctagcctagaggtctttattccagaggaaaaatgcctccaccaagagacacaacaatgattccattgaagtgaaggttaaatggcaacaaggatgctttgggctcttcctgcctctgagtcaacagaacatggagggtgtttcggtgttgggtga

SEQ ID NO: 943431 - DNA, 594 bp, Homo sapiens
actggggcacttgcaagtatgggataaaattctgcagaggatcatatatgctctgaatcagcatctgatgaaacaggaaacatggtgctgtttcactgatagccaggattcaacagtctaggaatcaagaggtggaaatgagagtggccctactccctattactcctgttaacccactagcaaaatgtttgcattctgtttctgtgactttatgctctgctagcctagaggtctttattccagaggaaaaatgcctccaccaagagacacaacaatgattccattgaagtgaaggttaaatggcaacaaggatgctttgggctcttcctgcctctgagtcaacagaacatggagggtgtttcggtgttgggtgaaataattgatttaaactaccaaaggaaaattggacttccactcyacagtgaagaaaaggaagaggaaacagaaggaaaacacgagatatcttaggatgtctcttagtattaccatgctccgttttaaggtcagtgaaaaactgtaacaacccaatccatacaggactaaaaatggcccagactcttcaggaattaagatttgtgtcatacagccaagtaa

SEQ ID NO: 943432 - DNA, 650 bp, Homo sapiens
ataccctccaaagccacaggggtggagctgcccaacaccatgggagcccacctcttgcaacagtgtgacctggatgtgagacatagagtcaaaggagattattttggagctttaagatttattgactgccctgctsggcttccgacttgcagcggaactgttgcccctttgttttggccaatttctcccttttggaatgggtgcatttaccaaaagcctttacccccattgtatcttggaagtaactagtttttattttacaggctcataggcggaagatatttgccttatcttagatgagactttgaatttggacttttgagttaacgctagaatgtgctaagactttgggggctgttgggaaggcatgattgtgttttgaaattgtgagaagcacatgagattttggagtgaccaggagcagaattatatggtttgggtctgtgtccccatccaaatcttgtgtcaaactgtaattttcaacattgaaggaggagtgtgctgtgaggtgattggatcatggggcaagtttcctcactgctgttctcatgatagtgagttctcaggagatatggttgtttaaacatgtgtagacttcccaattttctctctctcctactgcagcaatgtgggacatgcttccttaacct

SEQ ID NO: 943433 - DNA, 650 bp, Homo sapiens
ataccctccaaagccacaggggtggagctgcccaacaccatgggagcccacctcttgcaacagtgtgacctggatgtgagacatagagtcaaaggagattattttggagctttaagatttattgactgccctgctcggcttccgacttgcagsggaactgttgcccctttgttttggccaatttctcccttttggaatgggtgcatttaccaaaagcctttacccccattgtatcttggaagtaactagtttttattttacaggctcataggcggaagatatttgccttatcttagatgagactttgaatttggacttttgagttaacgctagaatgtgctaagactttgggggctgttgggaaggcatgattgtgttttgaaattgtgagaagcacatgagattttggagtgaccaggagcagaattatatggtttgggtctgtgtccccatccaaatcttgtgtcaaactgtaattttcaacattgaaggaggagtgtgctgtgaggtgattggatcatggggcaagtttcctcactgctgttctcatgatagtgagttctcaggagatatggttgtttaaacatgtgtagacttcccaattttctctctctcctactgcagcaatgtgggacatgcttccttaacct

SEQ ID NO: 943434 - DNA, 650 bp, Homo sapiens
ataccctccaaagccacaggggtggagctgcccaacaccatgggagcccacctcttgcaacagtgtgacctggatgtgagacatagagtcaaaggagattattttggagctttaagatttattgactgccctgctcggcttccgacttgcagcggamctgttgcccctttgttttggccaatttctcccttttggaatgggtgcatttaccaaaagcctttacccccattgtatcttggaagtaactagtttttattttacaggctcataggcggaagatatttgccttatcttagatgagactttgaatttggacttttgagttaacgctagaatgtgctaagactttgggggctgttgggaaggcatgattgtgttttgaaattgtgagaagcacatgagattttggagtgaccaggagcagaattatatggtttgggtctgtgtccccatccaaatcttgtgtcaaactgtaattttcaacattgaaggaggagtgtgctgtgaggtgattggatcatggggcaagtttcctcactgctgttctcatgatagtgagttctcaggagatatggttgtttaaacatgtgtagacttcccaattttctctctctcctactgcagcaatgtgggacatgcttccttaacct

SEQ ID NO: 943435 - DNA, 752 bp, Homo sapiens
aagacagagaggcttcactccatagccactacaactccgggctgtgaggagtactgccaaactaccaccgatgtacccttaaggctcaaggaagggctcttaagtcagcttgttgtgaatgatgcctggcctgggactcgcccttcaggtcagcaggctcctttctggcccagggaaggtccagaagttccatgaaaagttcaagtcctggaatcagggacccaaagaggtcacttggtgctctaccttcctgtggttaggctggtacctaaggttcaagataaagtcccctttactttccttctgcttttctcaagcagaaggggttttgccttgtagccactatggccagctatgtactgaatttcacttgaagccatcaagtcagaggttcrtccaaggcgctcgatttaggacctgggtattgctgctggttattcaggacccaaggattcttcaattaccaggtgttgaatgctgcccagactgggttctttcctttaaggcagtgggttcccttctggcccaaggtatgtctagaaatgtcatcttggagctaggtcctggaacaatggccctcccaactctaaccagtatcttaacctgttgtggctgggctggtattctagatccaagacaaagtcctccccactcttccttctcttctccttaagcagaagaaaaaggtgttttttggaacttcaagctgtgcagcctggggttagggtaagggtgatgccagctctccctta

SEQ ID NO: 943436 - DNA, 576 bp, Homo sapiens
atctctattcattgtctctcctacttctttctcatttttttctacttattgattgtgctctccttctatttcttcctgctctgattgcattatttttctttccaataaacttaagaactggcattgaatttgggcaatgaggaaacctagaactygatggaatagtaaggttattatgacaaacttacagctaaaactgtcgtgatgtatactaatatggttaattattaagagatttaaaggttggggtgatgtaatcttaaagttggagaagttatagtctagttacagtattgtactgtaaattctaaattatacaattaaatatatcagtaaataaaaaatgctctttatattgaaatgagaaaatgatatgcatcaactgcactagtatattcaactgcatgccataaatatttgaaaaagaataaatattgagattctgttggcagaggcccggtttttgacattttgtttaagaatttacacttgcccattagtatttgaaataatacactaaacctatgtaatgagtagaaggtgggcagaaaaatgagagaaagatggtacctattt

SEQ ID NO: 943437 - DNA, 572 bp, Homo sapiens
ttggccccagtgttccttggagtgtgagaagatttggactttcaaaatcgaactaccacagaaactgctttacccaaaattttggttcacagccttcactggattacacattgggacacagtttagccatgtgaatatgttaatagaccattccatgtgaaatttctgagattaaagctattagagctttgtttatgtatgtgaatgcattacatatttcgatktgtttatgtatatatacaattattatattacattgtgtaccaaattagcctagaaataaagtaaacaagtacttaataaataaagaagtccaaacaattttcaagttcatgtgacataaataaatctgtcataaaaaagctggctttaaaattattaatcagataaaaactaaaatgtattaaaaattttcagcatatatttttgtctgagtttcacgttggtccttgctaaatattttgaggtgtcagggtttggcacaaaaggttagaaaactgtaaaccatacaaaaatcaaaaagggctttgtacgagttttttgacaaataagacatttaatattgttagttt

SEQ ID NO: 943438 - DNA, 691 bp, Homo sapiens
ttggtctcaccacaaaaactcctgtgctgagacccttccagacattgccctatatatctcttcatgtggatgttcacctgtattctcattatatctgttattaataaattgccaaacataagtacggtgtttccctgagttctctaagcaatgccaccagattaatggaacccaagaagggggttaagaaaaccctgatttgtagccagttggtcataagtacagtcatgtgctatataatgatttagtcagcaagagamcacatatacgatgatggtcccataagattataatgtatttttactacaccttttatatatttagatacatttagaaacacaagttcttaccattgtgtttcaattgcctacagtattgagtatagtaatatgctatgcaggtttgtggtctaggagcaataggctatactatatggcctggatgtttagtaggctataccatctagattaatgtaagtatagcacactctataatggtcatcaaatgacaagatcacctaaggaaaaatttgtcagaatgtatctctattgtttagcaacacatgactacataggtgacaacctattgcaatgagtatttgaagtggagggcagtcttttgggagtgggcccttaacgaatatgatctgatgctatctccagtaggtagtgtgagaattgaattgaattac

SEQ ID NO: 943439 - DNA, 592 bp, Homo sapiens
taacttcatttctattacccttacgttttaagttgtagcgttatttcgagaggaatgaatacaagcattgagcaatcagccgaacgcatgggtaatcctttaagttctgaaatcaagactcaggggcgagggccctgctggagttctatagaacagcaaygtgtgtacataccaccagtggctgaatgacctagaggggttcatgtacagttttctttgcagaattctcagagggttttcagcaaagttgtaacaactatgtaacccagacctacatctccccctttctagtagattcaaagaaatctctataatcagttccttgaaattggaagtgagtccactgtgagaaaattgatgaatgtttgtttacctgctgggtgtaaaaatggaaaaatatcaacctaaggaagtatttgttttaatcttgtgttgtgcttgatgattatgcagcaactggaaacgggctatagggcaagaaatcaggaggcagccacacactcagaagttcagtgctggccaacagatatttatttgctgccaaaagatttctgctcaccagaaagcagggtagttccaggatatttatata

SEQ ID NO: 943440 - DNA, 644 bp, Homo sapiens
taagatgccattgttctctgactttcattatcaaagaaatgcctacctttcccaaactcttacagaatgataagaagatactcctcattttgaacattttctcttgagtcacaggccctgcttgacattcttcaagggyccggtgaatctcctctgtttacatgtgtgtgtgctgtgtgtacggggttggaggtgggtaagatgaacagagagagtgggagagagagaaatcttccctaagcatctttatctgcaaatacttattcttctaaaccctttgtcaccttcactgcttagtaagcttcacagtacataaaatttcaagctggctctgtgtgtgtgtgtgtgtgtgagtgtgtatgtgtgtgtataataattcactttctacatatattttgttattactactagattcaacttttaacttttcttacgttcttaggttgttcaaacagcagttagcacaatgagtttttttttttatcctaggtgcttggtaaatatgactcatttgagtaatttttaggaatggtaatttttctatctgactgtcgcaaccccctactctcattttttccatttatgaaaagagatatttaagtaagtgttttgtcgatcccaccacactggtaacagaggacccc

SEQ ID NO: 943441 - DNA, 556 bp, Homo sapiens
gtacattgttggtagccattacaaaatacctgcatggaattatgctgtgtctagaccagcagtttttaaaatgaaatagaaactaataaaattgaaaaaaaaaagaaaaaagaacggtaaaaataattttgtgaatatacacgcatacacatctgtactgtatagaagtgtaaaaaccgctgttcaatgtggattgcattcaaaagtataaatcccaktgacctaaatgataccattaaagctttctaccacaacgtaaagacccttcataaacaagcattggaacaaagattcggcatcatctcttgcaactctgcttccttgtatggtcccaaagtcttgaattagtcacaacttcttagaatcattatgatgtgtaggtttattccagtttgtctttaatatcttaacactgaacataagataatttatagattccaattaagataatttggtataattaatatatttaaactaacgtaatttatagacttagataatctttcaagataatattctatgccagtggttttcaaacttgaacctgcctcagaat

SEQ ID NO: 943442 - DNA, 569 bp, Homo sapiens
tattggaggaaatagtcttataaagaagcagtttgattttccaggggtacattcatgtagagaaatagatttaatgtatggttatttcttattattgtttctattttaaaaacaaactgtttattctgatttcctcagaaggagacragatatttttcaatcaccttaaaatcatggatttaaatgtacactatagatttaaatccatgatcatacttgtccttattgaagtgaatattgtctgtttttgtccagggagtctactatttgattggcacagaactacattgtcgttggtaactttcttattgcttgctgttttcagaagcaaaagaaactattttttttttcattttctgacccatacataaaggcaaatatttctccaagaagcctccattacataagtggaaaatagtatcgctagattacaatctggtctgggtgttaaggatgcatattgattccagacttggtcatttaggtctatttggtacacaaggcagaataaagggattattgcttgataggtaggtaggtaggtaggtaggtaggtagatagatagata

SEQ ID NO: 943443 - DNA, 624 bp, Homo sapiens
gccatcaatcagagcacagttctgttcatgtcttccacccacatatttattgcctcttctatctcctaactaagcacttattatgcactgggacaataatttttgcagtttgaggtgcaacagacaaactggcacaaaactcttttctcttcgccagattaaggatggaagatttgatcttaccatatgttatagtaacttcagcatacaattttttcctttcttctttgctttgacaatwttcactttttcgttttaaagaaagtactttaagacgtctttttggcatatgcgagttgccagcatcgctactcttgttctttggggccatgatgaagtaaaagaagggttatttgaacacaaacactggacgaaggaatgattcacaatgcccagggcagtagggagtggaacagagtgaaatttcatcatgttactcagaatggtgtgccatgaaaacattaattgttctgattttttttttttttttttgagatggagtctcgctctgttgcccaggctggagtgcagtggcgcaatctcagctcactgcaagctccgcctcctgggttcacgtcattctcctgcctcagcctcccgagtaggtgggactacaggcgcccg

SEQ ID NO: 943444 - DNA, 624 bp, Homo sapiens
gccatcaatcagagcacagttctgttcatgtcttccacccacatatttattgcctcttctatctcctaactaagcacttattatgcactgggacaataatttttgcagtttgaggtgcaacagacaaactggcacaaaactcttttctcttcgccagattaaggatggaagatttgatcttaccatatgttatagtaacttcagcatacaattttttcctttcttctttgctttgacaatattcactttttcgttttaaagaaagtactttaagacgtctttttggcatatgcgagttgccagcatcgctactcttgttctttggggccatgatgaagtaaaagaagggttatttgaacacaaacactggacgaaggaatgattcayaatgcccagggcagtagggagtggaacagagtgaaatttcatcatgttactcagaatggtgtgccatgaaaacattaattgttctgattttttttttttttttttgagatggagtctcgctctgttgcccaggctggagtgcagtggcgcaatctcagctcactgcaagctccgcctcctgggttcacgtcattctcctgcctcagcctcccgagtaggtgggactacaggcgcccg

SEQ ID NO: 943445 - DNA, 782 bp, Homo sapiens
tcttgagtgtttgaggcttttccaggtgcacaatgcaagctgtcagtcaatctactattctggggtctggaggatggtgggctttttctcacagttctactaggtagtgcccacatagggactctgtgtggggactcccgttccacatttcccttccatgctgccctagcagaggttctccatgagggctctgcccctgtggtgcacttctgcctaggcatccaggtgtttccatacatcctctgaaatctaggtggagattcccaaacctcaattcttgatttctgtgtatgtgcaggcccaacaccatgtgtaaaatgtcaagacttggggcttgcatcctctgaagcaatggcctgagctgtrcgtcgttggcctcttttagccatggctgggatgtagggcaccaagtcccaggcatgtacacagcaaggcaggccctgagtccagcccatgaaaccattttttgctcctaggtctccaggcctgtgatggtagaagctgctatgaagacctctgacatgcgctggaggcattttccctattgtcttggcaattaacatttgggtccttattacttatgcaaatttctacagcaggcttgaatttgtccccagaatttctttttttttgtatttcattgtcagcctgcaaattttccaaacatttatgtactgcttcctcttgaactcttcaccggttagaaatttcttttactagataccctaaatcatctctctcaagttcaaagttccacatatctctagggcagggacaaaatc

SEQ ID NO: 943446 - DNA, 622 bp, Homo sapiens
aattatctttaacaatgtgctgtataatatgaaaagaattggggtgattttttttccattttactcactagagtttttgccaatttcaagtgtgaattccttaaacatcctctcggtaaacaaggacataaggagatagaagcttaggtatgaaaaataggatagatcacatatacctttaaaatcataccgtattcaaagttttgaaagagaacatttcatattaggataatttttgctgaaaaagaaatctgaaagtttaattttcaaaatcacaatgaaattgactcagtgatcatcttgatgcagagccattggctcttaattgaattttttttttttttttttttttttttagatggagtttcactccaggctggagtacagtggcctggtctcggctcactrcaacttctgcctccggggttcaagagattctcctgtctcagcctcccaagtaggtgggattacaggtgcccaccaccatgcccaactaatttttgtagagagggggtttcaccacgttggtcaggctggtctcaaactcctgacctcaggcaatccaccgcctcggcctcccaaagttctgggattacaggcatgaaccaccatgacctgtcaa

SEQ ID NO: 943447 - DNA, 633 bp, Homo sapiens
aggggccaaagtacagcttggctgtggcttcagggaatgcaagctccaagctttgtcagctcctacatcgtgttgagtctgcaggcacacaaaagtcaagaattgagatttggaaacctccacttagatttcagaggatgtatggmgatacctggatgtccaggcagaagtttgctacaggggtggggccctcattgaggacctctgctagggcagtgtggaagaggaatgtgggggggttggaggccccccacacagtctcccctgtgacactgcctactggagctgtgagaagagggccaccatcctctagaccccagaatggtagctccaccaacagcttgcaccgtgaacctggagaagctgcagacattcaacgccagcctgtgaaagtggcaggagggtgactgtaccctgcaaagccacaggggtggagcttcccaaggctgtgggagcctacctcttgcatcagcatgacctggatgtgagacatgaagtaaaaataggttattttggatctttaaaatttaatgactgtcctattggattttggacttgcatgggggcctgtagcccctttgttttggccaatttctcccatttggaatgggtatatttactcaatgcctctac

SEQ ID NO: 943448 - DNA, 633 bp, Homo sapiens
aggggccaaagtacagcttggctgtggcttcagggaatgcaagctccaagctttgtcagctcctacatcgtgttgagtctgcaggcacacaaaagtcaagaattgagatttggaaacctccacttagatttcagaggatgtatggagatacctggatgtccaggcagaagtttgctacaggggtggggccctcattgaggacctctgctagggcagtgtggaagaggaatgtgggggggttggaggccccmcacacagtctcccctgtgacactgcctactggagctgtgagaagagggccaccatcctctagaccccagaatggtagctccaccaacagcttgcaccgtgaacctggagaagctgcagacattcaacgccagcctgtgaaagtggcaggagggtgactgtaccctgcaaagccacaggggtggagcttcccaaggctgtgggagcctacctcttgcatcagcatgacctggatgtgagacatgaagtaaaaataggttattttggatctttaaaatttaatgactgtcctattggattttggacttgcatgggggcctgtagcccctttgttttggccaatttctcccatttggaatgggtatatttactcaatgcctctac

SEQ ID NO: 943449 - DNA, 571 bp, Homo sapiens; identical to SEQ ID NO: 942463

SEQ ID NO: 943450 - DNA, 617 bp, Homo sapiens
cataggtgtgggcccagtccacaatggtgttggagcatgtcaacctacggccggaaccgcaaaggaggcacaagtattaacaggggtaagtcatgtccctcaggcaaaatacgggccaaattttcatctctggaaaacaacgcagcctccaaggacttcttctgcgacagcttatcagatccctgtgtttttttagggtcttgtaactgtgccaaagtcacaggggagctcatgttagaccacacaggcagtacacatgtcccccggaggagggtcccttccctggctgttcccctatgaatggttaatcgtgaggaccacacattaaatacccaaggagtaacatgtaagtcatactgcaggccctcccctctgggggctatgtcarccaaccatcagcaatggggggcttggagggccaacaccaggttttctgttctgcatttgaggcattggggcaggcaacaacagattaccatttgtccccataactggtcggtggaagtcatccttggtttgtatctgtagctggatgggggcagcggcccagtgtcagtgcctccactgtagctgtgccacctttccatggctgctcattcaagttttggagcgccagg

SEQ ID NO: 943451 - DNA, 509 bp, Homo sapiens
ggagggccaacaccaggttttctgttctgcatttgaggcattggggcaggcaacaacagattaccatttgtccccataactggtcggtggaagtcatccttggtttgtatctgtagctggatgggggcagcggcccagtgtcagtgcctccactgtagctgtgccacctttccatggctgctcattcaagttttggagcgccaggtccaacctggaactccagcaccacaaagactggggagtaagagtaacatgcaaaagtaaaccattcttcaggagtccactatatcgctcaatcatgccagcggcttgtgggttataaggaacgtggracccccattgtatgtccatccgctgtgcccactgttgtacctgctgtccagtgaaatgtgttcccgtcactttcaatggccagggaatggctgtataaggcacctaagtgttacaagtctcgaatggtgtgttgctggtcagccaccctgctaaggtaagcaaacaacaggctggtg

SEQ ID NO: 943452 - DNA, 607 bp, Homo sapiens
accacacattaaatacccaaggagtaacatgtaagtcatactgcaggccctcccctctgggggctatgtcagccaaccatcagcaatggggggcttggagggccaacaccaggttttctgttctgcatttgaggcattggggcaggcaacaacagattaccatttgtccccataactggtcggtggaagtcatccttggtttgtatctgtagctggatgggggcagcggcccagtgtcagtgcctccactgtagctgtgccacctttccatggctgctcattcaagttttggagcgccaggtccaacctggaactccagcaccacaaagactggggagtaagagtaacatgcaaaagtaaaccattcttcaggagtccactatatcgctcaatcatgccagcggcttgtgggttataaggaacgtggaacccccattgtatgtccatccgctstgcccactgttgtacctgctgtccagtgaaatgtgttcccgtcactttcaatggccagggaatggctgtataaggcacctaagtgttacaagtctcgaatggtgtgttgctggtcagccaccctgctaaggtaagcaaacaacaggctggtggc

SEQ ID NO: 943453 - DNA, 642 bp, Homo sapiens
acctttgccttatttgaacatggttcaaacagttggccacatttgattggccaaaacttggtgattggcacaagagtagacgatagtctgtttatactttcatttagtctagagtttgcgatgtacagagaaacgtttaggccaaacttaaaatatgtaaggagggcagggcgcrgtggctcacacctctaatcccagcactttgggagcgcaagtcgggcggatcacgaggtcaggagatggcggccatcgtggctaacacggtgaaaccccatctctactaaaaatataaaaaaaatagcgtgcgcctgtagtcccagctactcaggaagctgaggcaggagaatcgcttgaacctgggaggcagaagttgcagtgagcagagatggtgccactgcattccagcctgggcgacagaacgagactctgtctcaaaaaaaaaaaaaaaaaggaaggagacagctttaaactaaacttgatttaacagtagcattcctaaacgtgaggttaacatcattctcaaagagttgaccaaggattcatttgataaattcggtttttcggaaatagatgattctggtgattcagacaattctgatattagttctgtttagaaataactccaagaacagtttttatatt

SEQ ID NO: 943454 - DNA, 750 bp, Homo sapiens
gattgagataggatctggattttaaatatgaaaaaaatgggaggagataattttaatgacagtcagatttgtgatagaaagaacatcattaatagttaatagtacagcattatttttcccctaagttgagatattgctttaaaaaatataattctaacacattgggtttgtttttaatttgcagggagtacatgtgcaggtttgttgcctgggtaaattgcatgtcatgggggtttggtgtacagattatttcatcacscaggtaatgagtaaagtacccaataggtaatttttcattcattaccctcctctcactctctgttctcaagtaggccaaggtgtctattgttctattatttgtgttcatatctactcaatgtttagctctcacttataagtgagaacatgtgacattttatttcctgttcctgtgtttatttgcttaagataatggcccccagctccatgcatgtcactgcaaaggacatgatttccttttttttttggtatggatggatagtatttcatggtgtatatgtaccatattttctttatccattccaccattgatgagtatctaggttgattttgtgtctttgctattatgaaaagtattgtgataaacataagtatgcatgtgtttttataatagaacaagttatactcttttgtatatatactcagtaatgagattgctggattgaatggtagttctgttttaagttctttgagaaatctccaaactgcttt

SEQ ID NO: 943455 - DNA, 582 bp, Homo sapiens
aacataaattttggaggtgaaaatagcattttaactataggaaatatattacaataactttaaaatgtgttcaaagagttatataaagcacggtcaaaggactaaaagaaataaggaaagtgtggtataaacacaatgattatgtcaataaagacagagaaattacaaaaaggaacaaaacaaaaattctggtgataaaatataattacttaaatcaagttttattagaatggtacaaaagcagattagaacaaacacaaatcttcaaattaatctttggttggmtgaatataaaaacatttgagttttgagagcagaaaaaaatgaataaaattgaacagaacccaaggaactgtgaaacaccatctagtagaacgaaatacacatcatcagagttccagaaagtaaaccaagagagaaaaagaaagaaagaatgtttaaagaaacaatgacaaaaacctccaaaatttgttgaaagacataaacttacaaatctaagaaattcaataaactccaagtagggaaaaactcagatagacacatactgagacacataatcactctgttggatgacaaagatga

SEQ ID NO: 943456 - DNA, 550 bp, Homo sapiens
ggcctgttaggaaacaggtggcacatcaggcacatcaggaggtgagccgcaggtgagtacgcattacccactgagctctgagctccacctcctgtcagatcagcgggggcattagattctcattggaggaggaaccctattgtgagctgcacatgtgagggatccaggtcgcatgctccttatgagaatctaattaatgcctgatgatctgaggtggaacagtttcatcccaaaaccatccctcacccacgtctgtctgtggaaaaactgccttccatgaaaccasttcctggtaccaaaaaggttggggaccactgttctaagcaatctgtggtataatacactttctgaaggcaaacattttaggaggcatttgctttccacttgtagactgaatgtttatgtatccctgcccccacttcctatgttgaagccctaatccccaatgtgatgatatttggaggtggggcctttgggaggtaatcacatttatctgaggacatatgagcagggggcctcatgatgggattagtgtccttataaaaggagg

SEQ ID NO: 943457 - DNA, 684 bp, Homo sapiens
acttgctgaaagcaatgggaatatgagatgggcagtggaagaaagtagttttaaataccagttatgagcatgtaaccagttatagaaacagactgtgattgtcatgaatatgtcttccttgtgttgttatgaagatgcttgtgtttatatatatgtatacacatatttataaacatatatatacacacacatatgtatayacacacacacacacacacacacacaaatggtccctgacttacaatgctttgacatgattttccacttataatttttcaactttacactggcacaaaggtggtacccattcagtagaatccatacttcaagtatctatacaacctttctgcttctcactttcagcacagtattcaataaattacatgagctattaaacattttgttacaaaagaagtatttatgttagaagattttacccaactgtaggctaaggtaagtgttctgagcacatttaaagtaagctagctataacgtttggtagtttatgtgtattaaacgcatttttgacttagaatattttcaatttacaatgggtttatcggaacatatataatctttgtttttttctctcttatccccataggtaacataagatctattaactttatagtatagtatttaagtattgttaaattgacataatagtgtttaagttatgagata

SEQ ID NO: 943458 - DNA, 684 bp, Homo sapiens
acttgctgaaagcaatgggaatatgagatgggcagtggaagaaagtagttttaaataccagttatgagcatgtaaccagttatagaaacagactgtgattgtcatgaatatgtcttccttgtgttgttatgaagatgcttgtgtttatatatatgtatacacatatttataaacatatatatacacacacatatgtatatacacacacacacacacacacacacaaatggtccctgacttacartgctttgacatgattttccacttataatttttcaactttacactggcacaaaggtggtacccattcagtagaatccatacttcaagtatctatacaacctttctgcttctcactttcagcacagtattcaataaattacatgagctattaaacattttgttacaaaagaagtatttatgttagaagattttacccaactgtaggctaaggtaagtgttctgagcacatttaaagtaagctagctataacgtttggtagtttatgtgtattaaacgcatttttgacttagaatattttcaatttacaatgggtttatcggaacatatataatctttgtttttttctctcttatccccataggtaacataagatctattaactttatagtatagtatttaagtattgttaaattgacataatagtgtttaagttatgagata

SEQ ID NO: 943459 - DNA, 698 bp, Homo sapiens
cctttcatcttccaccatgattgtaagtttcctgaggcttccccagccatgcagaactgtgagtcaattaaacctcttttccttataaattacccggtcttgggtagtttattatagcagtgtggaaatggactaatacagaaaattgataccaggatagtrgagtactgctataaagataacctggaagtgtgaaagtgactttgcaactgggtaacaggcagaagttgaaacagtttggtgagcttggaagaagacaggaaaatgtgggaaagttttaaatttcctggagacttgttaattggctttgaccaaaatgcagatagtgatatatggacgatgaagtccaggctgaagtggtcctagatggagatgaagaacttattgggaactggagtaaaggtgactcttgctatgctttagcaaagagactggtggcattttgcccctgccctagagatctgtggaactttgaacttgagatgatttagcgtacctggtggaagaaatttctaagcagcaaagcattcaagaggcgatctggctttttctaaaagcatacagtcagtcgtatgcattcacaaatagatggtttgaaattggaagttaggtttaaaagggaagcagagcatacaggtttggaaaatttgcagcctgaccatgaggttgaaaagaaaaacccattttctggggaagga

SEQ ID NO: 943460 - DNA, 595 bp, Homo sapiens
aaggagagtttataggctttaaaaggccatgctgtaacaggtgagtgataacaggctttaatccttttaaagcgtgctgtgggatgggatattggtactgagcggggtaagggtgattaggttttaatgagatggtaaggggtggattataggtcgctaaggagggagtagaggtatcttatacttgtgggttaaggtggggagatataaggggaggatgtgaaggaggctttgaactgggggaaaaggtggcaatgaggtgtgtctgtagcccaggaatagtcagggaagcagataatttagttaaaatatctcggcctaataagggaactgggcaggtggrgataactaaaaggagtgcttaaaagagtattgtctaagttggcaccagagctggggagttttaagaggtttagaaacctggctgtcaatacctgcaacagttatggaggcaagggaaacaggcccttgaaaagaaggtaatgtggagtgggtagcctccgtattgattaagaaggggatggacttaccttccactgtgagagttacctagagcgtctgtgatggtcttgtaggcttctgaggcaatccggca

SEQ ID NO: 943461 - DNA, 732 bp, Homo sapiens
tcatggccctgaatttccaggtcatggtttcaggtggggaaacccacacagagcctagaggactcgtggagtggaggacatgaagtgtgtggagagatcaaggtagttgtaattcacaggacagggtattggtgaggagagagttgctccaaaagagaatccagagatgtgcagagtgatccctgagaatatagctgagtaatgatgggtacatgcatgtgaaagaaactgaagccagggggaaaatcaccaaaaagaattagcattaacagtgcttggtgttcacacagggacaggaataatgcctcttcccacgagtcaggtgagaaaacttaacattcatggtagatgactgagaagggtcttgcctcactagtaaggaataactagtcctaggctgataactgcttctatcccacctaacaaatctaaaaatgcaamgctcaaaaggatcaaactgtttccaagtaactcaactatgtgacagaaaaaagctcaagaatattacaaaaacacctagcattcaacaggtttaaattcagcgtccgacatttaataaaaaattatgaggcataaaatgatacagggaaatgccacatgtaataataagcaatcaaaattgattcaaagttgacagagatgttagaattagcaaacatggatatttaaacagttttcatataataactgtattccataggttcaaaagttaagatacagacgatattatgg

SEQ ID NO: 943462 - DNA, 611 bp, Homo sapiens
cagtgatgatgatgaacaaggtggtgactttgaaggattctgtaatttgaaggattatgtaaagcgagaaaaaaagaatgtctgatttccttacatatgcaaaaaatatatcttcagagttcattagtaagctggaagaggtgaatatcaaagacatttttaatatcaataatgaggctctagttcattcactgatgatgaaatagctgaaatggttctgaatcaaggtgatcatgaaaacagtaacaatgaagatgatgtcaacactgcagaaaaggtgcctatagacaacatggtgaaaatgtgtgatgggcttattgaaggactaaagcagcatgcatttgtaacaggacaggaaatcatgtcagtttataaagtcagtgagaggcttctaagacaaaagctattgttaaggaggcagatgackctggaggaaacattttaaaaagccatccagcagaatgctcttatccctagaggacccgtttcctggtccctccactgcttctgacatttcttctcacctaaaaaaataaaatacagtgtatagaaaccttttaattaaaacacagcatagtaggtggaaatggaaaggctgccattgtttgttc

SEQ ID NO: 943463 - DNA, 564 bp, Homo sapiens
catttgcttgtctggaaagaattttatttctcctttgcttatgaagcttagtttggctggatatgaagttctgggctgaaaattcttttctttaagaattttgaatattggtccccaatctcttttggcttgtagagtttctgctgagaggtccactgttagtctgatgggcttccctttgtaagtgacctggcctttctctctggctgtccttaatrgtttgtccttcatttcgaccttggagaatctgatgattatgtgtcttgcggttgactttctcatggagtatcttaatagtgttctttgtatttcctgaatttgcatgttggcctgtcttgctaggctagggaagttctcctggataatatcctgaagcgtgttttccagcttgtttccattctcctcatctccttctggtactccaatcaattgtaggttcagtcttttcattgaagtcccttatttctgggaggctttattcattccttttcattctttttcttgtatgcataccttatttcagtaaggtggtcttcaaactctgatatcctctcttctgcttgg

SEQ ID NO: 943464 - DNA, 620 bp, Homo sapiens
gccagttttgagtggggtccagaacaggagaaagctctgcagcaggtccaggctgctgtgcaagctgctcttccacttgggccatatgacccagcagatccaatgttgcttaaggcttcagtggcagataaggacgctatttgaacatttggcaggcccccataggtgaatcacagaggaggcctcaaggattttggggcaagtccctgccatcttctgcagataactactctccttttgagagacagctcttggcctgttactgggctttggtggaaacygaatgtttgactatgagtcatcaagttaccatgcaacctgaactgcctatcatgaactgggtgctttctgacccatctagccataaagtgggtcatgggcagtagcatcccatcatcaaatggaagtggcctatacgtgatcgggctcgagcaagtcctgaaggcacaagtaagttatataaggaagtggctcaaatgcccatggtctccactcctgccaccctgccttctctcccccagcctgcactgatggcctcatggagagttccctaagatcagttgacagaggaagagaagactagggcctggttcacagatagttctgcttgacatgcaggc

SEQ ID NO: 943465 - DNA, 484 bp, Homo sapiens
aacatttggcaggcccccataggtgaatcacagaggaggcctcaaggattttggggcaagtccctgccatcttctgcagataactactctccttttgagagacagctcttggcctgttactgggctttggtggaaactgaatgtttgactatgagtcatcaagttaccatgcaacctgaactgcctatcatgaactgggtgctttctgacccatctagccataaagtgggtcatgggcagtagcatcccatcatcaaatggaagtggcctatacgtgatcrggctcgagcaagtcctgaaggcacaagtaagttatataaggaagtggctcaaatgcccatggtctccactcctgccaccctgccttctctcccccagcctgcactgatggcctcatggagagttccctaagatcagttgacagaggaagagaagactagggcctggttcacagatagttctgcttgacatgcaggcaccaccc

SEQ ID NO: 943466 - DNA, 606 bp, Homo sapiens
aagtaagtgcctgggaagtgtagccctcctgtcaagaaaatgtggcacatatacaccatggaatactatgcagccataaaaaatgatgagttcatgtcctttgtagggacatggatgaaattggaaagcatcattctcagtaaactatcacaagaacaaaaaaccaaacaccgcatattctcactcataggtgggaattgaacaatgagatcacatggacacaggaaggggaatatcacactctggggactgttgtggggtggggggacgggggagggatagcatcgggagatatacctaatgctagatgacgagttagtgggtgcagcgcacgakcatggcacatgtatacatatgtaactaacctgcacaatgtgcacatgtaccctaaaacttaaagtataattaaaaaaaaaaaaagaaaagaaaattgcaccaggaacaaaaaaaaaataagaaaaaaataaaaaaataaaaaataaaaaggcacatcagtttagaaaaaaaaaaaaagagggaatagggagttactgtttaacatgtacagagttttagtacaggatgatgaaaaaccctggagatgtatagtggcgatgatcaatgtga

SEQ ID NO: 943467 - DNA, 600 bp, Homo sapiens
acctcaataagcagatgagtagccctggctttgggtccactaggtgcagcctgatgcctgggtctgcaggagtaggcagacatggaatttgggtttgcgtagatgggcctagtgcctcagtgcacaggggtaagcctgaagcttgggtctacaggtataagcctggatcctgggtacatggggtctagtgtgttgctggggtccactggggtggacctagtaactgtgttcatggttacaggactggagtctaagtccattgggatgggcccagagccygagtctatgaaggcaggtatggggccaacatctacaggggctggcctgaatcctgaggctgcaggagctagcctggcactggggtgggtctgaaagctggccctgaaggggcatggtggcgaagaccacagtaaagtcatgtgttaacttcactcttcttccgctctgtggaggatatcactgttggcactgtgctgtgcgaaacaggcttgggggagaggagatgtgagtaatgtgaaactgtccttactcccatcttcaatccatctttctttatttctgtactttacccaggtgttgtaatctgtcatatggattcct

SEQ ID NO: 943468 - DNA, 757 bp, Homo sapiens
gctagttgccttgtggtttcattgtgtagttgctttatgttatctgtgagctttgtatttctgtcatcttttatgatggtgtgggtcattctttcatttccatgtgtagactgcacatttgttggtggtctggtctagtggtgacaaattcccttggtgtttctttgtcggggaaaggttatatttctccttaatttatgaagcttagtttggcagaacacaaaattcctggctggcttttttgtttctttaagtgggctaaaaataggctcttaatgtcttctggattatagggtttctgctgagatttctgctgttagtataataggatttcaaaatgattagacccctctcttgatgctcttagagtgttttttttcccctctcattgactttggatagtctgatgactatatacattggtgaagttcttrcaatgtatctctaggaattctctgagcttctggtatctgaatgtctaaatctgtcccaagactagggaagttttcttaaattatttcctcaaataggtttttcatacattcttcttcttctttgttttcttcttcctctgtcattatgtaattatgtataacttgtaggtttggatgttttacataatctcatatatcctgaagtctttgtttatttaaaatttttttaaattgtttctcactgttaatttgaaagacctgtcttctaactctataattcttcttccacttggtctagcctattgttaaaattttcagctgta

SEQ ID NO: 943469 - DNA, 595 bp, Homo sapiens
ctggccatattgtgtctagaatttattccttccagtgggttcttggtctcgctggcttcaagaatggagccgcagacctttgcagtgagtgttacagctcataaaggtgttgcagacccaaagagtgagcagcagcaagatttactgtgaagagcgaaagaacaaagcttccacagcatggaagggcacttkccgctgctggctcaggtggccagcttttattcccttatttggccccacccacatcctgctgactggtccattttacagagccctgattggtccattttacagagtgctgattggtgtgtttacaatcctttatctagacactgagcactgattggtgcgtttttacagagggctgatcagtgcgtttattttcctttagctagacacagagcgctgattggtgcgtttttacagagtgctgattggtgcattgacaatcctttagctagacacagagtgctgattggtgcatttttacagagtgctgattggtgcatttacaatccttgagctagacacagagcgctgattgcgtttacaatcctctagctagatagaaaagttctccaagtccccacttgac

SEQ ID NO: 943470 - DNA, 662 bp, Homo sapiens
ctgtgcccacccagattgagggtgggtctgtctttccaagtccactgacttaaatgttaaactcctttggcaacatcctcagagacacatccaggaacaatactttgcctctttcaatccaatcaagttaacactcaatattaaccatcactgtaccagaatctctgggatgcagctaaagcagtgttaaaagggaaatttacagcactaaatgcctacatcaaaaagctagaatgatctcaagttaacaacctaacatcacaactaaaaacactagagcccagatgtgatggctcacacctgcaatctcagcacttcgggaggccaaggcgggtggatcatctgaggtcagaagttcgagaccagcctgaccaacatggtgaaagctcatctctagtaaaaatacaaaattagctgggtgtggtggcccatgcctgtaatctcagctacttggggggccraggcaggagaattgcttgaacccacgaggcggaggttgcaatgagctgagatcatgccattgcactccagcctgggcaacaagagcaaaactccatctcaaaaacaaagcaaaacaaaaaaataaaacaaacaaacaaacactagagtaccaagagcaaacaaacctcaaagctagcggaagacaagaaataaccagtatc

SEQ ID NO: 943471 - DNA, 609 bp, Homo sapiens
agagaatctaaactcttcctcaacccttggaggaggtctcttcccagggcaggattcaagtgcatctgctttgctgcaaggcaagttccctattgaacgagagctcaacccagaagatttcaaaaaccatgcctggggacttttaagaccacattttacaaacactttaaaatgtggttttgatgctgttaacctttaaccatgcttttttttttttttttttgaaaaagctctctgtttagaatcttgcaactctctcagacgaactacagatcatcatttccataactacaccaacttacagcgaacttctttctggtgtttattatctgtattgccattcattgmctcttattgctttgttgttgatgttgttgttgtttttataagcaagccttgaactctaggaagattgtaagcatcttggggttaggggatagatattttatctcagtctatttgctttaaacaaagtaagttctaacattgcgtattgagtactgtacttgttaacaattctcagcatgtgaaacatatcatttgtgcagcttggaaaagtaacttatatgattatacagaatgtttgtgatttggtcagggagtattatt

SEQ ID NO: 943472 - DNA, 583 bp, Homo sapiens
aagaacctacattgaaatattggggttgggttcccccgataccctagtaccgtttattaaatacgaagttcattccccactgctcatttttgtcaacttttttgaaaatcagatacgtagttataggtgtatggcttatttctgggctctctagtctgttccattgatctatgtgtctgcttttgtaccatgaggtccatgttgtaccaacaggtccacgttgtaccaacaggaccaagctgttttagttactacagccctgtagtatagtttgaagtcgaggaacgtgatgcctcctgytttgttgattttgtttaggattgccttggatattcaagttcttttctggttccatataaattttaaaatagtttttttctagttctgtaaataatatcattggtagttggataggaatagtattgattttgtaaattgctttggacagtatgaccattttaaccatattaatttcttcctatccatgagcatgaaatgtttttccatttgtttgtttcatctctgattttttaagcaatgtctggtaattctcattgtactgatctttcaactccctggttag

SEQ ID NO: 943473 - DNA, 673 bp, Homo sapiens
aatgggattaaacataaaaaagatttattggtgaaaatgccagtgatagataatggggaggtagttggagaggtctgggagagccatactactgtggagtatgtctagcctcagtgaaggacagagggaactaagtttggtctagaagaaacttctttaagaaactccccatcgggcgtggtggctcatgcctgtgatcccagcgctttgggaggccgaggcgggtggatcgcgaggtcaggagatcgagaccaccctggctaacacggtgaaaccccgtctctactaaaaatacaaaaaattagccgggcctggtggcgggtgcctgtagtcccagctactcgggaggctgaggcaggagaatggcgtgaacccgggaggcagagcttgcagtgagccaagacagtgccactgcactccrgcctgggcgacagagcgagactccgtctcaaaaaaaaaaaaagaaaagaaaagaaaagataagaaaaaaaaagaaactcctttagggcaattctaagaaagttttggcaagtcacccatcaaaggagccttacatatcaccaaaatgggcctgccttagcatccttgccaagagtatttactaacaagaatggatgacagcacaaccttggcacagaagtgatggtagattcaaagaccaactgctgtagct

SEQ ID NO: 943474 - DNA, 765 bp, Homo sapiens
ataagacaaggatgtccactctctcactactcctattcaacatagtactggaagtcctagctaatgcagtcaggagaaggaaagaaataaaacgaattcaaataggaaaataagttaaactgtatctctttgtggataatatgattccatacctagacaaccataaaaactctgccaaaaagctcctggatttcataaatgacttaaatcaagtttcacaacacaaaatcaatgtaaaaaattagtagcatttctatatataactattatttaagctaagagccaaatcaagaataaaataatatttacaatagtcacgtcaacaatcaaatacctgggaatacatctaaccaaagaggtgaaaggtctctagaaggcaaactgcaaaccactgctgaaagaaatcatagattatacaaacaaatgagaaaattttcatgctcatggwtttgaagaatcaataccgttaaaatgtctatactgcctagagcaatctacagattcaatggtattcctatcgaactacaaatttaattcttcacagaatttttaaaaagtattctaaaattcatatggaaaaaaaaggatctcaaatagccaaggcaattctatgcaaaaagaacaaagccagaggcatcacattacctgacttcaaactgtcctataaggctacagcaacccaaacaggatggtactgatataaaaacagatacatagaccaatgacacagaataaagaacctagaaataaaactacacacctaca

SEQ ID NO: 943475 - DNA, 765 bp, Homo sapiens
ataagacaaggatgtccactctctcactactcctattcaacatagtactggaagtcctagctaatgcagtcaggagaaggaaagaaataaaacgaattcaaataggaaaataagttaaactgtatctctttgtggataatatgattccatacctagacaaccataaaaactctgccaaaaagctcctggatttcataaatgacttaaatcaagtttcacaacacaaaatcaatgtaaaaaattagtagcatttctatatataactattatttaagctaagagccaaatcaagaataaaataatatttacaatagtcacgtcaacaatcaaatacctgggaatacatctaaccaaagaggtgaaaggtctctagaaggcaaactgcaaaccactgctgaaagaaatcatagattatacaaacaaatgagaaaattttcatgctcatggatktgaagaatcaataccgttaaaatgtctatactgcctagagcaatctacagattcaatggtattcctatcgaactacaaatttaattcttcacagaatttttaaaaagtattctaaaattcatatggaaaaaaaaggatctcaaatagccaaggcaattctatgcaaaaagaacaaagccagaggcatcacattacctgacttcaaactgtcctataaggctacagcaacccaaacaggatggtactgatataaaaacagatacatagaccaatgacacagaataaagaacctagaaataaaactacacacctaca

SEQ ID NO: 943476 - DNA, 597 bp, Homo sapiens
tacagaggttccaatttctccatgtcctcatcaatggttgtcttttttataatagccatcataataggtatgagatggtatctcattgtggttttgatttgcattcccctgataattagtgatgttgagcatcttttcatgtacctgttggtcatttatatctcttctctggagaaatgcctgttaaggtcttttgcccatttttaattatttgtttgggtttttttaatttagttattagsttgtatatattgtgattgttaatctcttaacatatatatgatttgaaaatattgcctctgactgcataagttacctttcaatgttgttggttatttcccttgctgtgaagaagctctttagtttgatatagtaccacttgtctattatgctttttttgcttatgcttttggtgtcatatccaaggtatcatagccaagaccaatgatgtcatgaagcttttctcctatgttttcttctacatgttttacagtttcaggtcttaggttagtctttaatccattttgagttgattttcatatataatataaattaagggtctgatgttattctttttcatgtagctatccagttctt

SEQ ID NO: 943477 - DNA, 627 bp, Homo sapiens
cgatctcagctcactgcaatctccacctcccaagttcgggtgattctattgcctcagcctcctgagtagctgggattacaggcatctgccaccacacccagctaattttttctatttttagtagacacggtttcaccatgttggccaggctggtcccgaactcctgacctcaggtgatccacccgccttggccccccaaagtgctgggattacaggcccagcctctcatttttatttgtatttgcccttacagtacttggaaacccctacacttgagaggttttcatggaagacaatttaggtgatgctccagtgaacaaggtggagaattatggagacaagaagagaagggacaagggatccgatgaaactatcctgtgttgtctgttrtacaactttagcttttcttgtaagatgaggagtcattacagagttttgcccagaggaacgataggatttggcttacatgttagagtcactcattattcataagtatctattagcaactctattcctgggactgttcttggtgctaaagaaggtacacaagaaacagagctttgttgtaaggttttttactctcctgatggggaaataacagggaaaagcagccactagtaacacagg

SEQ ID NO: 943478 - DNA, 710 bp, Homo sapiens
ggcttggcatggtactttttttttttttttgagacagagtcttgctctgtcgcccaggctggagtgcagtggcatgatcttggcttactgcaacctccgcctcctgagttcaagcaattctctgcctcagcctcccgagtagckgggattataggcacccaccaccatgcctggctaatttttgtatttttagtagagatggggtttcaccatcttggccaggctgggcttgaacttctgaccttgtgatccacccacctcggcctcccaaagtgctgggatttcaggcgtgagccactgtgcccagcctggcctggtatggtattttttactaaaacagatgaatgtagcctttaggggatgatatgtggccattgttctggtgaatgcgttattttccatcactcttgaaaggaaaaaaactgtttgcattcccttgaccagacaatcgtatgtatttagtcttccctcaggtggtgctaactctcctaccctctgtcatgtgtgatatatagtctgaagagaactggacctcctggacatcctgcagaacggcaccctggtccactgtatcatgcctcatgtcaatcagatatcagatgggtgagcaagatgcagcaagtgtactgaaggccttggaaagacacatgggcttcagatcatgggagacaaaccctaagtttcagaggcccatcacatcagttgtagaa

SEQ ID NO: 943479 - DNA, 639 bp, Homo sapiens
tcttcattctggacttcttgctgctaccatgtgaagaaggacatgtttgtgtccccttctgccataattgtaagtttcctgaggccttcccagccctgtggaactgtgagtcaattaaacttgttttctttataaattacccaggcttggatatgtccttatagcagcatgagaatggactaatacaataagttggtaccaggtagtgggtgctgctgtaaagatacctgaaaacgtggaagcaactttggaagtgggtaacaggcagaggttggaacagtttggagggctcagaagaagataggaaaatgtgggaaagtttggaacttcttagagacttgttgaatggctttgaccaaaaagctgatagtgatatggacaataaagcccaggctgaggtggyctcaaatggatatgaagaacttgttgggaactggaataaaggtcactcttcctatgcaaagagactggtggcattttgcttctgccttagagatttgtggaactttgaacttgagagagatgatttagggtatctggtagaagaaatttctaaggggcaaagtgttcaagagaaagcagagcataaaagtttgaaaaatttgcaacctgacaatgcaatagaaaagaaaatcccat

SEQ ID NO: 943480 - DNA, 768 bp, Homo sapiens
catttatgggcctccagaatgtgatacttgctctaactccatattggctgatgtttctctcaaagcccgaattaagatgtccgggaatcaaggggtggaaaagggagtgatttctcttactagtcccttaataattcacaagcaaagtttttgctttttgtccccattattttgggttctgcttgtctagaggtgtttgattctgacagaagacacaacagtggttctattaaactggaagctgagactgccacctggctcctttgtgtttctcgtgccatgaaccaacaagtggagaaagagcttactgcactgactggggtgctccatcctgactctcaagtggaaactgggtggtgacctcacatgagggcagatgagcggatgtctgaaccataggagatcctcttgggcacctcttagcactcccatgtcctgtgacaaaagttagcaggaaacgacaacaagccagctcagacaggattgccagtggcacagarctttcaggaatgatgaaagcatggctgctgaggtgcttgctacaaacaaagaaaatatggactgggtggggaagaagtaagtgatgaatgtcagccatgaccatgtggccagttgaagaaaacaaagactgtcatcatgattagtaatttcaaaaagggacccagctagaagagaaatgagtatcacacaaagatggataagaggaagatttgtgtatcctcttttggggaaaggatgacatgtttggggtgttcaagttgtgcatcc

SEQ ID NO: 943481 - DNA, 658 bp, Homo sapiens
ttaaaataatttgaaatctctttatttatttattttttttgagaaagagtctcactctgttgcccaggctggagtgcagtggcacaatctcagctcactgcaacctccgcctcctgggttcaagtgattctcctgcctcagcctcctgcgtagctgggactacagatgtgcgcaactatgccyggctaatttttgtatttttagtagagatgggggtttcactatgttggtaaggctggtctcgaactcctgacctcgtgatctgtctccctcggcctcccaaagtgcctggattacaggcatgagccaccgtgcccagccaataatttgaactctttatgccaggttagcaacccatatgtcacaatgtaattggcaactgtatcttgtagcctgcctaacatccattcccccttctagttgcctccatctcattttcttttaactatactaccttcccatgtgcctctgaaaaagtgagctctcccttctactcctgaatgggccctgattggtgaatccaatcagcacatcccatccaactggccacagtgactggctcaatgaaaaataacatgaatccagccaatggaaggttaggagaggtttactgggaacttagcaggaataaaagtgcttgatcttctcataaaactgt

SEQ ID NO: 943482 - DNA, 599 bp, Homo sapiens
gctgagactccgctacttgttacaagagcaaattacagtctgtttacacatctaggtaggctacagttcatgatgtacaaagaagcctttaggccagacttaaaatatgtaaggaggtagctttaggctaaatttaatttaacaagaagaaaagtaaatcaatagaaatagtagatagatttggtagattgggacattaaaacggttattgaaaccatattttatatgttcaagaagatgaaagaaagcattagtatattaaggaaagacatgaaatatatttttaaaagactaaatccaacttctagagatgaagagtacaatgtctgagatkaaaaatatactgaattcagattaatagctgattagacactgtagaagaaaagagcagtgatattgaagacatagtgatagaaactattcaaaatgaaagacacaggggaaaggacaagaaaaaatgaaagaatagcatcgaacacaactttaaggagtctaataagtgtgcattttgaaggagagtaaagcgaggataagaaaaaaattgaaagaatggccaatagttttccaagcttgatgaaaactataaacccatcgatcca

SEQ ID NO: 943483 - DNA, 808 bp, Homo sapiens
tccgaacctcttcttggtttgctcaaattgctaatttatctaaagtttttctttaacataactatggagaccttttaagaaaatcagtgacagcagcccacccttcttacagtcagggataaaatgagtttaaaacacactttccggctgggcacagtggctcacgcctgtaataccagcactttgggaggctgaggtgggtggatcacctgaggtcaggaattcgagaccagcctgaccaatatggtgaaaccccatctctactaaaaatacaaaaattatctgggcgtggtggcatgcacctgcagtcccagctacttaggaggctgagaaaggagaattgcttgaacctgggaggcagaggttgcagtgagccgagatcacgccactgcactccagcctgggcgacagagcaaggttctgtctcaaaaaaacactttcctataagattccatgtgtatgaaatagatacagacagaaagtacattagtggctgcctagggctaggggaaggagtaatggggagtgactgctaatgggtatggcagtgataaaaatattctcaaattggattrtgatgatggtagcataattctgtgaaaatactaaaaacactgaactgcatattttaaatggctgaattatatggtatgcaaattatatctcaatgaagctatctttaaaaaagcattttccttcagatatgcttcataccagaattatgtgctctagtagtatttttaattaactaaaaaacacattttagatacagttggtgaccaatgttatttaagccaaccactgtcct

SEQ ID NO: 943484 - DNA, 566 bp, Homo sapiens
acctccgatttctgtacgtcacttccttttttttttttttttttttttataaatttgttcagacccgagtcatccctggagtctcacacttgatcttagccaaaaggccgagaagcgatcatccctggagtctctctgaatctgccgtgatcctgggggctgcccgattcgtgcattgttcattgctcaattaaactcctttaaatttaatttggctgaagtttttcttttaatgatactatgatgtgtcattattatttcrcttttcaaattattcaaaattattttcaattttatggtatggtacataccgtaaaatttctgtactcttttaaagcttacatttcagtggttttcagtatattcacaaggttgtgcaaccatcaccactatctggttctagaacattttcttcacccccaaagaagcttcatacccattagcggtcactttccattccttcttccccacagcccctggcaaattctgacggttttaatggttaaatcttttcaattacatcacaagacaccatggaactcattactctttctggcacatagtag

SEQ ID NO: 943485 - DNA, 708 bp, Homo sapiens
cttagaaaacctaaggggttttactcccctgcttggagcgctccaaggaggcgcttgatgcttggagtaaaatctatactcgtccccatcctatctagtccctaatgaccctgcaatgtcatccttccccactgtcccttgtcaccctgctccagccacactggcctctccccatgcaacaagcccactcttgcctcagggccttcccagttactattctgcttttctttttttttttctttttgaggtggagtctcgctctgtcgcccaggctggagtgcagtggaggatctcaactcactggaacctccgcttccagggttcaggcgattcttctgcctcagcctcccgagtagctgggacaacaggcgtgtgccactatgcccagctaatttttgtacttttggtagagayggggtttcaccatgttagtcaggctggtctcaaactcctgatctcaggtgatccacctgcctcggcctcccaaaatgctgggattacaggtgtgagtctctgtgtcaggcatcccagtcactattccttctgccaacacactcttccccagctcttcatgtagctggctgcttcttttcattcatctcacagcttcaatgtcactgcttccaaaggaagacctcccttctaagtggtctttctcatgccaaaatgactgtgtaccccataacttattttaatgtctccatagca

SEQ ID NO: 943486 - DNA, 708 bp, Homo sapiens
cttagaaaacctaaggggttttactcccctgcttggagcgctccaaggaggcgcttgatgcttggagtaaaatctatactcgtccccatcctatctagtccctaatgaccctgcaatgtcatccttccccactgtcccttgtcaccctgctccagccacactggcctctccccatgcaacaagcccactcttgcctcagggccttcccagttactattctgcttttctttttttttttctttttgaggtggagtctcgctctgtcgcccaggctggagtgcagtggaggatctcaactcactggaacctccgcttccagggttcaggcgattcttctgcctcagcctcccgagtagctgggacaacaggcgtgtgccactatgcccagctaatttttgtacttttggtagagacggggtttcaccatgttagtcaggctggtctcaaactcctgatctcaggtgatccacctgcctcggcctcccaaaatgctgggattacaggtgtgagtctctgtgycaggcatcccagtcactattccttctgccaacacactcttccccagctcttcatgtagctggctgcttcttttcattcatctcacagcttcaatgtcactgcttccaaaggaagacctcccttctaagtggtctttctcatgccaaaatgactgtgtaccccataacttattttaatgtctccatagca

SEQ ID NO: 943487 - DNA, 801 bp, Homo sapiens
gtgagggtaaaatacacactaaactgtgaatttagtaaaaaaaaaaaaaaaaaaaaagtaaatctcttatattgaatatatttttgatcttttgggttaaattgaatatattacttaaagtaatttttttttttggagactaggtcttactctgtggcctaggctgaagtgcagtggcgtgatcctggctcactgcaacctcaacctcctgagctgaagwgatcctcccacctaagcctcctaggtagctgggaccacaggtgtgtgcaaccgaacccggctaagtttattttttgtgtgtatttttttggagagatggagtttcgccatgttgcccaggctggtcttgaatttctgggctcaagcgatcctcccacctcggcctcccagaatgttgggattacagcaggcctagcctaattttgttaatttttaaatgtggctaccagagaactttaaatgaactatgtggctcacattatgtattgactgaacaatgcatctgtagaggctgtctttggaagtttactatataaccaagacccacgaacactcatgcagttcccaggggtatcatggactgcttaaagtcccatctgtgaaaccctaacatgatgattttaaaggttacttttcatttacattcaaaatgtacataaagaatgtccctgtgagattagatcacttaagggagaaccatgtctgtgtttcactacgcagaaaatggtttcatcgtctttgtcctgaaagccactgcctggaagggctgtgcagcgctcagagtgggagaggcagacctct

SEQ ID NO: 943488 - DNA, 626 bp, Homo sapiens
ttacaacgcaaattgagctcccagcctcacagggtaaaagtgagggcattgattaagaaagaatgggatcctgtaaattgggataggaaggtgcgggaagaccttgatgaagctggggacactgagcccctaaattctgattattttgcttcgcaagtggcagatgtctccccatctccagtggaattgacctccttacccccagcagaaatggcctcctcaaacccagtggccatggccttcccactctcaggtaatggcatcatcatcccagtggtatcagcctgtccacttgggtctcaggaggattaaccctgcattgcctgaggaaattgtaatgacttcacttgaggcagytgccttggaagacaatgctgattctcttcaggacccactcccaccatccctctttgcttccagacctataacttgacttaagttctaacaggcccctaaaggtgagccatgtgtgacccaagagagtacttatagtcagaagaactgcttgagtttttaaattaatgtaggcagaagtccatggaacatgtgtagggctgtatactaaaagtgtgggataattgtggaaggaacataaaattgggtcaggctgaatttattgacatggg

SEQ ID NO: 943489 - DNA, 618 bp, Homo sapiens
caatgaaactcaagttaaatatgtattgcaacttgtgctatcaattaaagctggtgtgaagtgaacactatttgtaaaacattgaaaaatgtgttatctagaatatgaaagtaaatttttataatttgaatgtttagagccattcattaatcattttcaatccagcactttgccacaatcacaataaatttgatgatcactgtttgaagcctgtattgaaaaagatttcttatttaatagtaaaatgtgaaaagctatatgctatgaaggaaatgcttggtttttttttcttttttttttttttctttttagaaggaggcttgctctgttgcccaggctggagtgcattggtgccgtcttggcttaccacaacctccgcctcctgggttcaagcgattctccctcctcagcctcttgagtagctggkattacaggcacacgccaccccacccagctaatttttgtatttttagtagggatgggttttcaccatgttggttggccaggctggtcttgaaatcctgacctcaggtgatctgcctgcctcggcctcccaaagtgctgtgattacaggcgtgagccacctcgcccagccaacacttgttatttctgttgtag

SEQ ID NO: 943490 - DNA, 655 bp, Homo sapiens
cacaacacccctctgaggtgagtgagacctcatccattcactgcaaccttcttctgctttttcctctctacagagctgaagagacagaaactatttcccagcctgccttgcaaacagggctccacatatgatttggaagctgctgattaggtgcagccatgagagagctgactttggaactgaattaagtgcgaagggagtggcagtaagggtcatatatattttwgttggtgcagatctagtcggtgtggaggggccatgggggtaaacattgtcatggtagcccctgatctccatcacagttgaggtgttacatcactggaagcaaaggttgattcagaggtcctggggctgtgccacttcctgattctagagttttgtgcttgagttaaaagaggtggcttccctggtgggttagtcctgcagtattgttttatgagtctttcctgcaggcctcttctctagcctgcttctttgacccatgtgaaggttttgtgagcacactactcctatatgaaatccatttctgcttaaaatagttagagtggttcctgtgactgcaagggaaccttgcctgaaacagatggaactatcaagcccatcatacagatgcatacctgaaaaaatgaatggctactcaaggtcatagaggttg

SEQ ID NO: 943491 - DNA, 562 bp, Homo sapiens
tgtcaatctgggtggtgccccctgatccatcaagggcaggatttacaaaatatcttaagcactaatcttgagtgcagttttaggagggtcaaaatcttgtagcctccagatgcatgactcctaaaccatggtttctaatcttatagctagtttcttggtctggtccccaggcaagagggaagtatatcttaagaaggagctgttctttgggaggccgaggtgggcggatcacgaggtcaggagatcgagaccatcctggctaacacgrtgaaaccccatctctactaaaaatacaaaaagtagctggttgttgtggccagcacctgtagtcccagctactcaggaggctgaggcaggagaatggcgttgaacccgggaggcagagcttgctgtgagccgagatcacgccactgcactccagcctgggtgacagagtgagactccaaagaaaagaaaaggagctgttatcatctttgttttagactatagattataaaccaggctgctcccaaagttggttcggactacccccagggatgggcaagaacagcttggggctgga

SEQ ID NO: 943492 - DNA, 552 bp, Homo sapiens
ccctatactgttctcatgatagtgagtgagttctcacgagatctgatggttttacaagcgtctggcatttcccctgctggcacttcttctcttgcttgccaccacataagacgtgcctttcaccttccaccatgattgtgaggcctccccagccacgtggaactgtgagtacattaaacttctttttctttataaattacccagactcaggtatgtctttatcagtagcatgaaaacagactaatagagggtgtttgcaaytctccacctccacagatttcttggtgtgtgagataagagctatcagtgagaaaggacaagggagagtttctaaaactgtccaccccagccaaaacagtaaatcaaaaataacagcacattctggggtaggggttaggggaggtttggatcttaaagcttagaactatccttaaagaccttaagggtgcaggggtatgtcccctctcatatcaccatttaattaatttggtccctgcagaaaccagacaggtcctggaggatgacagactcctgtaaactcaaacaagtagc

SEQ ID NO: 943493 - DNA, 590 bp, Homo sapiens
gttgtatcttcactaaagcacaggccccaggtacatgctgtgcagcctttgatctggggactgtgttcttttcatctctatcagaaaggaggatcagaaacagttcacagtcactcagaacacacaacagtattcacttagagcactgacccagggctatrttaactctccctaccatgtcatcatattgtctgaggacacctgggccacttggacctctgcagaacatcatcgtggtgatgacacttgtaaaccagacccaatgaacaagaagtggcaagtgtgctgggacctttgtaagtcagactcataaaataaataaagaggcaggaaaagttctatgaagcttcaggggcctgccacattagtacacttttaaaagtccaggatctgcagcatgccaggataacttggccaaagtaaagaataaattctacattttactcccctaaaacaaagaatgtaacacaacactctttggattctggaaatattaattccacaattgggaatattgatcacacccacatggcaagggacccaaaaggctgccagttttgaataggaaccaaaacagcaaaaggtccagg

SEQ ID NO: 943494 - DNA, 619 bp, Homo sapiens
tctctacaaaaaagtataaaattagccaggcatagtggtccatgcctgtggtcccagctactcgggaggctgagggaggagaatcacttgaactcaggagttcaaggctgcagtgagctatgattgcactactgcactgcagcctgggcagcagagagagactatctctgaaaaaaataagaggctgggtgtggtggcttacacctgtaatcccagcactttgggaggctgaagagggtgaatcacttgaggccaggagtttgagaccagcctggtcaacatggcgaaaccccttatctactaaaaatacaaaaaattagccatgtgtggtggtgcgcacctgtaatcccagcwactcgggagtctgaggcaggagaaccgcttgaacccaggaggcggaggttgcagtcagccgaaattgtgccactgcgttacagcctaggtgacagagtgtgattctgtctcagaaaaaaaataggacaggcttcagaaccggaacaggttctaagcactctggcctgcaacgtgatcaggcaatatttatggacaaaacaaaagtgagatacagaaatagtttaattggttgcagcttggcattttgccttatttaaatcagctg

SEQ ID NO: 943495 - DNA, 663 bp, Homo sapiens
cgcctgtaatcccagcactttggggggccagggcaggcagactgcttgagcccaggagttcaagaccagcctggacaacatggtgaaaccctgtctctacaaattacaaaaaattagccagatgtggtggcacgtgcctgtagtcccagcttctcaggaggctaaggtgggaggatcatctgagcccagcgaggttgaggctgcagtgagccgagatcgcaccactgtgctgcagcctgggcaacagagtgagaacaaaaccccagctctaggtgtgccctcggcccctccaggcagcctgtgtcctctccccaggatttaagatcatgccgctcttgttttgggctttttcaggacagttaactcttaggaagaagggacctccaaacctctaagtcgccaaaccaccgcaccgccctgggtggaagaaaccgcttcggcagcagaggaaacagcagcttcrcagagcagcctggcccgagtggctacaccgggtctgtctggtctcagctctggcctctgagtcattagcgttgttttcttctgaggccagggcttcagattagtcaggggctcctgtttcctggctgataaagcaggtggaagaaacacaatctggccgcctagaggctgcgtgaagctcgtgaccctgcggggtgacta

SEQ ID NO: 943496 - DNA, 831 bp, Homo sapiens
gaggatagacactgcacctgcactgtcccctgctctgtccccagcagctacaacactgcctggcacatagcatgacattggtatttattgcatggttgaaagaatgaatgaattggagtcgttgaaggctgccttttagaatggtgactaccctgtattcagattcttttcaagatattgtctttctaaatgccccagagtactaggaggacacaacctacgtttaaatttaaaaacacccagtgcatttccaaaagaaagttgctttaagttcgctgcattaaattaaattcactgaactttctcagggctaccctgagatagcccagacatgcagcgggtcttgggaggcttggccattgtcaccatgataccaacttggctcctctccccctgaccccaaaagtcgaataagctctttaccttcattggtgtggaaatagagctcagggcagttttagtagctatatgtggagggagaattggaggggccctaaagtaagttggtttgctaagagccaccctttcaagagaagtcaaagggcagtgccaaatcctgctcatcgccagggtttctcaggtgctgtctggaaagttgggcccrtggcatcagcccggtttctaacctggtccccaccacaggcctggatcacatgctcccagtcccctcccagttcccatcttaggtccgggaactcctcctggccttctctagttcttggagacctgtcaagaggtccctgctccatccaactctgctcatatcccacaaattctctatctgctcactgtctaatgccggcaacagtcacagtgcaaggcaagaggctc

SEQ ID NO: 943497 - DNA, 486 bp, Homo sapiens
tgacctgctccctgtgggcctgagtcctctcctcttcgtccctccaggtcaccacacaggccctggggacaggtacagctcacagctaggaagtcatgatcccaggattcaaaccccatctttgtgtaactgcacagccagtgccctaatactctccagttttacccgagagtttcagtggcaagscttgggcctcaattgtgtttccaccaaggtggaaaattttctgctggaaacagttatgagtacagttaagagtcccccacctgaccacgtgggacaggtcaggtgatacaaagttgtcctttatgtgggaccaaaatgtacttcccttcagtctctgttgagggaggaggaatgagtctaattcctgtatcctgtgactgtcccttcaaatatttcaagactgtcatcttcctccccagtcttctcttccacagaccaaacaaccttcagctcctatgcggcacctggcatgaatgcttc

SEQ ID NO: 943498 - DNA, 630 bp, Homo sapiens
ccgaaccctgtttaagagatttttatccaggtttcattatgtcattggccattagtgattgaattcaacctccagcccctttcccttcccgcaagaggagtagggacatgttggagctgaatgaaagttacaaccctctgatcacatggtgtgttgcaccagccccaccctgaatccatcctagagcccgcaattagccacctcattagyagaaactgtgatttgactaagggagtcattatgaataacaaaaacactcctattgcctaggaaattccaaggggtttaggagttctgtgtcaggaactggggacaaagaccaaatagattttttataccaaactccctaaaccaataacccagtttaatcgtgagaaaaacatcagacaaatcccagcagagggacattgtacaaaatagccaacctaaaatcggtcaaggttgtgaatgtggtcagaatcaaaatggtggagtcatttgtgttaaaagagagagaaaaaaaaaatgacaaatagagctggggaaagccatgaagaggattcttgttcctaaatgcgtgatgtcacaaatgctcataaaagatcaacactgtccacagaggccatgtcagccttcccaaaagaagattcc

SEQ ID NO: 943499 - DNA, 647 bp, Homo sapiens
acttaaaaaaaaaaaaaaagccaacataacaatgacagcaaaataagacaaaagtctacacactcagagagagagacaggagagagaagagagaaaactagattattctcatttgtaaataccagtgcaaaggtcctaaataaaatattagcaaatgcaatccagtagcaacttaaaacaacactayacataaccaagtagaattcagtcaaggaatataagcatagtttaataatgagaaaactggtaatacaactcatattaatagctattaagagaaaaattatatatagtcatctccatagatgctgaaaaggcatttgaaaaaatttatgcattcttgataaaattcttagtaaaataatagaaggatgaccaaatatatctaccttaccccaaagccagcatcaaacttaatgagaaaacaagatatcatccatttaagtcaggaataaaagaaggatgtccactatcaccacaattaacgttctgcaagtactagttaatacaataaaactagagagagaaagaggtaattcaaaggcaggaggtaaaatgatcactacttgcacaatgagtgtatacctgaagaaacccaagggaatccactgaaaaactactatcaacatgaagagagtttcagaaaa

SEQ ID NO: 943500 - DNA, 647 bp, Homo sapiens
acttaaaaaaaaaaaaaaagccaacataacaatgacagcaaaataagacaaaagtctacacactcagagagagagacaggagagagaagagagaaaactagattattctcatttgtaaataccagtgcaaaggtcctaaataaaatattagcaaatgcaatccagtagcaacttaaaacaacactatacataaccaagtagaattcagtcaaggaatataagcatagtttaataatgagaaaactggtaatacaactcatattaatagctattaaragaaaaattatatatagtcatctccatagatgctgaaaaggcatttgaaaaaatttatgcattcttgataaaattcttagtaaaataatagaaggatgaccaaatatatctaccttaccccaaagccagcatcaaacttaatgagaaaacaagatatcatccatttaagtcaggaataaaagaaggatgtccactatcaccacaattaacgttctgcaagtactagttaatacaataaaactagagagagaaagaggtaattcaaaggcaggaggtaaaatgatcactacttgcacaatgagtgtatacctgaagaaacccaagggaatccactgaaaaactactatcaacatgaagagagtttcagaaaa

SEQ ID NO: 943501 - DNA, 619 bp, Homo sapiens; identical to SEQ ID NO: 943201

SEQ ID NO: 943502 - DNA, 514 bp, Homo sapiens
tataaagagaaaatagcagaaggattatgtgaagacgtaatgactggaaagtctttagttcaatgaaaaccattaatctatacatctaaaaaacttaacaaaccacaagtaaggtgaacccaaagagattcacactgagacacatcataatcaaactgttgaaacatgacgatgaaggtagaatcttgaaggcagcaaaagataaacaactcattacatgcaagtgattttcaatgatattaatagcttattcctcattagaaaccatggaagccagaaggcmatgagaagacattattaaaagcactgaaagaaaaagactggcaaccaagattccatatccagcaaaattatccttcacaaatgaaggagaaatgaagccattccatgaacaaaaatggagagactttgttgctagcagacttgtactccaagaaataataaacggagtccttcagactaaaataaaaagacactagatagtaactcagatgagaacaggtgtgttcagggt

SEQ ID NO: 943503 - DNA, 715 bp, Homo sapiens
ttttattggaacataaccacattcatttgcaagttgtccacggccactttggtgctactgtggcagaattgagtagttgctgcagagaccgtatgatgagaatatgtggcattctcatcattttgccctgccgctctgtgcaatgtaaattgcagtgacacagttataactcagcagcattttgaatgccacttgtattccatgctacaacattttattttttattaccaatatatacaagaaaagtggatttcaaatatcattgtgcttttaaggtacaatggagtatgaattgttactgaattaggcagcaaagtgcaatgacatggtagctgtcctaaggaacacaatacaaccaggtgcagtggctcatgsctgtaatcccaacgatttgggtggctgaggtgggagaatcacttgaacccaggatttggagaccagcttgggtggtatagtgagaccccccatctccacaaaaagtaaaaaaaaaccaaaatacatgttgttacttcccatcttagcactcatcaagatatttctaattcacaagaaagcaatggtcagaaaaattagaaaatttaaaattgaatatctcatcacagaatttattcacaaaaataaaaaatgaaaatgaagctacaaccaaagtaagtttcagatggctcatttgttagccaagcaaggaaagtcacttatggtgaattaattaaatcat

SEQ ID NO: 943504 - DNA, 466 bp, Homo sapiens
atatttctgtggcttattaccctagttgaaatacacacctggcattctacaaaaggaatcgaagtattgtctcaaaagactatcttcataattaatcaaggcccactgagccatagggcctccagcctttccctaactgagggatacttctgctaatggtgaagcttggtgttaaaaataatgtttagacctgttttgtgatattctgaatgtagaacagccaaagccatttagattagtgtcatttgttctcataaatgtgaataaaatgctttgtgggactaycaaattctttaaaacacgttacataaaatgtgcagataatcttaagagattccttttagagttggtgtgtttcattcaataaacttgttttatcaaatcacataacatttatttaattgtcaccaatcattcttttatttcatcatatagagtattgcatatttgtcttatttattttttt

SEQ ID NO: 943505 - DNA, 766 bp, Homo sapiens
tgtcagactggatttggagaatcaatatctctgcttcctcatcccttgggtgggaaaatactgagagcttatttgacacactggcctgggtcctcagcaggactgagccacttgtgcccgtggtgacagcttgctcattaatgcacctagtattttcttctccccttccctgtctcactttccttctctaccaggctttctgggatcacctcccaagtattctacttatactcaaatccttgtctcagagtctgctttgagaaaaacccaatccaatatagctttcttgctgtttcctaaacatgccaagtatactgcagggcctatgcactgacttttaactctacccctaatgcttttcttccatatagctgaatggctcactcccatgctcactcaggtctccactcaaatgttactttatccaaggccttccccagcaagcacactttccctcattcttattctyattcttttgttttgttttgttttgttttttgtgagacacagtttcgcttttgttgcccaggctggagtgcaatggtgcgatcaccactcaccaccacctctgcctcacaggttcaagcaattctcctgcctcagcctcccgagtagctgggattacaggcacgtgccaccaccctcgactaattttgtatttttagtagagacagggtttcagcatgttggccaggatggtctcaatatcttgacctcgtgattcgcccacctctgctggattacaggcatgagccaccgcgcctgg

SEQ ID NO: 943506 - DNA, 581 bp, Homo sapiens
tgctgtctagacagctgatttatcaacacaggggaactgaaatagagaaagagcaatttaccagggccagctatgtgggagaccagagttttattattactcggattactcaaaattacccaagaatttcgggatcagaggtgttttttgtttgtttgtttgtttgtttgggacagagtttcactctgtcacccaggctggagtgcaatggttcgatctcggcaacctctgcctcctgggttcaagcaawtctcccgcctcagcctcctaagtagctgggatacaggcacaccatcaccatgcctggctaatttttgtatttttgtagagacggggtttcgccatgttggccaggctggtcttgagttcctgacttcaggtgatccacccacctcggcctcccaaagtgctgggattacaggcatgagccactgcgcctggccttttttttttttttttgagatggagtgttgctctgtcccccaggctgtagtgcaatggcgtgatctcggctcactgcaacctccacctcccagcttcaagtgatcctcctgcctcagcctcccgagtagttgggatta

SEQ ID NO: 943507 - DNA, 573 bp, Homo sapiens
aacagtgggtttaaaatattcagtaatgtgttattccatttccagagcacaggcaagagtagacgtaacataattcttcagaaccctaggattttcagaatggtcaaagaccactggcttcagcttaaagtcaccagtgacatttgcccctaacaagagagccagcttgccctttgaaactaagcactgagttctctctaggtatgaaagtcctagatgtcatctccttccaaaggaagtcttttgtctatattgaaaatctgctttttcgtctcgctgccttcatcaatgatcttagctagacctggataacctggtgttgcttttctgttaggtagcacttgctgcttyaccttgtactttcgtgttatggggacagcttctttccttaaacctcatgaaccagcctctgctgcttccaactttttttttttttttttttttttttttgagatggattttcactcttgttgcccaagctggagagcaatggcgtgatctcggctcactgcaacctccacctcccgggttcaagcgattctcctgcctcagcctccgtagtagctgggagta

SEQ ID NO: 943508 - DNA, 627 bp, Homo sapiens
ctcctgactcaggcgtttgcccacctgtgccttcagccaggcatgcttttccccagggcccgctgggcacccctgagcctctgcccagcctccgctcagataccacgtcttcagtgagggctgcccccacctacgcactgtggtaaaatgtaccatcttaaccatttttttttttttgagacggagtctcactctgtcgcccaggctggagtgcagtggcgggatctcggctcactgcaagctctgcctcctgggttcacgccattctcctgcctcagcctctggagtagctgggactacargcgcccgccaccacgcccagctaatttttttctatttttagtagagatggggtttcaccgtgttagccagcatggtctcgatctcctgaccttgtgatccgcccacctcggcctcccaaagtgctgggattccaggcgtgagcagccgcgcccggccccatcttaaccatttgtaaatgcatagttgagtagggttaagtacgttcatgttgtgtaaccatcaccaccatccatctccagaactttctcactttcccgaactgaaactgttctcagccaacaatgattcctcatccccctcctcagcccctggcaaccactgttc

SEQ ID NO: 943509 - DNA, 618 bp, Homo sapiens
ctcctgactcaggcgtttgcccacctgtgccttcagccaggcatgcttttccccagggcccgctgggcacccctgagcctctgcccagcctccgctcagataccacgtcttcagtgagggctgcccccacctacgcactgtggtaaaatgtaccatcttaaccatttttttttttttgagacggagtctcactctgtcgcccaggctggagtgcagtggcgggatctcggctcactgcaagctctgcctcctgggttcacgccattctcctgcctcagcctctggagtagctgggactacaggcgcccgccaccacgcccagctaatttttttctatttttagtagagatggggtttcaycgtgttagccagcatggtctcgatctcctgaccttgtgatccgcccacctcggcctcccaaagtgctgggattccaggcgtgagcagccgcgcccggccccatcttaaccatttgtaaatgcatagttgagtagggttaagtacgttcatgttgtgtaaccatcaccaccatccatctccagaactttctcactttcccgaactgaaactgttctcagccaacaatgattcctcatccccctcctcagcccctggcaa

SEQ ID NO: 943510 - DNA, 627 bp, Homo sapiens
ctcctgactcaggcgtttgcccacctgtgccttcagccaggcatgcttttccccagggcccgctgggcacccctgagcctctgcccagcctccgctcagataccacgtcttcagtgagggctgcccccacctacgcactgtggtaaaatgtaccatcttaaccatttttttttttttgagacggagtctcactctgtcgcccaggctggagtgcagtggcgggatctcggctcactgcaagctctgcctcctgggttcacgccattctcctgcctcagcctctggagtagctgggactacaggcgcccgccaccacgcccagctaatttttttctatttttagtagagatggggtttcaccgtgttagccagcatggtctcgatctcctgaccttgtgatccgcccacctcggcctcccaaagtgctgggattccaggcgtgagcagccgcgcccggccccatsttaaccatttgtaaatgcatagttgagtagggttaagtacgttcatgttgtgtaaccatcaccaccatccatctccagaactttctcactttcccgaactgaaactgttctcagccaacaatgattcctcatccccctcctcagcccctggcaaccactgttc

SEQ ID NO: 943511 - DNA, 715 bp, Homo sapiens
gctgtaatcctgtttatgggatatttgttccacttaccatgatgaatttggctgcagaaatatcagtatatttgcctttggagtcctgcctcagacccctgatgagggctatgcaatctatagtacttgcttttatttgtttattctgctgtaaatggtttgtttgaattttttttttttttttttttttttttttgagacggagtctcgctcygtcgcccaggccggactgcggactgcagtggcgcaatctcggctcactgcaagctccgcttcccgggttcacgccattctcctgcctcagcctcccgagtagctgggactacaggcgcccgccaccgcgcccggctaattttttgtatttttagtagagacggggtttcaccttgttagccaggatggtctcgatctcctgacctcatgatccacccgcctcggccttcctaagtgctgggattacaggcgtgagccaccgcgcccggcctgtttgaatgttttgtttgcgaaaatagccttaattttcccttcactgtttccatgcaccttagaaataggacttcgtagccggttgtggtcatacacacctacggtcccagctacttgcaaggctgaggtgggggtgtggcaggccaggtctcactaacacaggcctccataacaactgtttcagtactgaccaagtggtaaagttaaatattaaaagctgaaagagcca

SEQ ID NO: 943512 - DNA, 607 bp, Homo sapiens
aggtttgctgggtcccatccctcccaggtttggactggtacacgggctacttttctgatgtttgaagcgatttccagaacctcttctccattattgcctatgttaagacagcaattggagatgttaaacttaccacagcccgcaccctcttctgctaataagtagtctagggccagcctgttttgataaattgccgcgygcatttggttttgttgttgcgcgagcatttctagggctgaggcagtttggttagtgattatctctagaacagcttgtagtctaatcgctctatttggcatatatatgggagtgcgataaccccatgaaccatcctctgcccaagtggcaggaccatagtattcaatgatccgttgcagaggccactcgtcctctcacaatctttggctccctcctacctccaaggatcatttttctctggttatcatacacagggactctgagggtgttgcccgcctgcttcggaagtaaaaagaatccaggttgaattgtgcctaggaagcaagtaccttgccagtgataaggtagctgtgagtaagcctgggttccccatatccacaggaatccgtcagtggcagtccattgtcag

SEQ ID NO: 943513 - DNA, 607 bp, Homo sapiens
aggtttgctgggtcccatccctcccaggtttggactggtacacgggctacttttctgatgtttgaagcgatttccagaacctcttctccattattgcctatgttaagacagcaattggagatgttaaacttaccacagcccgcaccctcttctgctaataagtagtctagggccagcctgttttgataaattgccgcgcgcatttggttttgttgttgcgcgagcatttctagggctgaggcagtttggttagtgattatctctagaacagcttgtagtctaatcgctctatttggcatatatatgggagtgcgataaccccatgaaccatcctctgcccaagtggcaggaccatagtattcaatgatccgttgcrgaggccactcgtcctctcacaatctttggctccctcctacctccaaggatcatttttctctggttatcatacacagggactctgagggtgttgcccgcctgcttcggaagtaaaaagaatccaggttgaattgtgcctaggaagcaagtaccttgccagtgataaggtagctgtgagtaagcctgggttccccatatccacaggaatccgtcagtggcagtccattgtcag

SEQ ID NO: 943514 - DNA, 728 bp, Homo sapiens
gtgtgtgtatatatatatatatatatatatatatgatggaatactactcagacataagaagtaatgaagtaatggcatttgcagcaacttggatgagatcggaggctattattctaagtgaagtaactcaggaatggaaaaccaaacatcgtatgttctcacttataagtgggagctaagctatgaggatgcaaaggcataagaatgacacaatggactttggggactcagggggaaagggcgggaagggggtgatggataaaaaactacaaatcgggtgcagtgtgcactgcttgggtgatggctgcaccaaaatctcasaaatcaccactaaagaacttcctcacgtaaccaaataccacctgttcccccacaacctatggaaataaaaacgtttaaaaaaaggctgttaaatgggctaaactcaccaatgaaaagcagagatggttggactggctaaaaatcaaagacttaaagtatgctgtctgcaagaatcacacctgaaagacaaagacagactgcaaatatagaaatggtcaaagatacagcattcaaaccctgaccccggggcggctggcacggccacgaacatcgcaggcaacatagactccagggcaaggaagatggacgaagacacgtggagacagttcatcagtgaagaaagggtcagcctgttaaggagacccacagtcctaaatatgcacgcacgtgatggaaagcttcaaaat

SEQ ID NO: 943515 - DNA, 728 bp, Homo sapiens
gtgtgtgtatatatatatatatatatatatatatgatggaatactactcagacataagaagtaatgaagtaatggcatttgcagcaacttggatgagatcggaggctattattctaagtgaagtaactcaggaatggaaaaccaaacatcgtatgttctcacttataagtgggagctaagctatgaggatgcaaaggcataagaatgacacaatggactttggggactcagggggaaagggcgggaagggggtgatggataaaaaactacaaatcgggtgcagtgtgcactgcttgggtgatggctgcaccaaaatctcacaaatcaccactaaagaacttcctcacgtaaccaaataccacctgttcccccacaacctatggaaataaaaacgtttaaaaaaaggctgttaaatgggctaaactcaccaatgaaaagcagagatggttggactggctaaaaatcaaagacttaaagtatgctgtctgcaagaatcacacctgaaagacaaagacagactgcaaatatagaaatggtcaaagatacagcattcaaamcctgaccccggggcggctggcacggccacgaacatcgcaggcaacatagactccagggcaaggaagatggacgaagacacgtggagacagttcatcagtgaagaaagggtcagcctgttaaggagacccacagtcctaaatatgcacgcacgtgatggaaagcttcaaaat

SEQ ID NO: 943516 - DNA, 596 bp, Homo sapiens; identical to SEQ ID NO: 942979

SEQ ID NO: 943517 - DNA, 711 bp, Homo sapiens; identical to SEQ ID NO: 942980

SEQ ID NO: 943518 - DNA, 744 bp, Homo sapiens
atcaggcccagagagaaattaaaatgagacagtaatcacatgctgtttctcctagagctgtgtcaccatctctggagactgcttcctctcaccacaagtagctgtaagtgaacctaaggatgctgcacacaggacaccgtaatcccatacaatgtatagccaatcactaatcaatattatttctgtaaaccaatgagaattcctgatagacaattttgtatcagcctgctccttgtcccccttttgtctttaaaaacctgcttgtcggctgggcgtgatggctcacacctacaatcccagcagtttgggaggccaaagcaggtggatcacgttaggtcaggagttcgagaccagcctggccaacatgatggaaccccgtctctaytaaaaatgcaaaaaaattagctgagcttggtgtctggcacctgtaatcccagctatctgggaggctgaggcaggagaatcacttgaacctgggatgctgaggttgcagcgagccgagattgtgccactgcactccagcctgggcaacaggagtgaaactccgtctaaaacaaacaaacaaacaaacaaacaaacaaaaccctgctgtcacgaaggtcaaaagcagctctcaccaaggcaatgtggaagtgtgtcttgctgtcctcaactttagcccacgcacagtctctacatcaattctgcctcagcttcttccttcaacaaggaagaaaggaaggaaggactgacaagacctggggg

SEQ ID NO: 943519 - DNA, 744 bp, Homo sapiens
atcaggcccagagagaaattaaaatgagacagtaatcacatgctgtttctcctagagctgtgtcaccatctctggagactgcttcctctcaccacaagtagctgtaagtgaacctaaggatgctgcacacaggacaccgtaatcccatacaatgtatagccaatcactaatcaatattatttctgtaaaccaatgagaattcctgatagacaattttgtatcagcctgctccttgtcccccttttgtctttaaaaacctgcttgtcggctgggcgtgatggctcacacctacaatcccagcagtttgggaggccaaagcaggtggatcacgttaggtcaggagttcgagaccagcctggccaacatgatggaaccccgtctctattaaaaatgcaaaaaaattagctgagcttggtgtctggcacctgtaatcccagctatytgggaggctgaggcaggagaatcacttgaacctgggatgctgaggttgcagcgagccgagattgtgccactgcactccagcctgggcaacaggagtgaaactccgtctaaaacaaacaaacaaacaaacaaacaaacaaaaccctgctgtcacgaaggtcaaaagcagctctcaccaaggcaatgtggaagtgtgtcttgctgtcctcaactttagcccacgcacagtctctacatcaattctgcctcagcttcttccttcaacaaggaagaaaggaaggaaggactgacaagacctggggg

SEQ ID NO: 943520 - DNA, 609 bp, Homo sapiens
ctgtgcctagctaattttgtatttttagtagagagacggggtttctccatgttggtcgggctggtcttgaactcctgagctcaagtaatccgcttgcctcagcctcccaaagtgctgggattacaggtgtgagccaccacgcctggccagtgttctggtctgtttgtgatgggtgtaagaatctgtctctttaaagaggtgcctctggccaggtggttacctctgtcaccagagatgagtcacccagtctcagctcgcaggccttcctggacgttcccagatagtccccagkgctggaggcctgtcgaaagtgtagctccaccacgccctttgatctcttcctcctctcctcttccccacccgcttccccctccttccccctccttccccctcctccttccccctcctccttctctcctgctgagggcatttggcctcatagataagcggtttctaatgagctcactggtttccgatggtgggtggggagtgactctgggctttctgtgctgcctcttcgacctcgtccctgttttctgctgtgcggagcatggccctttcctaatccgaaagagccgcacagtcccttccagtgctgcctgtggtctc

SEQ ID NO: 943521 - DNA, 609 bp, Homo sapiens
ctgtgcctagctaattttgtatttttagtagagagacggggtttctccatgttggtcgggctggtcttgaactcctgagctcaagtaatccgcttgcctcagcctcccaaagtgctgggattacaggtgtgagccaccacgcctggccagtgttctggtctgtttgtgatgggtgtaagaatctgtctctttaaagaggtgcctctggccaggtggttacctctgtcaccagagatgagtcacccagtctcagctcgcaggccttcctggacgttcccagatagtccccagtgctggaggcctgtcgaargtgtagctccaccacgccctttgatctcttcctcctctcctcttccccacccgcttccccctccttccccctccttccccctcctccttccccctcctccttctctcctgctgagggcatttggcctcatagataagcggtttctaatgagctcactggtttccgatggtgggtggggagtgactctgggctttctgtgctgcctcttcgacctcgtccctgttttctgctgtgcggagcatggccctttcctaatccgaaagagccgcacagtcccttccagtgctgcctgtggtctc

SEQ ID NO: 943522 - DNA, 553 bp, Homo sapiens
ttccatcatatggctataccacattctatgtatccattcttctgttgatggacttttgggttgtttctaccctttggctgttgtaaatggtgctgctatgaacattggtgtacaagctttggcttgaatacctgctttcatttctttttggtgtatccccagaagtgaaattgctagatcatatagtaattctatatttaattttttgagggactgccaaactgttttctacagtggctgtaccactttctgtttccatcagcaacttgtggggattccaatttttcttttcttttcttttctttcttttttttaagatggagtctcgctctgttgcccaggctggagtgcagtggcgcgatcttggctcactgcaagctccgcctcccgggttcacgccwttctcctgcctcagcctcccgagtagctgggactacaggcacctgccacgacgcccagctaattttttgtatttttagtagagacagggtttcaccgtgttaggatggtctagatctcctgaccttgtgatctgcccgcctcggcctcccaa

SEQ ID NO: 943523 - DNA, 780 bp, Homo sapiens
acgttctgtaaaggtctgtcaggtccatttggtctacggtgtagtttcaatccaatgtttctttgttaatcttctatctagatgatctttttaatgctgagagaggggttttagagtccaactattattctattggggtctatctctccctttagatctattaataataatatttgctttatatacctgggtaccctggtgttgggtgcatatatatttttaagtgttatattcccttgccaaattaacccccttattattatacagcgtctttgtctctttttatagcttttgaagtctgttttgtctaatataagtacagttactcctgctcacttttggtttccatttttgtggaatatttttttccatcccttcacttttagcctatatgtttcttyacacatgaggtgagtttcttgtaggcagcgtatagctgggtctttttaaaaatccattcatgccgggtgcagtggttcatgcctgtaattccagcattttggggggctgaggggggatgattgcttgagctcaggagttcaagaccagcctggacaacatagggagaccccatctctacaaaataatttaagaaattagctaggtgtggtggtgcatgcctgtgatcacagctagttgtgaggctgataagggagcatcacttgggcctgggaggttgagggtgcagtgagccatgattatgccattgcactccagcctgggtgaaagagtgagatcctatcttgaatgagtgaataaataaataaatccattcagcca

SEQ ID NO: 943524 - DNA, 479 bp, Homo sapiens
tttgtggggtttgaaaacaggtgccaatggtggctgtcaaatcatgatggcatttaggttctactagctacattggagagaaagaaaaacactatgctttacagagtcaaaatctacaatatgccagactttacaccccttgcatatttaaacttgggcttaaaaatgtagaagctggctggttgcagtggctcatgcctgtaatcccagcactctgggaggctgaagccagagaatcacttgagcctaggagatcaaggctgtgtgagccatgatggcrtcgctgccctccagcctgggtgacagagtgatattctgtctctataaataaatagatgaaaaataaaaaataaaaatgtagacgtcaacttcacattgtctggggatgcataatttcctaaaaatcgctctcatgggctcacgagcaaatgctctagggggccactgagtccaggcccctcccaatgctttcctgctct

SEQ ID NO: 943525 - DNA, 586 bp, Homo sapiens; identical to SEQ ID NO: 942989

SEQ ID NO: 943526 - DNA, 597 bp, Homo sapiens
cacaccgtgagaaacactttgtgccaagtgctttctcctctgaactcgagaggactctccatggagattggtacctgccaatcgggttttatggtcgcgtgtcctctcttttatgggaagaatatcgtgtaattgctactgcagcagcgtccgggcagacagacgtgcagtgtgcggttcttctctagaaaggcaggagccgctcccagggcgatgtgggcccggctgtttcatcagagatggtcagcttggtacctacttcaccttaaatgatgttcccacagaggccccgggatacttggaaacaagcgcccagcccctctcgcagatggctctgcagttacgactgtcttataaaatattaactgccttgcgktatgtttttagttaacgagatggctctctagccagaaagcacccagggcaggggcactggatggggctctgctgacatggagcgggtgaaagggagggcgtcttcacctcctttgtctgttaagggggctctaagacacctctctgggggtgttgctgattgtgataggacccaactcctgcagtgggtgctcgtcgagcacatctagttgcagggtggac

SEQ ID NO: 943527 - DNA, 583 bp, Homo sapiens; identical to SEQ ID NO: 943230

SEQ ID NO: 943528 - DNA, 583 bp, Homo sapiens; identical to SEQ ID NO: 943231

SEQ ID NO: 943529 - DNA, 642 bp, Homo sapiens; identical to SEQ ID NO: 942363

SEQ ID NO: 943530 - DNA, 642 bp, Homo sapiens; identical to SEQ ID NO: 942364

SEQ ID NO: 943531 - DNA, 549 bp, Homo sapiens
tccttctggtcctgggttttttttggttggtaggctatttcttactgcctcaatttcaggacttattattggtttattcagagattcaacttctttgtggttcagtcttaggagggtctttgtattcaggaatttatcartttcttctacattttctagttcatgtgcatagagatgtttatagtattctctgatggttgtttgtatttccgtagggtcagtggtgatattctctttatcattttcattgtgtccatttgattcttttcacttttctttgtctagctagcagtctatctattttattaatttttttcaaaaagccagctcctggattcgttgattttttttgaagggtttttcacgtctctgtttccttcagttctgctctgatcttggttatttcttgtcttctgctagctttggggtttgtttgctcttggttctctagttcttttagttgtgatgttaggatgtcaattggagatcctcctagctttttgaagtgggcatttagtgctataaattttcctcttaatgctgctttag

SEQ ID NO: 943532 - DNA, 549 bp, Homo sapiens
tccttctggtcctgggttttttttggttggtaggctatttcttactgcctcaatttcaggacttattattggtttattcagagattcaacttctttgtggttcagtcttaggagggtctttgtattcaggaatttatcagtttcttctacattttctagttcatgtgcatagagatgtttatagtattctctgatggttgtttgtatttccgtagggtcagtggtgatattctctttatcattttcattgtgtccatttgattcttytcacttttctttgtctagctagcagtctatctattttattaatttttttcaaaaagccagctcctggattcgttgattttttttgaagggtttttcacgtctctgtttccttcagttctgctctgatcttggttatttcttgtcttctgctagctttggggtttgtttgctcttggttctctagttcttttagttgtgatgttaggatgtcaattggagatcctcctagctttttgaagtgggcatttagtgctataaattttcctcttaatgctgctttag

SEQ ID NO: 943533 - DNA, 559 bp, Homo sapiens
agattgtcggtgcatgagtagcagcagcaggtgagttaaacaagcagattctcaggacccatgccaatgatcagttaccttaaaagacaaatactccagtctggagtggggggcagaggcgacttttttttttatactttaagttctagggtacaygtgcacaacgtgcagatttgacacataggtatacatgtggcatgttggtttgctgcacccatcaactcatcatttacatcaggtatttctcctaatgttatccctcccccagccccccatcacctgacaggccccagtgtgtgatgttccccgccctgtgtccaagtgatctcattgttcaattcccacttttgagtgagaacatgcagtgtttggttttctgtccttatgatagtttgctgagaatgatggtttccagcttcatccatgtccctgcaaaggatattaactcatccttttttatggctgcatatattccatggtgtgtatgtgccacattttcttaatccggtctatcattgatggacatttgggttggttccaagtctttgctttcgtgaat

SEQ ID NO: 943534 - DNA, 559 bp, Homo sapiens
agattgtcggtgcatgagtagcagcagcaggtgagttaaacaagcagattctcaggacccatgccaatgatcagttaccttaaaagacaaatactccagtctggagtggggggcagaggcgacttttttttttatactttaagttctagggtacatgtgcacaacgtgcagatttgayacataggtatacatgtggcatgttggtttgctgcacccatcaactcatcatttacatcaggtatttctcctaatgttatccctcccccagccccccatcacctgacaggccccagtgtgtgatgttccccgccctgtgtccaagtgatctcattgttcaattcccacttttgagtgagaacatgcagtgtttggttttctgtccttatgatagtttgctgagaatgatggtttccagcttcatccatgtccctgcaaaggatattaactcatccttttttatggctgcatatattccatggtgtgtatgtgccacattttcttaatccggtctatcattgatggacatttgggttggttccaagtctttgctttcgtgaat

SEQ ID NO: 943535 - DNA, 560 bp, Homo sapiens
cagattgtcggtgcatgagtagcagcagcaggtgagttaaacaagcagattctcaggacccatgccaatgatcagttaccttaaaagacaaatactccagtctggagtggggggcagaggcgacttttttttttatactttaagttctagggtacatgtgcacaacgtgcagatttgacacataggtatacatgtggcatgttggtttgctgcacccatcaactcatcatttacatcaggtatttctcctaatgttatccctcccccagccccccatcacctgacaggccccagtgtgtgatgttccccgccctgtgtccaagtgatctcattgttcaattcccacttttgagtgagaacatgyagtgtttggttttctgtccttatgatagtttgctgagaatgatggtttccagcttcatccatgtccctgcaaaggatattaactcatccttttttatggctgcatatattccatggtgtgtatgtgccacattttcttaatccggtctatcattgatggacatttgggttggttccaagtctttgctttcgtgaat

SEQ ID NO: 943536 - DNA, 566 bp, Homo sapiens
gttttctatagtataaaatcatattttgaccaagcagaaatagttgactttctgtcttcctatttggatctttcatttctttttcttacctgatttctctggctaggacttctagtaaaagttgaataggtgtgatgagagtgggcatccttgtcttgttctgattctcaagggaaatgcttctagcttttgcccattcagtattatgttggctgtggctttgtcatagatggctctcattattttgaagttccttcagtgcctagtttgtggagagtttttaacatgaggggatgctgaattttatcgaaagccttttctgcctctattgagataatcttgtgattttcgttttcagttctgtttatgtgytgaatcaaatttattgatttgcatatgttgaactaatcttgcatcccaggaaaaagcctacttgaccgtggtagattaaatttttgatgtgctgatgaattcggttttctacccctattttgttgaggatttttttcatctgtattcatcaaagatattggcctgaaattttcatttttttttgttgtaacttt

SEQ ID NO: 943537 - DNA, 749 bp, Homo sapiens
gttccatcattctgtcactaggactctgctgggtaatttgtggtttccaaaggaggaagaatgcagaggtaggaatgcaagtgcaatagctgacataggatgagaacaactaccttcccacatctcctctatcctgggtgagccctcacagagaaagggcaggactggtttcacctgagcctgggattagaagggcccatagctctggagtctgtgtctgtaagcatgagaagaaagctttagcatagccagtcattgctgcaatatgagcattcttacagatttagaagaaatgtcatgtagtaggaatatcaataatagtgccctccatttattgggaagcactatgtgccaggccttctgtaggtgctttataaattgacatgattcaaatgtcagctttgtccattcctggytatgtggccttgagaatgttacttagcctctctatgcctgtctcctcatctgcaaaatgtttattttgtgaaaattgttctgagaattgcataaatatatatacatatatatacacatatgaaatacgtatcaaagtaaaatagaaatgtataaaatataaatatatataatatatagtgtataatatgtaaaacatacatctataaaacttagaaaaattcctgggacatatataccatgtgaagtattattatcagttatgactgtcatcatcaacattatcatgattataaatgtcctgtattagtttcctgttgttgccgtaacttagt

SEQ ID NO: 943538 - DNA, 767 bp, Homo sapiens
ttcttcttcttcgctattctccctaacatccaccattatgataaacataagatttcaggttcagaaaattcctgaaaatcatagattcttgaaataagttggaagtaaccttagaagtaacattgccataccttgtcacttaaaattgaagacattatggactagaagtttaaggaccctgcttgagctcacagagctagtttgtgaatgatacaatgaaactagtgttcatatctctgactctgcaccttggtgcctaccatctcatttttactcctgctgatgcttcgtatttcccgttaaaaaggtagttttttagaatagcctgattttcaaacccattctgacacagagtgaaataagcactttgggtggaaaacagttttaaaatatacctgggtggaaaattaccttcaatgaactgtacttagagtcactgtatggtttctagttattccacaaatgcaaaaagagaggggcctcccttatataagtatgtcctattctgagcttccttgttagcccatctgtttgatgagctcagccacctggattctttctggccttttcacttttcatcagaatgtcttccagccttaaacatgtggtgagtctttggcckcttgctagcatgtagaaaattgtggtaatgactatttttttggagaacagacagtgctgtcatttgtgctcacctttgaatctgacctgtcagcatcacatatgcatcaaagagggtaaattgcctgttataacaaaggctgctc

SEQ ID NO: 943539 - DNA, 596 bp, Homo sapiens
gatagctgctgaagaagacagaatccaacatttatcactcagatacagtaggtgtttctttcttgctcatataatagaacagagagagtgaatgagttagtgggtgcctgtccttcaggtagtcatgaatgcaccaaactaaaggatcccattccagaagaaacccaaactgattgatagtggtcctcccatcttcaaatatatgacttaygaagttttcctgaatattgtctccatccagccaggttaaatggagaaggacgaggggtagcacatagagaaggtttgcatgggccatgcctgggagtagagcctgttactttcactcctatttgggactgtcagatttagcaaatagacatgcagtacaggtatcctgtacttcgtccagttaaacttgaattccagataaacaacacaatttcttttaatataagcatgcctcatgcagtacttgggacatatttataccagaaatatgttttttatctaaaacttaaatttaactgggtactctgtattttatctggcaactctccaagtacaacccattggctaaaactcaattacaggcctacatataattaaactacaaa

SEQ ID NO: 943540 - DNA, 596 bp, Homo sapiens
gatagctgctgaagaagacagaatccaacatttatcactcagatacagtaggtgtttctttcttgctcatataatagaacagagagagtgaatgagttagtgggtgcctgtccttcaggtagtcatgaatgcaccaaactaaaggatcccattccagaagaaacccaaactgattgatagtggtcctcccatcttcaaatatatgacttatgaagttttcctgaatattgtctccatccagccaggttaaatggagaaggacgaggggkagcacatagagaaggtttgcatgggccatgcctgggagtagagcctgttactttcactcctatttgggactgtcagatttagcaaatagacatgcagtacaggtatcctgtacttcgtccagttaaacttgaattccagataaacaacacaatttcttttaatataagcatgcctcatgcagtacttgggacatatttataccagaaatatgttttttatctaaaacttaaatttaactgggtactctgtattttatctggcaactctccaagtacaacccattggctaaaactcaattacaggcctacatataattaaactacaaa

SEQ ID NO: 943541 - DNA, 557 bp, Homo sapiens
attattgactatagtcaccctattgtgctatatgatactaggccttattcactaattttaactttcatacccattaaccatcccctcctcccacatatacaccatcccgcaactacccttctcagcctctggtaatcaaccttctattatctatcttcatggattcaattgttttgatttttagatctcacaaacaagtgagaacatgcagaatatatttytctgtccttggcttgtttcatttaacataatatcctctagttctatctgtgttgttgcaaatgagtgaatatcattctttttatggctgaatagtactccattgtgtataagtaccacattttccttatccacccatctgttgatggacacttaggttgcttccaattcttggctattgtgaacagagctacaacaaatttgggagtgcagatatctctttgatatcttgatttcctttcttggagtatatacccagcagtgggatgactggatagtatgatatctctatttttagttttttaaggaacctctgaaatattcttcatagtggttgt

SEQ ID NO: 943542 - DNA, 761 bp, Homo sapiens
gtttatgggaggaagaggaggagacaggacttggggaggggtcttaggaacagactcctggcacgacagtggtgaggggtggggtgttcccaagggcacagtttgacttctggtcatccctatttcttgcagcctggggagaggagagtcaggcacaggggaccctaactaggactcacaggctgatttcrgagcccacagtaaaccctgaagtggtttcctgccgggagtgggggcgtgggagacagtgagtcgccatgagagtctgggccagccgtgggcagaaggacagccgagaggcggaggagcagagggcacgttcctgtgactctgcagagaagtgacaatgatgtcctctcatgccccatgtccttgtgtctagatgacatcagggagtgggcaggggctgggctcatgggtgcctcttggctacctgagaaatactgcaacctttggcccccggtggtagtgggagccctgctaccatcccagagctctttcttgctttctgctgagaacaaatccagcccagtgcatagcacatcttagtcaattccagccttctcctttcttccacgttaggcccccttccaaatcctgccagagcttgactacacttattttctctatttactttgtcacagaggctcttagtctgtttaaaggagcacaaactctaaacctaaatccttgagatggattcgaaaagagactcaaagtccatcccttagtcatgggctggaatttgaggtacattaaac

SEQ ID NO: 943543 - DNA, 622 bp, Homo sapiens
ccaaaggaaaagagaggcccaaggttcaggatagagaggctagtcctctccactcactgttggagtagatacccaggtgaatttctcatcttttgcttggtggatgttactctttaatctggcactttatgtccacaacttacctgcaacatacctttytaaaggtctctctcactacctctttttcagctccctatccatgatccttttttcttttctctctctaggtcattccctctgacataaatgctcatttcttccaatttccacacattcaaattatatctacttttagcatccagctcaaataaatgccattcataattcccttctttcaactctctcctttttgaatgctcatatagttatatatatgggtctctactagggttcatgttctacttacagcagagattttatgtatacacccccatctaccttaaaatggaatacctaatgaatactcaataaatatttaataagtaaattcttcttcttataatagtggccaccacagaccctcacagacattctatttgttcaacaaactgttatccatggtacaagggacaaatctgtacaaacagtcctaactcaaatccactaagtgagcaaccagccg

SEQ ID NO: 943544 - DNA, 622 bp, Homo sapiens
ccaaaggaaaagagaggcccaaggttcaggatagagaggctagtcctctccactcactgttggagtagatacccaggtgaatttctcatcttttgcttggtggatgttactctttaatctggcactttatgtccacaacttacctgcaacatacctttctaaaggtctctctcactacctctttttcagctccctatccatgatccttttttcttttctctctctaggtcattccctctgacataaatgctcatttcttccaatttccacacattcaaattatatctacttttagcatccagctcaaataaatgccattcataattcccttctttcaactctctcctttttgaatgctcatatagttatatatatgggtctctactagggttcatgttctacttacagcagagattttatgtatacacccccatctaccttaaaatggaawacctaatgaatactcaataaatatttaataagtaaattcttcttcttataatagtggccaccacagaccctcacagacattctatttgttcaacaaactgttatccatggtacaagggacaaatctgtacaaacagtcctaactcaaatccactaagtgagcaaccagccg

SEQ ID NO: 943545 - DNA, 794 bp, Homo sapiens
cagcacttccccttttgttctctctcttcctcctgctctgcaatgtgaagaaggtgatagcttccccttcccccatgattgtaagtttcctgaggcctccacaaccatgtttcctgtacatggctgtgagtcaattaaacctcttttcttcataaattacccagtctcaggtagttactcatagcagtgggagaatagactaatacaataaggctatcattgtcatagacagtgatttctctgatagatctaggcaaggtaaattgaaaaccttctggaaaggattcarcattctagaagccattgacaacgtttatgattcatggaagaagctgattctaagccttatggattacttggtggggtttgaagacgtcagtggaggaacttcctgcaaatgtggtggaaacaggaagagagctagaattagaagtggagcctgaagacaagactgaattgctgcaatctcatgtcaaacttaaaggatgaggagttgcttcttacggatgagcaaagaaactagtttcttgagatagaatctattccttgtgaatactgttgaaatgacaacaaaggatttggaatattccatatacttacgtgataaggcagaagcagtgtttgagggaattgactacaattttaaaagatgttttcttataggtaaaatgctatcaaaaagcaatatcgcacactccagaaaatactttcatgaaagaaagagtcaacctatgaggcaaacttcactgtagtcttcttttcagaaaccgccacagccaccccagccttcagca

SEQ ID NO: 943546 - DNA, 461 bp, Homo sapiens
gactgaagttctgatagagttacagggatcaaaggacatatgaatgctaagttaaggaagatctgttgttttaaagttacgatcctggttaggagaactttgggacactgaaacatgggatagggacatctgaatgaaggttttgagggcatgggttctgcagacctctgcatatcctcagagcctgcagaggtggttcattcatacctagcaagagctagcatttcaatgcagtggaagacactgcagaggcctcttttcggcaaggcagcaaatgccctcctcaggagcttccccagtctcttatgstggctgtcaggcagataactagggttaaaagccaccataacccaatagggagtatgctgagcctgaaacagatggacagaaactctctacctaggaattttcatgaattagctagcacgtgccagcagaagcaaatgcagtatcattgagat

SEQ ID NO: 943547 - DNA, 461 bp, Homo sapiens
gactgaagttctgatagagttacagggatcaaaggacatatgaatgctaagttaaggaagatctgttgttttaaagttacgatcctggttaggagaactttgggacactgaaacatgggatagggacatctgaatgaaggttttgagggcatgggttctgcagacctctgcatatcctcagagcctgcagaggtggttcattcatacctagcaagagctagcatttcaatgcagtggaagacactgcagaggcctcttttcggcaaggcagcaaatgccctcctcaggagcttccccagtctcttatgckggctgtcaggcagataactagggttaaaagccaccataacccaatagggagtatgctgagcctgaaacagatggacagaaactctctacctaggaattttcatgaattagctagcacgtgccagcagaagcaaatgcagtatcattgagat

SEQ ID NO: 943548 - DNA, 600 bp, Homo sapiens
catgaataaataaactgaggtacatccacaccacagaatactactcagcaataaaaagcaacaagctgctcatacacacaacatgaatttcaaaagcattaggatgcccactctcaccattcttattcaacatagtactggaagtgctactccaaatgatcaggcaagagaaagaaatcaataggaaaagaagaaatcaaactagctctctttgctgatgatatgattctatacatagaaaactctagactccaccaaaagcctcctggaactgataaacaacttcagtaaagttgcaagatacaaatttacaaaatgtataaaaatcagtagcatttctatacaccaataacattctagctaagarcccatcaataacacaatctcatttacagcagccacacatataagaaaagaaatacccaggaatatatctaagtaaaggtgtattccaaggagatgtataaccaagaaggtgaaagatcttttcaaggagaagtataaaacattgctgaaagaaatcagaaacagcaaaataaatggaaaaatattccatgctcatgggttggaagaatcaatattgttaaaatgaccatgttg

SEQ ID NO: 943549 - DNA, 553 bp, Homo sapiens
caatatccttatgtgaaaagctcaggaaaactgagccctggtttaataacttactggcctctgtttaatcataggtcttgatgactctcagcggagatttaatttttggtccctggaaataggctattgatgtcttgacagaaacaagcagaataacaactagctgttggtcaacaggaatacacacacacacatatatgagcaaaaaaaaaaaaaaaaamcccgacagatttaataattagatctaaatgtgttttggtaaaagcaatgagaattgcctgagaaggataagaaacatatgaacctatgagtacatcaaaacccaatggaaccaaatggtgcccagttttcttgttttgacatcctctattttctagagttctggagagtaggaataatgacaactaaaaaatcccattctaacagatctgaatggttgcgtgtgtgtgtgtgtgtgtgtgtgcatatgtgtgttaccatatttaattctcactagctctccagtgcattatcttcatatgggatattgtgaaattgaggataaagaggttaa

SEQ ID NO: 943550 - DNA, 587 bp, Homo sapiens
agtttgagttcagcctctacaatgtagcaagaccccatctccaaataaataaataaaagtttaaaaaagaattacaaatggatcgtatactcagaaaaatatatttaaaaaatacagaaaagataaatatttaagattataggtattccaatcaccctgatttgattatatgaacgtatcagattatcacacgtaccccmaaaatatgtatatctactatgtataaattttcaaaaaaaaataaatttaaaaaaagaagttaggttctggacatgttaacttggagatatcttttagacatctgactgaagacatcaagtaagccactggatatataagtccagagtttgaggaagatatcaaaatagaaatggtatgtaaagccttgatcactggctgaagtagagaaaaagcttaaagatcaagtccttgagcatttcattgtttacaattatctatttaatacatgattttcttactgaactgtaaatcctatgaaatcaatatactgaaagagggataagaaagttgaggttctatgtaatggaactggttataaagaattttcctagagtttaagcttggta

SEQ ID NO: 943551 - DNA, 508 bp, Homo sapiens
agcaaactatagctgaacccagctcattgggtttctatagcctatgagctaagaatggtctttatktttttatttttcgttttattttattttattttattttatgacagagtctcactgtgtcgcccaggctggagtgcagtggcatgatcttggctcactgcaatctccacctcctgggttcaagcgattctcctgcctcatcctcccaagtagctgggattacaggcaccagccaccacgcccggctaatttttgtatatttagtagtttcaccatgttgaccaggctggggtctttatgttttgaaatggttgacacataatcaaagaaaaatatttagtgacatgaaagttactgaaattcaggtttcagtagccatgaattcagttgtcctgtaacaaagccacacgcctgtgtttctgttctctacgtgatggctgcgtatgtcctaccacgggagagttgagtagttgtgacagagaccatatgggcaccaaggaccaaa

SEQ ID NO: 943552 - DNA, 739 bp, Homo sapiens; identical to SEQ ID NO: 942871

SEQ ID NO: 943553 - DNA, 578 bp, Homo sapiens
aataattctcttcatagtactcatggttatcttattcacataaaattaatcagggcacttttcagcatggtcagaatcaagggatagagaggatgaaccaagcaatccagttctcagtcaaaacccagttctcctgtggaaactggagagccaaacttgtcaaagtctgaagaagacaaagtgtatgggaatcaagttatcattggaacctgtagagtttggctaaagtttgtgtcacttaaaaacttaaaattttaaaaatatataaaaagcaaaaagataatttctatatacatgtattttatttttgcataaaattatttcagtgcttagcrgtttaaaaaaatggtttttgactcacaatttctatcggtcaggaatctagccgtggcttgtctgggtcctgtggctctgggcctctcacaaggctggtactatagtttcattttaaggcgtgacttgggataaatccacaaaagggattttggcaggattcagcgtctcacagactttttcctggaggtctcctctatcttgcgccttcccatgtgggtctcttcatattggagcttacaata

SEQ ID NO: 943554 - DNA, 593 bp, Homo sapiens
ctcatgtttaggagaaaaagaggaaagttaagaaaaagaaagcatatttaatattgcgtcctttctttacctctcctgattttctcttccctctgtatcttcctctgtcttttgatttttttcactcctcagatttagagtgatraatcatgggaagtttcacctatgacaccagaaagatgttattcaaaggaaagagaaataaaatatttagtgctttgacacagtctgtgatctggtcctttttattgctgcagttcacagtatgttaaaagggttttattaatgtggttttgggctaaacacagacttcccatacagtgttttgtatctgtacaatcttactttggaaaattttctatgtaattaattatttaatgatttaagtgctatacaatttttgtccaaaattttacttatttattttttaaaacatattgctgatcaccggcttgatagtaaacaaatcaatatctaagcattgtagataagttatggggtgttcacacaaatgcccttgtcttctgttttcaaagtccagattaattttctacggagaggcttgtcaagtccccaaggagattgtttaagtg

SEQ ID NO: 943555 - DNA, 593 bp, Homo sapiens
ctcatgtttaggagaaaaagaggaaagttaagaaaaagaaagcatatttaatattgcgtcctttctttacctctcctgattttctcttccctctgtatcttcctctgtcttttgatttttttcactcctcagatttagagtgataaatcatgggaagtttcacctatgacaccagaaagatgttattcaaaggaaagagaaataaaatatttagtgctttgacacagtctgtgatctggtcctttttattgctgcagttcacagtatgttaaaagggttttattaatgtggttttgggctaaacacagacttcccatacagtgttttgtatctgtacaatcttactttggaaaattttctatgtaattaattatttaatgatttaagtgctatacaatttttgtccaaaattttacttatttaytttttaaaacatattgctgatcaccggcttgatagtaaacaaatcaatatctaagcattgtagataagttatggggtgttcacacaaatgcccttgtcttctgttttcaaagtccagattaattttctacggagaggcttgtcaagtccccaaggagattgtttaagtg

SEQ ID NO: 943556 - DNA, 543 bp, Homo sapiens
cccagtactaaatagttacttttcctgctcttcttcctttttgcaccctacaccctcaggtaggcccccggtgtctgtttgtcccctttttgtgtccatgtgttctcatcatttagctcacttttataagtgaaaatgtgcagtatttagttttctgttcctgtgttagtttgctaaggataatggcctccagctccatccgtgtttctgcaaaagacgtgatctcattattttttatggctggaaagtattccacggtgtatatgtaccacatttttgttatccagtcttccactgatagccatatagattaattccatgtctttgctattatgaatagggctgcagtgaagatacacgtgcaygtgtctttatgataaaacaatatatattcctttgaggtatatatccagtaatgggattgctgggtcaaatggttatgtttgtagttcttggaggaatcaccgcactgctttccacagttgttgaactaatttacactcctgccaacagtgtataagtgttcccttttcttcacagcct

SEQ ID NO: 943557 - DNA, 623 bp, Homo sapiens
atcatactaaatgggcaaaagctggaagcattcctttgaaaaccataagacaaggacgtcgtctctcaccactcctattcaacatagtattggaagttctggccagggcaatcaggcaagagaaagaaataaagagtattcaaaaaggaaggggaaaagtaaaattgtctttgtttgcagatgacatggtcctatatcgagaaaactccatgatttcagaccaaaagcttcttaagctgataagcaacttcagaaaagtctcaggatacaaaatcaatgtgcagaagtcacaagcattcctatacaccaatagcagacaagcagagagccaaatcatgaaagtactcccattcacaactgctacaatgagaawaaattacctaggaatacagctaacaagggaagtgaacgacctcttcaaggagaactacaaaccactgctcaaggaaaccagagaggacacaaacaaatggaaaaatattccatgctcatggataggaagaattaattatcgtgaaaatggccatactgcatgaagtaatttatagattcaatgctgttcccatataaactaccatttacattcttcacagaattagaaaaaactattttaaaattcatat

SEQ ID NO: 943558 - DNA, 490 bp, Homo sapiens
gggttgtttctactttttggttatcataaataatgctgctacaaatatttgggttcatgtgtttgtgtggacatgttttcatttctattggatatatctaggagtggaattgctaggccatgtgataactctatgtttaacattttgagaaactgctaacctgttttccaaagcagcagaaccatctttcaatcccaacagcagygtataagggttttgatttttctacatcctcatcaacatgttgtctttttgatgaccgctatcctaatgtgtatgaagtggtatctcataatagctttaatttgcatctttttaatgattaattacgttgagcaaccttttatgtacttgttgggtatttgtatatcctcttagataaatgtctatttagatcttctacccattttttcaatcggattttttaaattgttgaatggtaagttttctattatatattctaggaacaagtccatcaccaacatcaaat

SEQ ID NO: 943559 - DNA, 822 bp, Homo sapiens
ctaaaatattcagaaaatagaaactaacacagattcagaacataattaagtgaacaaaatgtttgtttttagatatcattataagccacttgaaatcatttctggattaaggtttgagtataaataaactaaaaatgcatgtttttatgttaaggggaaaagaagtttctgattttggtagctgccgtgagaacaaaaatcaacatctgcagaaraggagtgattacttgagttttgttgttgttgtcaggcagatttttaaaccacctggtataccatctgtactaagaatctgaaaaattggaaaagaaaaaaaagatgtgtgaacgtgttagcttagaagcaaaacagattcttctccccgttccatatttagcccaccacctgaaaatatgtatttacactgaatttatgaatgaacaatttccattcgtttctgtttttttcctccaagtaggaatattattgctttatttagataacaacaggatttctagtacttgttgatacttagtgagaaaaaatatttcaccaagtttgactgcttttcatttcattagcttcctagtcacagcccatctaaccaattatagcagtaaattatatcttatttaaactaatcactgttctatatgattgtcttccttctttgtcacataaaagaaatgttggagacaagtgccgtatcacagttacagtaatatatatatgtatatttataatatacctaggtatattcatatgtatatttagttgctcattaaccatgaattgagcatttactgaatagaaaagaaacaggaacatatatttgaataaaat

SEQ ID NO: 943560 - DNA, 822 bp, Homo sapiens
ctaaaatattcagaaaatagaaactaacacagattcagaacataattaagtgaacaaaatgtttgtttttagatatcattataagccacttgaaatcatttctggattaaggtttgagtataaataaactaaaaatgcatgtttttatgttaaggggaaaagaagtttctgattttggtagctgccgtgagaacaaaaatcaacatctgcagaagaggagtgattacttgagttttgttgttgttgtcaggcagatttttaaaccacctggtataccatctgtactaagaatctgaaaaattggaaaagaaaaaaaagatgtgtgaacgtgttagcttagaagcaaaacagattcttctccccgttccatatttagcccaccacctgaaaatatgtatttacactgaatttatgaatgaacaatttccattcgtttctgtytttttcctccaagtaggaatattattgctttatttagataacaacaggatttctagtacttgttgatacttagtgagaaaaaatatttcaccaagtttgactgcttttcatttcattagcttcctagtcacagcccatctaaccaattatagcagtaaattatatcttatttaaactaatcactgttctatatgattgtcttccttctttgtcacataaaagaaatgttggagacaagtgccgtatcacagttacagtaatatatatatgtatatttataatatacctaggtatattcatatgtatatttagttgctcattaaccatgaattgagcatttactgaatagaaaagaaacaggaacatatatttgaataaaat

SEQ ID NO: 943561 - DNA, 609 bp, Homo sapiens
tggatattgcgtgatcacctatatacttggagttggagacaggcacctggataaccttttgctaacaaaaacaggtaacaattaatgactaccagtagacatacattgtatatgcccatggtttttacccctgaatctatgtactaacaagataagttgcggcctggcgcggtggctcacgcccgtaatcccagcactttgggaggccaaggcgggtggatcacctgaggttgggagttcgagaccagcctgaccaacatggagaaaccccgtctctactaaacacacaaaatttgccgggcgtggtggtacatgcctgtaatcccaactactcaggaggctgaggcaggagaatcgcttgaacccgggaggcggaggttgcagtgagccgagattgcaccattgcactgcagactaggcaacaagatcaaaacgccatcttaraaaaaaaaaaaaaaaaagatgagttgcgtaattgaagataaatcagagagtcttaaaaattcctttaaatgttaccttggaagaacatttagggaaagtcctttcccttttaagaattgctttagtagtaatcctacagatggtcattttgcccacacttctgta

SEQ ID NO: 943562 - DNA, 599 bp, Homo sapiens
ttaaggtgaaaggtgaaaaggaaacaggcacatcacatgttgaaagcaagagcaagtgagaaagagaggtggcagggaaggtgccacacacttttaaatgacgagatcttatgtgaactcagagtgagaccttgcttatcaccaagggaatggcacaagcctgtcatgaagaatctgccccattggtccaaacacctcccacyaggccccacctctaacactgagcattatatttctacataatatttgggtggggacaaatatccaaactatactaatgtttatttccattgctgcagcaaaaacatttgacaaaattcaacattctttcatgattaaaaatgctcaaaaactaggaacaaaaggaaattagctctacataataaaggtcatatattaaaaattcacagttagcatcacactcaatggtgaaagactgaaagattttcccctaagatatgaaacaaaaaaggacactaatttttgccatttctatttaatatagtaatgaaagtactagaccaatcaggctagaaattaggcaagtaaaaaagaaattaaggacttctaaattggaaagaaaagtataaaattatctc

SEQ ID NO: 943563 - DNA, 632 bp, Homo sapiens
gaatggcacaaaaaattgaggcagtatttctctagtattcaaaaacttatccccaattcaacaaagaagtcactcacaccatagatggatgagtgaagttctaacatatgtctttattgttttatcttatttgttaacataaatgaacatatcagccaacatgcaggttggaattacagtcctttgtaaatgggaaccataaactgattatggatacaatacttcagcaaaaaatgaaccaaagcattctgtgggtatcagttggatagatgcaatttcaatgtagaatactgtatattttattatttgkcaatggcatcctttataagtgaaacacatacatgtgtgcacacacacatgttgcccttctcctttggagagttggccattaaacatttactaacaactattggctcatccctctcacacactccatgtccatcatggagcacctgttcacatcccttactctgagcccaggtgatggcacttccaccacctgaagcattgctgattgctgcagggggtgtgggggaaaggggcatgacaaaggctctgcctggaggtgacacatgctacttctgttcatattccatttactgaagcaagtcatctggccacgctacctttaa

SEQ ID NO: 943564 - DNA, 638 bp, Homo sapiens
caggggtgacatcacatattggcagtttctgtgatgccccttgagctgcgaaaccagcaagtttttattagggatttcaaaaggggaggggagtacaaacagggagtaagtcacaaagatcacatgcttcaaagggcaatttttattgcagaagggcagagcaagatcataaggccagggcgaaattagaatttctgatgaggtttcatgtcccactgggcacatattgtcttgataaacatcttaacagraaacagggtttgagagcagacaaccggtctgactagaatttaccaggctggaatttcccaatcctcgtatgcctgagggcactgcaggagaccagggcatatttcatcccttatcttcaaccacataagacagacactcccagagcggccatcaatagacctacccctgggaatgcattcctttcccagggtttttccttgctaggaagaaaattcagtgatatttctcctatttgctttctgcaagaagagaaatatgactctgttctgccaggccccgcaggcagtcagaccttatggttatctcccttgttccctgaaaatcgctgttatcctgttcttttttaggatgcccatatcctaaagatttcatatcttttaaacaca

SEQ ID NO: 943565 - DNA, 648 bp, Homo sapiens
aatgggcaaaagctctgtatagatgtctctcaaaagaagatatacgaatgacaaacagttatatgaaaaaaattactcaacatcactaatcatcagagaaatgcaaaccaaaactgtgataagatattccctcactccagttaaaatgccttttatcaaaaagtcatrcaataatgtgtgctggtgaggatctggagaaaggagaaccctcatactcttttggtaggaatgtaaattagtacagctactatagaaaacagtatagagcttcctcaaaaaaacacaagtagaactaccatatgattcagcaatttcactgctgggtacatacccaaaagaaaatatatttgtatgtcaaagagctatctgcactcccatgtttattgcagcactagtcacaatagccaagagatggaatcaacctaagtgttcataagcagatgaatgaagaaaatgtagtacatatacactacaaaatattattcagccataaaaagaatgaaatcctgtcatttgcagcaacatggaggtaactggaggacatcatgttaagcgaaatgagccaagcacagaaagtcaaacatcaatggtctcatatgttggagctaaaaaaaataaacacataaaagaaaatatatatatatattg

SEQ ID NO: 943566 - DNA, 648 bp, Homo sapiens
aatgggcaaaagctctgtatagatgtctctcaaaagaagatatacgaatgacaaacagttatatgaaaaaaattactcaacatcactaatcatcagagaaatgcaaaccaaaactgtgataagatattccctcactccagttaaaatgccttttatcaaaaagtcatacaataatgtgtgctggtgaggatctggagaaaggagaaccctcatactcttttggtaggaatgtaaattagtacagctactatagaaaacagtatagagcttcctcaaaaaaacacaagtagaactaccatatgattcagcaatttcactgctgggtacatacmcaaaagaaaatatatttgtatgtcaaagagctatctgcactcccatgtttattgcagcactagtcacaatagccaagagatggaatcaacctaagtgttcataagcagatgaatgaagaaaatgtagtacatatacactacaaaatattattcagccataaaaagaatgaaatcctgtcatttgcagcaacatggaggtaactggaggacatcatgttaagcgaaatgagccaagcacagaaagtcaaacatcaatggtctcatatgttggagctaaaaaaaataaacacataaaagaaaatatatatatatattg

SEQ ID NO: 943567 - DNA, 609 bp, Homo sapiens
caggcaacttctaaaagctgaaaaagacaagaaaaacaatctccctgcagagcctctggaagcaaccaatccaaatgacaccttgactttactccagtgactgattttagatttctggtttacagaactgtaagagaataaatttgtgttgttttaagctactaagtttatggtaatttcttacagcagaaatagaaaattaatgcaaagtgcctttaaaacatctaagtagctgggcatggtggcgcacaactgtaatcccaatactttgggaggctgaggcaggaagatcacttgagcccaggagtttgaaaccagcatggacaatatagggagatcccatctctacacacacacacacacacgttgccacatccctgtggtcccagttactcaggaggctgaggtggggaggactgcttgagcccaggagatcgaggctgcagtgagctgtgtttgcaytattgccctccagcctgggccacagaatgagaccctgtctctcaaaaacaaaacaaaaacatctacgtgaggtcaggtagccaactggagaccagggtctgaaagtgagagaagagtgctgagctagaaatctgtgaatcatattca

SEQ ID NO: 943568 - DNA, 640 bp, Homo sapiens
acatcacactctggggactgttgtggggtggggggagggtggagggatagcattaggagatatacctaatgctaaatgacgagttaatgggtgtagcacaccagcatggcacatgtatacatatgtaactaacctgcacattgtgcacatgtaccctaaaacttaaagtataataataataagaagaagaataagaatactttcaatgactttaaaaattaactgttttgaacttttcaaattgtcaggaatttaaaaaaatacatatatcattaaaaaatactcaaagcttccctctatctaagggcatgtcttatttgccagttggcagatggaccaccacgtttgtaaataaaygtgtccttcctgtgggctgtaacctctgcaccatctttctgttgtttgtcattctcgtacagaggtggtgaatcataactttcgcttggtggctgttatgtgcttagcactgtgctaggtattggacatactgggccagtgaaaggatctttataaaagggagctttttgaaaataaatgtatttaacttatgctgatgtctttctttcagttgtctttccagaaattaagacaggctgatgttgagccatccatgcactcccacgtaatgtaattagttacc

SEQ ID NO: 943569 - DNA, 545 bp, Homo sapiens
ctgtggtgcctcttccaggcctgcccatggctgctcatggaacaatcggctagcgtttcctcccctctgagatccataaaagccggcagctcagccagagcagggcagagggcagaggacagagagatgatgggatgacccgctgcagagaggagctaccctcctgctgagagcttcagagacctgcagagacttccaaatgatctgcctgcagagatgagccacgctttccagggctttctctctgctgagagctgagtacttgaggagagggcctgcctaggagccgacctgactacagagaggagctgcccactgtgggtctcttctgttstaacactaaataaagctcctctttatcttcttcacccttcacctgtctgcatactttattctttattcttcctggacgcaggacaagaactcagggcaaaggtgccactggccacagaggttttcaggaagaaaattgacaccccaaagattgccaccggctacagaggcttccagaaagaaaattgacacctcaaagatcccgtaacagt

SEQ ID NO: 943570 - DNA, 596 bp, Homo sapiens
ccaacaaggccaagagaacccagcaaggctcattttctagtttgagtgttgtgttagtctgcatgggctaccataacaaaataccatagaatgagtggcttaaaaagcaaacattttctcacagttctggagactggaagtccaagattaaggtgccagtaggggttggtttytggtgaggcctttcttcttggctgcagacgggcacattctaggtgtgtcttcatgtggcctttcctctgtgcacagagagcatatgtaagcccttgtgtcttcctttaataaggatgccagccctatcagattagggccccacccttctgacctcatttaaccatattacatccttagggcactatctccaaatgcagtcactttagggattagggctccagtataggaatttagggccaggtatggcagcccacacctgcaatctcagagctttgagaggccaaagtgggaggatcgcttgagcccaggagtttgaaaccagcctgggcatcatagcaagaccccctgtctctacaaaagctggcagcctgagtattaagatcttatctctacaaagaaaaaaagaaaattaaccagacagg

SEQ ID NO: 943571 - DNA, 637 bp, Homo sapiens
gacaggggacaatgcgtcaagtctggggtcccacatgggcttgtgaggaggaggttggcagctcctggggctgggtggaggtcaggccttagagggcaggcagagggcattctgctgagggctgtggttggcactgcagtctccagtgagtacggcagctttgacctcctcaccaycaccctcccctctcttagatactgccagaaagaacaggaaatgtgtagggaacagccacatatgcagcctccagtcataccctccaccctgtccccacacttggcatttgcagtgccaccaagtccttttggcctcccctaagctggctgtgacccacacatgtagcatcaccagcaaagccagtggggccctggggagtctctgtgcccacggcccctgcatctcctcctgctccgtgactgagttgttgaactgctggtgattctgggggctctggaccctgctcttctgctcacatactttggtgactttctataggagaaggacgatttttctctcgggaatgtccacttgatcggctacagcctcggagcgcacgtggccgggtatgcaggcaacttcgtgaaaggaacggtgggccgaatcacaggtgagctccacttccatcactaaagggctc

SEQ ID NO: 943572 - DNA, 592 bp, Homo sapiens
acagggagattatcttggattatctgggcaggcccaaagtaatcacaaggcttcttgaaagtggaagagggaggtagaagagaaagtcagatgtgatgtgaggaggactcagcctgcccttgctggctttgaagatggtagggaggtcatgagcaagaaatatgagcagcttctagaagctggcagaggcaaggatgcagatttccctctagagcctttggaaagggatgcagccttattgacatcctgatcttagctcattgagtgtcagacttctgacctacagaactgtaagataataaatttatgttgttcacaccactaaattttgataacttttktagtagcaatagaaaaataatacactttttgagatatgtttcatatatcatgtaattcacccatttaaagtgtattattcagtgtttttattcacagaattgtgtaacaatcaccaattttagaacattatcatcccagaaaggaaccatcccatgccctatcccatgcccattagcagacactcccccaaactctagattgcactagcaaccacttatttatttatttattttttgagagggagtctcag

SEQ ID NO: 943573 - DNA, 613 bp, Homo sapiens
tgaggccccctttctagacgctagatcctagacaacattgttagacacacccatttttagacgccagaagagaacccactgccttggatggaaggccccagtgctggcagaagccattgcctgcagactaaataatcctttggccctgwataaccagcagtatatccagatagtatatcgtggaccttgggtgagactctgacacttgctggcttcaaattagactcagtaccttcctagctaaggaggctatagggagactccttctgcttgagaaaggcagagggaaaagcaaagggaactctgtctttcaccttaggtaccagctcagccataggagggcagagcaccaaccaggcacttggggtatgcaatcctaggacttggctcttgaataacatttttcaacctgcaccccactgccctgaagggtgagtcccaagccatgcagcattcactacaagctgactgaagagcccttaggccttagggaacatgggcagtagtccagcaatacttcccacggacctgtggtagatggccacagggtgaatctgctctgcctgtggaaaggggaggaaagagtgagaaggactgcgtcttgtgatttgag

SEQ ID NO: 943574 - DNA, 680 bp, Homo sapiens
ttggagattcagactagaattcaaagaagacttctactagatgtgtattgaatcctcccacttatgtaataaacagtattctacagaacatgaaaaaaaggtgtagggcttcattttccataattatcataattatggtataattttccataatttccataattacctttaaaagcttataaatgaattattctagaaagaaagacaaattccaggtgatagtctcaataagagattgttgaaaagacccttaaaagatatattaataacttgtatttgtttcagagattgttgaaaagacccttaaaagatatattaataacttgtatttgtttcaagaaaccataaaaattgactgtctccattataaattagcttaaaaataagaraaaaattgcataagtgcaagtgattagtagaagaaatttacaaagaaaatgagatcaaagggaactagaagagaaaggaaaggaaaagaccattttgacatgttagaagaaaaaaaattatatatatgtgtgtgtgtgtgtgtgtgtataattgaactttcaacaaaccaaactatgaagttgcattgactcacactcatgctaagatgttatgcaccataggaaaaatatttatttgtcttgacatttctatttaaaacttataatttaaaaattttaaattatctttct

SEQ ID NO: 943575 - DNA, 600 bp, Homo sapiens
ccgtcaagtgcagggtctgcaaaatatctcaagcactgatcttaggttttataatagtgatgttatccccaggagcaatttgggaaggttcagactcttggaaccagagattgtatgacccctaaactgtaatttycaatcttgtagctaagttagtccagcaaaggcagactggtccccaggcaagaagggggtctttttgggaaagggctgttatcaattttgtttcagagtcaaaccatgaactgaattccttctcaaagttagtttgacctgtgcccaggaatgaacaaggacagcttaaaggttagaagcaagacagagacagttagatctgatttctttcactgtcatcatttcctcagttataattttgcaaaagtggtttcaatagtgttggtatttgccccaggatactttgtttctagacgttcttgcttccactgctgccacctcctggtcaaaggtgcctgatacactgaaaagaatttgtattttctttgggtcctagatttttgtctttaacaatttgtccctaattttttgtttcctgaattctttgccaaggcttgtctaaccacctcacctcacctcacccca

SEQ ID NO: 943576 - DNA, 699 bp, Homo sapiens
ctttaggacactctgcatgctgtatcactgtcttagaggtaggtgcacatcacacattagcttactaaagtcaatgagaagtcttattattaggaagtattagcattttccaaacttaattgatgtcagattttttcccmaaaatttttttttttcattaacaccctgaaagacaccagtattccatgaaacataggttaggaaatgttgccctggagaaattctttgatatttaatccttttgttgattttttttttttctctgaaaaaagactaaaattctgggcattggtgttttcctagtactccaaatctcatacagggtatcttacagcagctctcctatgaagtatggtaatgacttattcctccaaaatgtttgccctgcacctcatgataaaaaagactccatattcagtcctaaccccctgcttctcttcctttcattgctatttttctttagagttgtgctttccccattacttcaccattcatttttatttttttcacaatatgttcttttctgcctgcctaataggttcagttgtgtggtgaaggctgaggaggagcaatttggagggatttgcagaggttgttcaataggcaaataaaatttcaaggaatttttaacattagggaagaggatagaaaagagatgagctgtttacctttaaagttgtctgtgaacaagtagaacca

SEQ ID NO: 943577 - DNA, 585 bp, Homo sapiens
tttttgaatttcttctctgcgttatcttgaatttctttgagtttcctcaacacagctattttgaattctctgtctgaaaactcacatatgtctctctctccaggattggcccctggtgccttatttcatttggtaaggtcatgtttttctgtatggacttgatgcctgtggctgttcattggtgtctgatctttgaagagttatgcatttatcacagtcttcacagtctgggcttgtttgtgtccatccttcctgggaacgctttctacatattcaaagggacctgggggttgagatctgagtttttggtcactgcaagccatatctgcattacagagcaccccaagcctagtaacgttgtggttcttgaagactcrtagaggtaccactttggtggtctcggataagatatggaagaattctctggattaccaggtggagacttttgttctcttcttttactttctcctgaacaaaagagtctctctttctttgctgaggtacatgaggctatgggaagggttacacaagcacccctgtggccatcaccactgagattgggctgggtgagacctgaatccagca

SEQ ID NO: 943578 - DNA, 580 bp, Homo sapiens
attgtcaaaaaacaggagggttagcttactccttcctgccttaaatcctagagctcacttctattctttactaataaatgttctttgtggtatttttctgtacagaatagaggactttgacacacattaaaaacctgttacagcaaatattccttctcctcagtggttttcttaatggtrtcttggaacttgtctgctgcttcttgggcaacagaagctgtttttctcattatcttgacaatttttaagccaaatatctttgtaaaattatcaaaccatcctttgctaacactaaattctccagctttagatccttcaccttccttttgagtaagtcatcctttaatgactttgctttttcttgaataatattagactctaaatgtatgcctttcttatacccaatcatacacctacataaaagctgcattttcaaaattacagaaaaaggtatttccccagaagagcaaggttttcacatctgctggtgtagccacagggatggcttcatacgtttccttttctttcgttatgttggtctttccttatgctggatttgtttatcttgaaatgaagggca

SEQ ID NO: 943579 - DNA, 728 bp, Homo sapiens
agtgaaagtttattaaaaagcttaagagcaggaaagaaaggaaataaagtacacttggaagagggccaaacaggtgacttgagagattgtaacagcccaaggagttcaccttgcccgctgcctagacagagctgatccatcaagacaggggaattgcaatagagaaagactaattcacacagagctgcctgtgcgggggaccagagttttgttttttgtttttgttttttttttgagacagagtttcactcttgttgcccaggctggagtgcactggcgtgatctcggctcaccacaacgtccgcctcccgggttcaagcgattctcctgcctcagcctcccgagtagctgggattacaggcacgcgccactacgcccgtctaattttgtatttttagtagagatggagtttctccatgttagtcaggctggtctcgaaatcctgacctcagatgatcttcctgcctcgacctctcaaagtgctgggattacaggcatgagccaccgcacccggccaagaccagagttttattattactcaaatcagtccctyggagcactgggggagcagagtttttaaggataatttggtggatggggggaagccagtgagccaggagtgctgattggtcagagatggaaaataatagggagtcgaagccatcttcttgtactaagtccattcctgggtggggaccacaagatcagatgagccagtttattgatct

SEQ ID NO: 943580 - DNA, 663 bp, Homo sapiens; identical to SEQ ID NO: 943068

SEQ ID NO: 943581 - DNA, 725 bp, Homo sapiens
gagcatggagtaaaagtatacagttttttttaatgcaatgaaaattattagtctgaaatatcctgttataagatgttttatataagcctcatggtaaccacaaactaaaagccaagagtagatgcacaaaaagtaaacagtaaggaatgaaagcttgccactagagaaaatcatctaatcacaaaggaagacagcaagagaggaagaaacagagggtctgccaaacaactagaaaacaatgaacaaaattgcagtagtgagtccttatttatcaataataatcttgaatgtaaatgggttaaattctctgatatggtttgtgtatttgttccctccaaatgtcatgttgaaatgtgacctccgttattgaaggtagagcctgacgggaggtgtctgagtcacagaggtggattcctcatggatggcttagcattatccccttggcgacaagtgagttcgtgttctgagttcaygagagatctggttatttaaaagagtgtgggacttcccccctctcttgcttcctctcaccatgtgacatttgacttcaccttctgccatgagtaaaagctccatgaggccctcaccagaagctgagtagatgccagcaccatgcttcctgtacagcctgcagaactgtgagccaattaaatctctttcctgtataaattactcagtcttaggtattccttcatagcaacacaaaatagatgcacacattctca

SEQ ID NO: 943582 - DNA, 639 bp, Homo sapiens
ttgtgtgggtctatcttggggttctctaacaacaacaacacataataacacactgtgttgttgctatatctgtatagtaaactttaacatcaggtacagtggttccattcattttatttttttcaagatcaatttggctattcgagggcaaattagttcccacaaaagctattaatttttgtgtattggtcttgtgtcctccaaccttgtttaactcacatattsgagaaatttttttttaattaaatcttggtttgttttggttgatttctgccttagtatttcttacatagacaatcatgtcatctacaaatagggacaatattataacttcttgtcaaaccaatatgtgtattattatttttctcgttttgcaatgtggctagaacttccagtactattttaaatatcagtgatgcgtgtgtttacccttgccttatttctgatacaagtatgtaaacattaggctttcatcattatgtatgatataagatatagattctttgtagataatagttttttaaccaatttgagactttcttttttagtccttacttcgtgagacatacataattaattggttccgatttttctgcaataattactataatcatataatttttcttccttagtgtgttg

SEQ ID NO: 943583 - DNA, 516 bp, Homo sapiens
taggacactctgttcccaaaagggttttggaattcaaaaatgaaggagaataacaatagtgcatagctattgaataactactgggtcagatactacgctcatgcacataaaatgcttactttgtctaatcctcaccacagccctaggaaataggtgctgttattatccccattttatagctgagaatctgaggctcaaagaatgtaaaaatgttgctcaaagctgaagtaacagagctacatttaatccctggtctgtctgatgcctaacaaaatccctttatttagtgagktgctatgcttatctttctggaatgcaaaggcaacactcactaactttcctttatggaagaccaaaaacccagacatttttttttatcagagccttctagggtacctcaggaggccaaagtttgaattaagcattattccatgggtatgatgcatgatggaattttatcagagacaaaacagaaatcagcatagatgaagaaataggaaaggcaatggtcccatc

SEQ ID NO: 943584 - DNA, 732 bp, Homo sapiens
gagcttcccggggagtaggtgagcttcactccagggcccgttcactttctagtgcaccatgacctctatgccactcattcatttaacaagtatttgtcgagctcctatgcgacagacactgttctaatcatttggtgatacagcagtgagcaaagtagaataaaattcctaccctcatggaacttatattctaatgggagttaataacctagagatacgttagctaaaaaaaaaaattaaaaagtcagtggtggtaagtgcgctatggagaaaactagagcagggctagagcatggagagtggcaggggcctggtaggtccaggcagtgggtaggggaggccctgggagaggtgagcagtgacctcaaaatgctgagggagtgagccactcctgtgtctgggaagaggaacgtcccagacatggggagcagacaggccggcaggagcaggcctgggatgcctgaggagtgctgtggagagggaagaggagtgagccctggcttggcctcaccctcctgctgtcatgtttacaacaccactgtgatttctggccsacttttctgatgagtgcttgtcccctagggcagggctgttctttgcatctctggtgcctagcacagtgcccagcatggagtgaggactcagtgaatgcttgttggatgaatggaaaaggaaggaggaaagagggaggaagagaaggcaaagagaagaaagagagaaatgcatataagc

SEQ ID NO: 943585 - DNA, 573 bp, Homo sapiens
agtgccaccagcagtcccaaccctgccaagtagaggtagctgctccccagggcactcagctcagccttttactatagcacgtacatgtttacatgactttctccccccaaaactgtgaacccttcatggttacaagcatgtcttactcatctttctacctacctgcatggtgacagagctagccagctatctattaaattcagaattctcccctagcactgagttgctgctgggaagctgctaccaagccagggactacattttccagctcaatttccatccagatgtggccatgggataataattagccaatggaaaatgaacagatgtgaggtatttcacttggaggcttttataacacatcatatatatatacacgtatatatacatatatattatgtgttatatttcatatatatacatgyatacatatgtatatatatgatgtgttatatttatatatatttatatgatgtgttataaaagcctccatatatgtaactttttttttttgagatggagtcttggtctgtcacccaggctggagtgcagtggtgcgatgtcggctcactg

SEQ ID NO: 943586 - DNA, 458 bp, Homo sapiens
aagtgtgctgccagacatattggttcttctttaaatgcagtttcctttctctcactgcttttgggatcttttccttatttttgacctttggaagtctgattattaattgtcttgcagtagtcttatttgggttaaatatgcttggtgttctacaaccttcttgtgcttgactattaatatcttttcctagggtttgaaagttctctgttattawtacatcaaataaatattctaccctgatctctgcacctcctcgttaaaaccagtaactcttagatttgcccttttgaagctattttatagatcttataggcatgctttattcttttttcttttatctcctctgactgtgtatttcttttgcttgatcagttctgctgttgagagactctgatgcattctactgtaggtcaattgaatttttcagctccagaatgcctgcttgaatctttttagtt

SEQ ID NO: 943587 - DNA, 669 bp, Homo sapiens
tagggaaaaggaaatgcttatatgctggtggttgaaatgtaaatgaggtcagtcactgtggaaagcagcttggagatttctcaaaaaacttagaactactacttgacccagcaatcccattactgggtatgtattcaaaggaatataaatcattctaccataaagacacatgcacgtgtatgtttatcgcagcactactcacaatagcaaagacatgaaatcaatctagatgcccatcatcagcagttgactggataaagaaaatgtggtacatatacaccatggagtaccaygcagccatttaaaagaacaaaatcacgtcctttgcaacaacatgaatgcaaatagaggccattatcctaagtgaattaaaataggaaccaaaataccacatgttcttataagtgggagcgaaacattgagtacacatggacacaaagaagggtaaaaatagatactggggcctagttgagggtgaagggtgggaggagggtgaggatcgaaaaactatctatcaagtactatgctcactacatgggtgatgaaagaatctgcacaccaaaccccagtggcatgcaatatacccatgtaacaaacctgcacatgtacccccgaacctaaaagttggaaagaaaaaaataaagaaaaaccctcttatttccttacatt

SEQ ID NO: 943588 - DNA, 583 bp, Homo sapiens
ttcctgggacccaacagaccttgtgccaacagtgagcctgcagatgcatttactcacccaatgtttctcagttccttcctcagggcctgatctgtgctagcctgtgggatgccaagtggaaccaggctcccctagggtacctgaggtccacwtgtctttgggaactactgaaaattgatttatgcagtctcatacaggcaatcttcatctctctatgaatttatatagtaaagtagcaaatattaatcagagagccacaggcccttatcaatcctgacactcaaaaaattctaaaaccaaaaggttgggttttttttataactcattgggtgaaaaacctgacatgaagtaatgtgaagctatttactgtctttatctttcctacttagtgtgtacaatcatacattttgctgcagagaaattaatggctttgattatggagcacagcctcagacgtatcacataatatacagtatatgcaccctatttcctttcaaaaatctaaaaacaaaccaaattctgaaacacacctcaccccaagggctttcaatgatggactgtggacatgcatttattatttcta

SEQ ID NO: 943589 - DNA, 689 bp, Homo sapiens
tacccagcagagccacaggcagagcttcccaaggccgtaggagcccaccccttgcatcagtgtgtcctggatgtgagacatggtgtcaaaggagattattttggagttttaagatttaatgactgcctggctgggctttggaattgcatggtgcctatagcccctttgttttgaccaatttttcccatttggaatgaaagcatatacccaatgcctgtacccccattttatcttagrggtacctaacttgtttttgattttacaggctcataggtggaagggacttactttgtctaagatcaaactttggactgtgaacttttgagttaatgctggaatgagttaagacttcggggaactgctgggaaggcatgattggttttgaaatgtgagaaggacatgagatttgggaggggccagggggagaataatatggtttggatttatgttcctgcacaaatctcatgatgaattggaggaggggcctggtgggaggtgattggatcatgagggtgaatttcccccttgctgttctcatgatagtgagtgaattctcatgagatctgatggcttaaaagtgtgtggcacttccccctttgctctctctctgttctgctccgccatgtaagatgtgcctgcttccccttcaccttccgccatgattgtaagtttcctgaggcctcccatct

SEQ ID NO: 943590 - DNA, 708 bp, Homo sapiens
aagttcaagccaatcctcttttaccattctgaaatcctagggatcttaaggaggctgctaaatctactttgtctctgctgtataaatgagacaacacagccgagatgacagcatatctgtttatagcatggtttactgaataagtccactattgagacccacttctcagaaagcaagattcctgtattagtctgttctcacattgctaaaaagaaatactcaggattaggtaatttataaagaaaagatattttattggctcgaggttctgtaggctgtacaggatatagaatggcatcagcttttaaggaggcctcgggaagcttacaatcagggtggaaggcgaagtggggagtaggcacatcatatggcaaaagctggagcaagagaaaggaggggagaggccacrtacttttaaacaaccagattttgcaagaattcactcactatcataagaatagtaccaagagggtggcactaaagcattcatgagaaatctaccctccaatacagtcagctcccaccaggccctacctccaacactggagattacatttcaacatgaaattttggcagagatacatatctagactatatcaatttctttcaaggtattactgctcattgagaatacatctagtcatgcaagagctctgatggagatgtacaaaaagattaatgttgttttcatgcctgctaacgcaacat

SEQ ID NO: 943591 - DNA, 741 bp, Homo sapiens
gctgtgctgctgctgctgctgctcgcccatgcaaacaagcatggatcctgctgccaccacatgatgctttatctggcaccacccatcagagtgttgtgaccagcattctgggaacactttggctcttctgacacagcaggtttccatcctgaggggggtcaaagaacaaagctggggtcatgatatcagtcttccagagttaaaacatgcagcctaggggtgctgagctgagcgttggcccccacaaaatctaccagaaatgaaacgagtcaactcagcctaccttacgtcacaatcatacccccacggacatcaaagataaaagcaaaaacatacagctatccaaaggacagcaacttcgaagattgaagaaacatcagcccacacagatgagaaagaaccattgcaagaactctggcaactcaggaagccagagygtcttctcacctccaaacgaccacactagttcccccacaatggttcttaaccaggctgaaatgactaaaatgacagaaatattattcagaatatggataagaacaaaaatcatcaacattcagaagaatgtcaaaacccaatccaagaaatctaaggactacaataaaatgacacagaagatggaaaatgaaatggccatgtaagaaagaaccaaactgagctgatgtagctgaaaaactcacttcaagaatttcagaatgcaatcacaagtattaacaacagaatcaaccaagcatgaggaaa

SEQ ID NO: 943592 - DNA, 505 bp, Homo sapiens
acccaatccaagaaatctaaggactacaataaaatgacacagaagatggaaaatgaaatggccatgtaagaaagaaccaaactgagctgatgtagctgaaaaactcacttcaagaatttcagaatgcaatcacaagtattaacaacagaatcaaccaagcatgaggaaagaatctgagcttaaagaccagctctacaaaagaactcagtcagacaaaaataaggaaaaaacaagaagaatgaaaaaaatctccaagaaatatgggattaaagagaccaaatctacgatgcatcggcctccctgaaagacatggagagaaagcaaacgccttgmaaaacatattttatgataaggtctgtgaaaattccctcaacctctctagagaggccaacattcaaattcaggaagtgcagagaacccttgtgaaacactacacaagaagaccatccccaagacatgtagtcatcggattctccaaggtcaaaatgaaagaaaaaacattaaa

SEQ ID NO: 943593 - DNA, 601 bp, Homo sapiens
cctctctaagtcattctgtgaggccagcatcatcctgataccaaaacctggcagagacacaattaaaaagaaaacttcaggccaatatccttgatgaacatagatgccaaaatcctcaacaaaatactagcaaactgaatatagcagcacatcaaaaagctaatccaccatgatcaagtaggttttatctccaggatgcaaggttggttcaacatatgcaaatcgataaatgtgactcataacataaagaaaactaaaaacaaaaaccacatgattatcaatagatgcagaaaaagcttttgataaaattcaacatcacttcatgataaaaaccttcaagaaactagrcattgaaggaacatacttcaaaataataacagccatctatttcaaaaccaatattatactgaatgggcaaaaactggaagcattccccttgaaaactggaacaagacaaggatgccctctctcaccactccaacatagtactggaagtcctggctagagcaatcagacaagacaaagaaataaaggcatccaaataggaagtcaaattatccctgtttgcaggcaagatgattatatgcctaaaaccccccat

SEQ ID NO: 943594 - DNA, 594 bp, Homo sapiens
ggacatccctgtttccccggggcaatgcagggttaatcttaaagatggaaaggctggtactggagtgtgtgggtaaaagtatgttgccactacggggggtggggatgccatttcctctggcaaaaaaggctcattagaatttaggagttaggtgtccctagcttcatcagagtcccccatattcccatcccaacttacagggtcccattctttcccaatcaaagccctccctttgacagtagacasttggtgaagctgagcatgaaccttccattgcaggtcagccacttgcataagagcttgtgtctgattttcagcaatttcagctctttgtccacagaagagaagattcttacccagggcaccctgagaaactttttggctatgtatgtgtatctagaaccaggaaatagaatccctcagctcatccttttcgttcatcactttgcccagtgaacttaggagcaaccagccaacttcattatattccttggttctccacaaatgttcaaaggtatcatatatagagtcactaaactccttgcctcttaggaacagggaatcagaaatatcaaatgcatttattttgcgtaa

SEQ ID NO: 943595 - DNA, 607 bp, Homo sapiens
atagtatccacaaacaagtgtgtgttgaaacaaactgcattgaatttagaatacttttaaatttgaattactcttacattcaacctcaagaacaaggtaaataatttaaaaagctaaatatacttttgacttcttttgtagtaattttggatatcacattctcaaaatcgcttgtcaaagcgttagggtcaaaataaattttgggacctcactctttctcatctagctagtttcatttgttcatttgttcttctagctagtttccatccactctaatgaaagggggtagaatcttatttttccccaaattttcctcagatggctcatttattaataactcaatattctaagtgcrgcctgtgaagcaacagcaacaacaccacctaggaacttgttagaaatgcaaaatcttaggccaaatcaagacctactgaaccagaatctacattttatcaagatacccaggtggctttcatatgtaagtttgaaggccgggtgcggtggttcatgcttgtaatcccagcactttgggaggccaaggcaagtgaaccacctgagttcgggagttcaagaccagcctgaccaacatgaagaaaccccgactcta

SEQ ID NO: 943596 - DNA, 563 bp, Homo sapiens
tcccagcactttgggaggccgaggcaggtagatcacctgaggtcaggagctcgagaccaggctggccaacatggcgaaaccccatctctactaaaagtacaaaaattagccgggcatggtggtgggcgcctgtaatcccagttactcgggaagctaaggcagaattgctcgaaccagggaggcagaggttgcagtgggccgagattgcgccattgtactccagccttggcaacaagagcaaaactctgtctcaaacaaacaaacaaacaaaaaaaaaaaamcaaaagaaaatgtggtatatatacatactatgaaatactactcagccataaaaaggaacaaaataatggcattcacagcaacctgaatggaattagaaactattattctaagtgaaataactcagaaatggaaaaccaaacatcataggttctcactcataagtgggagttaagctatgaggatgagaaggcataagaagtgatacattggactttgaggactctggggaaaaggtgggaggggggtgagggataaaagactacacattggatacagtgtac

SEQ ID NO: 943597 - DNA, 640 bp, Homo sapiens
ggctttaggcctgtttcactcagagacgtcacgttatggcttgtgctgtttctagggcactaggtaagcacccacatccttttgaacatgcgaagctaatacatatgtaacaaacttgcacgttgtgcacatgtaccctaaaacttaaagtataattaaaaaaaaaaaaagtaaatagtcaagccagaaaagcctaacaggaacctgccagataccttcaccccagtaccgctcattaaagggggatgacttaatgggaggaccctgtacacttccagggaatcccaataacatatttaactgagaaatgatagttttaagtaactgaagccacaaaaacagatctgytttctcaatgatgaatatttgagcaactacttgagctgggataagtggcttctcaggaacctcatgagcccccaacagaattcagggcggttattaaaaaagaaagacaaatggatgctgggagatgcccaatgttgactgcgaactgtgatccaggaatgctgatcttctcaacctgtaactacaaattaagtggtcatatttccactaaaataggctttcattcatttgtcaaatagatgttaagcactcaataagtgccagaaagtgtgcaaggggacagatacacaat

SEQ ID NO: 943598 - DNA, 462 bp, Homo sapiens
cctaacaggaacctgccagataccttcaccccagtaccgctcattaaagggggatgacttaatgggaggaccctgtacacttccagggaatcccaataacatatttaactgagaaatgatagttttaagtaactgaagccacaaaaacagatctgttttctcaatgatgaatatttgagcaactacttgagctgggataagtggcttctcaggaacctcatgagcccccaacagaattcagggckgttattaaaaaagaaagacaaatggatgctgggagatgcccaatgttgactgcgaactgtgatccaggaatgctgatcttctcaacctgtaactacaaattaagtggtcatatttccactaaaataggctttcattcatttgtcaaatagatgttaagcactcaataagtgccagaaagtgtgcaaggggacagatacacaatgtgatatacaagac

SEQ ID NO: 943599 - DNA, 629 bp, Homo sapiens
gagttgcgctacaatcccttcatgtctcttcacggctccagggctcatttctgttagtcactgaataatgttctgttgcatggatgtacctcagatgttcattcattcacccagggaagggtttccaaactgttctcaaaagtgttcaaaccactttatattctcaaagcagtaagtgagttccagttgctacatatcctcaccaaaatttagtttggttggcgtttttaactttagccattctagtgtagtggtatcttattgtggttttactttgcatttgcctaacaagtaaygatgttcagaaagcttttatgaagtgtttcctaaagtgtctgttcaaagttctgtctgttatttaattaggctgtcttgttattgattgtaacagttattcatatattctagatacaagttctttgtcagatatatattgtgcaaatatattccccagtgtatgtcagcctttcaattattgtatcagcgtcatttaaagtaaaatagctttacgtttctaagaagtccaattgatcacttttttcttttgtattttattattattttttgttttaagaaagctccgtgaaaacccaattgtactgacattatcacctgtgttttactgaaga

SEQ ID NO: 943600 - DNA, 457 bp, Homo sapiens
aaaaagtacataatttggaaaggcagaaataaagcagcctttattcacagattaaatgattatctctatggaaaaccataaagaatcaacaaccacaaaccacaaaacactgctgaaatgaataagtgagcctagcaagatgtcgggcacacaaaagacaatggcttttctagatccaagcaatgagcaagtggaatttgaaattacaaaaaaaaaaaaacacaacaaaacaaacaaacaaaaaaccaatactatttgtaatagtmtcgaaagaaaagggagagagatttatacatttaacaaaatctgtactgaatctctatgagaaaaactataatacagtgatttaaaaccaacaaatatcttaataatagagagacattctgtgttcattgactggaagactcaactctaataaatagtgctggaaaaatggaatgtcgatacacagaagaat

SEQ ID NO: 943601 - DNA, 630 bp, Homo sapiens
gactgggcatctggtgagggcctcaggctgcttccactcatggtggaaggtgaaggagagctgatgtgagcagatatcacatggcaagaggagaagcaagagagaggggagagggtgccagaatctttcaacaagcagctctcccaggaactaagagagtgagaagtcactcacccccagggaaggcattaatctattcatgagggaccacctccatgagccaaacacctcccatcaggccccactccaaccctagaaatcacatttgaacatgagcctcggaggggacaaacatctaaaccatagcacacatccaacaaaagaataaactgaatggattagggatctaagtgtaaaaaacaaagccacctgtcttagtcagctcgggctgctrtaacaaaataccacaaaccaccaaatccaatggtaaagtgaggggaaaggcaccaacaggtaactaaccaaaaaagatattaaaatggccctcaaacttatgaaaaaaatattcaaggacactggtaattagagcgaggcaaatcgctctacagtgagatgccatttttcacttttcagactgacaataaaaaagatcacaacacattctgttcaccaagttgtagggaaacagtc

SEQ ID NO: 943602 - DNA, 777 bp, Homo sapiens
tacctaggtgggctgacctaaagggaagggaggcggagtgggaaagtgccccaggctgggtccgagcactagcctttgtcacacgcaggctgtgtgaccttctgcaagcctccaattctctggtcccagcctcctcctctagctctcaggacgcttgcggacttgacactcaagagtgtctcaacacttggagcagtccacaagaaggtcctamaggtgtgtggcaccctgacaccccaaccaagcacacacctgcaaggtttcctctgcacctgagaaggggagatgccagccagagaccatccctaggaggatgttttcagccctgaggagggtggcatggtgctcagaaaaaaaggggaggggaggggtgtggggcagggatcatggatgaggctgcagaggatcccgccagaggccccgggatgccatgtgcagcgtgtggcttcatcctaaggtgatggggagtgtggaagggtgctgagcagcggagggacttggtcacggctgtcttgcggagccccatgtggctgccacatgggaaacggactagaaaaggacaagactaaaccagaaagaccagaagaacggccacaggacttggactggcagtctcacgtgtggatgcggaggggctgggttccagggccgagtgggagagagcctcagctcttcctggtggccagccactggtgggggtgaagggagaatgcaggaatgcctgctgagggtccttctcctgtgctccactgccccgtaccccacagtggtgcccag

SEQ ID NO: 943603 - DNA, 777 bp, Homo sapiens
tacctaggtgggctgacctaaagggaagggaggcggagtgggaaagtgccccaggctgggtccgagcactagcctttgtcacacgcaggctgtgtgaccttctgcaagcctccaattctctggtcccagcctcctcctctagctctcaggacgcttgcggacttgacactcaagagtgtctcaacacttggagcagtccacaagaaggtcctacaggtgtgtggcaccctgacaccccaaccaagcacacacctgcaaggtttcctctgcacctgagaaggggagatgccagccagagaccatccctaggaggatgttttcagccctgaggagggtggcatggtgctcagaaaaaaaggggaggggaggggtgtggggcagggatcatggatgaggctgcagaggatcccgccagaggccccgggatgccatgtgcagcgtgtggcttcatcctaaggtgatggggagtgtggaagggtgctgagcagcggagggacttggtcmcggctgtcttgcggagccccatgtggctgccacatgggaaacggactagaaaaggacaagactaaaccagaaagaccagaagaacggccacaggacttggactggcagtctcacgtgtggatgcggaggggctgggttccagggccgagtgggagagagcctcagctcttcctggtggccagccactggtgggggtgaagggagaatgcaggaatgcctgctgagggtccttctcctgtgctccactgccccgtaccccacagtggtgcccag

SEQ ID NO: 943604 - DNA, 824 bp, Homo sapiens
gtgaggggccaactggagtgaaccttgggcaactcttcacgggggctaaccttccaccaagagggtcccaagcagaggtaatgggtttacagagcagagctgacttgggtttcacataggccagagggtctcaaagctgccacatattggcctatcagctccctggggaacttttatctaggcatcagaatttttaatttttgttttttgtccccccaaccctccatcatccctgttcatcttccctccgccctgccatccacccagaaatccagggctaagggctccacccaagtgagcagaattttttttttttttttttttaagagggggtcttgctctgttgcctaggctggagtgcagtggcgcgacctcggctcactgcaagctctgcctcccgggttcacrccattctcctgcctcagcttcctgagtagctgggactacaggcgcctgcgaccacacctggctaattttttttgtatttttggtagagatggggtttcaccgtgttagccaggatggtctcaatctcctgaccttgtgatccgtccaccttggcctcccaaagtgctaggattacaggcgtgagccaccgcgtccggcctgtgagcagaatgttttaaagcaccccgaggaaggctgatgggctgacagaattaagagctactcttttgaaccgttggcttagcaagagttggggtgactcttgagagacagacaacattgaggctgtggcatatggccctcccacaggagacttcccaaggtccttggcctttgttagaacctggtatagcaggttctggaaactgtgtgggtgg

SEQ ID NO: 943605 - DNA, 570 bp, Homo sapiens
atggataacaatttgggaaaataatataattaacaaagagttgaaaattagaagctgaggaacaaaatacagttgacccttgaacagtgcagagtgttgggggcgccaacaccccatgcactcaaaaatctgcatataaattttgactctaaaaactgaactacttatagcctactcttggctggcagccttaacaataacataaacagttattaacacatattctgtgtgttatatgcattatatactatattcttatggtaaagtaagctagagaaaagaaaatgttattaagaaaagcrtaaggaagagaaaatgtatttactattcattaagtggaaatggattatcatacaggtcttaatccttaacatcttcatgttaagtaggctgaggagaggaaagaagaggaggagttggtcttgccatctcaggggtggcaaagatagaagaggtagatgaggtgaaaggggaagtccctaagctctcacctctggatgatcttggggctctgcatatgcagttggtggaggctaaggcagagatgtaaactgcctgactgagtgtcac

SEQ ID NO: 943606 - DNA, 731 bp, Homo sapiens
agatcctagggctgtcatagcttccccctcctctttgattaatgtaaaataacccagttttttttcatgtttgcaattaactctaataataaacataggatgaggcagcatcgtgcagacaagacacatttgtggactgagtgtggtctctccatgggccattgatgagcatcctctgatggatcaacccccgcttaccccatgtttcccaaatgaggaatccaaggccaagaagaagggaaaggatttacccaagggcattcctcaaccmcagaagggaatccagggatttgggattctctggactagaggaattaaccgggactgggctagagcctgggcaagacacctaagaaatccaacccccaagtccagcctaagtatccaagtccctgtcccagcagcccaatggggagcccacctggacaggaggtaggcctctccagaccacaccagagaggtggtcccactcctacttcaagactccaggatggagaaaagccactgcctcctccaagatgctctggccactgagagtggaatccagcccatagctgaggaagaccagaggaatggttgctgctgaagacagaccaagtggccagaggtgctctcaatggagaaggaactctagccaggagaataggttgaggaggagcagaaaaaaaaaaaaaatcaagagtgtggagggggcagttcccagatattctgaacccagctcctcatccata

SEQ ID NO: 943607 - DNA, 731 bp, Homo sapiens
agatcctagggctgtcatagcttccccctcctctttgattaatgtaaaataacccagttttttttcatgtttgcaattaactctaataataaacataggatgaggcagcatcgtgcagacaagacacatttgtggactgagtgtggtctctccatgggccattgatgagcatcctctgatggatcaacccccgcttaccccatgtttcccaaatgaggaatccaaggccaagaagaagggaaaggatttacccaagggcattcctcaaccacagaagggaatccagggatttgggattctctggactagaggaattaaccgggactgggctagagcctgggcaagacacctaagaaatccaacccccaagtccagcctaagtatccaagtccctgtccmagcagcccaatggggagcccacctggacaggaggtaggcctctccagaccacaccagagaggtggtcccactcctacttcaagactccaggatggagaaaagccactgcctcctccaagatgctctggccactgagagtggaatccagcccatagctgaggaagaccagaggaatggttgctgctgaagacagaccaagtggccagaggtgctctcaatggagaaggaactctagccaggagaataggttgaggaggagcagaaaaaaaaaaaaaatcaagagtgtggagggggcagttcccagatattctgaacccagctcctcatccata

SEQ ID NO: 943608 - DNA, 731 bp, Homo sapiens
agatcctagggctgtcatagcttccccctcctctttgattaatgtaaaataacccagttttttttcatgtttgcaattaactctaataataaacataggatgaggcagcatcgtgcagacaagacacatttgtggactgagtgtggtctctccatgggccattgatgagcatcctctgatggatcaacccccgcttaccccatgtttcccaaatgaggaatccaaggccaagaagaagggaaaggatttacccaagggcattcctcaaccacagaagggaatccagggatttgggattctctggactagaggaattaaccgggactgggctagagcctgggcaagacacctaagaaatccaacccccaagtccagcctaagtatccaagtccctgtcccagcagcmcaatggggagcccacctggacaggaggtaggcctctccagaccacaccagagaggtggtcccactcctacttcaagactccaggatggagaaaagccactgcctcctccaagatgctctggccactgagagtggaatccagcccatagctgaggaagaccagaggaatggttgctgctgaagacagaccaagtggccagaggtgctctcaatggagaaggaactctagccaggagaataggttgaggaggagcagaaaaaaaaaaaaaatcaagagtgtggagggggcagttcccagatattctgaacccagctcctcatccata

SEQ ID NO: 943609 - DNA, 731 bp, Homo sapiens
agatcctagggctgtcatagcttccccctcctctttgattaatgtaaaataacccagttttttttcatgtttgcaattaactctaataataaacataggatgaggcagcatcgtgcagacaagacacatttgtggactgagtgtggtctctccatgggccattgatgagcatcctctgatggatcaacccccgcttaccccatgtttcccaaatgaggaatccaaggccaagaagaagggaaaggatttacccaagggcattcctcaaccacagaagggaatccagggatttgggattctctggactagaggaattaaccgggactgggctagagcctgggcaagacacctaagaaatccaacccccaagtccagcctaagtatccaagtccctgtcccagcagcccaatggggagcccacctggacaggaggtaggcctctccagaccacaccagagaggtggtcccactcmtacttcaagactccaggatggagaaaagccactgcctcctccaagatgctctggccactgagagtggaatccagcccatagctgaggaagaccagaggaatggttgctgctgaagacagaccaagtggccagaggtgctctcaatggagaaggaactctagccaggagaataggttgaggaggagcagaaaaaaaaaaaaaatcaagagtgtggagggggcagttcccagatattctgaacccagctcctcatccata

SEQ ID NO: 943610 - DNA, 602 bp, Homo sapiens
cctaaatactgtgcttttcccaaggtcttagcaaccagcagaccaggagatactctcccatgcctggctcactgggtcccatgcccacggagccttgctcactgctagcacagcagtctgagatcgacctgcaaggcagtagcctcatggggggaggggtgtctgccattgctgaggcttgagtaggtaaataaagtggccaggaagctcgaactgggtggagcccaccacagctcagcmaggcctactgcctttctagattccacctctgtgggcagggcatagatgaacaaaaggcagcagaaacttcagcagacttaaacgtctctgtctgacagctttgaagagaccagtggttctcccagcacagtgtatgagctctgagaatggacaggctgcctcctcaagtgggtccctgaaccctatgtagcctaactgggagacacctcccagtaggggctgacagacacctcatacaggcaggtgcccttctgagacgaagcttccagaggaaggattaggcagcaatatttgctgttctgcaaaacctccactggtgatacccaggcaaacagggtctggagtggacctccagcaaactc

SEQ ID NO: 943611 - DNA, 577 bp, Homo sapiens
aaaaagagaccgcatagccaagacaaccctaagcaaaaagatcaaagctggaggcaacacgctacctgacttcaaactatactacaaggctacaataatcaaaacagcatggtacgggtaccaaaacagatatatagaccgatggaacagaatagaagcttcagaaataacaccacacgtctatgaccatctgatctttsacaaatctgacaaaaacaagcaatggggaaaggatttcctttttaataagtggtgctgggaaaactggctagccatacgtagaaagctaaaactggatcccttccttacaccttatacaaaaattaactcaagatggattaaagacttaaatgtaagacctaacaccataaaagccctagagaaaacctaggcagtaccattcaggacttaggcatgagcaaagacttcatgactaaaacaccaaaacaatggcaacaaaagccaaaatagacaaatgggatctaatttgtagggaccagccctacagggtctatgggtttttctccccatgtacagagatgagagattgtagatataaagacacaagacaaagagg

SEQ ID NO: 943612 - DNA, 713 bp, Homo sapiens
ccgggcgcggtggctcacgcctgtaatcccagcacttcgggaggcataggcaggtggatcacgaggtcatgagattgagaccatcctggccaacatggtgaaaccccgtctctattaaaaatacaaaaaattagccaggtgcagtggcaggcgcctgtaatcccarctactcaggagactgaggctggagaatcacttcaactcggagggtggaggttgcagtgagccgaggttgcaccactgcactccagcctgggtgacagactgagactccgtctcaaaaaagaaaaaaaaaaaggcatcccccacttctgttctgatgtattcattaccttaaacttaagttatgacggtgatgcatgactgccttgaccaaaaccagaactacagataaggctaacgtctgctttgacttctaccctcaatcccaaacttcaccaacaacaagagttaaccacttttatcagtagaaacttcatctagcacagtatatttttccaaatccttctctacacatttacatacacacatacacatctatggaaactacatggaaattgctttatgagttcgtattttagatgaatatatcagtatatatattattatatattactacttgattctttttacccaacattaggtcttggacattttttggagttcatgcacatttaggtcttcctcaaaaattttagctgctataaaatagc

SEQ ID NO: 943613 - DNA, 596 bp, Homo sapiens
tctcactgatcaaaaagaccattgttttttcatttgtttccagtgatatcagttggtaaattgaaatcagtcagccaggagcagtggttcacaccttggaagcactttggaaggctaactcaggcagatcacttgagcccaggagttcaagaccagcctggctaacgtagtgaaaccctgtgtctacgaaaactacaaaaaaattgctgggtatcgtggtgcgtgcctgtagccccagctagctgggaggctgaggtgggaggatcacctgagcttggggaggtcaaggctgcagtgagctgtgattgtgccactgtactctagccttagcaacagagtgaggctctgcctcaaaagaagaaagaaagaaggaaagaaagaaagaaagagaaaaagaaagagagagagaaaaagagaaagaaagaaagaggaaggaaggaaggaaggaaggaaggaagraaggaagaaagaaagaaagaaagaaagaaagaaagaaagaaagaaagaaagaaagaaagaaagaaagaaagaaaggaagaaagtcataatgacaaaatttgtcacatggaaatcagcaaacactcccaccaggaccc

SEQ ID NO: 943614 - DNA, 709 bp, Homo sapiens
ctactcgggaagctgaggcaggagaatcgcttgaaccctggaggcggaggttgcagtgagccaagatcgcgtcactgcactccagcctgggtggcagagcaagactatgtctcaaaaagaaaaaaaaaaaaagaaaaacaaaagaaaagaagtacagttaatgagtatacacaggggattgattccaggacctccacctgactctactataacaaagtctgcacatactcaaattgtgaagttgaccctgcagaacccacrtataggaaaagtcagccctctacatactcgggtttcataatccttgaatactgtttgtttgtttgtttgtttttgagacagggtctttctccgttgcccaggctagagtgcaatggcgggatcacagctcactgcagcctcgaattcctgagctcaagcgatcctcccaacttggcctcccaaaatgttgggattacaagtgtgagccattgcacccagcttgaatacagtatttttgatccatgtgtgtattttgatctgcatataagtggatccatgcaattaaaacgcacgtggactctatttggctttggtattcagaatatgaactctccgtggctgacatatgtacttccagcaccttgagggggctgaggtgggaggatcacttgaggctaggagttccagaccagtccaggcaatatagcaagatgccatctctacaaaa

SEQ ID NO: 943615 - DNA, 611 bp, Homo sapiens
tagtattccatggtgtatatgtgccacatttctaatccagtcttgatggacatttaggctggttccaagtctttgctattgtgaaccgtgccgcaataaacatacatgtgtatgtgtctttatagcagcatgatttataatcctttgggtatatgcccagtaatgggatggctgggtcaaatggtatttctagttctagatacttgaggaatcgccacagtcttccacaatggttgaactagtttacgatcccaccaacagtgtaaaagtattcctatttctccacatcctctcaagcatctgttgtttcctgactttttaatgatcactttaatggctcaggattgtcttggtaatgtgggctgttttttttggtgctgtatgaactttaaagtagttttttccaattctgtgacgaaagtcaktggtagcttgatggggatggcattgaatctataaattaccttgggcagtatggctatttccacgatattgattcttcctatccatgagtatggaatgttcttccatttgtttgtatcctcttttatttcattgagcagtggtttgtagttctccttgaaggggtccttcacatcccttgtaagttg

SEQ ID NO: 943616 - DNA, 651 bp, Homo sapiens
ctggataatatcctgaagagtgttttccaacttggttccattctccccgtcactttcaggtacaccaatcagaggcagacttggtcttttctcatagtcccatatttcttggaggctttgttcatttctttttactcttttttctctaaacttctcttctcgcttcatttcattcatttgatcttcaatcacagataccctttcttccacttgattgaatcggctactgagtcttgtgcatgcgtcatgtagttctcatggcatggttttcagctccatcaggtcatttaaggtcttctctacgctgtttattctagttagccattcgtctaatcttttttcaaggtttttagcttctttgcaatgggttcaaatatcttcctttagctcagagaagtttgttatcaccratcgtttgaagccttcttctctcaactcgtcaaagtcattctccatcaagctttgttctgttgctggcaaggagctgtgttcctttggaggagaagaggtgctctgatttttggaattttcagcttttctgctttggtttctccacatctttgtcgttttatctacctttggtctgatgatggtgacatgcagatggggttttggtgtggatgtcctttttgttagttttccttctaacag

SEQ ID NO: 943617 - DNA, 562 bp, Homo sapiens
aaacgttaagatccagattggtggctccaggccctcactcaggactaagctcagctctgtgccacgtgtcctttctgcacttacaggtcgtctgaaatgctctttatgcatagggctcctgtactgtggttttcttctttttgtgtcttccttaccaagctttaagtttctggatggcaagraccatattatttatcagtatgtatatccttagtgtctaaaacagcgcctggtacttagtagtgtgtgtcgaattgagctttccctagatctgtatgtggatttgaaaaccattgaaatagatcctttgaattttcagactgagggctcctgaaggcaaggagcttgtttaatttagcttttgctttccctgtgaccagcactgtctgtgatgttcaggagatgccatctgtatctcttactctctctcttttttttttgagatggagtctcactctgtcgcccaggctggagtgcagtggcgtgatctcggctcactgtagcctccacctcccgagttcaaatgattctcctgcctcagcctcctgagtagctgggatta

SEQ ID NO: 943618 - DNA, 689 bp, Homo sapiens
attaaatggacaaaagcatttacattataaaccctcacttatgggctaattgtgatataaaagtcttagttggggaaacattaaaagcatagtggtgtaaaaaaatttgaagtgttccaagatggccaaaagggaacagctccactctgcagctcccagcgtgatcaaygcagaagacgggtgatttctgcatttccaactgaggtacctggttcatctcattgggactggttggacagtgggtgcagcgcacggagggcgagctgaagcagggtggggcattgcctcaccctggaagcgcaaggggtcagcggatttccctttcctagccaagggaagccatgacagactacctggaaaaatgggacactcctgcccaaatactgcacttttcccaaggtcttagcaactggcagacaaggagattctctcctgtgcctggctcagcgggtcccacgcccacggagccttgctcactgctagcacagcagtctgaaatcgaactgtgaggcagcagactggctggggaaggggcatccgccattgctgaggcttgagtaggtaaacaaagtggcaggggagcttgaactgggctgagcccaccacagcacaacaatgcctactgtctctagactccacctctgtgggcagggcatagctgaacaaaaggcagcagacaacttctgcag

SEQ ID NO: 943619 - DNA, 607 bp, Homo sapiens
cctagttcacttagcaaaatgccctcaagttttatccatgttgtagcatgtgtcacatttccttcctttttaaggctgaataatacattgttgtctttcaatgcttattaattccattgtgtgcgcatgtgtgtgtgcaaatgtgtgtgtgcttctgtgtgtatttacatatatttatatatacataccacatttttgtttatccgttcaatcattgatgaacacttggattgcttccaccctttggctattgtgaataatactgcaatgaacaaagatatacaaatatatcttcaagaccctgctttcaatttttggggggtggtatatgtccagtgtggaattgttggattatacagtggttctatttttaactttttttctttttttattatactttaagtcctggaatacatgtgcagaatgtacaggtttgttacataggtatacacrtgacatggtggtttgctgcacccgtcaacccatcatctacattagatctttctcctaatgttatccgtcccctagccccccatcccctggcaggccccagtgtgtaatgttcccctccctgtgtccatgtgtcctcattgttcagctcccacct

SEQ ID NO: 943620 - DNA, 616 bp, Homo sapiens
cgcacttattctaaaatcgaccacataattggaagtaaaacactcctcagtaaatgcaaaagaacagaaatcataacaaacagtctctcagaccacagtgcaatcaaattagaactcaggattaagaaactcactcaaaattgcacaactacatggaaactgaacaacctgctcctgaatgactactgggtaaataatgaaattaaggcacaaataaataagttatttgaaaccaatgagaacaaaggcacaatgtaccagaatccctgggacacagctaaagcagtgtgtagagggaaatgtatagcactaaatgcccatcggagaaagcaggaaagatctaaaatcarcaccttaacatcacaactagaagaactagagaagcaagagcaaacaaattcaaaagctagcagaagacaagaaataactaagatcagagcagaactgaaggagatagagacaagaaaaccccttcaaataaatcaatgaatgcaggaggtggttttttgtaaagattaacaaaatagaccgctagcaagactaataaagaaagaatcaaatagacacaataaaaaactataaagggaatatcaccactgatcccagagaaatacaa

SEQ ID NO: 943621 - DNA, 616 bp, Homo sapiens
cgcacttattctaaaatcgaccacataattggaagtaaaacactcctcagtaaatgcaaaagaacagaaatcataacaaacagtctctcagaccacagtgcaatcaaattagaactcaggattaagaaactcactcaaaattgcacaactacatggaaactgaacaacctgctcctgaatgactactgggtaaataatgaaattaaggcacaaataaataagttatttgaaaccaatgagaacaaaggcacaatgtaccagaatccctgggacacagctaaagcagtgtgtagagggaaatgtatagcactaaatgcccatcggagaaagcaggaaagatctaaaatcaacrccttaacatcacaactagaagaactagagaagcaagagcaaacaaattcaaaagctagcagaagacaagaaataactaagatcagagcagaactgaaggagatagagacaagaaaaccccttcaaataaatcaatgaatgcaggaggtggttttttgtaaagattaacaaaatagaccgctagcaagactaataaagaaagaatcaaatagacacaataaaaaactataaagggaatatcaccactgatcccagagaaatacaa

SEQ ID NO: 943622 - DNA, 600 bp, Homo sapiens; identical to SEQ ID NO: 931467

SEQ ID NO: 943623 - DNA, 775 bp, Homo sapiens
ggggctgtggactcaggccttcctgtgttcttgggggccagagcaggcaggcaccctgcatgcctcacacctccagacctgggcctctctgcactcttggaggcctgggaagtcccccaaccccatggtctcagaagtgactgctcctactgactggcttctccctgctgttggcacctgctctgatcttggagcaacatggggccaagctggggtactgtcacagcccagccaggtgtgcacacacttggggcagtgctgacatgcyggccccctgctgccttggccctgccagactttgggtaccaacaagcatagtggggaagccgaggggagtgctgcactccagtcagggcaacagaatgagaccctgtctcaaacaaaacaaaacaaacaaaaaaaatcaataggctcagcactggcctacaggtgacccttgacttgagcagcctgggaaccatggacagcggcaggaggcagacaggcttctgggcagaaaagggtgggtccccggtgaggccccaccttcaggtcagggagggcctgaatgctgggggccaaactgccagtcctgggaaccagagtgaagacttgtggtgccttttcttggcctatccatggccgcccttggaccaattagcgcacacttcttcccctctgaggcccataaaagccccaggctcagccagagcaaagcaaaggacagagagatgacaggacaacctgcctacagagaggagccaccaactctagggcctcctctctggtgagagct

SEQ ID NO: 943624 - DNA, 563 bp, Homo sapiens
ctgttgagtgttagaatggaagctggccacaccagtcttgtgtttttgatatgaacagactgttgaaacttttccctcctttatcatggcaagtcctaccttttgggtagtgaacccaggtttctgggattagattaaatctctcccctgactggtgggtaggccttatttttgcatgttcgtgtggagtattargataaatgttttgttggctaataatctcacatgaaccacttttgcccatgggatccatgctcgtattttctctctgttagtgatacggagctactagaagaatttaagcaaggaaaaaagtggcatagtaatattttgcctttaggaaaaatcactctatagggaaatgtagagaatggatttgagcactaagattggagacaaagagacccacttatgtttgaaaatatatgcaaaagttaaattgtggacaactcctggaaaaagatgcaacaagaatatcattggttttatataccaatcaaatgacacagaatagagaaataaagtaaccatttgcttgagagtttatactcagccccgcaaag

SEQ ID NO: 943625 - DNA, 638 bp, Homo sapiens
gacctctcctttaggtctggacattgccaactgcctgctggtcacagcacccgcatgtttccatttatcttgtccaaagctgggctcaccgtcatcttcctggaatctctcatcctccctcttagtgaataagtccaccctccacctcgtcacccagggacagtcccagaaggcccctagcgtccagctctgtctggcccaaagcatggtggcgacaagccatgccacatccagctccctggtttgtctgggtgctattccttcagtagctcgacctccaccctgtcccccaccgtctcttacccggaccacccaggagacatttctcctggtctcctttcctccaattatacccctctatagtctcctctccccaaagaagccaacatgctcctcctaaaaacacagatttcaccacatcactccttccaaacatgcgagatgtggggtcctcaagagaaaggccaaactrcctagtttgtcaggaaatgcatgtcaccacctggacaagcccttcactctaactcaccccacctgctcctcccgttctaactgcatcctctaccatagcctgccccagcaccaccaagcccaagaccttcttagccctgagccccatacctgcattcacacctctg

SEQ ID NO: 943626 - DNA, 593 bp, Homo sapiens
ccacaggtgcagtagcatgtgcctgtagtgtgagctgcttggtaggctgaggcaggaggatcacctgagcccaggagttcaaggctgcgttgcactatgatcacgcctgtgaatagccactgcactttagcctggaaaacatgagagaccccatctcttaaaaaaaaaaaaaaaaagtaaaaaayttaaaacactagttcaggaaattcaacatcaataacaaaataaaaacaaaaattagagaaaaataaattgataaaataactcatgagatttcccaaaaacaaaagaacatgaatttccaagctgaaagaccaccatatgttaagtacaattgatgaaaataagtgaacactaagacacatcattatgaagtttcagaacactaaggttaaagataaaattcaaatagaaaaaaaatgggaaggtcacaatgaaagaatcaagaattagaatggttttaaacttttcaacagccatactaaagaaggcaaaggagtgacatgtttaacgttctgaagaaaaacaatttacaaattagaattctgtattagtcaggatgggcttggttatactacaataacagacaactc

SEQ ID NO: 943627 - DNA, 593 bp, Homo sapiens
ccacaggtgcagtagcatgtgcctgtagtgtgagctgcttggtaggctgaggcaggaggatcacctgagcccaggagttcaaggctgcgttgcactatgatcacgcctgtgaatagccactgcactttagcctggaaaacatgagagaccccatctcttaaaaaaaaaaaaaaaaagtaaaaaatttaaaacactagttcaggaaattcaacatcaataacaaaataaaaacaaaaawtagagaaaaataaattgataaaataactcatgagatttcccaaaaacaaaagaacatgaatttccaagctgaaagaccaccatatgttaagtacaattgatgaaaataagtgaacactaagacacatcattatgaagtttcagaacactaaggttaaagataaaattcaaatagaaaaaaaatgggaaggtcacaatgaaagaatcaagaattagaatggttttaaacttttcaacagccatactaaagaaggcaaaggagtgacatgtttaacgttctgaagaaaaacaatttacaaattagaattctgtattagtcaggatgggcttggttatactacaataacagacaactc

SEQ ID NO: 943628 - DNA, 614 bp, Homo sapiens
aacaggcaaacataccaaaatctctggaatacagcaaaagcagtgttaagaggaaacgatatagctctaaatgcctacctcaaaaagtgagaaagatcttgaatgaatacctaatatcacatctagagaaaaaaaaacaagagaaaagaaaagaaaarctaaccccaaagctagcaaaagtaaagaaataactaaaatcagagcagaactaaacaaatttaagacccaaaaatctacacaaagaatccatgaaaccaaaagttacttttttgaaataataaaatgattaatagacagttatctagagtcacagaaaaaagggagaagatctcgatacgcttaatcaacaatgacaaaggtgacgttacaaccaattctaccaatacaaaagatcctcagagattattatgaacaattctatatatacaaagtaaaaaatctggaagaaatggataaattcctggaaacacacaatcttctaagactgaattgagaaataattgaaatcctgaacagacgaatattgagttcgcaaagtgaatcagtaatggaaaacaaaaacaaaacaaaaaaaaaccttaccaacaccaccaacaacaaaagccctggaccag

SEQ ID NO: 943629 - DNA, 614 bp, Homo sapiens
aacaggcaaacataccaaaatctctggaatacagcaaaagcagtgttaagaggaaacgatatagctctaaatgcctacctcaaaaagtgagaaagatcttgaatgaatacctaatatcacatctagagaaaaaaaaacaagagaaaagaaaagaaaagctaaccccaaagctagcaaaagtaaagaaataactaaaatcagagcagaactaaacaaatttaagacccaaaaatctacacaaagaatccatgaaaccaaaagttacttttttgaaataataaaatgattratagacagttatctagagtcacagaaaaaagggagaagatctcgatacgcttaatcaacaatgacaaaggtgacgttacaaccaattctaccaatacaaaagatcctcagagattattatgaacaattctatatatacaaagtaaaaaatctggaagaaatggataaattcctggaaacacacaatcttctaagactgaattgagaaataattgaaatcctgaacagacgaatattgagttcgcaaagtgaatcagtaatggaaaacaaaaacaaaacaaaaaaaaaccttaccaacaccaccaacaacaaaagccctggaccag

SEQ ID NO: 943630 - DNA, 618 bp, Homo sapiens
ctatagatgaatataaaggatgtgagggctctatttatcctctagcacattctagacggaaaccaagtttcccacttttagtggacagaagaagaaaagaggggagatgggccaactcccgaagtccgctctatgccagacacaagttctgatctccaaataycatctgtatgtgtccggggtgggcgtgggggccttggtcatggtgtcctatgattcagacacaaccatcctattctttttttttttttttgagacggagtctcactctgtcccccaggctggagtgcagtggcgccatctcagctcactgcaagctccgcctcccgggttcacgccattctcctgcactcagcctcacggagtagctgggactacaggcagcccgctaccacgcccggcataagttttatttgttgttgttttttgtatttttagtagagacggggttttcaccgtgttagccaggatggtctcgatctcctgacctcatgatccacccgcctcggcctctcaaagtgctgagattattcttaaataattttatacacacccattttcccccttttacctgtaaactttgaaatgaagttgaaaggccaccagtgtccatgacag

SEQ ID NO: 943631 - DNA, 618 bp, Homo sapiens
ctatagatgaatataaaggatgtgagggctctatttatcctctagcacattctagacggaaaccaagtttcccacttttagtggacagaagaagaaaagaggggagatgggccaactcccgaagtccgctctatgccagacacaagttctgatctccaaataccatctgtatgtgtccggggtgggcgtgggggccttggtcatggtgtcctatgattcagacacaaccatcctattctttttttttttttttgagacggagtctcastctgtcccccaggctggagtgcagtggcgccatctcagctcactgcaagctccgcctcccgggttcacgccattctcctgcactcagcctcacggagtagctgggactacaggcagcccgctaccacgcccggcataagttttatttgttgttgttttttgtatttttagtagagacggggttttcaccgtgttagccaggatggtctcgatctcctgacctcatgatccacccgcctcggcctctcaaagtgctgagattattcttaaataattttatacacacccattttcccccttttacctgtaaactttgaaatgaagttgaaaggccaccagtgtccatgacag

SEQ ID NO: 943632 - DNA, 618 bp, Homo sapiens
ctatagatgaatataaaggatgtgagggctctatttatcctctagcacattctagacggaaaccaagtttcccacttttagtggacagaagaagaaaagaggggagatgggccaactcccgaagtccgctctatgccagacacaagttctgatctccaaataccatctgtatgtgtccggggtgggcgtgggggccttggtcatggtgtcctatgattcagacacaaccatcctattctttttttttttttttgagacggagtctcactctgtcccccaggctggagtgcagtggcgccatctcrgctcactgcaagctccgcctcccgggttcacgccattctcctgcactcagcctcacggagtagctgggactacaggcagcccgctaccacgcccggcataagttttatttgttgttgttttttgtatttttagtagagacggggttttcaccgtgttagccaggatggtctcgatctcctgacctcatgatccacccgcctcggcctctcaaagtgctgagattattcttaaataattttatacacacccattttcccccttttacctgtaaactttgaaatgaagttgaaaggccaccagtgtccatgacag

SEQ ID NO: 943633 - DNA, 755 bp, Homo sapiens
ccatgtgtggggagcattaagaaaaataggccacctgtataagactagtggcaaaaatctgactcggtgctacttctctgtttgtcctttacttaaaaggagaaccataattaaaatgatccagaaaagagaaccaagcaggagactgagttgcttggggaaaggaccatgttgcattgatttttacataaccaatgccagcagtgcatcgggtacacaacaggttctcaatwaattgttaaatggataagttgatagaataaaaaacaaggtctcttcccactgctgcatgcaaaaaagctcagagtgaattcttatttgcaaagatgagagatttttagtcttctgatggctgtttcctcctctctgttttctttgccacagtttaggggcaaagaaaagtttctacctctctgaaatggtaggagaaacccttggggcttaggtaacaaatcaggctctctctttcacatgttgtgagaaaagaaatatttaaccatcagcaccaacaatgtcatttgcataagggagtgacttcctggctgagagatggtcagaataacatagagcctagagtgaaggcagtcaagtttgtgagcctagggctctgcttctggtgtctgcttcatggctgtgtgatcttgggcaagtttcctacattttctgcttctcagttttgtcatccataaaatgataacaacagtacctgcctcaaatagtgtgtggaagaggcttaaacaagctaatgtaagtca

SEQ ID NO: 943634 - DNA, 762 bp, Homo sapiens
tgtgtattttacctgttgacttagagtttgtttgaagatggaaggactagaagctctcccaagtcccatccatttctgacattctaaacatctgtccatatgtataaccattataaaaggaaagaattccataaagaggaggcggatctccctatcatgtgcacataggcaaacatgggcatcgatggtcatagccttcattcctgatggtggaatttcaggcatggtggcaggtgctggagaagatctctgtctcctttgtctatgtctcaggcctgcctgagtggcgtcctcttatttcctgcccaccctgtgctacccatcccagagctgggtaggtagcaggtatttaggggatgttgactggatatgctgaatgaacaygggctgaatgagcccatgctggcatctccatactaacttttgtacattaagtgctctcactggctgtctcaaatgagctgtgggtttgtttcttggcagttctgtagttgtggccttatttcttcccattcttacgccaggagtctttgtggcaggctggaaattctgcccagcaccaagcccatagcagagacagcagacatcggaaacaggctggacctgcagtggccgcgcctgtgtggtgcatgcgtatgcattcatggtttctcctcttctgtctctccggggctggtgtcactctgcccaggagttcacccaggcggctcagaagggtggctgctgtggaacgtgataaatttagagcaccaggaagttggg

SEQ ID NO: 943635 - DNA, 762 bp, Homo sapiens
tgtgtattttacctgttgacttagagtttgtttgaagatggaaggactagaagctctcccaagtcccatccatttctgacattctaaacatctgtccatatgtataaccattataaaaggaaagaattccataaagaggaggcggatctccctatcatgtgcacataggcaaacatgggcatcgatggtcatagccttcattcctgatggtggaatttcaggcatggtggcaggtgctggagaagatctctgtctcctttgtctatgtctcaggcctgcctgagtggcgtcctcttatttcctgcccaccctgtgctacccatcccagagctgggtaggtagcaggtatttaggggatgttgactggatatgctgaatgaacatggsctgaatgagcccatgctggcatctccatactaacttttgtacattaagtgctctcactggctgtctcaaatgagctgtgggtttgtttcttggcagttctgtagttgtggccttatttcttcccattcttacgccaggagtctttgtggcaggctggaaattctgcccagcaccaagcccatagcagagacagcagacatcggaaacaggctggacctgcagtggccgcgcctgtgtggtgcatgcgtatgcattcatggtttctcctcttctgtctctccggggctggtgtcactctgcccaggagttcacccaggcggctcagaagggtggctgctgtggaacgtgataaatttagagcaccaggaagttggg

SEQ ID NO: 943636 - DNA, 719 bp, Homo sapiens
ctgttgatggcacccctccttccagcactgctagggagacgtgctcagtgctaaatgatgactatgtaccccctgcagtggtgggcaaggcagatgccaagtggcttggattgactttggtcatcatcacgggaggtgtaaagaacaaccacacaaacaggtctgtaacaatgtcctctttcttcccttcattaatctcgtgaggaggagggaggaagagagcgagtgcagctatgcaatgtacatacattactgaattaaccaggaatgtaattagcgctcaggtgctcagcagaggaagaaccactcacgattagtcaaattttgcttgaatgtcctgaagttgggggagctgccttggtgtcccccactctccagcaccccctccctgcttcccctctctcatgttcatggaatgtgatgtttggggcatttgcagatgtttatggaaatttatgtgactgttcctaatgycataaatcatattctgacaagaaaagtccatgatcccggtagtaagatatcaaggagcctgttgtggaagcagttggcctcctctctatttcagaatcttacaggaatgagatggagatgaacgctgttattaattaaatgttaattgggccttggttataaagccatctttgcagtctgtgtgaggcatttgtctacaaggtgatgctgtgttacaagtacggtaagaaaactatgagctctca

SEQ ID NO: 943637 - DNA, 586 bp, Homo sapiens
tatataattaacacttatataaggtatctaaaataattaaactcatagaaacagaaagtagactggttgttatcaggggctgagcagagtggaaaatggggagttattcggtggtctagagtttctgttttacaggatgagaaagttatagagatctgttgcacaacaatgggaatatacttagcattactaaacactacatttaaaaaatagttaagatgggctgggggccgtggctcacacctgtaatcccagcactttggggaggctgaggtaggcagatcacttgaggtcaggagttcaagactagcctggccaacatggtgaaaccccatctctactgaaaatacaaaaaaattagccgggggtggtggtgggcacctgtaatcccatctacttgggaggttgaggcrggagaattgcttgaacctgggaagcggaggttgcagtgagacgagattgcaccactgcactccagcctaggtgacagagcaagactccatctcaaaaaaaaaaaaaagttggcaattttgtggattttttatcacaagtttttaaaaatgcttgtcaggcccccactctctct

SEQ ID NO: 943638 - DNA, 604 bp, Homo sapiens
taacttgggctgcaattctgcaacccctgaaatccgactgtgggcctgatcctcagttttatcttcctcatagaggttttcagactttgcatcctagtttgagttagactgacaaagtcaacattcattttagggtcaacagaagcaaccagcttatcccacaatccttatattgactatgatctcctcagcaamtaagtgccatggccacatgatctcgagatgcttgactttccatccatctgcatttttaatcctatgattgtgcatgataatttgaacaattattatggcactggatgtctcacactatctgtgtcctttttcctctcagcaaggaggactgcagatatgtgagcaaacctatcccacaaacctacttaatgacctgttttgtggcgcaactcttagtactatgcattgttatcaatcaaggtctcagaaggggtggaggcactcaactgaacaaatgaaaagagtttaataaaggagccgtttataaagatatagagagagttaaatgaacctcaaaacaataaaatcattatcatgcctagaacttaaaaggaaaaaatatttggaatccaaaaatccaagaagaata

SEQ ID NO: 943639 - DNA, 685 bp, Homo sapiens
tctagccatggctaaaaggggccagggcacagcttgggccattgcttcagagggtgcaagccccaagccttggcggcttccatgtgattgtgggcctgtggatgcacagaaggcaatacttaaggtttgggaacctccacccagatttcagaggatatatggaaacacctggatgtccaggcaaaagtctgttgcagaggcagagccctcatggagaatctctgctggggcagtgcgtaggggaaatgtgggattggagctctcacatggggtccccacgaggcactgcctagtggagttcaagaagagggccactgtcctccagacctcagaatggtagatccacagacaacttgcattcgtgcctggaaaagttacaggcagtcaacatcatcccatgaaggagctgcccaaggcagtgggagcccaccccttgcatcagtgtgccctggatgtgagacagggagtcaaaggtgattttggagctttaaggtttaatggctgccctgctgggtttcggacttgcatggggcctataccccycttgttttggccaatttctcccttctggaacaggagcatttaccaaatacctatgatacccccgttgtatcttggaagtaactaatttgttttttattttacaggctcataggtgggagggacttgccttatctcaggtgag

SEQ ID NO: 943640 - DNA, 771 bp, Homo sapiens
attcagcaggtgaatatccctgtcatcacatagccagtctcacaaggcttgcatacaaagcatattagctgccccatctggggtgttacacttggcatttatagatgatgttaggcagtccccatttttgggggtaaacagaccttacagtggcatttatccagtccacctggctggccgttccctcaggaataatctcccgtgtgtctggattatatatccccacccacgattgttcactagtgagctgtgggtcctgcatcaacccaaacatgctcttccactctgtagcatttaaaaccaaagatactgcccctaaattaatcactttcatagtccactttagcaaaggttccccaggaaactgatgataccagtctataagatggaacaattccttarcactacaccctttggtttcagtagttacttggttttgcccttcccccacattgactaccttcttggtaaccacaggacttagaaatattttctgttgtccctgcataattctctgctttgtgggtgactttgaggctggtggcctgagctcgcacccacattttgagctgggtccagcctcaagtccttatccagcaccctcttgtactttcattttagccattatagataacagtgaccaagggattgaattttggattgaatatttcacttttttctttttagtttgcatttccttatgtatccaatgaaccaactcttggagttggatctatccgtaaattccactggtaactttaacctttagta

SEQ ID NO: 943641 - DNA, 539 bp, Homo sapiens
tggtgggagatgccctgtgaagaaggtgtctgcttccccttctgctattaatttaagtttcctgaggcctcctcagctttgcagaactgtgagtcaactaaacctctttctcttacaaattacccagtcttgggaagttctttatagaagygtaagaatggacaaatacaaatcccattttttaaaaggataaatgcagaaataaagataatgaaatcagtattttgacctttcaaacaatataatgaaaatagaaaaaaattcatatttgggtatagctactcctaatatgctggttatatcattttttcgttctccccataaaactgttaccaaaatctcaactctgatggactttaccaccaagaatagtaacaaaaaacagaatacacctaggtgaacaatgttcactgaactacctttataactgtcacatccaaaaatatctctttcaaatacaacatcccaacaggatctaccatccagggatactgttctaaggctagacaataggaaaatcagaattaaatatactactc

SEQ ID NO: 943642 - DNA, 665 bp, Homo sapiens
cttagccccagtgaagcaggccattaatttcaactaagaagaagggacaataagtaaaaggcactctaataaaatagacacagggtaaacgtaaaaccccaggtgacttatccccagcttttccatggctgtcaaaacttctcagctcaatggtctagcctctaaaccaaggtgagcgccatggggctttttggaccaagatccctgtgcctttggcttagctcacagccaacccccacttcccaggctctgcccrgaaaagatacaccagagtttggagcaggctcccaggttccccgagccagaggctgcacgaaggaagcatacctgttcctgcgacccatctgccagggccaagcttagccgggcgatgcctctgcgcgctgcgtcaccagctttagttccaaaagggtccttccaaacaggaccatgacgggcgtcaccagcgccgccaatcaaagaccgtccattcatccttactttttctcaatacatgacaaagggcaaaaatatgtgaatcagcatgacgtgtgccctagctctaatgaccacgcaaaaggcaagctgaggggggctggagcgcgcccactgggttcctggtgagggaagatgtggccccacatgggagaccgctaatgaagaaggaggactttgccttcaccaaa

SEQ ID NO: 943643 - DNA, 646 bp, Homo sapiens
atcagtatacagagcttcttcttgaagtgtgctgtccaatatgctagacaccagacatgggtggctatttaattttaaatacaaattaataaaacttaactgatactgagttaatttcacagttgcattaaccacgtgctaagtgatagctatctgcgtctagtggctaccatattggatagcacctgctacagataattttcattattgcagaaagttctattagactgctttgctctagatgcttcttccatttttctagtcatcttcttttccgtcagatataacttactgtgctagccaggtgttgttagacccagccaatgggtagggtttyttccatgccttatccttaacatgatgcagcatggatgaacttgctggacattagtattcatatctttgaggacattatgctatgtgaaataagtcagccacaaagagacaaatactacatgattttacttatataaggtatctaaagtagtcaaacacatagaaacagaaagtggaattgtagctaggggaggggaaaatggggagttgttcaacgggtatacagtttcagtattgcaagatgaaaaagttctagagatgtggtgcacaactatttgaatattgtaagaccgttgaattggatacttaa

SEQ ID NO: 943644 - DNA, 424 bp, Homo sapiens
atcataattttactacttcacaaatttcaatagtttagtttcctccgtttgtaaatgttaaaaggaagcattacagaaagattacaattcaaaatgattgatatattaatttttttttaagagacagaatcttgctctgtcacccagactggagtgcagtggcatgatctcggctcactgcaacctctgcctcctgggttcaagcaattctcatccctcagccccctggtagctggaaccacaggcatgtgccyccacatccagctaatttttatatttttcttttttttttcagaaaattatttcaatagttacaaaactttttttttcagaatcagtataaaatagcagttgatttctccataattatcagaattatttatacttgaggtcttggctaagtggggctgaaatcaacaaaacg

SEQ ID NO: 943645 - DNA, 731 bp, Homo sapiens
ccactgttctcttcaaagctgtcagacagggacatttaagtcttcagaggttactgctgtctttttgtttgtctgtgccctgcccccagaggtggagcctacagaggcaggcaggcctccttgagctgtggtgtgctccacccagttggagcttcctggctgctttgtttacctaagcaagcctgggcaatggcgggcgcccctcccccagcctcgctgcagccttgcagtttgagctcagactgctgtgctagcaatcagcgagactccgtgggcgtaggaccctctgagccagatgcgggatataatctcgtggtgcgccgtttttaagcccgtcggaaaagctcagtattcgggtgggagtgacccrattttccaggtgcgtctgtcacccctttctttgactcggaaagggaactccctgaccccttgtgcttcccaagtgaggcaatgcctcgccctgcttcggcttgcgcacggtgcgcgcacccactgacctgcgcccactgtctggcactccatagtgagatgaacctggtacctcagatggaaatgcagaaatcacccgtcttctgcgtcgctcacgctgggagctgtagacaggagctgttcctattcggccatcttggctcctcccgccgccaccatcttattataaaaaccaaagccgcagctcagtggggcaggaggaatccatcgcacagaaatatcccgcagaccggggatgtgag

SEQ ID NO: 943646 - DNA, 615 bp, Homo sapiens
ctcattgtgccaacttcctacaatgtagatgttatatatggacaggaccgagcagtacaaaatgctgaatgtgtcatcacaatggaacataggtgaaatttacatgatattcacgtgtaatttcattcaggcacaaaagagtgcatactgtaggtttccatttatacaatgtttaaaaataaatttaaaatatgttgatcatgaccagaatagtgagtgtctcttggaagttactgcctaggaattagccaaagagcggctgccagggtgttcatatctgggcggtggtaacacagtgtttgtcagaaggcaacaatctgtacaggtaatatactgtgcactgcaccacaagtaaagcaaccatcaaataaaaacaaagtaacrcaaactatttttccatacgcaaacttccatccttactgtcccctctgagtccatcacatattttaaatagaagtaactccaatcttgcatgcacacttctggatatagagggaacacacaatgctctctcttttaatcgggacaatcatgacagcaaattcagcaaaagacatcacaagaaaggcgaattaaaagccaaacttggctgggtgtgtgggctcctggggacag

SEQ ID NO: 943647 - DNA, 796 bp, Homo sapiens
tatttttttttctgaatacatctgaggttgtttgaatccatagatgtctcatggatatggaggaacattgattttttttttttttttttgagactgagtcttgctctgtcacccaggctggagtgcagtgacatgatctcggctcactgcaccctctgcctcccaggttcaagtgattctcctgcctcagcctccctagtagctgggattacaggtkcccgccaccacgcccagctaatttttgtatttttagtagagatggagtttcaccatgttggtctcaaactcctgacctcaggtcacccacccgccttggcctcccaaagtgctgggattacaggcgtgagccaccgcgcctggctggaacactgtttttcttaaaatggggctgtttcagcatggcggtgcctccatgtggccttttggtgtcttcatgttatatcctgtccaggtggtgttggtataaataattctaggcaccatcatacctgagtttctcagtagccctaggaggtagcagggacaggtccaaatactctattgccactttacaaatgaagagcctgtaggagagggaagcaatttgtcccaagccagcatcaagtctgtggcacagccagcaccataatatctccaggtgctgtcacataccatatctgaatcttcgtaagaacccagggtggtcagacatatggatgaagacctggaggctcagaggggaggtttcccaaggtcacaccagtgagtggcagagtcagggctggtacacaggccccgccctggctcagcaggttgc

SEQ ID NO: 943648 - DNA, 746 bp, Homo sapiens
gcaccaggtactgagctgttcttgttacgctcgtatactactgcgtgttgctctcaaggaatagaccaggcagatgagttccacaagcctcaggcatcaataacatgcatacatacacatagcagccaacacgctattaaagcaaaatatatacctactttaacagaaatccaggagctgccactctctggtcacctgatcccatctaacaatgaaaacctcagaggtatactcaatcacctcagacaaactttcttttcttttgtttttgctttaaagaataaaattccaccaaatttccaggatgcaaaagcacgactcgcagctcccaagagcctaacccgtggatttaaacggtaaacatcacaagttagggtctcagggactgagaggagcgcaacaatgttttctttcttgagacaaagcaaagcaaaacaagaatgacaggcaatttctgttcgaggttcataactaagatgcaacaaacaggtggtatggtatttcttctctaagctcctttccttcacaaaattgagattccgtttaagcctaatacatatatacacacatacgcagtatctgggggcgcatakacaatcacgcacatacacatacgatcacgagtacatcagagaaaactctttcaagatttgggcaaaatagttcactaaaacggaaaataatatgcacagactcagaaatgcccaagtttttaaaaccatagtctacaataaggatttagtgtc

SEQ ID NO: 943649 - DNA, 622 bp, Homo sapiens
aggatgaggctggaggattgcatgagcccaggaggtcagggctgttgtgagccacaactgcacggctgcacttcagcctgggtgacagagtaaaaccctgtcccaaaaaaaaaaggctgggtgaaaatatttatatcttacatgtctgataaagggtttgtacccagaacatatgtatagaattcttaaaacttaacaacaaaaaccaaacaattttttaagtggataagagatctgaagatactttaccaaagaaaatatacagatggcaataagcatatgaaaagatcttccatatcattagtcattaagaaaatgcaaattaataccccagtgagatactaatwcctgttagaatggctaaaataagaaaacaggtttaaaaactggcaagtccttcaccacaaatatgcagagcagcaggaactcttgtttcttactggtaagaattaaaagtcatacagtggcttttgaaaacagtttgacatgattatgacatgattatatgattatgcatgtactcctcatgtgaaccaacactcacattacccaaatcaattggaaaacttgttctcacagaaaaacctagacactggtgtttgcttatagtggctaaaaactg

SEQ ID NO: 943650 - DNA, 596 bp, Homo sapiens
ccatgtggctcaacactataaccactcctttgcaaacatagttaattatattcccttcacccttctttcctgggagagctctaaacctatgtaaatctatttaaatataattatcctaccaactctgtttcttcacgtgacaactaaacattctaggagatacacacagctttgctgactggtctcactttagaagtatgaccaaaaatcctaggaggtattccagaattcctggtgatcctacaatccttccttaatacatttgtctttcaactcaccagatgaatattttacatttttgcatctcttcaaatccacttcttctccttcactttcattacttaacccttgaatgagaataaagaggcaaagactctcacactggagacctacttgatatctcccctggaatgtctaagatgcatctcagacatyacattatcactaacaactcttgcccatgcccccagtgtttcccaaattcttagtaaatgccataatcatccctcttgctgataaaaccaaaacccaagttgttcttgatcatacagtttttctttactccacttccaattaatccattccatcacctagta

SEQ ID NO: 943651 - DNA, 734 bp, Homo sapiens
gtatcctgagactttactgaagttgtttatcagcttaaggagcttttgggatgagactatggggttttcgagatataggatcatgtcatctgcaaacaaggatagtttgactccttcttttcctatatggatgccctatatttctttctcttgcctgattcctctggccaggacttccgatactatgtcgaataggagtggtgagagagggcatctttgtcttgtgctggttttcaaggggaatgctttcagcatttgtccattcagtacgatgttggtggtgggtttgtcagagwtagctcgtattattttgaggtatgttccttcaatacccagtttattgagagtttttaacatgaatgggttgctggattttatcaaaagccttttcttcatctactgagatgatcatgtggtttttttgtgtttagttctgtttacatgatgaatcacatttattgatttgtctatgttgaaccaaccttacatcccagggataaagcctacttgattgtggtggataagctttttgatgcgctgctggatttagtttgccagtattttgttgacaatttttgcatcaaagtttatcaaggatattggtctgaagttttctttttttgttgtgtctctgccaggttttgctgttagggtgatgctggcctcctagaatgagttacggaggagttcctcctgctcaacttctttgaaatactttcagcagaaatggtacc

SEQ ID NO: 943652 - DNA, 475 bp, Homo sapiens
caattaaaagaaacagagtggcaagcaggagaaaaaactagcacccattggtatgctgtcttccagagacctgtttcacatgtaatgacacctataggctcaaaataaagaggcggagaaaaatctacccagaaaatgggagacagaaaaaatgaggggttgaaatcctagtttctgaagcaaaacagactttaaacaacaaagatcaaaatagacaaagaagggctttacgtagtggtaaagggttcaactcaacaagatctacctctcctaaatacatatgcatccaagrcaggagcactcagattcaaaaagcacattgtttgggacctgcaaagagacttggattcccacaaaatagtagtgagaggctttaacactccactgatgatataagacatattattgagataaatacttaacaaagatattcagaatctaaactcagcactggatcaaatggacctgatagaca

SEQ ID NO: 943653 - DNA, 548 bp, Homo sapiens
aattgaatcatagaatcagtgtcccttatgctgttctcatgatagtgggtgagttctcatgagagctgacggttttttaaggggctcttccctggcacttctctttcctgctgccttgtaaagaagtgccttgcttcccatttgccttccaccatgaytgtaagtttcctgaggcctcccgagccatgctgaactgtgagtcaattaaacctttttcctctataaattacccagtcccaggcagttctttatagaagtaaattgggactggagagagtggggtgttgctataaagatgcccaaaaatgtggaagtgactttggaagtgtgtaacaggcagaggttggaacagaagacagaaagatgtgggaaagtttgcaacttcctagagacttgttgaatggctttgaccaaaatgctgatagtaatatgacaatgatgtccagactgaggtgatctcagatggagatgaggaactttttgggaattggaataaaggtgactcttactatgctttaacaaagagactggtgaaattttgcccctac

SEQ ID NO: 943654 - DNA, 454 bp, Homo sapiens
aatgggctgtatctgcttggctatataaaatttctttctgtctttgcaatctctttgtggattgcctgtgatatgctcacattctagattaattcttattcaataatgaatttttttttgtctctctactacttttataggaaagatttctagrttgagagattattttatcaccaatattgctaatgcagatttcctctgctgtaaatagcctttgtattagtttgttttcacactgctataaagaatacctgaaactgggtaatttataaagaaaagaggtttaattgactcacagttccacatggctgggaaggcctcaggaaacttacaataatagcagaaggggaagcaagacagcaggagagagagtgaggcaggggaaactgccagaaacttatcaaacaaccagatcctgtgagaaatcactcaccatcatgagaatggcatgggg

SEQ ID NO: 943655 - DNA, 549 bp, Homo sapiens
taatctcccaaaccccaaccacttctacaaaacaacaactcctttccttcctaggcatggttggctacttctgcctttggatacctacttttaccatcctgactaaaccattatataaactcaccaaagcaaatctaggtgaccccatagatcctaaatcctttctccactcccctttccattccttaaaaaacatccctaaagctgctcccacactagctctccctaactcatcccaaccatttttcattacacacagccaaagtacagggctgtgcagtcagaattcttacacaagagctgggaccgcaccctgtagcctttctgtccaaacarcttgaccttactgttttaggctggcccccgcattatttcagataccacacctgacccccatgactgtatctctctgatccacctgacattcactccatttccccatattttcttctttcctcttcctcacgctgatcacacttggtttatcgatggcagttccaccaggcctaattgccactcattagcaaaggcaggctatgctatagtatc

SEQ ID NO: 943656 - DNA, 549 bp, Homo sapiens
taatctcccaaaccccaaccacttctacaaaacaacaactcctttccttcctaggcatggttggctacttctgcctttggatacctacttttaccatcctgactaaaccattatataaactcaccaaagcaaatctaggtgaccccatagatcctaaatcctttctccactcccctttccattccttaaaaaacatccctaaagctgctcccacactagctctccctaactcatcccaaccatttttcattacacacagccaaagtacagggctgtgcagtcagaattcttacacaagagctgggaccgcaccctgtagcctttctgtccaaacaacttgaccttactgttttaggctggcccccrcattatttcagataccacacctgacccccatgactgtatctctctgatccacctgacattcactccatttccccatattttcttctttcctcttcctcacgctgatcacacttggtttatcgatggcagttccaccaggcctaattgccactcattagcaaaggcaggctatgctatagtatc

SEQ ID NO: 943657 - DNA, 662 bp, Homo sapiens
aataaaaaaagttcatgggcaaaatgggccacaaagacacacagcctcgaatgttccactctcaggcagtggatattaacacttgccctgtgtcacaaaagggattccgtgtgctgggcctctcagtggactggttcacacatccccaatgacagagaagcaggaagcagggtcccaaggtctggctatagcccagattctagccaaagtagaatttctttaataattcaaattttgtctttataattaattaaaatgttatatgcttctccagaatatatatttatctgttttaaaatatgcttgtctctaaaatctttggataaaatatatatgccttaggaaaatatgtacttctcaccgtattaccatgtaggctcaggggcagagttccctatttgggaaacatagacaatcattgtcacaataaatttttgccagtaatgcagtcatcccygtaatgcaggagaggagactgaggctcaaaaaggttaagtgagttttctgagatcacctagggcttggattaaaaatttagtcccaaatgcttatccctcctctacccattctattaagtacttcgccttcctctctggcctgtagcccttgtcacttgcagaggcagtgtggaacttcgaagctgttcaagacatccaattttc

SEQ ID NO: 943658 - DNA, 666 bp, Homo sapiens
taggctgcctgaaacatctgcatcccacttctgtttgttctcaagacctacaggggtaaaggccagaaggtaaaaaagaatttgggtcacttgtcctgctgcctagaatactggccctgtaaggttccctaatagaatctcaggttcctggggctcagtactgyccaatcaggagcacaaaggaaagcatagcattcactgcccacaggatcactggatttatggcctgccctccttccttcctgtcaagtaaatactgcatgtttaggatgaccacattttccataccaaaaatcgtatcataaaaatctatggtctgacaagagggtacctttcccttaatatacctcccatcggaggatacaaagggagagatagataaacaaagaataatgtaatgcaacctaaaagtgttgtaatagaagtataggcagagggcaagcagctccatctaggggagctgcgtggaagagcaagtgccatttgagctgggtattgaaagccaggaaagagttcgttagctggctgagaggcaggtagatgagcgtgaacctagatgaggaggcaggaaggggctgacctgacaaaagagcagtgagcagcaaggggcaaaggtgcttgcaggcaaagacctggatgcaggaaagttgaacttttttttgtgag

SEQ ID NO: 943659 - DNA, 781 bp, Homo sapiens
ctggtggcacaggctctggtgggcactgggggtgggcagcagtttcccctccaggacagaggatgcattccccacggtcctcagccgtcaggtgcctcccatgtccctgctgtggagagctgcctggcccccaaggtcatggccttcctggggcagcctccactcccgacagcatgtgaaaagcccagcccctcagcctaattcagaacaactcaacaccatcccagctccccgtgtcggtgggaattgtccctcttgaggctgtgtctcagcccggcttttaccttctctctaaaattgatcccaagagagctcccttcatgtaaataagccctgacatgctgatcttcaccttgaagtcagctttgaatggagtctaatctgtgacacaggcttccactaatttgcaggagaatcaggagaaaaccagatttttctgcaaaaaaataaaaagcacaatgatttcaactgataggatgacttggttgccctgtagggagtgggatggggacaagggaaatcagaygaataaagcgagggtctctcaggtgtgttcagtagaagaaggagatagcaaagctacacccaggcttcacaaaaccctgtgccataagcactaacatcaccacttcataaactgggcccagtcagactagaaaagcttctacagtcattttgcctgtgagctgcagagtcacaaagaggccttgttccaagacattatctccagttaatcagtagtaaaggtgttgtttatgtgatctcagccgtgtgatcctca

SEQ ID NO: 943660 - DNA, 781 bp, Homo sapiens
ctggtggcacaggctctggtgggcactgggggtgggcagcagtttcccctccaggacagaggatgcattccccacggtcctcagccgtcaggtgcctcccatgtccctgctgtggagagctgcctggcccccaaggtcatggccttcctggggcagcctccactcccgacagcatgtgaaaagcccagcccctcagcctaattcagaacaactcaacaccatcccagctccccgtgtcggtgggaattgtccctcttgaggctgtgtctcagcccggcttttaccttctctctaaaattgatcccaagagagctcccttcatgtaaataagccctgacatgctgatcttcaccttgaagtcagctttgaatggagtctaatctgtgacacaggcttccactaatttgcaggagaatcaggagaaaaccagatttttctgcaaaaaaataaaaagcacaatgatttcaactgataggatgacttggttgccctgtagggagtgggatggggacaagggaaatcagacgaataaagcgagggtctctcaggtgtgttcagtagaagaaggagayagcaaagctacacccaggcttcacaaaaccctgtgccataagcactaacatcaccacttcataaactgggcccagtcagactagaaaagcttctacagtcattttgcctgtgagctgcagagtcacaaagaggccttgttccaagacattatctccagttaatcagtagtaaaggtgttgtttatgtgatctcagccgtgtgatcctca

SEQ ID NO: 943661 - DNA, 786 bp, Homo sapiens
ttggttacatgagtaaagttctttagtggtgatttgtgagaatttggtgcacccatcatctgagcaatatacactgaacccaatttgtagtcttttatcccttttattcctcaccccctcccaccattttccccaagtccctaaagtccattatatcaatcatatgcctttgcatcttcacagcttagctcccccttatgagtgagaacatgtgatgtttgactttccatgcctgagtttcttcacttaggataatggtctccagttccatccaggttgctgygaatggcattcatttgttcctgttatggctgagtagtattccatcatatatatatgtatataccacaatttcctcaaccactggttgattgataggcatttgggctggttccatatttttgcaattgtcaattttgctgctataaacatgcctgtgcaagtatctttttcatataatgacttcttttcctctgggcagatacctggaagtggggttgctggatcaaatggtagttctccttttagttccttaaggatctccacactgttttccacagtgattacactagtttacattcccatcagcagtgaagaactgttcaaaaaaaggcaacttatattttaaaattggggataaaagtttccctcctctagtctttacctttcccgaaaaaacaatcactaagattgtttgacaagtatcatttgagaaaaaattacatgcatatagtcccttatatataaatatgtagcatatatatattttttatttgcatgaatcag

SEQ ID NO: 943662 - DNA, 612 bp, Homo sapiens
aggggaaacagtggtccaggcagccacaattcttactgttggctacaagagtgaactaaatttatgaccacaattccaatgcattaggcatcacctcaggctggcctttaagaaagtgaggaaatgctaacctgagacataccctgagagcactgtattgccacgtgtgcaccagaaaagctccaccaaggarcctaggtttcttgattgcttttttattgtaattattcaagacttcatgacataaaatagcatagaagagatatttgaagaaagattttctgccatatctacgaactatcactatgaacatttctgttaaattgaagctatgagactaaagttaatttgaatgcaaaagtcctgaaactaggggtgatatgtttttttaaattattattattatacaaggaataaggaatgtagtcatggaaaataaattctacagggtcttggctcttggcttgtgtttccccagtttagatttttttttttaatggagtcttgctctgttgcctaggctggagtgcggtggcgtgatcttggctcattgcaacctctgcctcccgggttcaagtgattctctgcctcagtctcccgagtagctgggat

SEQ ID NO: 943663 - DNA, 622 bp, Homo sapiens
ttcatattcctagacctgtaattaatcaaaagattgcaccaatctatagccacagccattatggtcactgcagtcattttccagtgctcttgaccaaagagtgctgtcaccatggtgatggtggcaggggttgggtgggaagtgaacacagcagttagggggattggccaagctttctggagtttggaggcagggctaactcataacatgtagaacaccagatctctgctaggagagactccaataggggactcagcckcttaaaaattgctaccattagccgggcgtggtggctcacacctgtaatctcagcactttgggaggctgaggcaggcagatcacctgaggtcaggagtttgaggccagcctggccaacatggtgaaaccccgtctttactataaatacaaatattagctgggcgtggtggtgggtgcctgtaattcctgctacttgggaggctgaggcaggagaatcacttgaacctgggaggcggaggttgcagtgagctgagatggcgccactgcactccagcctgggtgacagagggagactccatctcaaaaaaaaaaaattgctacgatctgttaagtacttacatcttggcactgtacatacattatc

SEQ ID NO: 943664 - DNA, 622 bp, Homo sapiens
ttcatattcctagacctgtaattaatcaaaagattgcaccaatctatagccacagccattatggtcactgcagtcattttccagtgctcttgaccaaagagtgctgtcaccatggtgatggtggcaggggttgggtgggaagtgaacacagcagttagggggattggccaagctttctggagtttggaggcagggctaactcataacatgtagaacaccagatctctgctaggagagactccaataggggactcagcctcttaaaaattgctaccattagcygggcgtggtggctcacacctgtaatctcagcactttgggaggctgaggcaggcagatcacctgaggtcaggagtttgaggccagcctggccaacatggtgaaaccccgtctttactataaatacaaatattagctgggcgtggtggtgggtgcctgtaattcctgctacttgggaggctgaggcaggagaatcacttgaacctgggaggcggaggttgcagtgagctgagatggcgccactgcactccagcctgggtgacagagggagactccatctcaaaaaaaaaaaattgctacgatctgttaagtacttacatcttggcactgtacatacattatc

SEQ ID NO: 943665 - DNA, 622 bp, Homo sapiens
ttcatattcctagacctgtaattaatcaaaagattgcaccaatctatagccacagccattatggtcactgcagtcattttccagtgctcttgaccaaagagtgctgtcaccatggtgatggtggcaggggttgggtgggaagtgaacacagcagttagggggattggccaagctttctggagtttggaggcagggctaactcataacatgtagaacaccagatctctgctaggagagactccaataggggactcagcctcttaaaaattgctaccattagccgggcgtggtggctcacacctgtaatctcagcactttgggaggctgaggcaggcagatcaccygaggtcaggagtttgaggccagcctggccaacatggtgaaaccccgtctttactataaatacaaatattagctgggcgtggtggtgggtgcctgtaattcctgctacttgggaggctgaggcaggagaatcacttgaacctgggaggcggaggttgcagtgagctgagatggcgccactgcactccagcctgggtgacagagggagactccatctcaaaaaaaaaaaattgctacgatctgttaagtacttacatcttggcactgtacatacattatc

SEQ ID NO: 943666 - DNA, 622 bp, Homo sapiens
ttcatattcctagacctgtaattaatcaaaagattgcaccaatctatagccacagccattatggtcactgcagtcattttccagtgctcttgaccaaagagtgctgtcaccatggtgatggtggcaggggttgggtgggaagtgaacacagcagttagggggattggccaagctttctggagtttggaggcagggctaactcataacatgtagaacaccagatctctgctaggagagactccaataggggactcagcctcttaaaaattgctaccattagccgggcgtggtggctcacacctgtaatctcagcactttgggaggctgaggcaggcagatcacctgaggtcaggagtttgaggccagcctggccaacatggtgaaaccccgtctttactataaatacaaatattagctgggcgtggtggtgggygcctgtaattcctgctacttgggaggctgaggcaggagaatcacttgaacctgggaggcggaggttgcagtgagctgagatggcgccactgcactccagcctgggtgacagagggagactccatctcaaaaaaaaaaaattgctacgatctgttaagtacttacatcttggcactgtacatacattatc

SEQ ID NO: 943667 - DNA, 483 bp, Homo sapiens
gattttatcttttgacacagaaatgaaaaatgaggctgggtgtggtggctcacgcctgtaatcccagcactttgggaggccgaggtgggctgatcacttgaggtcaggagttcgagaaaccagcctggccaacatggcaaaaccccgtctctactaaaaaatacaaaaaattagccggatgtggtggcagttgcctgtaatcacagctactcgggaagctgaggcaggagaatcacttgaacctgggaggtggaggttgcagtgagctgagattgcaccactgcactccagcctgggtgacagagtgagactccatcttaaaaaaaaaaaaaamaaaaaaaacagtatatgagattgtgcagcggctgttgtgtttggaccagtttcatcatctggtttctttgagaagctgtgagcctctggctccagttccaggctctcccatagtgacatcttccctctcaaagggggcatcagtttccc

SEQ ID NO: 943668 - DNA, 585 bp, Homo sapiens
aaatattttgtcagaaaaataaaaactttaatgccgttttgttcacatgacctcggtcatcttttggaaataaggacagttttaaaaattattagtaaaataaaatgtcttgaaaatgtaaacatttggtctaaatgaaggtcagatatccgatttgctaaatgctttaaggtcaaagtgtttctttaacttttgaaaattgtttgatttacctactttggagcattagattataaataaggcctggggacatacgaagagctatgcccgctagctatgctgaaaacagtcaaaccttatcttcatttctgtctgacgtcctaggatccaccccggtatatagttaaaaatcacttacttatcaagtttttcactmaaaataaaagttgctaaaagttaacattataacatacaattaagacaactggagaaacagttttacatgcaaggtgtgtaaaacgtgtttttgttaaaagattataaaaaggcacaggaatatggcttttgttagagggaatataattttgactagttcagagggtcttaaagattgtcttaacctaaaagagtaatgaaacaaaacta

SEQ ID NO: 943669 - DNA, 450 bp, Homo sapiens
atcaaatagtagctctcattcattctttctaactatttttgtaccaattaatgatcttctcctccccttcagtgccccactacccttcccagcctctggtaatgatccttctaatttctatgtccataagttcaattgttttgattttttaggtcccacagataagtgagaacaggcaatgtttgtctttctgtccctggcttatttcatttagcataatgatctccaattccacccrtgttgttgcgaattaatggatatcattctttttcatggctccattgtgtctatgtaccacattttctttatctattcatctgttcatggatacttaggttgcttccaaatgttatcagttttaaacaatgctgcaacaaacaggagtgcaggtatttctttaatatactgattttctttcttttgggtatacacccagcagtgaggttgctt

SEQ ID NO: 943670 - DNA, 791 bp, Homo sapiens
taattccagatttgaaaagggctttggcgagattcattgttggggcggggtgggggagctgtgactttgccaaaccatcttttgtcattcacttccctcatacctaggtttctcagtcaccctgagaccgactactcttgaaaagttaaatcagaaggaaaacacagtttggaagaaggtgttttacaaaaaaaaagaaaagaagctgcctgatttatgtgatctggcaaaagggaggttgcgtcatgaatcaaaagccagtgttcgggaaacaaatgagtgagaatgaggcaggaaggaagaggaaggaagmagaaggaaagaagaaagaaaggaaggtaggaagaagaaaagggaagaaaaaacagagaaaggaaaggtgaatgcaccataaataaaccatagtttgagttcctggaggataagtaaatgggaaaaagaagtagaaagaactaatacaaatgcatatttaaaaattatccaccattgtctgttaaaattactgtgctcagaacgaacagcctaacatagacatgaacttaagaactcacctttcaaaaatggacaagttggaagtgtatagcatttaaaacaacaacacgcccctcacccgctcccccccatttgtttatgcagtgagatccccctgggcttgtgagcctcatattcaaagcaacaagaagtcaatagttgaactgtgtcaataagaacagatgaaagcaacagcctctgatttaaatgaaaataggatacagcgtgaactattgtttgctccatgacttccttctaat

SEQ ID NO: 943671 - DNA, 791 bp, Homo sapiens
taattccagatttgaaaagggctttggcgagattcattgttggggcggggtgggggagctgtgactttgccaaaccatcttttgtcattcacttccctcatacctaggtttctcagtcaccctgagaccgactactcttgaaaagttaaatcagaaggaaaacacagtttggaagaaggtgttttacaaaaaaaaagaaaagaagctgcctgatttatgtgatctggcaaaagggaggttgcgtcatgaatcaaaagccagtgttcgggaaacaaatgagtgagaatgaggcaggaaggaagaggaaggaagaagaaggaaagaagaaagaaaggaaggtaggaagaagaaaagggaagaaaaaacagagaaaggaaaggtgaatgcaccataaataaaccatagtttgagttcctggaggataagtaaatgggaaaaagaagtagaaagaactaatacaaatgcatatttaaaaattatccaccattgtctgttaaaattactgtgctcagaacgaacagcctaacatagacatgaacttaagaactcacctttcaaaaatggacaagttggaagtgtatagcatttaaaamaacaacacgcccctcacccgctcccccccatttgtttatgcagtgagatccccctgggcttgtgagcctcatattcaaagcaacaagaagtcaatagttgaactgtgtcaataagaacagatgaaagcaacagcctctgatttaaatgaaaataggatacagcgtgaactattgtttgctccatgacttccttctaat

SEQ ID NO: 943672 - DNA, 626 bp, Homo sapiens
aaatctaagcttgatccatagatgatgccattaccccagaagccagtcctgggctctccaagaatttaaggtcacagttctcttcccaaccagcctacactgttctaaagcatgcaggaatgctacgaaccctggggctccccttctcccaggaagtcaggggattactccaagatgagggcctcaaagccttggcacagaggtgttttttgcagtacagaactaccaacaattgcctggaacttacttctctctctctcttttttttttttttttttttttgagacagggtctctgtcacccaggctggagtgaagtggcgcaatctcggctcactgctgcctcgacctccccagctcagatgatcttcccacctcagccccccaaggagctgggactataggcatgtgccaccatgcccagctatttttttgkatttttttgcagagatggggcttcactatgttgcccaggctggccttgaactcctggactcaagagatctgccctctgggccacggcacccagcccacactctttttctctcttttcaaaaaatccatacaaaacccaaatcatgaccaggtagcccaggaggtcttatttgcttagctctcagcttaccc

SEQ ID NO: 943673 - DNA, 736 bp, Homo sapiens
gaccaatgcagaaggcaggtgatttctgcatttccaactgaggtacctggttcatctcattaggactgattagacagtggttgtagcccacagagggcaagcagaagcagggtggggcattgcctcacctgggaaacacaaggggctggggaactccctcctctagccaagggaagccatgagggactgtgcagtgagggacagtggtatctggcccagatactatgcttttcccatggtttttgcaacctgaagaccaggagattccctcgggtgcctacaccaccagggccctgggtttcaagcacaaaactgggtggccgtttgggcagacactgagctagctgcaggaggatttttttttttttttgtatcacagtggtgcctggaacccccagtgatacagaaccattcactcccctggaaagggggctgaagccagggaaccaagtggtcttgctcagtaggtcccacccccatggaggccagaaagctaagatccactggcttgaaattctcgctgccagtacagcagtctgaagttgacctgggacactccagcttggtggggggagaagcmtccaccattactgaggcgtgagtaggtggttttcccctcacagtgtaaacaaagccactgggaaatatgaactgggtagaacccaccacagtgtgacaaagccactgtagccagactgcctctctagattcctcctctctgggcagggcatctctg

SEQ ID NO: 943674 - DNA, 609 bp, Homo sapiens
  misc_feature 573, 574, 575, 576, 577, 578, 579, 580, 581, 582, 583, 584,585, 586, 587, 588, 589, 590, 591, 592, 593, 594, 595, 596,597, 598, 599, 600, 601, 602, 603, 604, 605, 606, 607, 608,609: n = A,T,C or G
ctgtctgccttgctggctcctctgtctgcctgtctgtctgcctatctgtcctgcgggctccatttctgcatgtgtctgtccgtccatctctctctggctcctgctccttcaccatgtctttctgtgtctccctctgtctctttctctctcgctcttgctctgtgtgggtgactgtgtctacctgcctatctctctccctgtttctgtctaccagcatgtgtgcgtgtgtgtgtgtgtgtgtgtgtgtgtgtgtgtgtctgtgtgtgtytcggttggctcatgcaaggggaggggttctgcctgcttctctgtatgcaagggctccgtctctgcatgtatgtacttctgtgtctgtggctctccgtgtctgtctgtatgtcatctctgtgtgtcttgttctccccctccccctcccctgcaagttgcggaagagggaggaggcaagcccttccagaagctgattggctcccggtgacatcacagttttctagagaaagagctaagatcacagagtatttttggagcagagcagagcattgcactcacctgcctgaggccccagcatgcttccannnnnnnnnnnnnnnnnnnnnnnnnnnnnnnnnnnnn

SEQ ID NO: 943675 - DNA, 750 bp, Homo sapiens
gcaaggaagatgtgcttaccagcagcgtgtgtgcccatgtgggcttctgggaggcagtgtagcataactgctaagacggcttccaccttcggattgccaggcctcggaccctggctttaccatttagcggctgtgagattttgagcaaatggcttcacctctctgtgcttctgtgtcctggagtcctggtgaagatcaagtgagatagcatcycggtagagggggcatcacatgcccgccacttggtagaccctcagtacagggtagctatgaggattcctatacccgggaagaggcaccagccatagcacagccctttccagcaccaatgactgctggctgttagtcttcacgttcataaaacactttcctaagccttttgtaatgtgagtcggtgatctagtcagtccagaaggaaatagtcactgctctctaggagcttatactggaagggaaaagattatgagggcctctaaagatgttggggaaccacagacaaacatttaggaaaaataaaaatattaggtgtgcatttgggagccggtgtaggagggggtgtgctgtcagagattcatgtttggtcaacatgggggctgcatattttcaaaggagaatcagagtcctggctctacgggcttcaaagaggggctcccctgaggacctgctggacccaggactcctggcattctgaggagggggcttctttgcgtctttgtgccccctgagggagggctctctggggcctagaat

SEQ ID NO: 943676 - DNA, 743 bp, Homo sapiens
ctgtcccagcaccatttattgaatagggagtctttcccctgtttttttattgcctgtgtcaaagatcagatggttgtaggtatgcagctttatttctgagctctctattctgttccattggtctctgtgtctgttttagtaccagtaccatgctgttttggttattgcgatcttgtagtatggtttgaagtcaggtaatgtgatgcctccagctttgttcttattacttaggattgctttgactatttcgtgtctttttttgttttgtttgaattttggaatagtttctttctaattttgtgaaaaatgacattggcagtttgataggaattgcattgaatctgcagattgctttgggcagcatggccattttaatgatattaactcttccaattcatgagcatggaatgtttttccatttatttacgtcatcttagatgtctttcaaaagtgtagttctccttgtagagwtctctcacctccttggttaactgtattcttaggtattgtgttctgtttgtggctgttgtaaatgaatggcattcttgacttatctctcagcttgctcattgttgtatagaaatgctataatgataaagggttcaattcactatgaaaacttaactattttaagtctacacacacccaaaattagagcacccagattcataaaacaagttattttagacctatgaaaagacttagacagccatacaataataatgggagacttcagggcccca

SEQ ID NO: 943677 - DNA, 615 bp, Homo sapiens
gtatttgagatttttcttcttacgtatttatttgttgctataaactttctcttagaactgctttgccgtatcccacaggttttgatatgttgtgtttccattttcatttgtccccacaattttaaaatttctttaacattttttcattaaaattgttcaggagtatgttgtttaatttccacatatttgtgagttttcagaaattgctcctcttattgatttctagttttatacggttatggttagaaaagatacttgatatgatttcatcttcttaaatttgtcaagaatrgttttgtagcctaacatatgatcaaacctggaggatgttccatatccagtggagaggaatgtattctatagctgttggatggaatgttttgaatggctttgtctggtagttcatatatctcaatttcaataaaaagccactgtcttcttattttgtccatttagtgatgctatgttttcctgattgttcttgattctgtggttgagtgttgatgtctgagtatttgaaagactaggtccttattccaatttttacagactggttttgtctaggaaggccctgtagcaggtatggtgctggggcacactagaagttcaaggtag

SEQ ID NO: 943678 - DNA, 714 bp, Homo sapiens
ttcagtcagtttccagacttgagccagtttacagacccagaaccccttgaatgaaggggaggccaggttcccttgagaaaggaccccactacactaccaacaatttatgctgctaatctttctcccatctttccccaaggagacctccagccttttaccagagtaattgtgtactggggaaaggggaatgatcagacttttgggggactactagacactgactctgagctgatgttgattctaactgacccaaaatgttattgttgtcccccagttaaagtatgggctcatggaggtcaggtaattaatggtgttttagctcaggtccaacttacaatgggtctagtgggtccctgggctcatcctgttgttttcccagtgccagaatgcataattggcatagacatacttagccactggcagaacccccacattggctccctgacaggtagrgagagggccattacagtgggaaagaccaaatggaagccattagaactgcctctacctagaaaaacagtaaaccaaatccaatatcgcatccctggagggattgcagagattaacaccagcatcaaggacttgaaagatgcaggggaggtgattccgattcccaccacattcccattcaactctcccatttggcctgtgcagaagacagatggatcttggagaatggcagtggattattataagtttaacctagtagtgact

SEQ ID NO: 943679 - DNA, 797 bp, Homo sapiens
tgtgtggcctatatctttatatatctttatatccttctaaggtgaaagataagttgcttcatttggcccctcctacaaccaagaaagaggcacaacacctagtgggcctatttggattctggaggcaaaatattcttcatctgggtgtgttactctggcccatttatcaagtgacccaaaagcctgctgattttgaatggagtccagaacaggagaaggctctgctgcaggtccaggctgctgtgtaagtgctggggccatatgacccagcagattcaatggtgcttgaggtgtcagtggcagatagggatgctgtttggagccgttggcaggcccccataggtgaatcagagcagaggcctctaggattttggagcaaggccctgccatcttccacagataactactcttcttttgagagacagctcttggcctgttaccaggctttggtggaaactgaatgtttgactacgggtcatcaagtcaccatgcaacctgaactgcctatcatgaactggttgctttctgacccatctagccataaagtgggtcatgcagagcagcattcmatcattaaatggaagtggtatgtatgtgatggagctcaggctgttcctgagggcacaagtaagttacatgagaaagtggctcaaatgcccatgatctccacttctgtcaccctgccttctctccctcagcctgcaccaatgacctcatgaggagttccctatgatgagttgacagaggaagagaagactagggcctggttcacagatggttctgcatgatatgcaggc

SEQ ID NO: 943680 - DNA, 631 bp, Homo sapiens
gcctatgctaagttattctcctgtcaataatctttcatctgtgtttctttcagaggcatctactgcaagtgcaaaagaattgtggtgaaagctgcctgatcaacagctataacctggcagaatttctccttccagccttacctgaaaattgcttattatgaaatactataccacaatgcttcatgcttattccaatctcagattaaaggcaaactctttgtccaaaacagtacacacccacaggtgggggtgtatatgagcagttttgacaacgaacaacaaaagttggacctaaatttttcacttagcacaagcctagtaattttattattgttattattggatgtagttgcattgaggattctcttattagagacatatcttggttcaagtaatcaatggaatgtgtgggggaaacacatttaaaaatgaatttggaaatgtttccakgagtggtggttttacaagaggactcatcacagattttttcacagaatctttcctaatctttacgaaggtttgaggctctaactcagttctcgtaatggactctctcttggttggaaagaagacaacccaaaattccaacatttggtgagttgacaaaagtgacatgtggtgtctctttcat

SEQ ID NO: 943681 - DNA, 631 bp, Homo sapiens
gcctatgctaagttattctcctgtcaataatctttcatctgtgtttctttcagaggcatctactgcaagtgcaaaagaattgtggtgaaagctgcctgatcaacagctataacctggcagaatttctccttccagccttacctgaaaattgcttattatgaaatactataccacaatgcttcatgcttattccaatctcagattaaaggcaaactctttgtccaaaacagtacacacccacaggtgggggtgtatatgagcagttttgacaacgaacaacaaaagttggacctaaatttttcacttagcacaagcctagtaattttattattgttattattggatgtagttgcattgaggattctcttattagagacatatcttggttcaagtaatcaatggaatgtgtgggggaaacacatttaaaaatgaatttggaaatgtttccaggagtggtggttktacaagaggactcatcacagattttttcacagaatctttcctaatctttacgaaggtttgaggctctaactcagttctcgtaatggactctctcttggttggaaagaagacaacccaaaattccaacatttggtgagttgacaaaagtgacatgtggtgtctctttcat

SEQ ID NO: 943682 - DNA, 662 bp, Homo sapiens
accatcagaatccagtcccgtgtcgatcaatgtctcactgtcttcagtctgctcctggccaatgaccgagcatggcagaagtcctcgagttggtcatttctgatcaatgctgggcttttctaatgtactatattcttcggttccctagtggcatagaaaggactttcttagagctgcactatattttgaggctcttcttatccgattcttctttattcccttttccctctcacataagtcagacatcacagtgtgaggctctccccacttaactcctgtcacctctctcctttatgattaacaagataaagttgaactttttttgcgttttatttttagagacagggtctcatcctatcacccagggtagagggcagtggcacaatcattgcttaccacagcctcaaactcctaggctcaggggatcttcctgggtmagcttcctatgcagctgggactataagcatgaactaccacacccagcttaaagttacgctttacaatttatattggtgtctacttcatggagggtccaaactgacatacgctgcaatacaaaatttgttgggaatcatctccaatcctctcacttcactcctccctgaatccattcttcaaagatgcaaggagttcagactccatatccgaaagcttggctacta

SEQ ID NO: 943683 - DNA, 575 bp, Homo sapiens
aataaattaatgaataacaatcttgtttctgatcttgaacaatgcttaaaatgctgaaagttgggaacctgacataaaagtaacaaataccacagccctgttaggtttggagcagtaatcccagccaaagactgatcctattggaaagagtgattaaaagttaagctcaaggctgcccactgggtaagtatactgtgcagcagtaggaggcagagaggagcacaggaaakctgccacctctccctccaagggagtacttctgtactctagagtggaggacgatgtaaatcacccttgaaacttgtgtaattgagagtgacataaaacaatgtgatgagccagagtaagtaattagagaatgcctaagtgtggggagaaggggtaagtcacaatatagcttcattcttgaagggaggttcagatgcctctactttccctcctgagccagatagattgaagctgacttctgagagtgctgtgactgtgcagagatttaggctaaattgaaatcaacactgttctgaaataaaaacatcctttctctgctctttacaaattcctgtgccactggaggc

SEQ ID NO: 943684 - DNA, 789 bp, Homo sapiens
gcacttcctagtacttacagatgctagcttttaaacttactttagagaattattttcaaaactcagtcattaaagatgcagaaaaggtcttcagaagggatgtttgaaatgaagaattctcaaggttgaacatcttctcccttttcaagatacataaaattgtttcaaataaaaagtgactcaaagaaaggatggtattttgtttttgtgcctaaattaatctaataacatgctcaaaaaaatgacaattcaaatgactttgaagcagaagacatattttgcaatttttattgtcaaacttgagaacacagtcgtttccccaaaatgtggctcattaaattgatttcaaagcatctttgtttcttttaattatacatgtccatctactttctaagcccttttatttggcttaaaacattccccattttctgacaagtctctaatctcttgtaagctcctcagagaaatttagtgacactctctgtcacagaatgccacatgtccacagccccagcacccctgctgaacttgcaaagctgctgattctctggtttgtgtcagacctcggcacctaaatttccttttccaggctgctgacagccatttccactgagtgctttgcctctgacttttctckctagacattcaggtcaactggggttctggtgatggcagaatttctcctgtctccttccttgcagctaaggtcatatcctgagagattgacaggctaggcaaggagcagatggggagtctcccttggctgatgtggatgtatgatgaatgact

SEQ ID NO: 943685 - DNA, 789 bp, Homo sapiens
gcacttcctagtacttacagatgctagcttttaaacttactttagagaattattttcaaaactcagtcattaaagatgcagaaaaggtcttcagaagggatgtttgaaatgaagaattctcaaggttgaacatcttctcccttttcaagatacataaaattgtttcaaataaaaagtgactcaaagaaaggatggtattttgtttttgtgcctaaattaatctaataacatgctcaaaaaaatgacaattcaaatgactttgaagcagaagacatattttgcaatttttattgtcaaacttgagaacacagtcgtttccccaaaatgtggctcattaaattgatttcaaagcatctttgtttcttttaattatacatgtccatctactttctaagcccttttatttggcttaaaacattccccattttctgacaagtctctaatctcttgtaagctcctcagagaaatttagtgacactctctgtcacagaatgccacatgtccacagccccagcacccctgctgaacttgcaaagctgctgattctctggtttgtgtcagacctcggcacctaaatttccttttccaggctgctgacagccatttccactgagtgctttgcctctgacttttctctctagacattcakgtcaactggggttctggtgatggcagaatttctcctgtctccttccttgcagctaaggtcatatcctgagagattgacaggctaggcaaggagcagatggggagtctcccttggctgatgtggatgtatgatgaatgact

SEQ ID NO: 943686 - DNA, 595 bp, Homo sapiens
acaagtaaatgtccatgttatgaggctcccttggcaaggagcttagcacagcctctaggggctgagggtaatgacagtcagaaagaagctatggccctcagtcccagagtttcaagaaaatgaattctgccatcaacctgagtgagcttggaagtggattcttcaccagttgagtctccagataagagtgcagcccagccgccatcttgagtgcagctttgtgaagccctaaccaggggacccaaccaagatgcacctgtatctgaccacagaaatcgtgaggtaatatatatgtgtktggctttaagccattaagtgtgtggtcatttattgtgcagaaatagatagctaatatagtaactttttaatttatttttttcccacttaaaaaaatggaggcaacaacatacagtaaagtgcacaggtgtgtccaatttggttaatttttatctatgtatacactcatgcagccataactcagatcaagatatgaagatctgcactgccccaggaggctacctcacactcccctcccctgctgctcccaagggccaacaactgtgctgacttctactaccattagtgtatctaaacc

SEQ ID NO: 943687 - DNA, 716 bp, Homo sapiens
tgcgtttatatcaataggctgtggtcaaaggtttggcttggaggaaatacaattggaaaattgatgataaggaagtctgagtatgggaggtaaagtatgtggatagatctctctgcatgggtaaagaacatgaagttatttttgccccatgtcaatgttcaccaaaaagttatttcagcagagagggatgttaataattaagtgattaggagaactcattctgtggacaccagtgagcctgtttccctagccagtcctgtcatgcccaatgtgctcatgaacaaaaagtacctgtggtggcagggatggaggctatgcatgaaatacaatgtggatttccgcttaccaaggccaatctttccactgctgagtgccctttctgccaatagtagagaccarcactgattccccaatatggtataattgctgggtgtgatagagagttattttgtggaaggttgattgcatgcaaccacttccaccatggaaggtgcagtgctttgttctacttggtatattaattactttggatatgtatttgcgtttgctgtacaaaatgcttctgccaaaatgaccatctgtggacttaaagaataatgtatccgctgtcatggtattcttcatagcgttcttctgatcaaggaaatcatttgacaccaaatgcaatgtagcagtaggcctagctcatggaattcactgatctcaccatatggtcc

SEQ ID NO: 943688 - DNA, 589 bp, Homo sapiens
gcactctcaggggccagagaaggccctccttcccccacaggtatgcatatgcctgctcctgctgcctggcctctccccgatcctggtgcttgctccaatctcagagtaaaattgaggccaagcctgggtgctgccacaacccagccaggtgtgtgcacgctcaacacagtgctgactctggactttgagtgctgacgaggatgggagggaggcccggggcatgctcggagaagctcacagatgacctgcaggcaccccttggcaagaacagcctcagtgccatggatgagggcaggaggcagacaggctccaggatagaaaggggtgggtccctggtgaagccccaccttcaagccaggggtggcctgaagcctgggggctgggctgtcagttccatggaccagaatgagaacttatgatgccttttccagggctgcscatggccacccaggaaccaatcagcatgcacttcctcccctctgaagcccataaaacccccagactcagccagactcagagagatgacaggatgacctgcctgtgaacaggagctacttatgccaaggtttcccctctgctgagagctgag

SEQ ID NO: 943689 - DNA, 647 bp, Homo sapiens
actcacaggctgtgaccaatgtcttggccatttggttaggccactggcaggtctgagtgccatataaacaagcttccctgtaggggtgagacatttagaaaaaaaaatgctccattcctaataaggttttcttatcaaggttgatgatcaccagaaaggctctcagactgacaaaggggaatataatcaatgagcagaccatgtttgtcagctaaactcagagactgaattgtgccctaatccagaacaagcagatgttcaacctattgccttctggatccatgagaaatttggataccatcctagactggcctacatgcatagactgcctctgtggtctgaacatgccaacatagcatggaaaaggttttcctccagccagaccatggccaaagctaaaaatgctgcctgggaaaaaatctctccagccaatgaccaaggagtttccaatgaatagatcacattgggcccctcatccaatcaagaagattccactagatcctgactgtagctgatactttctctgaatttactcaggcatccttgtgcatsccactgactcaggccacactatccagatcactgaagaccatatgtgtcttgttcaggttttccgagtagattttatttgataatggctttaaatt

SEQ ID NO: 943690 - DNA, 718 bp, Homo sapiens
accagtctttttggtaaagcatagtagcagtgatttttgctccagtttgcaataaattcctcatgtccatctgagaccatctcagcatggacttcattgtccatatctctatcagcattttggtcaaaaccattcaacaagtctctagaagttacaaactttcccacatacctctgtcttcttctgagccctgcaaatttttatgacctatgctagttacccagttacaaagtcacttccacattttcaggttatctttatattaacagcagtgctccaaacacgtggtaccaattcctgtattagtccattttcacattgctataaagatactacctgagactggataatttatatacaaaagaagtttatttgactcacatttccacattgacagggaggcctcaggaaactyacaatcatggcagaaggaaaaggagaagcaagcaccttcttcccaggcagcaggaggtagagagagaaggggaaagcaccagagacttatcaaacaaccagatttcataagaactcactccctatcatgagaacagcatggaggaaactgcccccatgacctagtcacctcccaccaggtccctccctcaacacttgcggattacaattcagattagaatttgagatgagatttgggtggggacacagccaaaccatatcacctaatccgtactcagacagattgatgggtataatgtgatct

SEQ ID NO: 943691 - DNA, 718 bp, Homo sapiens
accagtctttttggtaaagcatagtagcagtgatttttgctccagtttgcaataaattcctcatgtccatctgagaccatctcagcatggacttcattgtccatatctctatcagcattttggtcaaaaccattcaacaagtctctagaagttacaaactttcccacatacctctgtcttcttctgagccctgcaaatttttatgacctatgctagttacccagttacaaagtcacttccacattttcaggttatctttatattaacagcagtgctccaaacacgtggtaccaattcctgtattagtccattttcacattgctataaagatactacctgagactggataatttatatacaaaagaagtttatttgactcacatttccacattgacagggaggcctcaggaaacttacaatcatggcagaaggaaaaggagaagcaagcaccttcttcccaggcagcaggaggtagagagagaaggggaaagcaccagagacttatcaaacaaccagatttcataagaactcactccctatcakgagaacagcatggaggaaactgcccccatgacctagtcacctcccaccaggtccctccctcaacacttgcggattacaattcagattagaatttgagatgagatttgggtggggacacagccaaaccatatcacctaatccgtactcagacagattgatgggtataatgtgatct

SEQ ID NO: 943692 - DNA, 581 bp, Homo sapiens
acttatttcaggagaaaatagaagagaagaagagaattttcacatgcttgtaccattaaatctaccaacccactcatctagtaggttttctctcttttaaaaatgggcttttacataaggccaatccttctgcttatttgctagattgcatcccctctcactttctcaaaggcatcaatcccataattgctacctcctttccaagcatcatacatttttacattttactgaatcattctctttagcataattaacatgctaagataaacgttagcttaaaataaaaacaaagaagttttgatactccctatttctttgcttccttttagtgtaaaacttttcacaaaaagattacatttattttctccaattgctttttttctgttttatggtggtagttctagcagtagctactgttaagatcaatgatccttcctttsccaaatctaatggtggattatctgttctcatgtcacctcgtgtatgaaggttattttcgtagttctatttataatactatcttcccttggactctgtgacatcaacttccctttgattttcctttgacttaatgtgtttgt

SEQ ID NO: 943693 - DNA, 869 bp, Homo sapiens
agactgattacagcttggcttttgccttatttgaacgcagtttaaacattctgcagtctgtgagtggttgaagtatggccactgggattggtcgacactcagccactgttaacaggtgcatactattaagataggttttcgcatttgtctggctattaagctaggttacagtttaaccacaaggactcaaatatagaaatacggaatctttttaggccatatttagtttgttttaacagatggaagaatctgataccaaagttgttataatatattatctaaaatgtccagttttctggcagagcaggaacatcaccatctcagataggcactgccattttaagttccccttgattaaaaactgcctaaatccagcccaaaaaacatcaccctaatggctaatgtcagcataatcataaayctcaaaagacacctctgaccagaaacattccaaccctgagataaacccccctccaaccagagacatgccagcccctaggtaacttcccctccaaccagagacattccaaccctgcaataaaactctcctccacacaaaaacattttcagcctgtgaaaagctctcttcctaaacccttaaatacccttaatctgtaagagagaatgctcctgaccaaaatcagccagaagcccctcttgggtttattctccaaaataaacctgtctttgaattgttgatctgcttttcgtgtttcttttttctatcttcaacttcacattttcgataacaacataaacaaaatacaagacataccaaaaaataaaggaaaatataccacatatacagaaagaaaagtacagccaacggaaaacataccttagagggtacagatattggtcttactaga

SEQ ID NO: 943694 - DNA, 588 bp, Homo sapiens
agtttctgggaggggcagggatggctgaaatataccaccttatagaatgtacaaccttgctcactttgcacaaaccagcccgaacgcgtgatgctgggttttcctgttgaggatgtctgagaagttagaccccatgccttcctcagttgtcctcccctgacccaatccccacttctggtcagggatatctggccttttccaaccataagttttacctacttttatttatgcatttttttctctctagttaaatgttggtcagttggggagctttaaaytttttttttttttttttgatatggagtctcgctctgttgcccaggctggagtgcagtgacatgatcttggctcactgcaagctccgcctcccaggttcacgccattctcctgcctcagcctcccaagtagctgggactacaggtgcccaccaccatgactggctattttttttatattttagtagagacagggtttcaccatgtgttagccaggatggtctggatctcctgaccttgtgatccacccacctcggcctgccaaagtgttgggattacaggcatgagccaccgcgtccagcctaacttcata

SEQ ID NO: 943695 - DNA, 622 bp, Homo sapiens
cagctgacaagcaatggaaccaggtccgagcccagacatttcacaccagtgcccaagctccaccatctccccatttgaagtctaggtttaaagtgatgtttttatgatgacagtgtcacaggtgagtgatgctgcataacagcatagcccatatccagggctgaaacataggtcagtcagaagaacatagaatgcagagaaagtcttggaaggttaatatatatagaaatgcttctgtattctttataacctgttaactcagagaggaatgctcatgggctgctgtgatggaraaaactgacttaattttcttttagtagctatggaaaacaatgcacagccatgaactttgaaaatctatttcctttattgtatattctctgtactctgtaccctctgtctccctaaactctccattatttagtttcccagtgaataatctacgtttaaaattactgttaacactttaccctctcttttctctctggccactacaaaaaaaaaaaaaaaaaattcctgaatgcaaccctccctccctccctccctcctttccttccttccttctttccttccttccttccattcttttagtcatcactttttagctccaatagtaaagcaa

SEQ ID NO: 943696 - DNA, 604 bp, Homo sapiens
gatgagttggaactatggccttattaatgatgtggaggatctgatctagtctccattctccattgggtttttgcactcctaatattggggtgttgcaggggctgctacaaggttcgaggaggccctgcattttcaggttattaataatggcttctagccccttcctagccttggctttaggggatattgtctctggttaagaaaagcagtgggatccttaagatggatctgaactggcctatttttccttgagttgctcacmcttctggattaataatagcttccacctgggggaaacaaagagtttgtcttggggctataaggatgctggcccccatgcaagctaaaatgtctctgcctaatgaaggagtggtactttcaggcatgagtaagaaggcatgagtaaataataggtcctcccaactacaactaaggggttgagaaaaatatcaggttagaactttacctgagatgcccatcatggtcatgctatgggaaaaggggattagggagaagagggatgctggttccaatgtctagaagaaggtccaccttccttccttccttcaattttcagaatcacctggggctcctgtgcagtaat

SEQ ID NO: 943697 - DNA, 644 bp, Homo sapiens
tgggccagatttgggccatgggcccaatcctggttttggtatagcctgtttgctaagagtggtgtttacattttttaatgattgaaaaaaatcaaaacaaggataaaatttcatgacatgttaaaattatatgaaattcagatttcagggtccataaataaaattgtattggaaaaaagccaccatacctatttatgaattgtctatggctgattttgtacaacaatagtaaaattgaatagctgcaacagaaaccatatggtctgcaaagcctaaaacacttattatatggtctttgacagaaaaggtttgctgatcccctggtctagaagatcaaatgttaaagtccctcaaggcctactcctagtttctttcctctcactccctactgtctccctagggatgacttcagatagccactggcccatgamcagtgactcaaaaatttctaactctaatgcagacctctcctctgtattccagaccagtgtatccaactgcctatttgacatttctacctggaggcctcaaaagtaccgccaacatacacatacccaaagcaaattgataaattttttcttcaaattgtatgttctttcattgttcccttagtgaatagcttcatcttccatccagttactcaa

SEQ ID NO: 943698 - DNA, 745 bp, Homo sapiens
agcatactcttccttttagtatagtttaggcaggctccttttattacaataaatcttattgaaaatgaataaaacaaaaataacattaagttggtcaggttctcaaaaatcctaccaattccactcaaagtagcaaagctgctgagttggagtccaaattacctcttcctagagtgactgctatcttcacagatgggccaacatcttcataggcactagttttggtcatttcccatcaaacgacctttgtccccaaaccagcctctaattcccatcatcataggctccaggtgccatgttgccyctgggcacccagacactaaactccctaaacatcttgcctcattcaagggcaaacattttctttaaaactaagactttcacctgggtacagtggtgcatgcctgtaatcccagctacttgggactatggggtggaaggatagcttgagcccaggaggtcaagaccagcttaagcaacatagcaagaccctgtctctaaaaattaaaaaaaaaaaaatgaagactcttcattttctgatcaaatgccaattacagtgactcaagcctcttaggtgctcaaaaaatagatattgaattgataagtaagtgaacaaatgaatcaatttgtaaattagtgaagtaaatgaatgaaagcttcacttctgttactctcccaaatcccatttctcctaggctagagacctctggctcaattcccatataggcccagtgatttgcgagtc

SEQ ID NO: 943699 - DNA, 745 bp, Homo sapiens
agcatactcttccttttagtatagtttaggcaggctccttttattacaataaatcttattgaaaatgaataaaacaaaaataacattaagttggtcaggttctcaaaaatcctaccaattccactcaaagtagcaaagctgctgagttggagtccaaattacctcttcctagagtgactgctatcttcacagatgggccaacatcttcataggcactagttttggtcatttcccatcaaacgacctttgtccccaaaccagcctctaattcccatcatcataggctccaggtgccatgttgcctctgggcacccagacactaaactccctaaacatcttgcctcattcaaggrcaaacattttctttaaaactaagactttcacctgggtacagtggtgcatgcctgtaatcccagctacttgggactatggggtggaaggatagcttgagcccaggaggtcaagaccagcttaagcaacatagcaagaccctgtctctaaaaattaaaaaaaaaaaaatgaagactcttcattttctgatcaaatgccaattacagtgactcaagcctcttaggtgctcaaaaaatagatattgaattgataagtaagtgaacaaatgaatcaatttgtaaattagtgaagtaaatgaatgaaagcttcacttctgttactctcccaaatcccatttctcctaggctagagacctctggctcaattcccatataggcccagtgatttgcgagtc

SEQ ID NO: 943700 - DNA, 663 bp, Homo sapiens
caataaaaaaagttcatgggcaaaatgggccacaaagacacacagcctcgaatgttccactctcaggcagtggatattaacacttgccctgtgtcacaaaagggattccgtgtgctgggcctctcagtggactggttcacacatccccaatgacagagaagcaggaagcagggtcccaaggtctggctatagcccagattctagccaaagtagaatttctttaataattcaaattttgtctttataattaattaaaatgttatatgcttctccagaatatatatttatctgttttaaaatatgcttgtctctaaaatctttggataaaatatatatgccttaggaaaatatgtacttctcaccgtattaccatgtaggctcaggggcagagttccctatttgggaaacatagacaatcattgtcacaataaatttttgccagtaatgcagtcatcccygtaatgcaggagaggagactgaggctcaaaaaggttaagtgagttttctgagatcacctagggcttggattaaaaatttagtcccaaatgcttatccctcctctacccattctattaagtacttcgccttcctctctggcctgtagcccttgtcacttgcagaggcagtgtggaacttcgaagctgttcaagacatccaattttc

SEQ ID NO: 943701 - DNA, 653 bp, Homo sapiens
aacccaataacacagtgttcattctagaatttcctctttgattatttgtaatctatttccccaagagtgagaaatctggcacttcctatcaacaatatatttacttatttgttcaaccatttcatacctgtagtttcaaaattgctaatttatactcctgggagaaagaaatgcaaatgtttktgcatagctctttttgttttcagccttacagcatctgatcaaaacacctgttttccaaagttatttagatcatctcttttctttatcaacccttcaaagtgtttgctatctacaatacagttagattcagttgctgtagtctttatttcatcttgtattctcttgaaattgaggttatgtttaatatttacaaatatttacatatatttaatatttacatacatttaatatttatatatcataaaatttactttttgtggtgtacagttctacaggttttgaaaaatgtgtagcgtcaccatcttgtacaacagctccatcatcccccagattcttttgtgctgcctctttctccacccacaacccctggtaactactgttttgttttccttccctgtagttttatctatttcataaagtcatgtaaatggaatcacacaatacgtagcctttgggatctggatttgctc

SEQ ID NO: 943702 - DNA, 650 bp, Homo sapiens
tgaattctaccagtggcacaaggaagaactggtaccattccttctgaaactcttccaatcgatagaaaaagagggaatcttccctaactcattttatgaggccagcatcatcctgataccaaagctgggcagaggcacaaccaaaaaagagaattttagaccaatatccttgatgaacattgatgctaaaatcctcaataaaatactggcaaactgaacccagcagcacatcaaaaagcttatccaccatgatcaagtgggcttcatccctgggatgcaaggctggttcaatatacacaaatcaataaatgtaatccagcatataaacagaaccaaagacaaaaacygcatgattatctcagtagatgcagaaaaggcccgcatgattatctcaataaatgcagaaaaggcctttgacaaaattcaacaaccttaatgctaaaaactcccaataaattagatattgatgggacatatctcaaaataataatagccatctatgacaaacccacagccaatatcatactgaatgggcaaaaactggaagcattccctttgaaaactggcacaagaaagagatgccctctctcaccactcctattcaacatagtgttggaagttctggccagggcaaataggcaggagaagga

SEQ ID NO: 943703 - DNA, 650 bp, Homo sapiens
tgaattctaccagtggcacaaggaagaactggtaccattccttctgaaactcttccaatcgatagaaaaagagggaatcttccctaactcattttatgaggccagcatcatcctgataccaaagctgggcagaggcacaaccaaaaaagagaattttagaccaatatccttgatgaacattgatgctaaaatcctcaataaaatactggcaaactgaacccagcagcacatcaaaaagcttatccaccatgatcaagtgggcttcatccctgggatgcaaggctggttcaatatacacaaatcaataaatgtaatccagcatataaacagaaccaaagacaaaaaccgcatgattatctcagtagatgcagaaaaggcccgcatgattatctcaataratgcagaaaaggcctttgacaaaattcaacaaccttaatgctaaaaactcccaataaattagatattgatgggacatatctcaaaataataatagccatctatgacaaacccacagccaatatcatactgaatgggcaaaaactggaagcattccctttgaaaactggcacaagaaagagatgccctctctcaccactcctattcaacatagtgttggaagttctggccagggcaaataggcaggagaagga

SEQ ID NO: 943704 - DNA, 587 bp, Homo sapiens
ttcctccagctgccaccttttcctacccaccaaacctggggccaggtatccgggcaagataggcaagtagacttcactgacatgctgcccaataaatggccctttatcttccagtctttgtctgtattttctttgggtagatagaagtgttcccaacaacttcagaaggtrcaaaagtcatcacacaaactctcattgtgtatataattccccattttggactcctaacatgcatccaatccaataacgggcccgccttttatcagcctaattacccaatgtatctctacatccctggtaataaaatcagttctccacacaccctacaggcctcaatcttcaggcaaagttagaaaggtcaactctgtccttgaagctcaactcaccaagctagctctagaaacccaccagtcatggacaaaaaaatctccctttcacactcatgagacttcatgcaacaaccaaaacaccctctttttatagtccctttgaaatcatgtgtggccaaacttttgtcttagggccttcaccctcaccagactttgagccactcagaaattacctcccctccttaatccagacatggt

SEQ ID NO: 943705 - DNA, 641 bp, Homo sapiens
tcctaaggtcagccatatgcagtgtcctaggtctgatttctccctcagtcgcctcagagcacacagcccgtgctaagggatctgtgcctccccatctcattccctgcattggcctctcctgagactgtctctctttcacacactttcatactccttccctgccccagcactcctcatcacacaaaatgagcctctctcatgtccccggtgggcctagttaggctcccacattcacacacatacatacaccactcgtaccccagggcacctcatcagactaaacgagcctctctcatgtcctgggcaggttcatatgcaccgacacactactagttcctgtctccagatccagtgaaccattttcactttattagtggggacatgaggttcatccaagttgacaagccactcctgccacccccagmcgcgtctgggttggattagtggctgttccccaggaggtgatcaagctccccttcatccttatgcgacgggcttccttgccttgggcccttgctccttaccatggttcctgaagtgctggtatcatcctgcaaccccatccccagttccgttacgctgctgggcaggccactgggacgcgggaagagccggtctccatccaggtgaatcttccccgc

SEQ ID NO: 943706 - DNA, 420 bp, Homo sapiens
ggttaagtggatgaccaaaatgctgatagaaatatggacagtgacaaccagaacgacaaggtctcagatggaaattaggaatttggggggaactagagcagaggtcacccttgttatgttgtagtgaagaactctgctatgtcatgtgcataccctaggactctgtggaagcctgaatgtgagagtgatgacctatarcacctggtagaaacattttctgagcagcaaagcattcaagaagtgatgtggctgcttctaacagcttataaaataacatgggagcaaagggatgacctaaagttggaacttataattaaagagaagctgagcatacaaattttaaaaatttgcagcctggccacgtggtggagaaagaaagagcattttcagatgaggaatctaaaggtgcaatgagcaaac

SEQ ID NO: 943707 - DNA, 553 bp, Homo sapiens
agcagaaagtagtctccacagtattttttttttttttctgagacagagtctcactctgtcacccaggctggagtgcagtggcgtgatctcggttcactgcaagctccgcctcccaggttcacaccattctcctgcctcagcctcccgagtagctgggactacaggcgcccgccaccacgcctggctaattttttgtatttttagtagagacaaggtttcaccgtgttagtctggatggtctcgrtctcctgacctcgtgatccacctgcctcggcctcccaaagtgttgggattacaggcgtgagccaccgcgcctggcctccacagtatttatgaaatgatctgtccaaaggagctgcagccctgggcactcagatacactaaaaggagagacacccaagttctctcttctgaaaggctgctgcctggtgggagggagggggaccatcgggttaattgcaggaagcagcaggattagggaggcactggccttgcagttgatggctcaggttaagcaggtcgttgcctctgccttcagcagggctgggaaaag

SEQ ID NO: 943708 - DNA, 553 bp, Homo sapiens
agcagaaagtagtctccacagtattttttttttttttctgagacagagtctcactctgtcacccaggctggagtgcagtggcgtgatctcggttcactgcaagctccgcctcccaggttcacaccattctcctgcctcagcctcccgagtagctgggactacaggcgcccgccaccacgcctggctaattttttgtatttttagtagagacaaggtttcaccgtgttagtctggatggtctcggtctcctgacctcgtgatccacctgcctcggcctcccaaagtgttgggattacaggcgtgagccaccgcgccyggcctccacagtatttatgaaatgatctgtccaaaggagctgcagccctgggcactcagatacactaaaaggagagacacccaagttctctcttctgaaaggctgctgcctggtgggagggagggggaccatcgggttaattgcaggaagcagcaggattagggaggcactggccttgcagttgatggctcaggttaagcaggtcgttgcctctgccttcagcagggctgggaaaag

SEQ ID NO: 943709 - DNA, 649 bp, Homo sapiens
gtagatggggacaagtgaggtacaggaaaaagggggagtcccagaaaggaggtgggccctgttgcataaggtgggtaggtgactgcatggctggacaaaccagagagatggaagggcaggtgcagttacctcgggtggctttcacctgcagagacaaatagctccaaaactctagaactgggtcctgcaatttactctagaaccacccctcaccctacccacagttagcatcttagtcaccaatgttgggctcaaaattcctcttctcctctcctgtctcctgtggtcttcccctcccaggaggatcaggatagagaagcaatttccaatttaaaaaatggaagagcaggatacacctactcatcctataatctaaaccacgtgttagatatgtaagagtctaaattacgtgggacttggagcacttctatagacmcagtcctgacctgctcttcaccaggtcaaagttgacacatccccttctcccacaaccagcattatggggggtaggggcccacagaaagggctggtgttgagagggtcttggccaataagcctgtgtctcagggcacattctcacggggatgtgaggctcactacaatgggctttgagcatggaatgccagcatctacaggtcacacaaactcc

SEQ ID NO: 943710 - DNA, 605 bp, Homo sapiens
gaatgcttattgtgaagataaataattcaaattaaagctgttggaactttaaagtattttgagcctctaagggaatgtgaattgtgagacctgagtcatgtagcatgcagctacagcttctgttccttcctgtaaatgataagaaaaggccttgtggcaccagagagcagaccccctcagattgtcacccctcctcagaaagcgctggagcactgttccttagaatgtagcaaactgtgagcaatcacatccctgcaactgtgtactggccatgtatggaaatgtgtgatcctgccaaacctctttgtttctgcctayattaataaaaccttaatttcctcactagggaggcactgaccccattattttggagtgtgtgtttctgagtggctgtcttcaaactttatgcttgactaaaattggattttgatccttttggttttttcaggctgacattattgaagattgactttgggatcaagccctgttgtaggaagggagagaaggaagagcagacagaggggtatttgagctgtgatgcaggcccaacaggagcctccactggcaccaagagggcccctggggagatcgtgtcctccagagtt

SEQ ID NO: 943711 - DNA, 726 bp, Homo sapiens
gaccacatgtctcacctgctggcttagaaagcacagtctccatctacaggagaggcatgggacctggggtggtggtgttatatcctgatgctccagttctgcctctgccccaggggctccctgctccctccagtccccaagcctcagtcccaaatctgtgacggggtctggggagactgggaagtgtctgagggtccctgccatgcagccctctcaccctcacttgtcttctctgagctgcctctgtgcctcacgctcgagcgcctttggctctgggaggcgagactgacagcagcagagggtgaaacccgggtgcattatatggagcccgtgtttacccaggctgggccccgtataatgcctcaaagcggaatggagctcgggttccagttccccgggcaatgttccgtacggcttgtgaaccttgggaatggacaacccggttggcaatctcattcccttgacaccttggaaaactccaaagggaagcttgggaatgccttgaggcagaggagtagacaaggwtgcgttgcagggctcagggccactgagaggttggcactgtccagcctcttgccttatgctgcattatggcctgggggagaatgacttgggctttttctgcatgctgcctctaagcggaaccctgcagtggtacccagtagacatggctctgtgacttgtcacctctgcctggtgtaggtcttctttctctacactattgct

SEQ ID NO: 943712 - DNA, 732 bp, Homo sapiens
gacgttctggtataggaacagctttcagaatgaatacctatactgcctgcccaccgtgccgactcatttggtgtcatagctgtgaccggggctggaagtctgtggacagtggaggagaaacaaggtttgaaatgtatagagactgaagccagtctggagtattcgttcaggcatcagatgtaccaaattgtaggcaaagaatttgggcctcatcaaaacagaaattatcagcctcgtgtggtggctcatgcctgtaatctcagcactttgggaggctgaggtgggcagaccgtttgagtccaggagttcaggaccagccyggacgacatgatgaaacccccatctctacaaaaaaatgcaaaaaaaaaaaaaagttcttggggcatggtagtgcttgccttatagtcccaactactcaggaggctaaggtaggaggatcacttgagctcaggaggtggaggctgcagtgacccatgattgcaccactgcattcccagcctgggtgacagagtgagaccccctctcaaaaaacaaaccaacccagtaatgatcttgcatcaggaatgtcatagatagtgcagcctatataattagaaattataaatacatcttttctggaccgggtgcagtggctcacacctgtaatcccagaactttaggaggctaaggaggacagattgcttgagcccacgagtttgaaaccagcctgggcaacatggcgaaaccccatct

SEQ ID NO: 943713 - DNA, 732 bp, Homo sapiens
gacgttctggtataggaacagctttcagaatgaatacctatactgcctgcccaccgtgccgactcatttggtgtcatagctgtgaccggggctggaagtctgtggacagtggaggagaaacaaggtttgaaatgtatagagactgaagccagtctggagtattcgttcaggcatcagatgtaccaaattgtaggcaaagaatttgggcctcatcaaaacagaaattatcagcctcgtgtggtggctcatgcctgtaatctcagcactttgggaggctgaggtgggcagaccgtttgagtccaggagttcaggaccagcctggacgacatgatgaaacccccatctctacaaaaaaatgcaaaaaaaaaaaaaagttcttggggcatggtagtgcttgccttatagtcccarctactcaggaggctaaggtaggaggatcacttgagctcaggaggtggaggctgcagtgacccatgattgcaccactgcattcccagcctgggtgacagagtgagaccccctctcaaaaaacaaaccaacccagtaatgatcttgcatcaggaatgtcatagatagtgcagcctatataattagaaattataaatacatcttttctggaccgggtgcagtggctcacacctgtaatcccagaactttaggaggctaaggaggacagattgcttgagcccacgagtttgaaaccagcctgggcaacatggcgaaaccccatct

SEQ ID NO: 943714 - DNA, 732 bp, Homo sapiens
gacgttctggtataggaacagctttcagaatgaatacctatactgcctgcccaccgtgccgactcatttggtgtcatagctgtgaccggggctggaagtctgtggacagtggaggagaaacaaggtttgaaatgtatagagactgaagccagtctggagtattcgttcaggcatcagatgtaccaaattgtaggcaaagaatttgggcctcatcaaaacagaaattatcagcctcgtgtggtggctcatgcctgtaatctcagcactttgggaggctgaggtgggcagaccgtttgagtccaggagttcaggaccagcctggacgacatgatgaaacccccatctctacaaaaaaatgcaaaaaaaaaaaaaagttcttggggcatggtagtgcttgccttatagtcccaactactcaggaggctaaggtaggaggatcacttgagctcaggaggtggaggctgcagtgacccatgattgcaccactgcattcccagcctgggtgacagagtgagaccccctctcaaaaaacaaacmaacccagtaatgatcttgcatcaggaatgtcatagatagtgcagcctatataattagaaattataaatacatcttttctggaccgggtgcagtggctcacacctgtaatcccagaactttaggaggctaaggaggacagattgcttgagcccacgagtttgaaaccagcctgggcaacatggcgaaaccccatct

SEQ ID NO: 943715 - DNA, 601 bp, Homo sapiens
atccaaaaatcatttgccctatggccaacttgttatcactatcatagtctttgagatcttgtaatctaatcaaactctatcaccctatggatggaaatgagatggtgtccagagatattaaacgttctttccaggtaatatcagggctgaaatatcagactttttgtcttttgcgtattactttttctagatttttgttgctatcattacgcataactttgttggttggatacatttattaaatgaaggtaataaggaaggcaaaggattgaaattttctatttcaacccatatccatttactgaagtcctacctatccttaacatttatacctgagtttttacttgagtgctcaccccaaacctccacagggctttatatctttcttttcagttctctaaatttacttcactatkctaaaatctctttgtcagttagggttcccaatcacgaacaaaactaccaattatgctgcatattgccagcagataaatgtattgaaagagtgttatgaagatcatatgaatgttagagaatcaggttcacgcaggaaacaagaattgctggctaccctgctgtaggatggctgacctaggacaca

SEQ ID NO: 943716 - DNA, 603 bp, Homo sapiens
atgtgtcctaggtcagccatcctacagcagggtagccagcaattcttgtttcctgcgtgaacctgattctctaacattcatatgatcttcataacactctttcaatacatttatctgctggcaatatgcagcataattggtagttttgttcgtgattgggaaccctaactgacaaagagattttagmatagtgaagtaaatttagagaactgaaaagaaagatataaagccctgtggaggtttggggtgagcactcaagtaaaaactcaggtataaatgttaaggataggtaggacttcagtaaatggatatgggttgaaatagaaaatttcaatcctttgccttccttattaccttcatttaataaatgtatccaaccaacaaagttatgcgtaatgatagcaacaaaaatctagaaaaagtaatacgcaaaagacaaaaagtctgatatttcagccctgatattacctggaaagaacgtttaatatctctggacaccatctcatttccatccatagggtgatagagtttgattagattacaagatctcaaagactatgatagtgataacaagttggccatagggcaaatgatttttggatg

SEQ ID NO: 943717 - DNA, 836 bp, Homo sapiens
gtggtgcctgcatatcatgcagaaccatctgtgaaccaggccctagtcttctcttcctctgtcaactcatcatagggaactcctcatgaggtcattggtgcaggctgagggagagaaggcagggtgacagaagtggagatcatgggcatttgagccactttctcatgtaacttacttgtgccctcaggaacagcctgagctccatcacatacataccacttccatttaatgatkgaatgctgctctgcatgacccactttatggctagatgggtcagaaagcaaccagttcatgataggcagttcaggttgcatggtgacttgatgacccgtagtcaaacattcagtttccaccaaagcctggtaacaggccaagagctgtctctcaaaagaagagtagttatctgtggaagatggcagggccttgctccaaaatcctagaggcctctgctctgattcacctatgggggcctgccaacggctccaaacagcatccctatctgccactgacacctcaagcaccattgaatctgctgggtcatatggccccagcacttacacagcagcctggacctgcagcagagccttctcctgttctggactccattcaaaatcagcaggcttttgggtcacttgataaatgggccagagtaacacacccagatgaagaatattttgcctccagaatccaaataggcccactaggtgttgtgcctctttcttggttgtaggaggggccaaatgaagcaacttatctttcaccttagaaggatataaagatatataaagatataggccacacaccactggagccctagaaattttactgaggtaaaa

SEQ ID NO: 943718 - DNA, 721 bp, Homo sapiens
ggagtcactactaggttaaacttataataatccactgccattctccaagatccatctgtcttctgcacaggccaaatgggagagttgaatgggaatgtggtgggaatcggaatcacctcccctgcatctttcaagtccttgatgctggtgttaatctctgcaatccctccagggatgcgatattggatttggtttactgtttttctaggtagaggcagttctaatggcttccatttggtctttcccactgtaatggccctctcyctacctgtcagggagccaatgtgggggttctgccagtggctaagtatgtctatgccaattatgcattctggcactgggaaaacaacaggatgagcccagggacccactagacccattgtaagttggacctgagctaaaacaccattaattacctgacctccatgagcccatactttaactgggggacaacaataacattttgggtcagttagaatcaacatcagctcagagtcagtgtctagtagtcccccaaaagtctgatcattcccctttccccagtacacaattactctggtaaaaggctggaggtctccttggggaaagatgggagaaagattagcagcataaattgttggtagtgtagtggggtcctttctcaagggaacctggcctccccttcattcaaggggttctgggtctgtaaactggctcaagtctggaaactgactgaagggcc

SEQ ID NO: 943719 - DNA, 622 bp, Homo sapiens
tggtagtgtatttgagatttttcttcttacgtatttatttgttgctataaactttctcttagaactgctttgccgtatcccacaggttttgatatgttgtgtttccattttcatttgtccccacaattttaaaatttctttaacattttttcattaaaattgttcaggagtatgttgtttaatttccacatatttgtgagttttcagaaattgctcctcttattgatttctagttttatacggttatggttagaaaagatacttgatatgatttcatcttcttaaatttgtcaagaatrgttttgtagcctaacatatgatcaaacctggaggatgttccatatccagtggagaggaatgtattctatagctgttggatggaatgttttgaatggctttgtctggtagttcatatatctcaatttcaataaaaagccactgtcttcttattttgtccatttagtgatgctatgttttcctgattgttcttgattctgtggttgagtgttgatgtctgagtatttgaaagactaggtccttattccaatttttacagactggttttgtctaggaaggccctgtagcaggtatggtgctggggcacactagaagttcaaggtag

SEQ ID NO: 943720 - DNA, 671 bp, Homo sapiens
gccctgctcccagaggtgggggctacagaatcagcaggcctagctgagctgtggtgggctccgcccagtttgagcttccaggcagctttgtttacctactcaagcctcagcaatggcaggtgcccctccccctgccaggctgttgcctcgcagttcaatctctgactgctgcactagctgtgagcaaggctctgtgggtgtgggaaccaccgagccaggcactggatagtagctcctggtctgcatttgctaagactgttgaaaacrcgcagtatttgggggaggagtgttccgttttttccaggtacagtctgtcagggcttcctttgtctaggaaagggaaatctcccaacgccttgcgcttcctgggtgaggcgacgccctgccctgctttggttcaccctccgtgggctacacccactgtcctcctgacctcaagtaatctgcccgccttggcctcccaaagtgctgggattatagtcataagccaccacacccggcccaggttttctatattcttattgatgttctgtacactacttctactgattactgcaaagaagaaatattaaagcctccaattgtaactagatttatctatttctcctttcagtttttgtttcatgtattttttgagggggggacgggagaggacagtgtctcactctgtc

SEQ ID NO: 943721 - DNA, 674 bp, Homo sapiens
gccctgctcccagaggtgggggctacagaatcagcaggcctagctgagctgtggtgggctccgcccagtttgagcttccaggcagctttgtttacctactcaagcctcagcaatggcaggtgcccctccccctgccaggctgttgcctcgcagttcaatctctgactgctgcactagctgtgagcaaggctctgtgggtgtgggaaccaccgagccaggcactggatagtagctcctggtctgcatttgctaagactgttgaaaacgcgcagtatttgggggaggagtgttccgttttttccaggtacagtctgtcagggcttcctttgtctaggaaagggaaatctcccaacgccttgcgcttcctgggtgaggcgacgccctgccctgctttggttcaccctccgtgggctacacccactgtcctcctgacctcaagtaatctgccygccttggcctcccaaagtgctgggattatagtcataagccaccacacccggcccaggttttctatattcttattgatgttctgtacactacttctactgattactgcaaagaagaaatattaaagcctccaattgtaactagatttatctatttctcctttcagtttttgtttcatgtattttttgagggggggacgggagaggacagtgtctcactctgtctgt

SEQ ID NO: 943722 - DNA, 674 bp, Homo sapiens
gccctgctcccagaggtgggggctacagaatcagcaggcctagctgagctgtggtgggctccgcccagtttgagcttccaggcagctttgtttacctactcaagcctcagcaatggcaggtgcccctccccctgccaggctgttgcctcgcagttcaatctctgactgctgcactagctgtgagcaaggctctgtgggtgtgggaaccaccgagccaggcactggatagtagctcctggtctgcatttgctaagactgttgaaaacgcgcagtatttgggggaggagtgttccgttttttccaggtacagtctgtcagggcttcctttgtctaggaaagggaaatctcccaacgccttgcgcttcctgggtgaggcgacgccctgccctgctttggttcaccctccgtgggctacacccactgtcctcctgacctcaagtaatctgcccgccttggcctcccaaagtgctgggattatagtcataagccaccacacccggcccaggttttctatattcttattgatgttctgtacrctacttctactgattactgcaaagaagaaatattaaagcctccaattgtaactagatttatctatttctcctttcagtttttgtttcatgtattttttgagggggggacgggagaggacagtgtctcactctgtctgt

SEQ ID NO: 943723 - DNA, 636 bp, Homo sapiens
ccactgtccccaggagcccacacacccagccaagtttggcttttaattcgcctttcttgtgatgtcttttgctgaatttgctgtcatgattgtcccgattaaaagagagagcattgtgtgttccctctatatccagaagtgtgcatgcaagattggagttacttctatttaaaatatgtgatggactcagaggggacagtaaggatggaagtttgcgtatggaaaaatagtttgygttactttgtttttatttgatggttgctttacttgtggtgcagtgcacagtatattacctgtacagattgttgccttctgacaaacactgtgttaccaccgcccagatatgaacaccctggcagccgctctttggctaattcctaggcagtaacttccaagagacactcactattctggtcatgatcaacatattttaaatttatttttaaacattgtataaatggaaacctacagtatgcactcttttgtgcctgaatgaaaattacacgtgaatatcatgtaaatttcacctatgttccattgtgatgacacattcagcattttgtactgctcggtcctgtccatatataacatctacattgtaggaagttggcacaatgagttttcaccctctatgtt

SEQ ID NO: 943724 - DNA, 722 bp, Homo sapiens
ccactgttctcttcaaagctgtcagacagggacatttaagtcttcagaggttactgctgtctttttgtttgtctgtgaccctgcccccagaggtggagcctacagaggcaggcaggcctccttgagctgtggtgtgctccacccagttggagcttcctggctgctttgtttacctaagcaagcctgggcaatggcgggcgcccctcccccagcctcgctgcagccttgcagtttgagctcagactgctgtgctagcaatcagcgagactccgtgggcgtaggaccctctgagccagatgcgggatataatctcgtggtgcgccgtttttaagcccgtcggaaaagctcagtattcgggtgggagtgacccrattttccaggtgcgtctgtcacccctttctttgactcggaaagggaactccctgaccccttgtgcttcccaagtgaggcaatgcctcgccctgcttcggcttgcgcacggtgcgcgcacccactgacctgcgcccactgtctggcactccatagtgagatgaacctggtacctcagatggaaatgcagaaatcacccgtcttctgcgtcgctcacgctgggagctgtagacaggagctgttcctattcggccatcttggctcctcccgccgccaccatcttattataaaaaccaaagccgcagctcagtggggcaggaggaatccatcgcacagaaatatcccgcagaccg

SEQ ID NO: 943725 - DNA, 748 bp, Homo sapiens
aatcccagtataattttaccttgacagaaggaggttcaggctcagtctttggcactggttcaagaggtggagacggaggaggaggtggggatggtgactcagcttcataagccccaggagagtctggaaagactgaaataatgaaacggacttagatcagagaactacaagcactatctggtataaagccttctccattggttctctaamttgacatgtccagcaaaggggatttagcaagcagtaattcatgacaaccaagaactctgtagttatatagttatctttaaaatacatattttattaattttatacaaataaaatcagagaatcaagaattattacagccggaagtatcttagctaaatattttcttttatagctagtcaggttatgaagttggtttacaaatatccacttatcgcctttcatatgccatgtatttcactttattcttacaacaactctaagagacagattttcttatttgcacattacagtaaatagaggttcagaggggttcctaaacttgccaaggtcacacagcttataactgagacaggaggttttaagcctaagtcaatccaattctacagccttgctattccaactatcccatgccgccttaccattgaggacaagacattatctctcaagatctatgtggagataatcctcaggttataacaaatgttccatgccagagtctttcactgtgacctaagggttacttttaatcacctgagat

SEQ ID NO: 943726 - DNA, 590 bp, Homo sapiens
caggagaaagctccaaaagcaagccctgggccctgaacaaaatctggaggcattattaaacttggcaacctcagtgttctataatagggaccaagaggaacaggcccaaaaggaaaagcgagatcagagaaaggccacagccttagtcatggccttcagacaaacaaaccttggtggttcagaaaggacagaaaatggagcaggccaatcacgcagtagggcttgttatcagtgtggtttactaggacactttaaaaaagattgtacaatgagaaacaagctgccccctcatccatgtccactgtgccaaggcaatcactggaaggtgcactgccccagaggatgaagtttctctgggtcagaagcccccaaccagatgatccaacaacaggactgagggttcctggggcaagtgctagctcatgtcatcaccctcactgagcccygtgtaagtttaaccattgagggctaggaaattgacttcctcctggacactagcgtggccttctcagtgttaatctcctgtcctggacaactgtccgcaaggtccgttaccattcgaggaatcctgggacagcctgtaaccaggt

SEQ ID NO: 943727 - DNA, 659 bp, Homo sapiens
cctgccaggacaaaaatcctaatcacatcaaccttttttctatcttccttccttttgacagcaatttactcctacctttaattcagactagataaaatgatctcgttttccagagcaccctctttaccttcctatttccgctttgcctatgtatccctcctgcttccttggatacctcatacaatcacccctccccttccactaggtcctaattacctctacaagactctcaacttaactcactctctgttgaaccagtccaatccttccctggcaaatgactgttggctttgtatctctctaccaacctctgcctacgttgccactcccattcccgcagaaaaactgggactttaccaacttaacctaccaccctcattatgaaggaaaagaccctttcygatttctaaatatgcaatcattagccgacttccccatatctgataggaccaagaatacccccaggacgtgcaatctaacttttacattcttacatttccaacctcatctattacacaagcaatgaaaagcccatacaaggccctgtaaccacgaatactatcttaactttccaagcccctttatgcatccagcacaacctgttatcaggcttgcccctggggcacctactaccacatcagtgtaattacaccctacaa

SEQ ID NO: 943728 - DNA, 660 bp, Homo sapiens
ttgtagggtgtaattacactgatgtggtagtaggtgccccaggggcaagcctgataacaggttgtgctggatgcataaaggggcttggaaagttaagatagtattcgtggttacagggccttgtatgggcttttcattgcttgtgtaatagatgaggttggaaatgtaagaatgtaaaagttagattgcacgtcctgggggtattcttggtcctatcagatatggggaagtcggctaatgattgcatatttagaaatcrgaaagggtcttttccttcataatgagggtggtaggttaagttggtaaagtcccagtttttctgcgggaatgggagtggcaacgtaggcagaggttggtagagagatacaaagccaacagtcatttgccagggaaggattggactggttcaacagagagtgagttaagttgagagtcttgtagaggtaattaggacctagtggaaggggaggggtgattgtatgaggtatccaaggaagcaggagggatacataggcaaagcggaaataggaaggtaaagagggtgctctggaaaacgagatcattttatctagtctgaattaaaggtaggagtaaattgctgtcaaaaggaaggaagatagaaaaaaggttgatgtgattaggatttttgtcctggcagga

SEQ ID NO: 943729 - DNA, 589 bp, Homo sapiens
cctggttacaggctgtcccaggattcctcgaatggtaacggaccttgcggacagttgtccaggacaggagattaacactgagaaggccacgctagtgtccaggaggaagtcaatttcctagccctcaatggttaaacttacacrgggctcagtgagggtgatgacatgagctagcacttgccccaggaaccctcagtcctgttgttggatcatctggttgggggcttctgacccagagaaacttcatcctctggggcagtgcaccttccagtgattgccttggcacagtggacatggatgagggggcagcttgtttctcattgtacaatcttttttaaagtgtcctagtaaaccacactgataacaagccctactgcgtgattggcctgctccattttctgtcctttctgaaccaccaaggtttgtttgtctgaaggccatgactaaggctgtggcctttctctgatctcgcttttccttttgggcctgttcctcttggtccctattatagaacactgaggttgccaagtttaataatgcctccagattttgttcagggcccagggcttgcttttggagctttctcctg

SEQ ID NO: 943730 - DNA, 662 bp, Homo sapiens
atcagggtggccacagtatgcctgtaatcacagctactcgaggggctgaggcaggagaatcgcctgaacccaggaggcagaggcgggaggccaagtcttcttaagaaaggaccccacacctggctaacatggtgaaaccccgtctgtaccaaaaatacaaaaaaattagccgggcatggtggcgggygcctgtagtctcagctactcaggaggctgaggcaggagaatggcatgaacccgggagacagagcttgcaatgagccgagatcgccccactgcactctagcctgggtgacagagcgagactccatctcaaaaaaaaaaaaaaaaagaaaagaaaggaccccactacattaccaacaatttatgcagtgaatctttctcccatccttccccaaggagccctccagcattttaccagggtaactgcactggggaaaaggaaataatcagacatttcagggactactggacattggctctgagctgatgttgattccaggggacccaaaatatcattgtggtcctccagttaaagtagcagttacagaggtcaggtaattaatggagttttagttcaggtctgacttacagtgggtccagtgtgtccctgaacacatcctgtggtcattttcccagtgccagaatgcataattggcata

SEQ ID NO: 943731 - DNA, 662 bp, Homo sapiens
atcagggtggccacagtatgcctgtaatcacagctactcgaggggctgaggcaggagaatcgcctgaacccaggaggcagaggcgggaggccaagtcttcttaagaaaggaccccacacctggctaacatggtgaaaccccgtctgtaccaaaaatacaaaaaaattagccgggcatggtggcgggtgcctgtagtctcagctactcaggaggctgaggcaggagaatggcatgaacccgggagacagagcttgcaatgagccgagatcgccccactgcactctagcctgggtgacagagcgagactccatctcaaaaaaaaaaaaaaaaagaaaagaaaggaccccactacattaccaacaatttatgcagtgaatctttctcccatccttccccaaggagccctccagcatyttaccagggtaactgcactggggaaaaggaaataatcagacatttcagggactactggacattggctctgagctgatgttgattccaggggacccaaaatatcattgtggtcctccagttaaagtagcagttacagaggtcaggtaattaatggagttttagttcaggtctgacttacagtgggtccagtgtgtccctgaacacatcctgtggtcattttcccagtgccagaatgcataattggcata

SEQ ID NO: 943732 - DNA, 780 bp, Homo sapiens
taaatttatgggggagagatttattacaacaatggagagcacaagttctaattcctgaactattatatagccctcaaagtcaacatatgatgcatgaaatggggtatgtctctggtatgggactaggaaaaaatttgcaaggtttgaaagaaccgcttcaagcagaaagacaaagttcccgccaaggtttaggatatcattttttatggcagccattgttaagcctccagaacctatacctttaaaatggttaacagataagccagtttggatagaacaatggccactgagtaaagagaaactggaggctttagaggatttggttactgaacaattctcaataatcattttccaaaaatgaaactrttacaatttttggaattaactaattggattctccctaaaattactaaatctaaaccaattgaaggtgctgagaatgtttttacagatgggtctagtaatggcaaagcttcttattctggctcgacaggtaaagttttccagacgctctatacttcagttcaaaaagtggagcttgtagctgtaattgaggtattgactgcttttgatatgcctattaatgtgatttctgattcttcatacgtggttcattccacacaattaattgaaaatgctcagttacaatttcatacagatgaacaactgatgataaaaacaaaaaaggaggagaaacagggattatgggacggcccatatacaattgaatctagcattattaactttaaattttttgagcctgcctaaaggccagatgtt

SEQ ID NO: 943733 - DNA, 602 bp, Homo sapiens
caaactggatggaattagagaccattattctaagtgaagtaactcaggaatggaaaaccaaacactgtatgttctcactcataagtgggaacgcaaatgaggacgcaaaagcataacaatggtacagtgaactttggggactcaggggaaagggtgggagaagggtggtacagtgtacaccgctcaagtgatgggtgctccaagatctcagaactcaccactaaagaacttattcatgtaaccaaacaccacctgtttcccacaaatctattgaaattaaaaaaaggaaaaagaaaaagaaagagaaaaattattttttaaaaatcgagtatsgagaacctcaaaaaaaaaaaaggaaagaaaagaaaagaaacactggtggatctctattcttgttagcttctctgccagcggctggaggtagatgaatagacctgtgaaagaacaaacacataaacagaaaattaaatgataacatgatacacgaaaagagacttataccaggttacaaagagacagcagacacattgagatcagaggagatattctggaggattgaagataaaactaaaccctaaaaaatgagcaggaatttgccaaga

SEQ ID NO: 943734 - DNA, 602 bp, Homo sapiens
caaactggatggaattagagaccattattctaagtgaagtaactcaggaatggaaaaccaaacactgtatgttctcactcataagtgggaacgcaaatgaggacgcaaaagcataacaatggtacagtgaactttggggactcaggggaaagggtgggagaagggtggtacagtgtacaccgctcaagtgatgggtgctccaagatctcagaactcaccactaaagaacttattcatgtaaccaaacaccacctgtttcccacaaatctattgaaattaaaaaaaggaaaaagaaaaagaaagagaaaaattattttttaaaaatcgagtatcgagaacctcaaaaaaaaaaaaggaaagaaaagaaaagaaacactggtggatctctattcttgttagcttctctgccagcggctggagktagatgaatagacctgtgaaagaacaaacacataaacagaaaattaaatgataacatgatacacgaaaagagacttataccaggttacaaagagacagcagacacattgagatcagaggagatattctggaggattgaagataaaactaaaccctaaaaaatgagcaggaatttgccaaga

SEQ ID NO: 943735 - DNA, 608 bp, Homo sapiens
gagatgagtctcttgaagacagcatgccactaggtcttgctattttatccaacttgccactctatgccttttaagtagggcatttagcctgtttacattcaaggttagtattgatatgtgtggattggatcatgtcattgtgttgttagctggttactatgttgccttgtttgtgtggttgcttaatagtgatagtggtttgtgtgtttaagtgtgtttttgtattagctgatagcagacttttctttccatatttagtgcacctttcaagatctctcataaggcaggtctggtggtmacaaactccctcaacatttgcttatttgcaaaggatcttattcctccttcacttaggaagcttagtttggctggatataaaaattcttggttaaagattttttttccttaagaatgttgaatctaagcctctaatctcttctggcttgtagggtttcagttgagaagtctgctgttagcctaatggtgttccctttgtaggtgagctgccctttttctctacctgtctttaacattatttcttttatttcagtcttgggaaagctgatgattatgtgtcttgggggtgatcttcctgtgtagaatgttgc

SEQ ID NO: 943736 - DNA, 596 bp, Homo sapiens
actgtgtatttgagtttctagctagcaagcttatccacagatgtccttaaaaataaaagctgatcacatatttccagtgcttggcagtgtactgtaaaacccatctttattgtggtaaagcatgtacaattcactgagctctttctttacagaatcaacataattgcaaatataataaaaattcaattgaaatttcatcttctgccaattaattttcattattcatttgtcaaatccttcaactttgcaggattttcaatgtggtccatgccaaaataaatatcrgaatacttggaaataaagttctaatagtaggagtttctgattgtcaggtgcctatgatgtgacaggtgcactgtggcttgtgctgagtgagttacatgcattatttttatttttaaaatttatttatttttaatttcaatagtttttggggtgcaggttgtttttgattacatggataagttctttagtggtggtttttgagatttgctgcatgtgtcacccgagcagtgtacactgtatccaacgtgtagtcttttatccctaaccaaagtcctctatatcattcttatgcctttgtatccttatagctt

SEQ ID NO: 943737 - DNA, 608 bp, Homo sapiens
aatttattttccattggcaggaattcagtcacatggctacatttaaatgcaagggagatgggaaaacgtaatctaattgtgttatggaagaaaagtaaccttattttggcaaacagtcaacagtttgccacaggcctagccattactcttctgattccttaggtgaagtcagttcgtcttgcttggtttgagtgtttaatgtatgtcagatcctgtaatatttgtttatataaatagaggggaataaacaaagtgcctttccttaggttgagtgccgtgtgatacaataacaaagaaagtgtaagatagataatatcttacagaaacattttctgtagagagagaagaacatgttcaggaatgaatctgttatttaatgtcagaagtgaaagctgtccacagtaagtgacctaggaaggaacttagcacatatatwttgagccgctgctagatgaacactttcatctccttgtgcttaatttttttcatctgtacaatagtagggaatggtacttactgtagaattgttatgaggattaagtgagatgatacatggaaagcacttagaattctgcatgaaaacagtacatgaaagcatttaatgttaa

SEQ ID NO: 943738 - DNA, 599 bp, Homo sapiens
atctcttggcagaaagtctacaagccagaacagagtgggggccaatattcaacattttaaagaaaagaattttcaaccagaatttcatatccagccaaactaagcttcataagtgaaggagaaataaaatactttacagataaacaaatgctgagagattttgtcaccaccaggcctgccctaaaagagctcctgawggaagcactaaacatggaaaggaacaaccagtaccagccactggaaaaacatgccaaattgtaaagaccatcaaggctaggaaggaactgcatcaactaatgagaaaaataaccagctaacatcataaagacaggatcaaattcacacataacaatactaaccttaaatgtaaatgggctaaatgctccaattaaaagacacagactggcaaactggataaagagtcaagacccatcagtgagctgtattcaggaaacccatctcacgtgcagagacacacataggctcaaaataaagggatggaggaagatctaccaagcaaatggaaaacaaaaaaaggaaggggttgcaatccttgtctctgataaaacagactttaaaccaacaaagatcaaaagaga

SEQ ID NO: 943739 - DNA, 599 bp, Homo sapiens
atctcttggcagaaagtctacaagccagaacagagtgggggccaatattcaacattttaaagaaaagaattttcaaccagaatttcatatccagccaaactaagcttcataagtgaaggagaaataaaatactttacagataaacaaatgctgagagattttgtcaccaccaggcctgccctaaaagagctcctgatggaagcactaaacatggaaaggaacaaccrgtaccagccactggaaaaacatgccaaattgtaaagaccatcaaggctaggaaggaactgcatcaactaatgagaaaaataaccagctaacatcataaagacaggatcaaattcacacataacaatactaaccttaaatgtaaatgggctaaatgctccaattaaaagacacagactggcaaactggataaagagtcaagacccatcagtgagctgtattcaggaaacccatctcacgtgcagagacacacataggctcaaaataaagggatggaggaagatctaccaagcaaatggaaaacaaaaaaaggaaggggttgcaatccttgtctctgataaaacagactttaaaccaacaaagatcaaaagaga

SEQ ID NO: 943740 - DNA, 715 bp, Homo sapiens
gcctttccaccacgtttaaagtattagaagctggctgtgggtctctaggagaaagacactgacaatagctgtaattgaggttgctccagaagtaatcaaggcagaagtgcaaagtactggcctgccatttgtgtgagtttaccaaaaaacccacgtggccaaaatgctaatagactcctgagagtgttgaccttcaaaagatacaaagcactttgttaattaacataaatctagcttagaaagcacatttggtataattgcccttccaattaaaatgagatttgtttacttgcacattttatttttcaattgttcctaccctattttaggaaaagaccccattatgaaagaaaacaaattctcaagaattctcagcttctctttcatgatggctggcaaagagaaaggcatctggattcagacaaacagtgatgatttctcctggctttacaatgtgtacaaatcttaccccctgcactctgctccatcagttcaatttaatttaattcaattcaagccaacaaatatttttaagtaatattagaacctgggtatatgataattaatggaacatrtgctgtctttacagaaatttcattgtgtgctagggcactttatctgcatccccagaataaatttatccatagatacatttgtttagtatttactattcagttatctctctccatgttcttttcacatttggcattactga

SEQ ID NO: 943741 - DNA, 652 bp, Homo sapiens
tctacagattcaatgtcattcctatcaatataccaatgccatttttcacagaactagaaaaagcaattctaaaattgatatggaaccaaaaaagagtccaaatagccaaagaaatcctaagcaaaaagaacaaagccagaggcattacattacatgatttcaaactatactacaaggttatagtaaccaaaacagcatgatgctaatacaggagtactggaaagggaagagtatggtccttctaaatgatagggagggaagggaagtgctgggtaaaggagggcgtggtccctggctacggctccacccccatggacctaggtgaagacaggtagtcctgctttcgggcccaaatgttgcattttctaagaccaccctggyccgccacacccccatcctgggtctctaaaaacccgataccctagcaggcagacacacagacggccagacatggagaggagcacatcggcggaagaagatgcaagccgctagtcgtggagagggcgaggagaggagcaggctaggagaagagcacaccgacaaacaccggcaggcgaccagcagaaccacgtggagtttggctggggcggtcggaggagagccctggccccgaagcagcccgactccagggaaaaaccgtcttccttcttgc

SEQ ID NO: 943742 - DNA, 652 bp, Homo sapiens
tctacagattcaatgtcattcctatcaatataccaatgccatttttcacagaactagaaaaagcaattctaaaattgatatggaaccaaaaaagagtccaaatagccaaagaaatcctaagcaaaaagaacaaagccagaggcattacattacatgatttcaaactatactacaaggttatagtaaccaaaacagcatgatgctaatacaggagtactggaaagggaagagtatggtccttctaaatgatagggagggaagggaagtgctgggtaaaggagggcgtggtccctggctacggctccacccccatggacctaggtgaagacaggtagtcctgctttcgggcccaaatgttgcattttctaagaccaccctggtccgccacacccccatcctgggtctstaaaaacccgataccctagcaggcagacacacagacggccagacatggagaggagcacatcggcggaagaagatgcaagccgctagtcgtggagagggcgaggagaggagcaggctaggagaagagcacaccgacaaacaccggcaggcgaccagcagaaccacgtggagtttggctggggcggtcggaggagagccctggccccgaagcagcccgactccagggaaaaaccgtcttccttcttgc

SEQ ID NO: 943743 - DNA, 666 bp, Homo sapiens
gagatacttccactcagtaaaactttgcacccattcgccaagccaacgtgtgatctgattcttctggtacaccaaggcaagaaactggggatacagaaagccctctgtccttgtaacaaggtagacgctctaattgagttgrttaacacaaggtgcccgtaggcaaactaagagaacaccctgtaacacacgcccactggggctttaggagctgtaaacagtcaccccgagacactgctgtggggtgggagccccacagcctgcccgtctgtatgttcacctagaggttggagcagcagggctctgaagaagcaagccacacccccaccgcatgccctgctagggggacaagggaacctttcccatttcaatactggtacaaaaatggacacatatatcaatggagcagagtagagaacccagaaataaagcctcatacctacaagcaactgacctttggtaagttgataaaaatcaacaatggggaaaatacaccctattgaataattggtgctgggaaactggctaggcatatgcagataagtgaaactggaacgcttcctctcaccgtatgcaaaaattaactcaagatggattaaagacttatgtgtaaggcactgatttattaaaatcctagaagaaaacctaggaaaaactcatctggac

SEQ ID NO: 943744 - DNA, 637 bp, Homo sapiens
gagccctcctagttctcaccccactccagctcttcccctctctcagttgtcccaattgtaactcaaaagatggaatatcaaagtcttaaaaaaaaaaaaaaaaggacactgcagactaaccaaagagcagggagagaacagagtgaattacttaattcccaagaatagtgatgttggggagggaagacctaaattggggmttagctcaagagggtttttagcttcacctaggaaagaattcaagaacaagctgacagtagaggaaaaccactttattgaagcagcagtgttatagctccggtggtgttacagctctgtgactgcttctgcagagcagggctaccctgcaggcagagagtagcagctcagggcagttctacagtcatgtttatacctacttgtaattacatgcagattaaggggcagtttatgcagagatttctaggaaaagagtagtaacttctgggtcattgggtcattgccatggaaagggctggtaactcctggatgttgccatggcaatggtaaactgacatgacacactggtggatgtatcttatggagagcttaggcaccggacataattgaggactagctaaaacagggacaggatcaaggaaggcctccagggttgaag

SEQ ID NO: 943745 - DNA, 499 bp, Homo sapiens
tgggcctttcagaccggcatcatcagtgttacggggaagtcactagaaatgcagaattgattgggcacggtggctcacacctgtaatcccaacactctgggaggccaaggcgggtggatcacttgtggtcaggagtttgagaccagcctggccaacatggtgaaacctcatctctactaaaaatrcaaaaattagctgggaatggtggcacatgcctataatcccagttactcaggaggctgaggcaggagaatcgtttgaacctgggaggcagaggttgcagtgagccgagatcacgccactgcactccagcctgggtgacacagcgagactctgtctcaaaaaaaaaaaaaaatgcagaatttcaggcttcaccccagacccactgcatgactgcatgagaagctgcatcttaacaagatccctggtaattcatacgcatattaaatttggagatgcactggcgtaagaccctcctactctctgcttaggcccatga

SEQ ID NO: 943746 - DNA, 492 bp, Homo sapiens
gggttgtttctactttttggttatcataaataatgctgctacaaatatttgggttcatgtgtttgtgtggacatgttttcatttctattggatatatctaggagtggaattgctaggccatgtgataactctatgtttaacattttgagaaactgctaacctgttttccaaagcagcagaaccatctttcaatcccaacagcagygtataagggttttgatttttctacatcctcatcaacatgttgtctttttgatgaccgctatcctaatgtgtatgaagtggtatctcataatagctttaatttgcatctttttaatgattaattacgttgagcaaccttttatgtacttgttgggtatttgtatatcctcttagataaatgtctatttagatcttctacccattttttcaatcggattttttaaattgttgaatggtaagttttctattatatattctaggaacaagtccatcaccaacatcaaatgt

SEQ ID NO: 943747 - DNA, 590 bp, Homo sapiens
ttgagtatccctcatccaaaatgcttgggaccagaagggtttcaaatttcagtttattgtttcctttttaattttggattatctgcatatacacaatgagatatcctggagatgggacctaagtctaaacacacaattcatttatgtttaataaagaccttatacacatggccyggaggtaattttaaacaatgtttttaataattttgtgcacaaaacaaagtttgtgtaaactgaaccatcagaaagcaacggtgtcactatcttagccacccatgtggaaaatctatggttgtttggcatcaccatcattcctgattgaacttacacgttactaataatcatttttattacacttattcacacataagtacttaacagtaaaagatacaacataccattaatacagtgaaaaaacataatgtactcagggtaaccaaccagcacagtaacatcacagaacacctctaccagttattaaataaaagcaacaaccaacaatggcaggctttcagtctcccacctacaatgttgtgtttgattaaaaagttactgaacacggtattttatttttttaggtgagaagaaac

SEQ ID NO: 943748 - DNA, 472 bp, Homo sapiens
gtattctgctgggtggagtcacctgcctctacagcagttgatgaacaagacaaaacagcacccccaaccccgagggaatccgcagaggctggccctcttaagagtcttttctctctggatagtgacaaagaccaaaggatgacaaggtgacctaggggaaaaatcacgagtgatgtgatgccatgtaagttacccattgcagtactcttagaaggtgaccyacagccctaaagagttcctgtccctccaagtatatctgtccacacttcacatgtgcccttgagcagagcccagcccagaaagtcctttccagtccagggccaggttactccgcctcctcctgtagctgatgtgagctctcactttgctttttcagattacgacgtttgtgccgaggctccctgtgaacagcagtgcacggacaactttggccgagtgctgtgtacttgttatccgggataccgatatgacc

SEQ ID NO: 943749 - DNA, 578 bp, Homo sapiens
agaggaagggaggagagggaggtcagggtatttattcccgctattttttttttttttgaaatggagttttgctcttgttgcctaggctggagtgcaatgacatggtcttggctcactgtgacctctgcctcctgggttcaagygattctcctgcctcagcctcccaagtagctgggattacaggtgcctgccaccacgtcggctaatttttgtatttttagtagagacggggtttcatcatgttggccaggctggtctcgaactcctgacctcaggtgatctgcccgccttggcctctcacttactactgctttttttcttgtgacactcccttgggctggccctgtccctcaactagactcaactgcccctctcaaagtggcagactctctgtgactctttctcattccagattccagtaactgctctgtctttttggccattcaggcctaaaggtgatgacagctctgctgttcccctacacttagtaaatagtcccttcataaataaaactaccttccattttcatctgttttcgtcggaatcctgaatgatattacccctgacattctccccat

SEQ ID NO: 943750 - DNA, 590 bp, Homo sapiens
ggtatatacccagtaatgggattgctgggtcaaattgtatttctggttctacatcttcgaggaatcgccacactgtcttccacaatggttgaacaaatttacactctcaccaacagtgtaaaaacgttcctatttctccatatcctctccagcatctgttgtttgctgactttttaatgatcaccattctaactggcatgagatggtatctcattgtgcttttgatttgcgttyctctaatgaccagtgatgatgagcattttttcatatttttgttggtggcattaatgtcttcttttgagaagtgtctgttcgtatctgtcacccactttttgatggggttgtctgtttatttcttgtaaatttgtttaagttctttatagatttttggatattagccctttgtcagatggatagattgcaaaatttttctcccattctgtaggttgcctgttcactctgatgacagtttcttttgctgtgcagaagctttttagtttaattagatcacagttatcaattttggctttgttgccactgcttttggtgttttagtcatgaagtctttgcccatgtctgtgtcctgaatg

SEQ ID NO: 943751 - DNA, 720 bp, Homo sapiens
aaatatcttttgccatcccttcactttcagtctatgtgtatctttataggtgaggtgagtttctcactggcagcatatagttgggtctttttttttttaatccattcagctaatctttatctatctatctatctaatctatttagaggcaggggattgctctgttgctcaagcaggagtgcagtgacatgatcatagctcagtgcagcctcaaactcctgggctgaagtgatcctcctgcctcagcctcccaagtagctgggactacaggcatgtgccaccacacccagctaattctttaattttttttaaataagaggtctcaatatgttgtccaggctggtcttgaacttttggcatcaagcaatcttcctgtcttggcctcccaaagtgctgggattacaggtatgagccaccacagccagcttcratctacatcttttaaatgggaaatttagtccatttacattcaaggttattatttataggtgaggacttacttttgtcattttattgttttctaattgtcttgcacattgtttgttccttacttcctctcctattgcttatgtctggaattgagtggttttctgtagtgataagatttgactgctttctctttcttgtttatgtatcagctctaccaattagttatatagttttgcatgtttttatgatggtggttatcgtcgtttcttcccaatgtaaaactcctttgagc

SEQ ID NO: 943752 - DNA, 766 bp, Homo sapiens
gcccagtcctgccttggtgttgctgggttgtcaggatcagagctgagggctgcgaagtgccaggcacaggtcctgcacagagtccttcccctttccaccacagtgtcttggccagtgttcgtaacccaggtctgtggagggccttctggagggtcatgagccctggaaacacaaaaccaaatgtgatgtgtgtgcatgtgtgcaagagtgagagtgtgtgagtgtgagagagaatgggggtgaggatccttggctttcaccaagttctcagcagggtctatgagccataaacggtcataagccacgtgattctaggcaggcccagcctcctctttttaacatggaaggaagagaattaatggggttactcacccagggagccccaaggagtaagtgtgcgtggcaatatgggcgttatgggggtgcaaatacacacccttgtgtgtgggtgtgactgtgtgtatgtgagtatgaaagcacgtrtaaatgtatgagtgtgaatgtgaggatacaaaattgtatgtgtgtgagcatttcgagtgtatgagggcgtgtgagcggctgtgtgtgagagtgcgtgtgtatgagtgtgtgtgcatgtgtgagcatgtgtgtgtgttgtgtggtggcactggggtcacagacacacattgctgtcctgtgctggaggagcccagcacagagctaatgaggcagtgacacctgggcgctggggacaggttgggcctcccttcccaggctggcagtgcttacatctccgcggggg

SEQ ID NO: 943753 - DNA, 766 bp, Homo sapiens
gcccagtcctgccttggtgttgctgggttgtcaggatcagagctgagggctgcgaagtgccaggcacaggtcctgcacagagtccttcccctttccaccacagtgtcttggccagtgttcgtaacccaggtctgtggagggccttctggagggtcatgagccctggaaacacaaaaccaaatgtgatgtgtgtgcatgtgtgcaagagtgagagtgtgtgagtgtgagagagaatgggggtgaggatccttggctttcaccaagttctcagcagggtctatgagccataaacggtcataagccacgtgattctaggcaggcccagcctcctctttttaacatggaaggaagagaattaatggggttactcacccagggagccccaaggagtaagtgtgcgtggcaatatgggcgttatgggggtgcaaatacacacccttgtgtgtgggtgtgactgtgtgtatgtgagtatgaaagcacgtataaatgtatgagtgtgaatgtgaggatrcaaaattgtatgtgtgtgagcatttcgagtgtatgagggcgtgtgagcggctgtgtgtgagagtgcgtgtgtatgagtgtgtgtgcatgtgtgagcatgtgtgtgtgttgtgtggtggcactggggtcacagacacacattgctgtcctgtgctggaggagcccagcacagagctaatgaggcagtgacacctgggcgctggggacaggttgggcctcccttcccaggctggcagtgcttacatctccgcggggg

SEQ ID NO: 943754 - DNA, 766 bp, Homo sapiens
gcccagtcctgccttggtgttgctgggttgtcaggatcagagctgagggctgcgaagtgccaggcacaggtcctgcacagagtccttcccctttccaccacagtgtcttggccagtgttcgtaacccaggtctgtggagggccttctggagggtcatgagccctggaaacacaaaaccaaatgtgatgtgtgtgcatgtgtgcaagagtgagagtgtgtgagtgtgagagagaatgggggtgaggatccttggctttcaccaagttctcagcagggtctatgagccataaacggtcataagccacgtgattctaggcaggcccagcctcctctttttaacatggaaggaagagaattaatggggttactcacccagggagccccaaggagtaagtgtgcgtggcaatatgggcgttatgggggtgcaaatacacacccttgtgtgtgggtgtgactgtgtgtatgtgagtatgaaagcacgtataaatgtatgagtgtgaatgtgaggatacaaaattgtatgtgtgtgagcatttygagtgtatgagggcgtgtgagcggctgtgtgtgagagtgcgtgtgtatgagtgtgtgtgcatgtgtgagcatgtgtgtgtgttgtgtggtggcactggggtcacagacacacattgctgtcctgtgctggaggagcccagcacagagctaatgaggcagtgacacctgggcgctggggacaggttgggcctcccttcccaggctggcagtgcttacatctccgcggggg

SEQ ID NO: 943755 - DNA, 766 bp, Homo sapiens
gcccagtcctgccttggtgttgctgggttgtcaggatcagagctgagggctgcgaagtgccaggcacaggtcctgcacagagtccttcccctttccaccacagtgtcttggccagtgttcgtaacccaggtctgtggagggccttctggagggtcatgagccctggaaacacaaaaccaaatgtgatgtgtgtgcatgtgtgcaagagtgagagtgtgtgagtgtgagagagaatgggggtgaggatccttggctttcaccaagttctcagcagggtctatgagccataaacggtcataagccacgtgattctaggcaggcccagcctcctctttttaacatggaaggaagagaattaatggggttactcacccagggagccccaaggagtaagtgtgcgtggcaatatgggcgttatgggggtgcaaatacacacccttgtgtgtgggtgtgactgtgtgtatgtgagtatgaaagcacgtataaatgtatgagtgtgaatgtgaggatacaaaattgtatgtgtgtgagcatttcgagtgtatgagggygtgtgagcggctgtgtgtgagagtgcgtgtgtatgagtgtgtgtgcatgtgtgagcatgtgtgtgtgttgtgtggtggcactggggtcacagacacacattgctgtcctgtgctggaggagcccagcacagagctaatgaggcagtgacacctgggcgctggggacaggttgggcctcccttcccaggctggcagtgcttacatctccgcggggg

SEQ ID NO: 943756 - DNA, 600 bp, Homo sapiens
gatttcttttcttttggttatctacctaatagtgggattgctgtataatatggtagctctatttttagttttttgaggaacctccaaactgttttttatagtggttgtactaatttacattcccaccagcagtgtatgagggtccacttttctctacatcctctccagcttttgttatttcctgtcttttraataaaagccatttttaactggggtgagataatatctcattgcagttttgatttgcatttctctgatgatggatgttgagcaccttttcatatacctgtttgccattcgtatttcttcttttgagaaatttatattttttaacatgatatactttgatgcacagaagtttttaattttggtgaagtccaacttgcctgttttttctttggatgcttatgcttttggtgtcatatctgtgaatccattgccaaatccaaggttgtgaagatttacccttatgttttcttctaaaagttttatagttttaacacttacacaggttgttgattcatttttagttaatttctgtgtgtggtatgacagagcttcattcttttgcctgtggatatccagttttccccccactgt

SEQ ID NO: 943757 - DNA, 468 bp, Homo sapiens
ctcccagggtcaagcaattctcctgcctcagcctccctagtagctgggattacaggcgcatgccaccacgcctggctaatttttgtatttttagtagagatgcagtttcaccttgttggccaggctggtctcgaactcctgacctcaggtgatacgcctgcctcggcctcccaaagtgctgggattacaggcatgagccaccgctccyagccacaaacccaagttattttattccatcttctcctttactcagacctactctagtttcctcaaatgcctcaactagaaatctatatgtatctacctcatcccctacaagctcagtaatttttaaatactaccactgtaggctcaagtgagcaaattattgctcagtcaggttcattgacagtagttctaaagtgaatgcttgtctataaaacagagctctgggtagaagccatagttttctatgtttacagcttcctc

SEQ ID NO: 943758 - DNA, 579 bp, Homo sapiens
gagactgagatatattccaaccaactcggccctgtggaagtgccaagttttcctcagtgccactcttgaaactacatcaccaactgaccctttaatatatttttgcactatataacatttatttcttagagtaagttcttccctagaaaagaagcagtttggacacgtatattaaggccgtcacatagaatattatcctctcattgctaggaggtggccttcaagatggctgactagaggtaccaggcactgtgccctcccaaagaaagaccaaamcagcaagtagataatcataccttgaagagggcataaaagagggcactagaattcagcagcaaagtgacaaggaatctctgaggtatggaaggaaaggaaaatgaagcagcagcccagccagaatcagcttaaagccaggacaggctctccagtgtggtgaaaaggtaaaaaagagagccccagtggtccatattcccactgtggacactgcaatcctagccaagggacagtctctcagccctcgcaggccctgagactactatagggagctgcctggaatctatgtgatggtcattgtcccag

SEQ ID NO: 943759 - DNA, 606 bp, Homo sapiens
tctgccaggatgtctcacacagtctacaaactctgcaaatcccaagtgtactctataataccctaaaccttcttcccatgtacctctgatatattggagttcgtatctccactgccactatccaccattcttcctctatctagtatccctacatccatactggctccctttaatccatcctccatcttttccagagctttccaaattcaaattctttttttttctttcaaaggtgatgtttctattgtccaggctggagtgcagttgatttaagctcactgcagcctggaactcctggattcaagcgatcctcccacctcagcctcctgagtagctggaactacaggtgagtgccaccacacctggctacttaaattttttttgtagagatggggtctcgttgtgttgcccaggctggtcttgaactcctggsctcaagcagtcctcccaccttggtcttccaaagtgttgggattacaggcatgagccaccgcaccaggacaaccaaattcaaatttgtaagatggctttcaaagccctatgtgatgtcattccagtccatctctccagaaactcacctctggctccctgtgctgtaaagggcct

SEQ ID NO: 943760 - DNA, 608 bp, Homo sapiens
agaaatccctttccatcacctgcaccttaggaactgccttcacctctctctttcattggatctcctgtcttgtatcccacgcactcgtcctttttgtagtactctcattttggcgaagcacgtctttcagtaggttcttgagcaatatttaatgggatgtmagtttttttgagatcttggaatgtatgaaaacatatttttctctgtattttactgatagtttggctgcctgtagaattctagcttagaaataattttcctttagaaatttgaaggcattggtcttctagtttcaatgttgctttggcaagcccaaagccattctgattcctgatcctttgtatatattcctgcctctcaacttatatacttctggaatccttccttgttctagaactctgaaactggcataggtctagaacaaggatggagcacatctccatccattgtgctgggtatccagtgggctttttcagtctaataactcatgcccatcaattatataatgttttcttgaattattttggtaattgcctctcttccattttctctattctctgcctctgtctcctttttgatgttggttcccttctattctggctcaacat

SEQ ID NO: 943761 - DNA, 774 bp, Homo sapiens
caggttaagaaggccaagtagtgagggcttgggactctcatccccacccacagtaattagttccttattcccttagagaccatgtgaggagcttggatatctatcttcccgtggcaatgatgagacactgttttccctccctagtgggatagtgtcagagacctactgcagagtcagaattttcaccactggccagagataccatggccacaccacttgggtgtcagtggaaaccagatggtaagaaataataaagcaatccttcccctctcagacaaagcagtggcctagtagggagagggagctcccaactcagcccagcagttaatcaagagcctcttctccccctggcttgccaacagaggccaaagaggaacctagacttctacgagtacctggcagtaatgaggtggtgctmagggacctgtgggactataacaaaagatctaagtgtcttgttattggtgtcccccagaaggagaggaggaagagagcagggctgaaaagtacttcataaaataatggcaaaaaacttctaaatttgttaaaaaaataaaaataaaaacaaaaaactcaacaattccctaactaaaaacaacaaacacacagattcaagaagctgagccaacctcaaaacatgtgatttttttaaagttttttttttttttcaagagacagggtcttgctctgttgcccaggctggagtgcagtggcacaatcctagctcactgcagcctcgaactcctgggttcaaacaatcctcctgcctcaatc

SEQ ID NO: 943762 - DNA, 620 bp, Homo sapiens
tttgaattacgtagatttatgccgcttctcatgctcttttccttagcttccctgtgatccacctggccttgccctcagcccagtgacagcctcagactgccagacctcttgctacctcagagcttttccttgtgctgtccccctgcctggattgatgtctctctccctgctctgtctacttaagaactcagtctctgggtccacttgacaaggcatattcttggggaagcttgaatgaagcccaaaggagaccaggtaccctgttagacattctcagcatgtgatttgtttaaagattatcttccctcctaggctgtaagcattttaaggatagggatcacaccagtcttcaccgttgtattaccagcaccctgcatagsgtgggaggttaggacagccgagtagtaggaaatgctggctgcctggattcaaattccactgccactgctttctagtgttgtgattttgagcacgttgacttaagctctcaaatacctgcctctgaagagttactgtgaagaccaaatgataatgtgtgtaaagaatttactatggtccttggcacatagtattcagtaaatattagctgttaggattatcaggtgccgataaatatttgc

SEQ ID NO: 943763 - DNA, 545 bp, Homo sapiens
gggaggcttcagggaacttctaatcatggcagaagaggaagcaggcaccttcttcaccaggtggcaggaaagagaagagcaggggaaaccacttctataaccatcagatcttgtgaaaactcactcaggggccgggcgcggtggctcaygcctgtaattccaacactttgggaggccaagggggttggatcacctgaggtcaggagttcaagaccagcctggccaacaaggtaaaacccgcccccctactaaaaatacaaatgttaacccaggcgtggtagcaggcacctgtagtcccagctacttgggagaatgagacaggagaattgcttgaacctgggaggcagaggctgcagtgagccgagatcgtgccactgcactccagcctgggtaacagagtgagactccatctcaagacaaacaaacaaaaaaccatacaaacaaaaaaacctcactcattacaagaacagcatgggggaaaccgcccccataatccaatcacctgcctcccttcacgcgtttggattacaggtccctccttcaac

SEQ ID NO: 943764 - DNA, 768 bp, Homo sapiens
agggagggtcggtaatgtgcccagagcgagccagctctagagtgggctctgtcccaaaacctccctgccaggtttcagactctaacagtgggaggggctggaaagcagcctggggagggtccagggaggctgtccaggcagggcatcrtgccagcaatgtgcagaggatgggggtccctcgtgggagtgctcccactaggcacgtgagaggcccaggtgggcaggtacaggacccattcccaatgccacagcctctgtcaagctgcctgcggactcccagcagccagatgatctacagttgctggctcaaagatgtgctttaatcgaataatgatattggggagtgaggagtcaccatacatcagctctcaccaaatgaaaaatccgaaggataatgtaggaggtgagagatgcactggagtgggcattttaccgaaatccacagcaattcacatgccagaaaggtggctaccccaccgcccagccactgagatcacaggtggctactgtgtcccagacccagcttgggcagagaagttccccgcaggtccccacctcttcactctccacctcaccatgcacccttccttagttcagccctttgaagcctcaatgtgactaatttgtagaatcaggaggtgaggctttgagccctgcacccagcgagtttggggtctgtgctgccctttgccagtgcacagggcggtcctcactgcctggtgcaggggctcatgcagctcatctccactctgacatccggctccgaac

SEQ ID NO: 943765 - DNA, 708 bp, Homo sapiens
acagacagagtgagacactgtcctctcccgtccccccctcaaaaaatacatgaaacaaaaactgaaaggagaaatagataaatctagttacaattggaggctttaatatttcttctttgcagtaatcagtagaagtagygtacagaacatcaataagaatatagaaaacctgggccgggtgtggtggcttatgactataatcccagcactttgggaggccaaggcgggcagattacttgaggtcaggaggacagtgggtgtagcccacggagggtgaaccaaagcagggcagggcgtcgcctcacccaggaagcgcaaggcgttgggagatttccctttcctagacaaaggaagccctgacagactgtacctggaaaaaacggaacactcctcccccaaatactgcgcgttttcaacagtcttagcaaatgcagaccaggagctactatccagtgcctggctcggtggttcccacacccacagagccttgctcacagctagtgcagcagtcagagattgaactgcgaggcaacagcctggcagggggaggggcacctgccattgctgaggcttgagtaggtaaacaaagctgcctggaagctcaaactgggcggagcccaccacagctcagctaggcctgctgattctgtagcccccacctctgggagcagggcatagctgaacaaaaggcagcagaaacttctgcat

SEQ ID NO: 943766 - DNA, 708 bp, Homo sapiens
acagacagagtgagacactgtcctctcccgtccccccctcaaaaaatacatgaaacaaaaactgaaaggagaaatagataaatctagttacaattggaggctttaatatttcttctttgcagtaatcagtagaagtagtgtacagaacatcaataagaatatagaaaacctgggccgggtgtggtggcttatgactataatcccagcactttgggaggccaaggcrggcagattacttgaggtcaggaggacagtgggtgtagcccacggagggtgaaccaaagcagggcagggcgtcgcctcacccaggaagcgcaaggcgttgggagatttccctttcctagacaaaggaagccctgacagactgtacctggaaaaaacggaacactcctcccccaaatactgcgcgttttcaacagtcttagcaaatgcagaccaggagctactatccagtgcctggctcggtggttcccacacccacagagccttgctcacagctagtgcagcagtcagagattgaactgcgaggcaacagcctggcagggggaggggcacctgccattgctgaggcttgagtaggtaaacaaagctgcctggaagctcaaactgggcggagcccaccacagctcagctaggcctgctgattctgtagcccccacctctgggagcagggcatagctgaacaaaaggcagcagaaacttctgcat

SEQ ID NO: 943767 - DNA, 671 bp, Homo sapiens
agacagagtgagacactgtcctctcccgtccccccctcaaaaaatacatgaaacaaaaactgaaaggagaaatagataaatctagttacaattggaggctttaatatttcttctttgcagtaatcagtagaagtagtgtacagaacatcaataagaatatagaaaacctgggccgggtgtggtggcttatgactataatcccagcactttgggaggccaaggcgggcagattacttgaggtcaggaggacagtgggtgtagcccacggagggtgaaccaaagcagggcagggcgtcgcctcacccaggaagcgcaaggcgttgggagatttccctttcctagacaaaggaagccctgacagactgtacctggaaaaaacggaacactcctcccccaaatactgcgygttttcaacagtcttagcaaatgcagaccaggagctactatccagtgcctggctcggtggttcccacacccacagagccttgctcacagctagtgcagcagtcagagattgaactgcgaggcaacagcctggcagggggaggggcacctgccattgctgaggcttgagtaggtaaacaaagctgcctggaagctcaaactgggcggagcccaccacagctcagctaggcctgctgattctgtagcccccacctctgggagcaggg

SEQ ID NO: 943768 - DNA, 620 bp, Homo sapiens
tgaattttaaaatagttttttctaattctgtgaagaatgtaaatggtagtttatatgggaacagcattgaatctataaattacttcatgcagtatggccattttcacgataattaattcttcctatccatgagcatggaatatttttccatttgtttgtgtcctctctggtttccttgagcagtggtttgtagttctccttgaagaggtcgttcacttcccttgttagctgtattcctaggtaatttwttctcattgtagcagttgtgaatgggagtactttcatgatttggctctctgcttgtctgctattggtgtataggaatgcttgtgacttctgcacattgattttgtatcctgagacttttctgaagttgcttatcagcttaagaagcttttggtctgaaatcatggagttttctcgatataggaccatgtcatctgcaaacaaagacaattttacttttccccttcctttttgaatactctttatttctttctcttgcctgattgccctggccagaacttccaatactatgttgaataggagtggtgagagacgacgtccttgtcttatggttttcaaaggaatgcttccagcttttgcccatttagtatgat

SEQ ID NO: 943769 - DNA, 487 bp, Homo sapiens
gggttgtttctactttttggttatcataaataatgctgctacaaatatttgggttcatgtgtttgtgtggacatgttttcatttctattggatatatctaggagtggaattgctaggccatgtgataactctatgtttaacattttgagaaactgctaacctgttttccaaagcagcagaaccatctttcaatcccaacagcagygtataagggttttgatttttctacatcctcatcaacatgttgtctttttgatgaccgctattcctaatgtgtatgaagtggtatctcataatagctttaatttgcatctttttaatgattaattacgttgagcaaccttttatgtacttgttgggtatttgtatatcctcttagataaatgtctatttagatcttctacccattttttcaatcggattttttaaattgttgaatggtaagttttctattatatattctaggaacaagtccatcaccaacatc

SEQ ID NO: 943770 - DNA, 606 bp, Homo sapiens
ggttgtttctactttttggttatcataaataatgctgctacaaatatttgggttcatgtgtttgtgtggacatgttttcatttctattggatatatctaggagtggaattgctaggccatgtgataactctatgtttaacattttgagaaactgctaacctgttttccaaagcagcagaaccatctttcaatcccaacagcagcgtataagggttttgatttttctacatcctcatcaacatgttgtctttttgatgaccgctattcctaatgtgtatgaagtggtatctcataatagctttaatttgcatctttttaatgattaattacgttgagcaaccttttatgtacttgttgggtatttgtatatcctcttagataaatgtctatttagatcttctacccattttttcaatcggattttttaaattgttgaatggtaagttttctattayatattctaggaacaagtccatcaccaacatcaaatgtattacttgcaaatattttctcccattctgtgggtgatatgtgacttccttgatggtgtattttcaagtacgaatgtttttaactttgacaaagttgaacttatgtatttggtta

SEQ ID NO: 943771 - DNA, 759 bp, Homo sapiens
ggacatgcaagaatcccagtataattttaccttgacagaaggaggttcaggctcagtctttggcactggttcaagaggtggagacggaggaggaggtggggatggtgactcagcttcataagccccaggagagtctggaaagactgaaataatgaaacggacttagatcagagaactacaagcactatctggtataaagccttctccattggttctctaamttgacatgtccagcaaaggggatttagcaagcagtaattcatgacaaccaagaactctgtagttatatagttatctttaaaatacatattttattaattttatacaaataaaatcagagaatcaagaattattacagccggaagtatcttagctaaatattttcttttatagctagtcaggttatgaagttggtttacaaatatccacttatcgcctttcatatgccatgtatttcactttattcttacaacaactctaagagacagattttcttatttgcacattacagtaaatagaggttcagaggggttcctaaacttgccaaggtcacacagcttataactgagacaggaggttttaagcctaagtcaatccaattctacagccttgctattccaactatcccatgccgccttaccattgaggacaagacattatctctcaagatctatgtggagataatcctcaggttataacaaatgttccatgccagagtctttcactgtgacctaagggttacttttaatcacctgagat

SEQ ID NO: 943772 - DNA, 693 bp, Homo sapiens
aggagcatcaggcatcagccaaaccccgcagaaaagtgaaagcctcaggggtctggaagggttgccccatagatcattcctaagtaaattctttgctggcatcccataaacaagaacatctcattgtaacttcacgtctacaatctgattctaggttaaamctgaagtctgttccattccacattgatcatgtctattacaagcttcgcttcccaggtgcagaaaaaagacaagatgagatcagtcattcctccacctgcccagagacatctgcataattgattcttcctttacgcccttttttctcttcaaacattcattcaccttatcttatgtaaaatgcagatttactggcactaactagagtctcacaagaatgtaatcattcgccttacagcccacctgcccctcttccgagccttcccccctttaaggaaacatacaaatactaagcctcctgaaaacctctttagaaaaatagatacagatgtgtctgtggctggtatttttccagatgcaccctaaagctggcttaataaacgtcaacaattgagacctctgcctcagtcactcatctcagctatcagccacatgtcaccatataaaatttatattgccagccgggcgtggtggctcactcctgtaatcccagcactttgggaggccgaggcaagcggatcatgaggtcaggag

SEQ ID NO: 943773 - DNA, 692 bp, Homo sapiens
atcagccaaaccccgcagaaaagtgaaagcctcaggggtctggaagggttgccccatagatcattcctaagtaaattctttgctggcatcccataaacaagaacatctcattgtaacttcacgtctacaatctgattctaggttaaaactgaagtctgttccattccacattgatcatgtctattacaagcttygcttcccaggtgcagaaaaaagacaagatgagatcagtcattcctccacctgcccagagacatctgcataattgattcttcctttacgcccttttttctcttcaaacattcattcaccttatcttatgtaaaatgcagatttactggcactaactagagtctcacaagaatgtaatcattcgccttacagcccacctgcccctcttccgagccttcccccctttaaggaaacatacaaatactaagcctcctgaaaacctctttagaaaaatagatacagatgtgtctgtggctggtatttttccagatgcaccctaaagctggcttaataaacgtcaacaattgagacctctgcctcagtcactcatctcagctatcagccacatgtcaccatataaaatttatattgccagccgggcgtggtggctcactcctgtaatcccagcactttgggaggccgaggcaagcggatcatgaggtcaggagatcaagaacatc

SEQ ID NO: 943774 - DNA, 693 bp, Homo sapiens
aggagcatcaggcatcagccaaaccccgcagaaaagtgaaagcctcaggggtctggaagggttgccccatagatcattcctaagtaaattctttgctggcatcccataaacaagaacatctcattgtaacttcacgtctacaatctgattctaggttaaaactgaagtctgttccattccacattgatcatgtctattacaagcttcgcttcccaggtgcagaaaaaagacaagatgagatcagtcattcctccacctgcccagagacatctgcataattgattcttcctttacgcccttttttctcttcaaacattcattcaccttatcttatgtaaaatgcagatttactggcactaactagagtctcacaagaatgtaatcattcgccttacagcccacctgcccctcttccgagccttcccccctttaaggaaacatayaaatactaagcctcctgaaaacctctttagaaaaatagatacagatgtgtctgtggctggtatttttccagatgcaccctaaagctggcttaataaacgtcaacaattgagacctctgcctcagtcactcatctcagctatcagccacatgtcaccatataaaatttatattgccagccgggcgtggtggctcactcctgtaatcccagcactttgggaggccgaggcaagcggatcatgaggtcaggag

SEQ ID NO: 943775 - DNA, 645 bp, Homo sapiens
gagatggccaataagcatatgaaaagatgcttcacattacaggtcatcaggaaaatgaaaattaaaaacacaatgaaataccactacgcacctattagaatggccgaaatccagaacactgacaataccaaaagctggcaaggatgtagggcaacagaactctcatttattgatggtgggaatgcaacatggtaccatcacttcagaagacagtttgacagattcttaaaaaaactaaacatactcttagcatatgatccagcaattgcgctcgttggtatttactaaaaaaaagttaaaaacttacaaccatgcaaaaacctacttayggacacttatagcagctttattcatatttgccaaaacctggaagtaactaccatgtctttcagtagaagagtggataaacaaaccatggtacatccagataatgaaatgttattcaccaccaaaaaaaaaaaacaaaaaaaatgagctatcaagccacaaaaaggcataggagaacatgaaacgcatattactaaatgaagaagctactctgaaaggctacgtactctatgattccaaccatatgacattctggaaaaggcaaaactatggagacagtgagaatcagtggttgccacaggttgaggggagggagag

SEQ ID NO: 943776 - DNA, 632 bp, Homo sapiens
gtagcaggtgaggcctgagagtggaggagaatagattggaggctgtttaagttttctctccagcttgtagtatcctcccctcccttcttctccgtctcaatcctggcatccatcttctctcactattctcagattcttccagtgcagatgtcatagatttcttaacttattttcatgaaggtgtcaatgatgcgatgctttatctttgcrtgttgaaaaagaatgctagcagagggcagtgcttaactcaaagtttagcaaacacaacttaatgctagaattttagaccacgtagtattttgttcaggggagagttttggggtacagggtggagtacatgccttcctgttgtagttcagaatacacctagtaaagaaccaatacagtcgtccctcgttatccgttggattggttccaagaagcctgcagatagatgccagaattcatggatgctcaagccccagtataaaatggtgtcatatttgcatatcacctacacacatcctcccatatactttaagtcatctttagattacttataatacctaatacaacataaacactatgtaaatagttgttacactgtattgtttggggaataatgacaagaaaaaagtctgtacatgtccaga

SEQ ID NO: 943777 - DNA, 632 bp, Homo sapiens
gtagcaggtgaggcctgagagtggaggagaatagattggaggctgtttaagttttctctccagcttgtagtatcctcccctcccttcttctccgtctcaatcctggcatccatcttctctcactattctcagattcttccagtgcagatgtcatagatttcttaacttattttcatgaaggtgtcaatgatgcgatgctttatctttgcgtgttgaaaaagaatgctagcagagggcagtgcttaactcaaagtttagcaaacacaacttaatgctagaattttagaccacgtagtattttgttcaggggagagttttggggtacagggtggagtacatgccttcctgttgtagttcagaatacacctagtaaagaaccaatacagtcgtccctcgttatccgttggattggttccaagaagcctgcagatagatgccagaattcatggatgctcaagccccagtataaaatggtgtcrtatttgcatatcacctacacacatcctcccatatactttaagtcatctttagattacttataatacctaatacaacataaacactatgtaaatagttgttacactgtattgtttggggaataatgacaagaaaaaagtctgtacatgtccaga

SEQ ID NO: 943778 - DNA, 741 bp, Homo sapiens
caggattggaaggtgtattagatcaggcatagataaactgctgtgacaaagagtctccaaaatgtggaggcttaagcaagataaatgtttatttttctcttacataacagtccatgaaagagtggattctctgctccaggaactcacccaggaaccctgctggcagggtggctctgcaccctttggggcagggactggcaaactttcattatcaagagccagatagcaaataatttggctttgtagaacctactgyttctgttgcaactgctcaaatgtgccatcgtagcccccaaacagccatagatgatatatacaaaagtgtacttggctctgttccaataaaactttatttgcccaaacaggtggtgggccacatttgtttctctatttttttttttttggagacagggtctcactgtgtcacccaggctggagtgcaatgccatgatcttggctcactgcaacctctgcctcccaggttcaagtgatcctcctgcctcagcctcccgagtagctgggattacaggcgcatgccaccatgcctggctaatttttgtatttttagtagagatgggctttcaccgtgttggccaggctggttttgtactcctgatctcatgtgatccacctgcctctgcctcccaaagtgctgggattacaggcatgagccactgcgcctagcccatatttgtttcacggacagtagttttctggcctctgctttagtccattctcctc

SEQ ID NO: 943779 - DNA, 670 bp, Homo sapiens
acttttgggtgattcctgcatattgtgcagaaccatctgtgaacgaggccctagtcttctcttcctctgtcaactgatcatagggaactccccatgaggccatcagtgcaggctggcagagagaaggcagggtggcaggagtggagaccatgggcatttaagccacttcctcatgtaacttacttttgccttcaggacctgctcaagcccgatcacatatataccacttccatttgatgatggaatgctgcagtgcacaacccactttatggctagatgtgtcacaaagcacccagttcatgataggcagttcaggtcacayggtgacttgatgacccacagtcaaatgtccagtttccaccaaagcccagtaacaggccaagagctgtctctcaaaaggagagtagttatctgcagaagatagcatggtctttcaccctagaggcctctgctgtgattcacttatgggggccggccaaaggctccaaagagcatccctatctgccactgacacctcaagcaccattggatctgctgggtcatatgtcccaagtggcagcgcagcttgcacagcagcctggacctgttgcagagccttcttctcttctggaccccactcaaaactggcagcctttcaggtcacctgataaatgggccagagtaacacacc

SEQ ID NO: 943780 - DNA, 628 bp, Homo sapiens
gggtgattcctgcatattgtgcagaaccatctgtgaacgaggccctagtcttctcttcctctgtcaactgatcatagggaactccccatgaggccatcagtgcaggctggcagagagaaggcagggtggcaggagtggagaccatgggcatttaagccacttcctcatgtaacttacttttgccttcaggacctgctcaagcccgatcacatatataccacttccatttgatgatggaatgctgcagtgcacaacccactttatggctagatgtgtcacaaagcacccagttcatgataggcagttcaggtcacatggtgacttgatgacccacagtcaaatgtccagtttccaccaaagcccagtaacaggccaagagctgtctytcaaaaggagagtagttatctgcagaagatagcatggtctttcaccctagaggcctctgctgtgattcacttatgggggccggccaaaggctccaaagagcatccctatctgccactgacacctcaagcaccattggatctgctgggtcatatgtcccaagtggcagcgcagcttgcacagcagcctggacctgttgcagagccttcttctcttctggaccccactcaaaactggcagcctt

SEQ ID NO: 943781 - DNA, 637 bp, Homo sapiens
actttttgtctcggggtgaaaggggaaggatttaaagccaaagttttagaagaaacgaaagttaaatacaaaaatcgatcaactagtattaaactcctactaatctctgaagcaagaacaaacctgttaggaagggacctgatgttaaaactggacataggcctgcatgcctgccctgaagaatttttcacttcatttaaccttctcaccaccacagaaaaaagttacattcatcccaatgagtcatcaaaagaagggaaccgagggaaaatatgaatccccccattcatataaagttgaaaacccctggaaaaatagtaaggagaaggcaatacctaattcctctagaaggcaggataggcttgaaaactgtrattcaaggtgttattcaggataagttacttgaaccctgtatgtctccatataatacccctataatacctttaaagaaatcagatgggtcatattgactaatacaagagctccaggacattaaccaaatagtccaaaccactcaccatgttgtccccattctatatattatcctcagcaagattccatatgaccatcagtggtttacagtaatagacttaaatgatgccttttgggcatgtcccttagctgaagacagctgaga

SEQ ID NO: 943782 - DNA, 649 bp, Homo sapiens
ggagaaggaatttcacaaggtaatgtcatcagttaaggcaaggaccagccattttcacttcttttgtggtggaatgtcatcagttaaggcaggaacaggccatttaaatttcacttcttttgtgattctacagttacttcaggccatctggctgtatatgtgcaggccacaggggatatgatggcttagcttgggctcagaggcctgacattcctatcttcttatgttaataagaaaaataaaacaaagtagtgttaaagtgttggggcggcaaaaatttttgagggtggtatggagagataatgggtgatgtttctcagggctgcttcaagtgggattaggggcagtgtgggaacacagaatgggagagattaagctgaaggaagattttttagtaaggggtgatattgtgggkttgttagaaggagcatttgtcatatagaattattggtgatggcctggatatggttttgtatgaattgaaaaaataatggaataagacaaggagaaaaataggtattaaagtactaagaattgggaggacccaagacatccaattagagaatgcctaaggaggttcagcatagccctgccagcaaagattatttactttaagagggagttaagagtgatggtttggggatagcac

SEQ ID NO: 943783 - DNA, 665 bp, Homo sapiens
atattgtggacacaggcatgcaatgcaaaataatcatatcatggagaatggggtatccatcccctcaagcatttatcctttgtgttacaaacaatccaattatagtcttttagttatttttaaatatgcaattgttattattgattacagtcaccctgctgtgctatcaaataataggtcttatttattctatttttttgtacccattaaccatccctccctttccactagccctccactaccctttccagccactggtaaccatccttctattatctatgtccattagttgaattgttttgatttttagatcccacaaataagtgagaacatgcgatgtttatctttctgtscctggcttatttcacttaacataatgacctccagttccatccacgttgttgcaaatgacaggatctcattctttttggtggctgaatagtactccattgtacatgttccatccatgttgttgcaaatgacaggatctcattcttttttgtggctgaatagtactccattgtgcatatacaccacattttctttatcctttcatctgtaaatagacactgtgattgcttccaaatctcagctatcttgaacagtgctgcaacaaacaggagtgcagatatctcttcaatataccaatttcctttcttgtgggt

SEQ ID NO: 943784 - DNA, 874 bp, Homo sapiens
cgtgcaccaccacacccagctaattgttgtattgttagtagagatggggttttgggtccaaaattggtgggttcttggtctcactgacttcaagaatgaagccgcggaccctcgcggtgagtgttacagcttttaaggtggcgcctctggagtttgttccttctgatgtttggatgtgttcggagtttcttccttctggtgggttcgtggtctcgctggctgaggagtgaagctgcagacctttgcggtgagtgttgcagctcataaaagcagtgtggacccaaaaagtgagcagtagcaagatttattgcaaagagtgaaagaacaaagtttccacagtctggaaggggaccccagcgggtagccactgctggctgggacagcctgcttttattctcttatctggccccacccacatcctgctgattggtagagcccagtggtctgttttgacagggtrctgattggtgcgtttacaatccctgagctacacataaaggttctccaaggccccaccagagtagctagatacagagtgtcaattggtgcattcacaaaccctgagctacacacagggtgctgattggtgtatttataatccctgagctagacataaatgttctccaaggctccaccagagtagctagatacagagtgtccattggtgcattcacaaaccctgagctagacacagggtgctgattggtgtgtttacaaaccttgagctagatacagagtgccaattggtgtatttacaatcccgagctagacataaaggttctccaaggccccaccagactcagcagcccaggtggcttcacccagtggatcctgcaccggggctgcaggtggagctgcctgccagtcctgcacc

SEQ ID NO: 943785 - DNA, 743 bp, Homo sapiens
taacagacttgacacaaatgtaggcttgagagaggtgtagtgtatttcaacttcctgtcttactcttcctcctttgccctgaccacagattcatgctaacctgttggcagatgagaagtcatgtggcgctaaaccagttttcacaggtggggacatcttataccagcttgtttccaggcaacatattagctgaggatgaactcatgagtggatgcagacaagattagccaagcatggcccagagcagaaactgtcctatgacacatggtaaataatkcattgcatttgtttaagccactctgttttggatttttaaattcatcatttttgtttcaatagaaaacattttattacgtaattccagttgtgaatggacacagagaagatatggaaactcctaaacagtcacaaactgcagtgcaaacttccctgctacttgggatgggagctttctcagggattcttatacatacagtttcctgggggcatttgcgtcactgtttagggctaaggtcttcattatctgttctgctcaccttcaagctatagctttcctagccctgtcctcaatatttccctaatctttatttcctgagatattccaatattcatattagcccttattcttataacaagccctttctctatttctgtacagaaccaactgtggcacaggagtgaaggagaaaacagatatctgaggaagccaacaccaggccaaaagacagcctatgcaaagatgc

SEQ ID NO: 943786 - DNA, 743 bp, Homo sapiens
taacagacttgacacaaatgtaggcttgagagaggtgtagtgtatttcaacttcctgtcttactcttcctcctttgccctgaccacagattcatgctaacctgttggcagatgagaagtcatgtggcgctaaaccagttttcacaggtggggacatcttataccagcttgtttccaggcaacatattagctgaggatgaactcatgagtggatgcagacaagattagccaagcatggcccagagcagaaactgtcctatgacacatggtaaataatgcattgcatttgtttaagccactctgttttggatttktaaattcatcatttttgtttcaatagaaaacattttattacgtaattccagttgtgaatggacacagagaagatatggaaactcctaaacagtcacaaactgcagtgcaaacttccctgctacttgggatgggagctttctcagggattcttatacatacagtttcctgggggcatttgcgtcactgtttagggctaaggtcttcattatctgttctgctcaccttcaagctatagctttcctagccctgtcctcaatatttccctaatctttatttcctgagatattccaatattcatattagcccttattcttataacaagccctttctctatttctgtacagaaccaactgtggcacaggagtgaaggagaaaacagatatctgaggaagccaacaccaggccaaaagacagcctatgcaaagatgc

SEQ ID NO: 943787 - DNA, 743 bp, Homo sapiens
taacagacttgacacaaatgtaggcttgagagaggtgtagtgtatttcaacttcctgtcttactcttcctcctttgccctgaccacagattcatgctaacctgttggcagatgagaagtcatgtggcgctaaaccagttttcacaggtggggacatcttataccagcttgtttccaggcaacatattagctgaggatgaactcatgagtggatgcagacaagattagccaagcatggcccagagcagaaactgtcctatgacacatggtaaataatgcattgcatttgtttaagccactctgttttggatttttaaattcatcatttttgtttcaatagaaaacatttkattacgtaattccagttgtgaatggacacagagaagatatggaaactcctaaacagtcacaaactgcagtgcaaacttccctgctacttgggatgggagctttctcagggattcttatacatacagtttcctgggggcatttgcgtcactgtttagggctaaggtcttcattatctgttctgctcaccttcaagctatagctttcctagccctgtcctcaatatttccctaatctttatttcctgagatattccaatattcatattagcccttattcttataacaagccctttctctatttctgtacagaaccaactgtggcacaggagtgaaggagaaaacagatatctgaggaagccaacaccaggccaaaagacagcctatgcaaagatgc

SEQ ID NO: 943788 - DNA, 630 bp, Homo sapiens
cccagactccagataggcgcaccacctcatccttcagagcagggctctgagactccacaagtggtgaggacttaccagaggaactgaacttgacctccaacccaaccttccatttgctggtattattctgaagccctcatggcctagggaactgcctcaggtagcaggtctcactcctgcagtggaggggccataaagttcagttcatgatcagcccccaagccaggggcagcggatgacagggcaggagttccatctagaggagctcccgtgttcaggcgttcctagacacctgcctgcccttctcccatcagcactggggtataaagaaggaaagaggcctgagggttccagaggcctctacctgctgaggtcttmagaggactcaaccctctgggaaatacaaataaaatcctcaaccctccaaacaactgaatggacacctcttggccaaagagaccccggaaaaactttaaaatccaagtttcctggccgtgatgataggtcactcacacctcagtacacctgcttcctcacgaaccgttaccaggcttctttcccaagagctaaacagaaaccagccctgaaaaccaagaacaggagactccttcactgatttcaatttcaacc

SEQ ID NO: 943789 - DNA, 678 bp, Homo sapiens
taggatgtggtgctcataatctggaggtttttttgggaaaatgaaaacaagggagcaaaccaaagccaagcaccatgcatccaaatcttagcaggcataactatagccactagttatctgggcatgtcagcagacttgggatttttgagctgtctttacctccttgttgttccattttgatccatgtcatctaataacccaaactgtttcttctcacttagaggccatcaaattccgaacagagccttgaatgatggctccctttaacctgggaygcttagataggcctctgagggagctctgattgctgtttgctcaaaacagcatcccctgtcagcaggaagtagttaagattgtctttgtccctattctaacaacaggtagttgtacctcttcagagggggaaatgagagggacaggaggcagccaaatgcctaggcaaatagggactggtccctggtgaaaccccacttccaagccaaagccagtttaaagcctgaaagccaagctacaagctaaatcctcagaccagattgaagacttgtcttcccatttgttgtgctttcctctgattgatccccacccttcacctattttacatatacttaccctttcctaattggttttctacactgtcatgcccatctttgagtgatgtcttcactttaacctgttttg

SEQ ID NO: 943790 - DNA, 592 bp, Homo sapiens
gttttccacttcccttctgcccaggaactggttcttggctgtacttcccttgcttttgttacagtccaaatacaagtctggccctccccatccagcatactccagatcctactagggttacagagctttgctgtcctccttaaagggagaggaattatggcccctgtgtaagtagcaagtcaccttcttacaccagtatccagagccttccataacttgctctcaccctgtctagacagcttctctgccmtgtcctgtccaacggctccctccttgcagtgaggctgttcttactcttgaggacaacagactcagactgatcccccactggggttttgcttacactggggtggtccctcattcagaatatccacctccttactctcattttttttgtaacagttcctttaggtcctacttcaagatgtactctctctgtgatgctttcatgtgacagttcagatcatctgatttttaccccttcttatgcacacatagcacctatgaatttggccttgactcattgttatcctctgattgttctaggaatgggtgtatcatcttaccagttagcttataaaggtctgccaag

SEQ ID NO: 943791 - DNA, 592 bp, Homo sapiens
gttttccacttcccttctgcccaggaactggttcttggctgtacttcccttgcttttgttacagtccaaatacaagtctggccctccccatccagcatactccagatcctactagggttacagagctttgctgtcctccttaaagggagaggaattatggcccctgtgtaagtagcaagtcaccttcttacaccagtatccagagccttccataacttgctctcaccctgtctagacagcttctctgccatgtcctgtmcaacggctccctccttgcagtgaggctgttcttactcttgaggacaacagactcagactgatcccccactggggttttgcttacactggggtggtccctcattcagaatatccacctccttactctcattttttttgtaacagttcctttaggtcctacttcaagatgtactctctctgtgatgctttcatgtgacagttcagatcatctgatttttaccccttcttatgcacacatagcacctatgaatttggccttgactcattgttatcctctgattgttctaggaatgggtgtatcatcttaccagttagcttataaaggtctgccaag

SEQ ID NO: 943792 - DNA, 774 bp, Homo sapiens
gagaaccactgctctcttcaaagctgtcagggacatttaagtccgcagaggttactgctgtcttttgtttgtctctgtcctgcccccagaggtggagcctacagaggcaggcaggcctccttgagctgtggtgggctccacccagttcgagcttcctggctgctttgtttacctaagcatgcctgggcaatggtgggcacccctcccccagcctcgctgccgccttgcagtttgatctcagactgctgtgctagcaatcagtgagactccgtgggcataggactctctgagccaggtgcgggatataatctcctggtgtgccattttttaagcccgtyggaaaagcacagtattggggtgggagtgacccgattttccaggtgccatctgtcacccctttctttgactaggaaagggaactccctgaccccttgtgcttccagagtgaggcaatgcctcaccctgcttcggctcgcgcagggtgcgcgcacccactgacctgggcccactgtctgccactccctagtgagatgaacccggtacctcagatggaaatgcagaaatcacccatcttctgcgtcgctcacgctgggagctgtagactggagctgttcctattcggccatcttcagtacttaaccgatacaataggtttcatttctcacagaactctcagaatatattaggaaacatggcattgtattattatgaattttctgtgtgactaacagacaaatagagttgcaatatctacacaatcacaggaatgggtat

SEQ ID NO: 943793 - DNA, 774 bp, Homo sapiens
gagaaccactgctctcttcaaagctgtcagggacatttaagtccgcagaggttactgctgtcttttgtttgtctctgtcctgcccccagaggtggagcctacagaggcaggcaggcctccttgagctgtggtgggctccacccagttcgagcttcctggctgctttgtttacctaagcatgcctgggcaatggtgggcacccctcccccagcctcgctgccgccttgcagtttgatctcagactgctgtgctagcaatcagtgagactccgtgggcataggactctctgagccaggtgcgggatataatctcctggtgtgccattttttaagcccgtcggaaaagcacagtattggggtgggagtgacccgattttccaggtgccatctgtcacccctttctttgactaggaaagggaactccctgaccccttgtgcttccagagtgaggcaatgcctcaccctgcttcggctcgcgcagggtgcgcgcacccactgacctsggcccactgtctgccactccctagtgagatgaacccggtacctcagatggaaatgcagaaatcacccatcttctgcgtcgctcacgctgggagctgtagactggagctgttcctattcggccatcttcagtacttaaccgatacaataggtttcatttctcacagaactctcagaatatattaggaaacatggcattgtattattatgaattttctgtgtgactaacagacaaatagagttgcaatatctacacaatcacaggaatgggtat

SEQ ID NO: 943794 - DNA, 602 bp, Homo sapiens
tgttgcccctctgcagtgggggcctgctccagtgcccaatctgtgcggtttgcatagagggggtgggactctggacggacctgttctgatgggggcagtgtgggttggggagtggaaatcttttctcttgcatgcccaaatgtcagtttagtaatttccccttacagagaacccagaactaactctcctgtttccttcttattggagttaacaatttactttctctgtgtaaaccctgggtttgacattattttcacttccattgcttctccccttccctgtggttcaggaatgaaatagaaaggcttttttttgaatraatttctcagtcattgtcttccccaattaacttcaggccagcagatgttaaattaagtcctgactgtgtgccagatcctcttggaacggagccagctagagggtgtggagtatgtgggaacatctctgtgctttgccctcggatgacaggggctccagatgctgcctcagcatggaagggtggtgtgggtgtggagctgggctcctcacttgctctgagagattgtatattcccagagtcccccaactattcatatgtccagattgaaagactgacggaggct

SEQ ID NO: 943795 - DNA, 602 bp, Homo sapiens
tgttgcccctctgcagtgggggcctgctccagtgcccaatctgtgcggtttgcatagagggggtgggactctggacggacctgttctgatgggggcagtgtgggttggggagtggaaatcttttctcttgcatgcccaaatgtcagtttagtaatttccccttacagagaacccagaactaactctcctgtttccttcttattggagttaacaatttactttctctgtgtaaaccctgggtttgacattattttcacttccattgcttctccccttccctgtggttcaggaatgaaatagaaaggcttttttttgaataaatttctcrgtcattgtcttccccaattaacttcaggccagcagatgttaaattaagtcctgactgtgtgccagatcctcttggaacggagccagctagagggtgtggagtatgtgggaacatctctgtgctttgccctcggatgacaggggctccagatgctgcctcagcatggaagggtggtgtgggtgtggagctgggctcctcacttgctctgagagattgtatattcccagagtcccccaactattcatatgtccagattgaaagactgacggaggct

SEQ ID NO: 943796 - DNA, 500 bp, Homo sapiens
agtgtaaaatgattgagcaactttggaaaacagtttggcaatttcttatgaagttaaacatgcacttatcaaatgatgcagcaattccactcctgggtatttgctcaaaagaaataaaagcagatctatacagagacttgtacatgaattttatagaagctttatttataatagccctaaattggaaacaacccaaatgtgtaccagcagatgaatggataaacaaattgagatatagtcatrcaataaaatataattcagcaacaaaaaataatgaactagattcattcagtggtgattagattggagcatacatctgtcaaaatttgttgaactgtacttttagaatgtgtgcgctttattgagatacaattgtatgcaaattatatgtcaattaagttgataaaataatgatttaaaatgcataagatacttagaaataaatctaacacatatgtgaaagacttacacctagagaaatataagcgttacacaaaatg

SEQ ID NO: 943797 - DNA, 512 bp, Homo sapiens
tatgacaaatgattaatatatttaaaataaaaattacatttgcagctgagattgaaaaacttaaatacatcagccacaaccaactatatctatcacctctttaggaaaggcattataatgagatgaaatgctaaatatctgatagctgaggttccttatgccccagatagtgctaggtaggcactgtcttattttatcttattcaattataaatgcaaacatacatacttgaagaatatagcaaagacactttaaatgtaaaaaawaaattttaaaataatttaaaatgtaataaaactctccagatctctccatcttccctctgtcctcagcctgaaaccactctcaattgatagttgttttgagcagaactaaatgagataaagacacgaaaaaacactcaaaaaaatcagtggatccaggaactggttttttgaaaagattaacaaatagctagctagactaataaggaagaaaagagaaaagaatcaaatagacacaataaaaaatga

SEQ ID NO: 943798 - DNA, 592 bp, Homo sapiens
ggtttaatgaactcacagttccacatggctggggaggactcacaatcatggtggaaggtgaaggaggagcaaagtcacatcttacatggcagcaggcaagaaaacatgtgcaggggaactgccctgtataaaaaaccattagatctcatgagatttattcactatcatgaaaacagcatgagaataaactgtctccatgattcaattaccccctcctgggtccctcccatgacacatgtggattatgagagctaccattcaaratgagattttgatggggacccagccaaaccatatcaccacctcagatggcacctacctgaaggcctgaagactgccctaccaagcccatcacattcagtgccaacatcgacacacaccatacaagacccagagaatcatcaaaccacagctattgccgtcactcacaccatgccagcttccctgtgtcctgagaacctcaccactcacctagtctactactgccactactgaatccaaataagtcacatggaggtcaaataattggctcgccagtacctgctaacacaggtgtcagtatataccaccctggtgcgtaaagataggcact

SEQ ID NO: 943799 - DNA, 578 bp, Homo sapiens
aattactgtatatattatatatgctaagaatgaacaattgggacataaaattttaaatatgattcaaaataacataaaagtataaagtagttttaaatctctcaaaatatattgcagaatcaatatgctgtaccctgtaaaacactgatataagaaatcaaagaagacttaaataagtgaaaaggtgctgtgtttatggataggaagactttaaattgtgaagatrcgaattccgcaaagctagtcattcattgcaacttaaatcaaaatctcagtcatttatttttgtttttgttcatgtttttattttgagttactgacaggataatttatttgcaaaaaaaaatctgacaaaaaccgtatagaatacctcaaacctcaaaactcaacaataagaaagcaaacaacactttttaaaagaaattagcaatctatttgaacagatatttcagcaaagaaaactttcaggtgttaaattagtccataaaaatatgctcaacatcaacatcactggtcattagagaaatgcaagttaaaaccacaatgagatacagcatcattactcatcgataaaaata

SEQ ID NO: 943800 - DNA, 578 bp, Homo sapiens
aattactgtatatattatatatgctaagaatgaacaattgggacataaaattttaaatatgattcaaaataacataaaagtataaagtagttttaaatctctcaaaatatattgcagaatcaatatgctgtaccctgtaaaacactgatataagaaatcaaagaagacttaaataagtgaaaaggtgctgtgtttatggataggaagactttaaattgtgaagatgcgaattccgcaaagctagtcattcattgcaacttaaatcaaaatctcagtcatttatttttgtttttgttcatgtttttattttgagttactgacaggataatttatttgcaaaaaaaaatctgacaaaaaccgtatagaatacctcaaacctcaaaactcaacaatargaaagcaaacaacactttttaaaagaaattagcaatctatttgaacagatatttcagcaaagaaaactttcaggtgttaaattagtccataaaaatatgctcaacatcaacatcactggtcattagagaaatgcaagttaaaaccacaatgagatacagcatcattactcatcgataaaaata

SEQ ID NO: 943801 - DNA, 571 bp, Homo sapiens
aaggactcaggaacccctggctggtcgtgttttttgcatatttatattcctagccccagagccttcatcctaagtctctttatctgaagacgctggctgatgcccttttgaggtgtctctgctgagacctctgctctggtggggctgcatggggggaggtggcaagaagagaaaaccttgaagacatgttgccctactctgacttagcccagtacttttccacttctagctctcttccttcccttaccacaggatccataaatttgctgcaaccttttttgggggctccctcagcagtggaacaatccctaggtctgcacygatccacctgacctgcgcacaagtccatgggggaaaatagaacagagaggagtagcacctgctccggttttagcttgttgctcacattatcaccataagtgattaaagacttcactgctaactttcatcatggctcctccttgctctaattgactacccctacacctggcagctcaatgctctctcttaactctacggagcccctgacccacacacttgaagagattaaagaaagaggtaaaaagattta

SEQ ID NO: 943802 - DNA, 557 bp, Homo sapiens
ttctctctctctcatctctcatctgtctagtttattatttttaagcatacaatttcagcagttttcactgtttgcaaagttctgcaagtgtcataattatttaattccagaacatttttatcatcctctaaagaaacctcatactgataagcagccactccccactgccctctctccctacactcagccctaggcaatcacaaatttactttcggtatcgaaagatttgcttattctgaacatttcataaaaattgaatcatacaatatttggttttctgtgttttgccaattttacttactataatgtttcaaggatcatttatgttgcatcatatgtcagtgcttaatttattttatggttatatcatactttrttcatttgttcattgttcatggatacttggcttgttttcatttttagctattatagataatgctgttataaacacttgtgtttaagatttttgtgtacttgtgttttcaattcccttgggtaaacctagcaggaaaattacagggtaaactaattttttgaagaattgccatgctgttttc

SEQ ID NO: 943803 - DNA, 621 bp, Homo sapiens
tctaagatgttataattgcctagttggaggctataggcttgttccccatgacagacctcccagctaaagtggaattcattactttcctggctttttttgttttgttttgtttttattattatactttaagttttagggtacatgggcacaatgtgcaggttagttacatatgtatacatgtgccatgctggtgcgctgtacccactaactcgtcatctagcrttaggtatatctcccaatgctctcccttccccctccccccaccccacaacagtccccagagtgtgatgttccccttcctgtgtccatgtgttctcattgttcaattcccacctatgagtgagaatatgcactgtttggttttttgttcttgcgatagtttactgagaatgatgatttccaatttcattcatgtccctacaaaggacatgaactcatcattttttatggctgcatagtattccatggtgtatatgtgccacattttcttaatccagtctatcactgttggacatttgggttggttccaagtctttgctattgtgagcacaggaaggaatgtttgggaaagcggcattaattgcattacccagtttgaggctgcctgcagctaagactgtt

SEQ ID NO: 943804 - DNA, 603 bp, Homo sapiens
ttgctttttcttattaaccagaatatcacctatcttggtgaatgatttgtgtgcaattgaaaagcatatttctgtagttgttggtggaagtgatattaaacaccaattaggtgaagttggctggtatcattatttaattctattatgactgtatatttatctacttgttttatcaattactgatagatttattgaaatttctaactataattgtagttttatatattttttaaatttctgcarattttccttctgttttaagcttgtgttttaaactcatttgttatagctctttgatgacttcaacctttctaattataaattgtaccttataaatccttgataatatagtccttgcttggaagtctactttttctgatattcatccagtcatttcagctttatcattatttgaactggtgtggtaaatattttacatcttcttatttttaacctgtgtctttacattttatttgagtatctggtaaatggcaagtatgtgggtcttgctgttttatctgttctaaaagcatttgcattttaattggaatgcttaggttatttatattgaataaaatttttaatgtgtttgggtttaatgct

SEQ ID NO: 943805 - DNA, 603 bp, Homo sapiens
ttgctttttcttattaaccagaatatcacctatcttggtgaatgatttgtgtgcaattgaaaagcatatttctgtagttgttggtggaagtgatattaaacaccaattaggtgaagttggctggtatcattatttaattctattatgactgtatatttatctacttgttttatcaattactgatagatttattgaaatttctaactataattgtagttttatatattttttaaatttctgcagattttccttctgttttaagcttgkgttttaaactcatttgttatagctctttgatgacttcaacctttctaattataaattgtaccttataaatccttgataatatagtccttgcttggaagtctactttttctgatattcatccagtcatttcagctttatcattatttgaactggtgtggtaaatattttacatcttcttatttttaacctgtgtctttacattttatttgagtatctggtaaatggcaagtatgtgggtcttgctgttttatctgttctaaaagcatttgcattttaattggaatgcttaggttatttatattgaataaaatttttaatgtgtttgggtttaatgct

SEQ ID NO: 943806 - DNA, 529 bp, Homo sapiens
ctaaaaggggccattgtacagctcaatccagtgcttcagagggtgcaagctccaagccttggtagcttccacgtgattttgggcctgcaggtacgcagaagacaagaattgaggtttgggaacctctgcstagatttcagaggatgtatggaaatgcctgcgtgtctaggcagaggtgtgctgcagaggcaaagccctcatggagaacctctgctagggcagtgtggaagggaaatatgagataggagcccccacacagagtccctactggggcactggctagtggagctgtgagaagagggccaccgtcctccagtccccagaaagtagatccacaaacagcttgccccatgtgcctggaaaagcagcagacactcaacaccaacccgtgaaagcacccggcgggggagctgtaccctgcaaagccacaagggcagagctgcccaaagccatgggagcacacctcttgcatcagtgtgccctggatatgagacatggagtcaaaggagatcattttggagctttaaga

SEQ ID NO: 943807 - DNA, 529 bp, Homo sapiens
ctaaaaggggccattgtacagctcaatccagtgcttcagagggtgcaagctccaagccttggtagcttccacgtgattttgggcctgcaggtacgcagaagacaagaattgaggtttgggaacctctgcgtagatttcagaggatgtatggaaatgyctgcgtgtctaggcagaggtgtgctgcagaggcaaagccctcatggagaacctctgctagggcagtgtggaagggaaatatgagataggagcccccacacagagtccctactggggcactggctagtggagctgtgagaagagggccaccgtcctccagtccccagaaagtagatccacaaacagcttgccccatgtgcctggaaaagcagcagacactcaacaccaacccgtgaaagcacccggcgggggagctgtaccctgcaaagccacaagggcagagctgcccaaagccatgggagcacacctcttgcatcagtgtgccctggatatgagacatggagtcaaaggagatcattttggagctttaaga

SEQ ID NO: 943808 - DNA, 718 bp, Homo sapiens
ccaggatgaccttgatgagacgtagtcgggcctcaggaggcactcccgctgctatcccgctgccggccagcagcttggccacctggctgcacagcgacgccaccgtcagcttcgccagagggaaggactgcagaatccggccctcctgcggggggcgcttctgaggctctggggacgtcgtcctagtggggaagagcgacagcggacgcagcagccggtggtaaaaccgctggagctcaggctcgggcttcgggggctccatcatagagccggcggccgccaccgtccaggaacagaaagccgaggggttactaaggcaaccaggagcccgacggcccgagtgcgcytgcgcggccgccacccggtggctgacgaagcagggccttgcgtgcgcacgcactaggaggaggagttaagggtggctttagaggctcagtccccgcgacgccgcgctggttggtgctcctgcgccggaggagttctgcgtctcggggtggtgactgggtccagaatggcttcggattcggggaaccaggggaccctctgcacggtgagggtcgaggcttcgtgtggagcctcgccgggcagagagcctcggcccctgggatgatcgttaccttgggaagaggagaaggagtgggcacttgggttggggcctggggccatgggatgaaactagggtgcgagggtagcaggggccctgcgtgagtgttggggg

SEQ ID NO: 943809 - DNA, 627 bp, Homo sapiens
ttatagtgaaataattgctaaataacaagccaggcatggtagcgctgtagtctcagctacttggcagactgaagcggaaggattgtttgagcccgggaattggagatcagcctgggcaacatagcaaaactccatcttggccaggcacagtggctcacccctgtattctcgcactttgggaggccaaggcaaatggatcaccctgaagtcaggagtttgagaccatcctggccaacatggtgaaagcctgtctgtactgaaaacacaaaaatttgctgggcatggtggcgcacgcctgtaatcccagctactcgtgaggctgaggtaggagaatcccttgaacctgggaggcggaggttgcagtgaaccaagattgcaccattgcactccagcctgggtgacaagagagactctgtctctctctctctctctctctctctctctcwcacacacacacacacacacacacacacacaaagagaaaactccatctcaaaaaattcccaaaaccagccaactaaacaaaaaaatagatgcgggccaggggtgatggcttacacctgtaaccccagcactttgggaggccaaggcaagcagatcatgaggtcaggagttcgagaccagcct

SEQ ID NO: 943810 - DNA, 788 bp, Homo sapiens
aggtccatcatgagagcaggcccctccttgcctgttcaactcacccctttctcaggaaacactatattttaaaactcgttctgtttttttgtttcctctaaattatataagcttttaaggctttctttcttttttgattttaaattttatttatttgaattgacaagttaagattgtgcatatttatggtgtataacaatgttttgatgtatgtatacattgtggaatggctaaatcaagctatttaacatatgcataacttcactttttttttgtgatgagaagacmaaatgtattctcttagcacttttcatgtgtgcaattgttattaactatggtcactatgttgtataatagatctctcaaacttatttctccaatctaattgaaattctgtatcctttggccaacatctccatccacccccaacctagtctctcataaccaccattctgctctctatttctatgaggtcagcttttttagagtccacatacaaatgacatcatgtggcttttgtctttctctgcctggcttgttacacttaacataatgtctttcaagttcatccatgttgttacaaatgacagaattttgttctttttaaaggctaaatagtatcccattgtatatatactacattttaaaaattcactcatcagctaatagacacataagttgattccatatcttggctattgtcaataatgctgcaataaatgtgggaatgtggatatcttttccacatactgatttcattccctttggatatatatctggtagtgaga

SEQ ID NO: 943811 - DNA, 503 bp, Homo sapiens
cagaaactgttcatgaaaaagatagtggaacaacatttttaagtgctgaaagaaaagaattgttaatcttgaattttatacctggtgaaaatatcctttaggaatgaaggttaaataaagacattctcagatgaaagaaaactaatacagttcactacaaacagtcctgatctaaaagaattacgaaatgaaaattttcagataggaaatgacaccagaaggaaatatggagcatgaggaatgaaggaagagcaatataaatagcaaatatttgggcaaawataatagactgttcttctccttttaaggtgtttgaagtatatttgatcattgaaaaccaaaactataacattatctgatgggttttcaatgcatatagaagtaatatataaggcaaatacaacatgaaggatggaaggtaaagggatcttggaagaatttctacatcacatttaaagtggcaaatattgattcaaagcatgctgagaaagtttaagtttgtt

SEQ ID NO: 943812 - DNA, 781 bp, Homo sapiens
cttgtaaggtgtctgttaaggtattcagctcactttttaattgggttgtttgtgttcttattgttgagttttgagagtccttgtgtattttgaataacagtcctttatcaggattaaagaagaaaaatcatacgatcatatcagtagatgtaggctcctttagctcagaggagtttgttattacccaccgtctgaagcctacttctgtcaattcgtcaaactcatcatccgtccagttttgttctcttgctggcgaggagttgtgatcctttggaggagaagaggtgttctggtttttggaattttcagcctttttgtgctggtttctccccatctttgtgaatttatctacctttggcctttgatgttggtgaccttcggatggggtctctgagtggacgtcctttttattgatgttgatgtattcctttctgtttgttagttttccgtctaacagttaggcccctctgctgcaggtatgctggagtttgctggaggtccacttcacaccctgtttgcctgggtaacaccagcggaggctgcagaacggcaaagattgctgcctgtttcttcctctggaagcttcgtcccagaggggcacccgccagatgccagygagagctctcctgtatgaggtgtctctcggcccgtactgggaggtgtctcccagtcaggatacacaggggtcagggacccactgaggaggcagcttgacccttagcagagtttgaacgctgtgctggtagatctgctgctctcttctgagccatcaggcagggat

SEQ ID NO: 943813 - DNA, 765 bp, Homo sapiens
aggctttaagtcagaatctgacacttatttcagtccgtgtgtggcctgcccattattttatttaccacttccatccatgcctccttcctgcactgcgcacttgtctctgtcacagttttggtaagcccacaagctaacccaagccaaaatgagtgaaaaataaacgtcactagagagcttctttgaaaagagggaaagacccaatgatgagacagcagaagactctaagactgccaacaaaaagaaatcttcatttaaaagaaaatactaagagtcctacttaaattatggtttcattgcaccaagtgattcaccttctccaagcctgctttgtataatatgtggtgactggctatccaccgaagccatgaaaccttccaaactgctttgctacatggagatgaggcaccctgcattaaaagacaagcctttggagtttttcaaaagaaaaaaacatgaacacaaagaacagaagcaattagygaaggccaccacttcatcaaatgtgtctgcacagagagcatcattcttagtggctaactgcattgctaaaggtaagatgcccttcactattggtgaagagttgatcctgcctgctgctaaggacatctgtcatgaatttttttttttttttgagatggagtctcactctgttgcccaggcgggagtgcggtggtgtaatctcggctcactgcaacctccacctcccagattcaagtgattcccctgcctcagcctcccgaatagctgggactacaggcacct

SEQ ID NO: 943814 - DNA, 610 bp, Homo sapiens
aggaaacttagtttttaaaaccatcggatctcgtgagacttctccactatcacaagaacagcacaggaaagacccacccccatgattcaattctcttccactgggaccctcccacaacatgtgggaattctgggagatacaaaatgagatttgtctggggacacggagtcaaaccatatcattctgcccctaccccctcccaaatctcatgtcttcacatctcaaaaccaatcatgccttcccaacaacccccaaattcttaactcatttcagtattaactcaaaagtccacagtctaaagtctcatctragacaaggcaagtcccttccgcctatgagcctgtaaaatcaaaagcaagttaattacttcatagatacaatggggctacaggcattgggtaaatacagccattccaaatgagagacattggccaaaacaaaggggctataggctctatgcaagtctgaaatccagtgaggcagtcaaattgtagagctccaaaatgatctcctttgactccatgtctcacatccaggtcatgctgatgcaagaggtgggttcctatggtcttgagaagctctggccctatagctttgcagggtacagcct

SEQ ID NO: 943815 - DNA, 775 bp, Homo sapiens
tccaaacttttatgctctgcttcccttataaaactgagtatctttaacagcacccaagtcacctgttgaatgctttgctgcttagaaatttcctctgccagataccctaaatcatctctctcaagttcaaagttccacaaatctcttgggcagggggaaaatgcttcctgtttctttgctaaaacataccaagagtcacctttgctccatttcccaacaagtttctcatttccatctgagaccacctcagcctggactttcttgtccatatcactatcagcatttttgtcaaagccattcaaccagtctctagggagttccaaactttccsacatttccctatcttcttctgagccctccgaactgttccagcctctgcctattaccaagttccaaagttgcttccacatttttgggtatcttttcagcaatgcactctaatcttaccaatttgctgtattagttcattttcatgctgctgataaagacatacaagagactaagaaatctacaaaagaaagaggcttattggacttacatttccacgtggctggagacctcacaatcatggcagaaggtgaaaggcacgtctcacatggcagcagacaagagaagagagagcttgtgcagggaaactcccatttttgataccatcagatctcatgagacttattcactgtcatgagaaaggcatgggaaagacctgcccccatgattcatttatctcccaccaggtccctcccacaacatatgggaattatgggagccacaaggt

SEQ ID NO: 943816 - DNA, 612 bp, Homo sapiens
aatttttgtatttttagtagagactgggttttaccatgttggccaggctggtctcaaactcctgacctcaagtggtcaatccacccaccttggcctcccaaagtgctgggattacaggtgtgagccactgtgcccagctatgatcacatttctttttacatacatagaaactttttagggttatatgttgttttggaataaaaaaagcaactattcatggtattctgtaatttgataaaacaacctattagtaaattttatttaacttataaaatttgctatagattttttcttcttaaaatgtagttctttctctatgtacacacttgtatgcatgtacatgcatgcatatgtatggaaatcagtcttacccaagtcaggtagactgggaaatcagtcttaccaatgtcaggtagagctttatgtatttttaaaaaataccaatataagcartgtattattaacatgtttcaggtgccttttacccatgatatttttataatactgctaacatagactatctaaaaagaaatggaaagattcttattttataagattatttcttattcagggaataaattcattgtcatgtttgaatttaaacatagttct

SEQ ID NO: 943817 - DNA, 598 bp, Homo sapiens
tgcataagtaatgaggagccaaatgttaatccccaagacaatggggagaatatctccagggcatgtcagaagtcttcacagcaaccccttccatcacaggcccagtggcctagaagaaaatggttttgtgggccargcccagggtcttcgtgctatgtgcagcctagggacttggtgacctgtgtcccagccttcttcagccaccgatgaaagaagccaacatagagttcaggccatggtttcagagggtgaaagctccaagccttgacagcttccacatggtgttaagcttgctagaattgaggtttgggaaactccacctagatttcataagatgtatggaaatgcctggatgctcatgcagaagtttgctgcaggggcaggacactcatggagagcctctgctagggcggtgtggaagggaaatatggggctggagcccccacacagagaccctactggggtactgcctagtggggctgtgagaagagcgccacaccatcctccagaccccagaacagtagatccaccaacagcttgcactatgtgcctggaaaagatgcagacactcaatgccagcctgtgaaagcagcctgga

SEQ ID NO: 943818 - DNA, 598 bp, Homo sapiens
tgcataagtaatgaggagccaaatgttaatccccaagacaatggggagaatatctccagggcatgtcagaagtcttcacagcaaccccttccatcacaggcccagtggcctagaagaaaatggttttgtgggccaggcccagggtcttcgtgctatgtgcagcctagggacttggtgacctgtgtcccagccttcttcagccaccgwtgaaagaagccaacatagagttcaggccatggtttcagagggtgaaagctccaagccttgacagcttccacatggtgttaagcttgctagaattgaggtttgggaaactccacctagatttcataagatgtatggaaatgcctggatgctcatgcagaagtttgctgcaggggcaggacactcatggagagcctctgctagggcggtgtggaagggaaatatggggctggagcccccacacagagaccctactggggtactgcctagtggggctgtgagaagagcgccacaccatcctccagaccccagaacagtagatccaccaacagcttgcactatgtgcctggaaaagatgcagacactcaatgccagcctgtgaaagcagcctgga

SEQ ID NO: 943819 - DNA, 598 bp, Homo sapiens
tgcataagtaatgaggagccaaatgttaatccccaagacaatggggagaatatctccagggcatgtcagaagtcttcacagcaaccccttccatcacaggcccagtggcctagaagaaaatggttttgtgggccaggcccagggtcttcgtgctatgtgcagcctagggacttggtgacctgtgtcccagccttcttcagccaccgatgaaagaagccaacatagagttcaggccatggtttcagagggtgaaagctccaagccttgacagcttccacatggtgttaagcttgctagaattgaggtttgggaaactccacctagatttcataagatgtatggaaatgcctggatgctcatgcagaagtttgctgcaggggcaggacactcatggagagcctctgctagggyggtgtggaagggaaatatggggctggagcccccacacagagaccctactggggtactgcctagtggggctgtgagaagagcgccacaccatcctccagaccccagaacagtagatccaccaacagcttgcactatgtgcctggaaaagatgcagacactcaatgccagcctgtgaaagcagcctgga

SEQ ID NO: 943820 - DNA, 744 bp, Homo sapiens
ctatcagcatgtacttcctcccttctggagcctataaaaattcaaactcagccagactcaaagagagaggtcaggactactagctgtgggaaggagctactcactttgggtctcttcatcaagatgacctgcctgaggaaagaagctacccaccacaggtcttctcttaagctggacacttgttgggatgacctgactgtggaaaggtcatcttccatctatcctcacttccgtctaagacccgcactatgggtctcctctccactgagggccagatactcattgggatgacctgcctgcagaaaggatctacctacttcgggtctcctgagagctgttctgtcactcaataaagctcctcttcaccttgctcaccctccagttktctgcatacttcattcatcctggatgcgggacaagaaattgggacccatcaaatggcaggactgaaagagcagcaacgcaaacagggtttaaacatgcactgaaccccctctaacactcccctcccccaccccactgctcaccatgtcaagaaggaaagaagagcttcgacccttcagggagcccagatttaggggctccccgagccagggctgtagcatcttctttggggctctgtggttcctggcatttccaagcttttgggcaccaacgtattccccttgttcaggtgcctgcagtggaagccacttgtggtacatctggtccagccgcagcctcacacggagctagcacctgtgc

SEQ ID NO: 943821 - DNA, 629 bp, Homo sapiens
cattcttttttttgttttgtttttgtggcaagaagagctaaaatctatttatttagcaggaatctcaaatacagtacaattttatttgattacctatagtccccctcatgttgtacattagatctctagacttgttcatcttacatatttgttactttgtatcctctgacctacatctacccttttattttcttttttcttaaaacaaaacacaataaaaaccgtctattctttagtaataaaagatacgtattataaaacattcaaaagtgcaaaatgagtaaaatacatagtatgcataactcccgtttatcttctcttcaacactagtgtaaattactgtcaatattttaacatgcattttatagactttttctatttatgcacaattatatataaatgatggatatatattatatataatatgtcatatttaatayataatttatatatccaaatagaaaagcacttgattgaattactactttgtgttttatttattgctactgtagagttactagaaaggaggaagctatttcccctctacccctcctccccactttcctctctgcacctctatcctttcttcccatatccttatttagggttttgagtcaagagcagcttcc

SEQ ID NO: 943822 - DNA, 492 bp, Homo sapiens
aatcaattgaatcaattgaattgaattttgaattgaaatttgaattgaataattttgaattgaatattaaggatttctttatagatactatattcaagacagcgtagtattggcaggggaatagacacaaagatcaatagaacagaatagagaccmcagaaacagacaaatacaaatataacaaattggttttgacaaagttattaacacaattcaatggagaaacagccttttgaacacatggcactggagtcactgggtgtgcataggcaaaaaaattaatcccaacctaaaccttataccttatcaaaaattaactcaaatgtatcatgggtttaaatgtaaaaatataaaactattggaaaaattaggagaatatctttggaacctaaggttagagaagagttcttggacattacattaaaagcactatatataaactaagaaatgattaattcattgtcatgaaaattaaaacttttgcattgtgaa

SEQ ID NO: 943823 - DNA, 599 bp, Homo sapiens
gacaaaggtagtccaatgatcagactatagtctgaatggaactaaacctctctgaagcatttaaaatcatcaatctttcctttgttctgtaaacattttatttcagagatccttatattctcctgggtttccttctgtctcaggtacctcctctgattatttgatggattcttctttatagtcagtaaatgctgtactggctcaacattttctctctctttttctttgcctaggtaattgtgtccaaatataacagctttaaataccatctatatgctaatgactactaaatttatatcttcagtcccaacctcttccctgatttctccagagttatrtaatcaatcacgtacttgaaatgtccacttggatcccttacaggtatctcaaacctagcacaaccaaacaggatccttgattccttcttcacatagtagacttctcatttctacttcttgcccatcttaaacaatgggattaccattgaccaggttgctcagataaaacaatcttaagtattttctttgatttctctctctcagatttgtcatcaacacatcaacaagtctatcatgtttcccttcagaatatcacaaata

SEQ ID NO: 943824 - DNA, 600 bp, Homo sapiens
cctgacaatgtaatagaaaagaaaactgactttctggggagaaattcaagcccactgcagaaatttgcataagtaataaggggctgagtgttaatcaccaaggcaatgggaaaaatgtctccaggcatgtcagagactttcattgcaacccctcctatcacagagccagaggcctaggagggaaaaatggtttcctgggccaggtccagggcctcccctctgtgtacagcctcaggactttgttcctgatgctccaactatggctaaaagaggccagggtacagcttttcccattacttctgagggtgcaagcccctaamtttgacagcttccatgtagtgttaagcctgtaggtgcacagaagtcaagaattgaggtttgggaacctccacctagatttcagaggatatatggaaatgcttggttgtccaggcagaagtctgctgcagaggcagaggcctcatggagaatctctgctagggaagtgcagaagggaaatgtggggttggagcccccacacggagtcctcactggggtactgcttagtggagctatgagaagtgggccaccatccttcagatcccagaatggtagatccac

SEQ ID NO: 943825 - DNA, 600 bp, Homo sapiens
cctgacaatgtaatagaaaagaaaactgactttctggggagaaattcaagcccactgcagaaatttgcataagtaataaggggctgagtgttaatcaccaaggcaatgggaaaaatgtctccaggcatgtcagagactttcattgcaacccctcctatcacagagccagaggcctaggagggaaaaatggtttcctgggccaggtccagggcctcccctctgtgtacagcctcaggactttgttcctgatgctccaactatggctaaaagaggccagggtacagcttttcccattacttctgagggtgcaagcccctaaatttgacagcttccatgtagtgttaagcctgtaggtgcacagaagtcaagaattgaggtttgggaacstccacctagatttcagaggatatatggaaatgcttggttgtccaggcagaagtctgctgcagaggcagaggcctcatggagaatctctgctagggaagtgcagaagggaaatgtggggttggagcccccacacggagtcctcactggggtactgcttagtggagctatgagaagtgggccaccatccttcagatcccagaatggtagatccac

SEQ ID NO: 943826 - DNA, 654 bp, Homo sapiens
gattgtctagagcattttgcagttctacaggtgtgtccaaagtttcctgaattttttattgttttttctttaagctatctatttccttgaatgtttctcccttcacttcttgtgccattttttggatttccttgcattgggctttgcctttctttggtcctgattaccttaataactaacctcctgaattatttttcaggtaaatcagggatttctttttggtttggatccattgctgatgaactagtatgatttttgggggtgttgaagagccttgttttgtcatattaccagggttgattttctggttccttctcatttgggtaggccctatcagagggaaggtctggggttgaaggctgttgttcagattcttttgtcccacgggatgttcccttgatgtagtactctcccccttttcctatgratgtggcttcctgtgagccaaactgcagtgattattgtctttcttctgggtctagccacccaataagtctacccagccgtgggctggtactgggggttgtctgcacagagttctgtgatgtgagccgtctatgagtctctcagccatggatacctgggcctgtactggtggaggtggcagtggggggtgcaatagactccatgagagttcttagctttggtggttta

SEQ ID NO: 943827 - DNA, 741 bp, Homo sapiens
acacccactgggaaggctctgataaagaagacagataataacaaaatgtggcgaatcggaaccttcatacaatgctggtgggaatgtaacatggtacagcccctttggaaaacagtttggaggtccctcaaataggtaagcatagggttaccataagacccagaagtttcactgctaggtatatattcaagagaaataaaaacatgtgtccacacacaaaacttgtacagaatgttcatagcagcattatttataatagcttaaaaaattgaaacaacataaatgtccaccaatgaatgaatggatcaatgaaatgtgatatatccacacaatggaatatgattcagtcacaaaaaggaatgaagtactgatacatactacaacatagatggaccttaaaaacattatgctaaatcaaagaagccagacgcagaagatcacatattgtatgactccactcatacaaaatatctagaatagacaaatctatagagacagaaagtaaatgtataggctgggggrtggggaggtctggggagaaatgaagagtgtcagctaatgggcatggagttttgttagggggagatgaaaatgttataaaattgactgtgctggttcaaaactttgtgtatatactgaaagccattgaattgtatactttaaatgggtgaattgtatgatatataaattacatatcaataaagctgtcataaataattaaaaacaaaagacagtagcatt

SEQ ID NO: 943828 - DNA, 606 bp, Homo sapiens
ttaaattcatctactagacagtttaaatttaatgaccaatttctttttaataatcttagcaggcccccctagagtttcagccatttaaacagaacataacagaaatttccaaagaaataaaaggtgatttctttatacagcttctcacattcaaacacatttgcatacatggcccatctgaaaagctagaactaatgaaattatgaatgagattctcatttttctattctcagaatcctctccctcctggcatctttcaaaactctaatctgaaattattccctccaggaagttatccttgattaatcactcccaactctaattatgtatttcttcattatataaacaagagctgtggatacagttccagttaggttcaccttctctcrttcatatatggatttaaagtttcctgagtcttgggatgtgagtgtgttcttgggcagggatgtcttctgtctctgtgtagccattccttccctctaccctcatccccaggactgctttaagcaaagacaaaagaggaacttatttactggtgtaataaaaaatcctgggccctgcaaattgccagaactgaagtgaaatttgagctctgctgatact

SEQ ID NO: 943829 - DNA, 753 bp, Homo sapiens
tgggattataggcatgtgccaccgcgcccagcaaatttttgtatttttagtagatgggggggtttctccatgttggccaagctggtctcaagctcctggcctcaagtgatcctcatgccttggcctcccaaactgttgggattacaggcatgagcccccataccaggccaagatttccttcctttttaaggctaatattccattgtatgcatgtgtcacatattgtttattaattcatctgtggatggatacttgtttgcctctacctttggctactatgaataatgctactatgagtatgggggtaaataagttggttttaattttatagaatgtactttttttttgaggcagggtcttgctctgtctcccaggctagagtgaggtgacacaatcaagactsacagtagcctcaacctcctatgctcaagccagcctcccaagtagctgggactacaggcatgtgacaccacacctggttaatttttttaattttttgtaaagatagggtctcactatgttgcccaggctggtctccaactcctggcctcaagcaatcctcccgccttagtgtcccaaagtgctgggattacaggtgtgagtcaccatgccccccggccaaagtgtacttttaaaaaagaaaagagtcaggctcactggcctgactctatagtcccagctactcaggaggctgaggcaggaggatcacttgagccaggagttccgggctgtagtacgctataatcatgcctg

SEQ ID NO: 943830 - DNA, 759 bp, Homo sapiens
ccaggtccttggagccccccgcatggcccacccggccccatttctccacttggctggctgcaggtctgctggttccctggttttataaactccattttccaaggatgtgaaaacgtagcaataggtcccactatataatagctcttacttgctttagcctctgtgtgtgtctcgagatgtacattttttatactatatattaggcttctcccaagaagcagaatcaatagaggggtggagggtatacgtgtaagaaagagatrtatttttcaactcatgtgattgaagagtgacaagtccaagatcttcagggcagcctggagccccagggaagagttgatgctgtgcttaaatagaaggtcacttttttttttttttgagacacagtctcgctctgtcacacaggctggagtgcagtggtgtgatcttggctcactgcaacctccacctcctgggttcaagtgattctcctgcctcagcctcccgagtagctgggattacaggtgcatgccaccacgcccagctaatttttgtacttttagtagagatggggtttcaccatgttagtcaggctggtctcaaactcctgatctcgtgatccgcccgccttggcctcccaaagtgctgggattacaggtgtgagccactgtgcatggccagaaggccactttttagcagattccctcttctttggggaaggtgggtcttctgtctcttaaagctgtcaactgattggatgaggcccacccccattgtgaa

SEQ ID NO: 943831 - DNA, 759 bp, Homo sapiens
ccaggtccttggagccccccgcatggcccacccggccccatttctccacttggctggctgcaggtctgctggttccctggttttataaactccattttccaaggatgtgaaaacgtagcaataggtcccactatataatagctcttacttgctttagcctctgtgtgtgtctcgagatgtacattttttatactatatattaggcttctcccaagaagcagaatcaatagaggggtggagggtatacgtgtaagaaagagatatatttttcaactcatgtgattgaagagtgacaagtccaagatcttcagggcagcctggagccccagggaagagttgatgctgtgcttaaatagaaggtcacttttttttttttttgagacrcagtctcgctctgtcacacaggctggagtgcagtggtgtgatcttggctcactgcaacctccacctcctgggttcaagtgattctcctgcctcagcctcccgagtagctgggattacaggtgcatgccaccacgcccagctaatttttgtacttttagtagagatggggtttcaccatgttagtcaggctggtctcaaactcctgatctcgtgatccgcccgccttggcctcccaaagtgctgggattacaggtgtgagccactgtgcatggccagaaggccactttttagcagattccctcttctttggggaaggtgggtcttctgtctcttaaagctgtcaactgattggatgaggcccacccccattgtgaa

SEQ ID NO: 943832 - DNA, 759 bp, Homo sapiens
ccaggtccttggagccccccgcatggcccacccggccccatttctccacttggctggctgcaggtctgctggttccctggttttataaactccattttccaaggatgtgaaaacgtagcaataggtcccactatataatagctcttacttgctttagcctctgtgtgtgtctcgagatgtacattttttatactatatattaggcttctcccaagaagcagaatcaatagaggggtggagggtatacgtgtaagaaagagatatatttttcaactcatgtgattgaagagtgacaagtccaagatcttcagggcagcctggagccccagggaagagttgatgctgtgcttaaatagaaggtcacttttttttttttttgagacasagtctcgctctgtcacacaggctggagtgcagtggtgtgatcttggctcactgcaacctccacctcctgggttcaagtgattctcctgcctcagcctcccgagtagctgggattacaggtgcatgccaccacgcccagctaatttttgtacttttagtagagatggggtttcaccatgttagtcaggctggtctcaaactcctgatctcgtgatccgcccgccttggcctcccaaagtgctgggattacaggtgtgagccactgtgcatggccagaaggccactttttagcagattccctcttctttggggaaggtgggtcttctgtctcttaaagctgtcaactgattggatgaggcccacccccattgtgaa

SEQ ID NO: 943833 - DNA, 593 bp, Homo sapiens
gttttccacttcccttctgcccaggaactggttcttggctgtacttcccttgcttttgttacagtccaaatacaagtctggccctccccatccagcatactccagatcctactagggttacagagctttgctgtcctccttaaagggagaggaattatggcccctgtgtaagtagcaagtcaccttcttacaccagtatccagagccttccataacttgctctcaccctgtctagacagcttctctgccmtgtcctgtccaacggctccctccttgcagtgaggctgttcttactcttgaggacaacagactcagactgatcccccactggggttttgcttacactggggtggtccctcattcagaatatccacctccttactctcattttttttgtaacagttcctttaggtcctacttcaagatgtactctctctgtgatgctttcatgtgacagttcagatcatctgatttttaccccttcttatgcacacatagcacctatgaatttggccttgactcattgttatcctctgattgttctaggaatgggtgtatcatcttaccagttagcttataaaggtctgccaagg

SEQ ID NO: 943834 - DNA, 593 bp, Homo sapiens
gttttccacttcccttctgcccaggaactggttcttggctgtacttcccttgcttttgttacagtccaaatacaagtctggccctccccatccagcatactccagatcctactagggttacagagctttgctgtcctccttaaagggagaggaattatggcccctgtgtaagtagcaagtcaccttcttacaccagtatccagagccttccataacttgctctcaccctgtctagacagcttctctgccatgtcctgtmcaacggctccctccttgcagtgaggctgttcttactcttgaggacaacagactcagactgatcccccactggggttttgcttacactggggtggtccctcattcagaatatccacctccttactctcattttttttgtaacagttcctttaggtcctacttcaagatgtactctctctgtgatgctttcatgtgacagttcagatcatctgatttttaccccttcttatgcacacatagcacctatgaatttggccttgactcattgttatcctctgattgttctaggaatgggtgtatcatcttaccagttagcttataaaggtctgccaagg

SEQ ID NO: 943835 - DNA, 638 bp, Homo sapiens
ccccacaggaagggaggctttcagtttgtttcagatgcttgcgttcactcactcattcccacgtgggggacacctacatgccaggcgctattcacctttctcatatcctttttctcaagaactcagtggaatgtgctccctgtgccctgtgcaccctgaaaggtaataaatggaatgagatgagtggtcaggagccctttggagatgcaagatcctccctcctaccactcaacaggctgatgagttgaggtttctaatttctagaaaaggtgttgtcctcttgccccccctaacaactgctttctccagtccaggagagcttaacaaaagctattcagggccttattctctcctcgtcccaccttgaaggccctggggtctgtctagcagagggaggcaaaccctggccagcctctcaccctgtgctgcctaaaagcgtacrgcctagatctgcctcctgcctgaaggcggacctggaggaaggaagacagcgacaagaggtgcaggtagcttcccacttaggtgcacccagcgtcccctatttgggaggcttgcagcttggcagtcccccagagcggacccactgccagaagtatgtcgccagcttctttcatccaagccagagatgtctgtcatat

SEQ ID NO: 943836 - DNA, 568 bp, Homo sapiens
ctagtgttttatgagaggtagaacctctgagcaatgaaaccagatatttagctaaacagttttctaagcaaagtgttgaaagagtggccttgttcctcctgacaccttatagaaaaatacaaggggaaataaattaattgaatatgaaatttaagcaagcaaaaaggaaccaaaattaaagattttgaaattctcagcctgtccattgtacaaaaactaagaaagtatatttgacatacaacaataaaggtgtgacagactgagcacttagtaaggatattaggctgggtgcagtggctcattcctgtaatcccaatgctttcagaggctgaggtgggaagattacatgagaccaggagttwgagaccagcctgggcaacacagaaaggagagacataaatttataagttcaagaatttcacagaacctcaagcaggataaatttgaagaaaatttcctaagcatattatagtcaaactactgaaaactaaagataaagagaacatcttgaaagcagccaggaaagactggcatataacataaaaggggagcatgatttaaatggcag

SEQ ID NO: 943837 - DNA, 595 bp, Homo sapiens
ggggttcagtcggcaggaattgttcctgcctatttacattgtgcctgtcacctggctttagatccctcagatctggttttcctttctagggcctcagcctgaagcttggaatcaagtttgggactcaaggggctgcatgtatctgtttagagtgtctcaaatgagtcctgctaaatttgcagttatcagccagcaggggtcattcctctgctaacttccctagcagaaggagcgtgctggagaggcgaaccctctcactcagaaaagcaacaaataaaaaaatttaaaaaaccagtttaaggggccaaagggggagctcctgsgggaagaatcccttgctcagtgcaggtgggtccctttaatccttgtatccttttcccacttcaggctaggttgaattctttggccaggggagaaaaagttctgttggtatggtgggtggggagtaccagccaattggccctgcagggtccctgtggtagccacagttttctcccaccccttgtggccaccgggcatgggctttgcatgctgtgaacgtgcccaggtgcctgagctagtaggggagagggtaggaagaggaggtgctgtgagc

SEQ ID NO: 943838 - DNA, 620 bp, Homo sapiens
tcactgtatggatatatcacaatttgtttatccatgcattttttttgctggacatttaggttgtttcaagtatttggctattattagtagagctctgtgaacatttttgtacaagtcttttgttgaacattaaaaaaaatttaccttgggtgtagaatttacctaggagtagaatcactgggtcatgtgttatgtgtatacttaactttataagaaactgccaaggtgttttctagagtaattataatacttgacactcacactagccatttgtgactttcagtaactttacgtcttagtsaacacttaatattatgtgtcttataacttttagccattctagctaccatatagtaaatgtatggttttactttgtattttcctgatgactaaaaatagtgagacttttccagtacttactgtttatttgtatatcttcatgtgtataatgtttattcaagttttttaccattatttttattgcttttgtttttaacattaagtctgaaaattactttccatgttctgagaacaagtcttttgcgatatatatgaaatgcaaatattccctcatagtctgcagcttgccttttcattttcccaacgttgcatttcaatga

SEQ ID NO: 943839 - DNA, 657 bp, Homo sapiens
acaaattgtttgtaaaacatgtgtgtttaaaagatatgaaatctttaggatatgggcatcctaaaaaagaacaggataacagcgattttcagggaacaagggagataaccataaggtctgactgcctgcggggcctggcagaacagagtcatatttctcttcttgcagaaagcaaataggagaaatatcactgaattttcttcctagcaaggaaaaaccctgggaaaggaatgcattcccaggggtaggtctattgatggccgctctgggagtgtctgtcttatgtggttgaagataagggatgaaatatgccctggtctcctgcagtgccctcaggcatacgaggattgggaaattccagcctggtaaattctagtcagaccggttgtctgctctcaaaccctgtttyctgttaagatgtttatcaagacaatatgtgcccagtgggacatgaaacctcatcagaaattctaatttcgccctggccttatgatcttgctctgcccttctgcaataaaaattgccctttgaagcatgtgatctttgtgacttactccctgtttgtactcccctccccttttgaaatccctaataaaaacttgctggtttcgcagctcaaggggcatcacagaaactgccaatatgtgatgtcacccc

SEQ ID NO: 943840 - DNA, 613 bp, Homo sapiens
agcacatgccaccatgttcagctaattatttttatttttgtagagtcagggtttcaccatgttacccaagctggtctcaaattcctgggctcaaacaatctgcccaccgtggcttcccaaagtgctgattacaggtgtgagccactgcgcccagccagcagctctctttatattaagaaaattaaccttttgtctaggataggagttgcaattttttccctcaatttgatatttgcgatttcattttatgtatagagtggggggattttgttcttttgttttggtttgtgcgacgtagaaattttacaaattttacaaaaacatatgttcatgtgagwacattgctggggtctctccccagggccttggaatgcaacaatccaagtgaggggcttcccagtaagtcggcttctaaaggaaggactcttaggaaacatatttatttagagatttaaataatgagaaagcagtaaatgtgcaaaaatatagagaaaggatgttttggaggagtgacttatcaaagaataaattggagatgtttgaggaattaaaagaaagccattgtgtaaggaatatagcttcactacctacttcacctttcgaacaaactcaa

SEQ ID NO: 943841 - DNA, 661 bp, Homo sapiens
cagacccgttaactggctcaaccagttctgccatcccacccaggaacagaagacagcaagaaaaactcacttcgacccatttgattccatctccagcctaaccaatcagcattccccacttcccaagcccctactcgccaaattatctttaaaaactctgatccctgatgctcagggagactaatttgagtaataataaaactccagtcctcctgcacaaccagctctgcctgaattactctttctccattgcaattcccctgtcttgataaatgagctctgtctaggcagtgggcaaggtgaacccattgggtggttacaaggatagatcaggaaacagaatgggcaaaactccctgcctgtctttgagtaacttacattctggtagggaagatttcaccaagataagagataccaaattcctcttacttcctttttgataggattaaatagattgatgttttagtgaagatcmatctaggctcgtcttggttttgactgcttgaccagtgatttgaggggagattagaaatttgtaaaaaacacaaagctaggagcagtttttaatatgataagtgacacagaaccacagttaccattgggtgcaaacatgcatgggcaaacaaattccatacaaataataaaatacagcaaccttaat

SEQ ID NO: 943842 - DNA, 511 bp, Homo sapiens
agctgacacaacaatgattccattaaactggaagttaagattgccacctggacactttgagctcctcctacttttaagtcaacaggataagaagggagttacagtgttggctggggtgattaacccggactgtcaagacgaaatcagtctactattccacaatggaggtaaggaagagtatgcatggaatacatgagatccattagggtctctccttagtattgccataccctgtgattaaggtcaatggaaaactgtaacagtccaatctaggcagaactacaaatggcccagacccttcagaaataaaggtttyggtcactccaccaggaaaaaatccacaacctgctgaggtgcttgctgaaggcaaagggaatacagaatgggtagtagaagaaagtagttatcaataccagctatgaccatataatgagctgcagaaatgaggactgtagttgtcattatgatttcctccttcttttgttaaaaacatgtttgtgcatgtacacac

SEQ ID NO: 943843 - DNA, 664 bp, Homo sapiens
ttgctgttaacacccctggattcagcctctttcctagggttatatacaggagtctaacctccaactttgctggggctgcagctacttttaccagaaaacccaagtatctaagccttcgaggactccatgctggcctgagtggctgctctgccaagactccacatagctctgtgtattagactgaagactgaaagccctggtggagtgggttcacaaggagatctcctgacttgagggttgcaaagacctaatgctcaccccttctgttcctttccatgacagccacacacactagctgcttctggtcagccatcttgcccactcctccacttctcctctagttttcttaaggtttgaattggcattcttttttcaatttttttctgattcacagctttgttactttattgtatttcttttcaaaagattgttacttctgattttagcwttggctacatctcataaatattgctttattttattcatatgtaccttgtatattaataagcaatttggcaccttatacattaaggggtattgaagaagggaggaggctttgatatctgcaatgttagtttggattcccaccccttcacttactagctgtgtttctgaatttctctggcctaagtttattcatctgtgaagttggtataacagtaaa

SEQ ID NO: 943844 - DNA, 593 bp, Homo sapiens
ccatgggaggtgacacaccttaaaaccgtcaactctcgtgagaacttactttctatcaggagaatagcaaaggaaaaatctacccccatgacccagtcatctcccaccaggtccctcctctgacacatggggattacaattcaagytgagatttgggtacggacacagagttaaaccatatcagtggccccactgctgggggcatcaaggttgctaccaatggctcacactttgacctggtggcagcagctagcagaggcagtggctgggggtggagtatgtccatggggttccagggatgtggagatgcatgggctgttgtgcccagggcaggatgcaatctgttaggggctgggcttttaaggtggcactgtgctgtagctgcttaggactcagggagtatgtgggatccagtgtgagctccctctctggagcaatgtcatcatatggtcttcaggaagctctctagattagtctaggacccacatagattgatggttttcctgtggttaagattgcaggagttcttggtggaaatgtggatcactggggttctctcacttatgctttgctctcattggggagcctctgca

SEQ ID NO: 943845 - DNA, 570 bp, Homo sapiens
tgcagccatatggatagacctggaggccattatcctgagtgaattaatgcagaaatagaaaattagatactacatgttttcacttataagtgggagctaatcattgggtactcatggacataaatatggcaacaataggcactgggaagggagaggagggrcaagggttaaaaacctacctattgggttctgtgctcactgccttggtgatgggatccataccccaaacctgagcatcatgcaatatacccaggcaacaaacctgcacgtgtactcctgaatctaaactaaaagttgggaaaaaaaatgaaaaaaatagaaatggcttcatgaatttggacaatctgatggcttacatgcatgaggtagaaatgccagaagtttcataggatagtgttgagaaataggtcacaaggcccaaagtagtagcaaagacagcatgaatttaccaggtaacggctgagaacctaccacctcactatgttttcagaggatacttttttctgtaaggtactaaataatgcatgggtgtggggtacttacgcatctttgagaagcttggggatggtt

SEQ ID NO: 943846 - DNA, 544 bp, Homo sapiens
cagtgtggcagggagagccagggagggagtgctgggtagggagatgtaggagagggcagcagggccaggcaagcaagaccttgtaggacttattaaggagtgtggtctttatcttaagatcaataggaggcaactaatgtacttttaaggaagaaaatgatatgaacagagttgtgttttgaaatgcrctctggctgctgtgtggagaacaaattggaggggagccagtgtggatataagggtaccagggggctcttgtggtaccccagaaatgtgaagatggtaccatgaactaggatgatgctggtggagatggaaagaagtgaaagatttgagagatatttacaagctaatatcaacaagatatggggacggattggatatgggttttgagggagagaggtgttgaggatgactgccaggtctgtctgccttgtgcagctacccagacgaaggagtcattcaacgaaatctaaaatacctgaagaggaccaggtttcagtaggatgaagaactacagaaattctgttttggacacattgag

SEQ ID NO: 943847 - DNA, 487 bp, Homo sapiens
tgccatccgtgttctcctggaagcctgcagtgacaagcagagagtggacacgccttacactcgggaccaggtaagacgcccagaaggcactgagcacagggcccatagccatggagacagaagttaggaggccagcacgtagtttctgaggcaggggagagagcatgggagtcctgttagttttgcatgctgkaggagggcaaatattctccacgtttctcattgactttgtagcctctctatgagaactcctaccctctttgcccatcccattatgagctttacatgctgcaggaaggtaaaagaatatattttctgtgtctctcattgaccttgaagcctccctacgagatctcctacctgctttgcccatcccaaccactgtagggccttcctcaatctctgttcagattgcctattctgggaggcggaaagacccatggaaggtgcctagacctcctctgaaggtctgtgtcctggtcatgtt

SEQ ID NO: 943848 - DNA, 487 bp, Homo sapiens
tgccatccgtgttctcctggaagcctgcagtgacaagcagagagtggacacgccttacactcgggaccaggtaagacgcccagaaggcactgagcacagggcccatagccatggagacagaagttaggaggccagcacgtagtttctgaggcaggggagagagcatgggagtcctgttagttttgcatgctgtrggagggcaaatattctccacgtttctcattgactttgtagcctctctatgagaactcctaccctctttgcccatcccattatgagctttacatgctgcaggaaggtaaaagaatatattttctgtgtctctcattgaccttgaagcctccctacgagatctcctacctgctttgcccatcccaaccactgtagggccttcctcaatctctgttcagattgcctattctgggaggcggaaagacccatggaaggtgcctagacctcctctgaaggtctgtgtcctggtcatgtt

SEQ ID NO: 943849 - DNA, 715 bp, Homo sapiens
ctggtgagaaaaattgatgcctcagacaatatctacaccacagagtccaccacagggaacctgttcagcctgacccaggagggggctcccttgtgccgcatcatagccaaggtgagcttcatggttagggaccaaaatggcaggcctggggaagtatgaggaagctcacttgttcaatgggaatagctggctcacgaggtctgtcttggcccctgcattagctgctgagtctccttgggagagtcacttatcctatctgggacttggtgtgtgcatttttttttttttttttttgagacgggagtctcactctgtcacccaggctggagtgcagtggcgcgatctcggctcactgcaagctctgcctcccgggttcacgccattctcactgcctcagcctcccgagtagctgggactacaggcgcctgccaccacgtccggctaatttttgtatttttagtagagacggggtttcacsgtgttagccaggatggtctcgatctcctgatcttgtgatccgcctgcctcggcctcccaaagtgctgggattacaggcgtgagccaccgtgcccggccggtgtctgcatttttagtaggtggctagcccctctgatttcatttcccacttgagacagaaatctggtgcccccagagcctctatcatctttctttatgggtatatgttataaatatcaaccgtctttctccatctcca

SEQ ID NO: 943850 - DNA, 742 bp, Homo sapiens
aacttttctctctcttcttaggcactggtgagaaaaattgatgcctcagacaatatctacaccacagagtccaccacagggaacctgttcagcctgacccaggagggggctcccttgtgccgcatcatagccaaggtgagcttcatggttagggaccaaaatggcaggcctggggaagtatgaggaagctcacttgttcaatgggaatagctggctcacgaggtctgtcttggcccctgcattagctgctgagtctccttgggagagtcacttatcctatctgggacttggtgtgtgcatttttttttttttttttttgagacgggagtctcactctgtcacccaggctggagtgcagtggcgcgatctcggctcactgcaagctctgcctcccgggttcacgccattctcactgcctcagcctcccgagtagctgggactacaggcgcctgccaccacgtccggctaatttttgtatttttagtagagacggggtttcaccgtgttagccaggatggtctcgatctcctgatcttgtgatccgcctgcctcggcctcccaaagtgctgggattacaggcgtgagccacygtgcccggccggtgtctgcatttttagtaggtggctagcccctctgatttcatttcccacttgagacagaaatctggtgcccccagagcctctatcatctttctttatgggtatatgttataaatatcaaccgtctttctccatctccacac

SEQ ID NO: 943851 - DNA, 704 bp, Homo sapiens
aaggctaaagggcactggcataccacatttgaagtgctcaaagaaaaaaagtgtcaagaatcctatagccagtggagctatctttgaaaaataaaggtaaaataaagagattcccttatgaacaaaaactgtgaaaattttgttactaacagacccactttaaaagaaatactaaagaatgcttcaggaaaaaagcaaatgcaataattcaatgtttgaaattattmatcatcaggcaaatgcaaatcaaatctacaatgagataccatttcacacctactaggtataatcaaaaagttggataatagtacgtattgatgaggatgtagagaaacgaaacatacgcaaactgctggtgagaaggtaaaatgattgtattagttcattttcacattgctataaaaacttccctgagactgggtaatttatgaagtaaagaggtttaagtgactcacagttccacacaggtggggcggcctcaggaaacttacaatcatggcagaaggggaagcatttaccttcttcacaaagtggcaggaaagagcatgaacatgtgaaggaggaactgtcaaacagttataaaaccatcagatatcatgaaaactcacttactatcacaagaacagcatggggaaaaccacctctatgatccagtcacctcctaccaggtcccttccttgacacatgaagataatggggattac

SEQ ID NO: 943852 - DNA, 762 bp, Homo sapiens
ggctaaagggcactggcataccacatttgaagtgctcaaagaaaaaaagtgtcaagaatcctatagccagtggagctatctttgaaaaataaaggtaaaataaagagattcccttatgaacaaaaactgtgaaaattttgttactaacagacccactttaaaagaaatactaaagaatgcttcaggaaaaaagcaaatgcaataattcaatgtttgaaattattcatcatcaggcaaatgcaaatcaaatctacaatgagataccatttcacacctactaggtataatcaaaaagttggataatagtacgtaytgatgaggatgtagagaaacgaaacatacgcaaactgctggtgagaaggtaaaatgattgtattagttcattttcacattgctataaaaacttccctgagactgggtaatttatgaagtaaagaggtttaagtgactcacagttccacacaggtggggcggcctcaggaaacttacaatcatggcagaaggggaagcatttaccttcttcacaaagtggcaggaaagagcatgaacatgtgaaggaggaactgtcaaacagttataaaaccatcagatatcatgaaaactcacttactatcacaagaacagcatggggaaaaccacctctatgatccagtcacctcctaccaggtcccttccttgacacatgaagataatggggattacaattcaagataagatttgggtggggacacagagccaaaccatatcattctggccctggcc

SEQ ID NO: 943853 - DNA, 663 bp, Homo sapiens
agcactaaaagacattttataagcccaggctggctgtgagtgtcatgaggactccaagactgatgtatcttttggggccagatggacctggggaagaccaaccaagggcctgagttgcgtgggaatgctgtccgaggatcagagaccagcagactgtcctggtgatccaagcaagcatgtttcccagcaggtctccacatgagttgggtggttccctgactgtagtgaaargtgctggagttgcgactgggccccttcaggatctgctttgagaaggaggctgatggccctgtgtaattggccctgatgggcatacattacccagcaggcccccgcacaagttggatatttcctctgttttaacaggagaggccagaactgagactgagaccccttggtatctgctatgggatagaagctgaaaagtattgtctctactcagaagggtgcattttgcctaccaaattcttaaacagatagcatagtttctgattgcagcaggcagggactggagctgagactgggtcccctcaggatctgctgtgggatgaagctggagatcctcatctctttggttcagaggagcacgagtctcccagcaagtccctgtgcaggcaggataggtctctgcagtataaggactggagctgggtctatacccct

SEQ ID NO: 943854 - DNA, 663 bp, Homo sapiens
agcactaaaagacattttataagcccaggctggctgtgagtgtcatgaggactccaagactgatgtatcttttggggccagatggacctggggaagaccaaccaagggcctgagttgcgtgggaatgctgtccgaggatcagagaccagcagactgtcctggtgatccaagcaagcatgtttcccagcaggtctccacatgagttgggtggttccctgactgtagtgaaaggtgctggagttgmgactgggccccttcaggatctgctttgagaaggaggctgatggccctgtgtaattggccctgatgggcatacattacccagcaggcccccgcacaagttggatatttcctctgttttaacaggagaggccagaactgagactgagaccccttggtatctgctatgggatagaagctgaaaagtattgtctctactcagaagggtgcattttgcctaccaaattcttaaacagatagcatagtttctgattgcagcaggcagggactggagctgagactgggtcccctcaggatctgctgtgggatgaagctggagatcctcatctctttggttcagaggagcacgagtctcccagcaagtccctgtgcaggcaggataggtctctgcagtataaggactggagctgggtctatacccct

SEQ ID NO: 943855 - DNA, 608 bp, Homo sapiens
ctgttgtaaataatgctccaataaacatacgtgtacatgtgtttttgtagtagaatgatttatattcctttgggtatatacccagtaaagggattgctaggtcaaatggtatttttggttctagatccttgaggaatcaccacactgtcttccacaatggttgaactaatttacactcccaccaacagtgtaaaagcattcctatttctccacatcctctccagcatccgttgtttcctgactttttaatgatcgccattctaactggcatgagatggtatctcattgtggttttgatttgcatttctctaatgaccagtgatgatgagctttttttcatatgttcattggctgcataaatgtcttcttttgagaagtgtctgttcatatcctttgtcccctttttgatggagttgtttggttttttcatgaaaatttgtttatgttccttgtagattctkaatactagctctttgtcagctggatagattgcaaaaatgttctcccattctgtaggttgcctgttcaccctgatgtgcagaagctctttagtttgattagatctcatttgtcaattttggctttttttgccattgcttttggtgttt

SEQ ID NO: 943856 - DNA, 752 bp, Homo sapiens
actgacactgcccgattgcctcagaagcctacaggaccatcacagatgctctaagtaactctcacagtagaaagtaagtccatccccttcttaatcaatacagaggctactcactccacattaccttcttttcaagggcctgtttcccttgcttccataactgttgtgcatattgatggccaggcttctaaacctcttaaaactccccaactctggtgccaacttagacaatactcttttaagcattcctttttagttatccccacctgcccagttcccttattaggaccagacactgtaactaaattatctgcttccctgactattcctaggctacagccacacctcattgccaccttttcccccagttcaaagcctccttcacatcctccccttgtatctccccaccttaacccacaagtataagacacctctactccctccttagtgaccgatcatgcaccccttaccatcccattaaaacctaatcacgcttacctcgctcaatgccaatatcccatcccatagcacgctttaaaaagattaaagcctgttatcactcgcctgttacagcatggccttttaaagcctataaaytctccttaccattcccccattttacctgtcctagaaccagacaaggcttacaggttagttcaggatctgagccttatcaaccaaattgttttgcctatccaccccatggtgccaaacccatatactctcctatcctcaatacctccctccacaac

SEQ ID NO: 943857 - DNA, 752 bp, Homo sapiens
actgacactgcccgattgcctcagaagcctacaggaccatcacagatgctctaagtaactctcacagtagaaagtaagtccatccccttcttaatcaatacagaggctactcactccacattaccttcttttcaagggcctgtttcccttgcttccataactgttgtgcatattgatggccaggcttctaaacctcttaaaactccccaactctggtgccaacttagacaatactcttttaagcattcctttttagttatccccacctgcccagttcccttattaggaccagacactgtaactaaattatctgcttccctgactattcctaggctacagccacacctcattgccaccttttcccccagttcaaagcctccttcacatcctccccttgtatctccccaccttaacccacaagtataagacacctctactccctccttagtgaccgatcatgcaccccttaccatcccattaaaacctaatcacgcttacctcgctcaatgccaatatcccatcccatagcacgctttaaaaagattaaagcctgttatcactcgcctgttacagcatggccttttaaagcctataaackctccttaccattcccccattttacctgtcctagaaccagacaaggcttacaggttagttcaggatctgagccttatcaaccaaattgttttgcctatccaccccatggtgccaaacccatatactctcctatcctcaatacctccctccacaac

SEQ ID NO: 943858 - DNA, 579 bp, Homo sapiens
cacttgccccatgtccccgcctctatccctccacctgccacatgccagccagaatgacctggtgaaacatgggtagaatcaggtccctccctgctcaaaacccccacagcccatcttattcaccattaaagccaaagtcctctcaatggcctccaaggccccacatgctcgaatccaaccacagcttctacatttctcctccctgctcattttgttccagccaggctggcccactcaacagataccaagcacagtcccatcttgcaccactgcccttccttctgcctgcaatgccctcccgcagacagccacrcggctaactccatcacagttttcagatggctgcccaagttcccctccatgaggcctaccctgaccaccctatctaaaagaacagcccgtgttgccccacacagaatgccttcaccttacaaataatatatctatttctttatctttgtcttccctactggactagcggctccacaagagcaggcagtttgccttttgttcactgacgcagccccacatgtgaaattgtacccagcatataatgtgagttcaataaatgctaactta

SEQ ID NO: 943859 - DNA, 645 bp, Homo sapiens
atcagtatacagagcttcttcttgaagtgtgctgtccaatatgctagacaccagacatgggtggctatttaattttaaatacaaattaataaaacttaactgatactgagttaatttcacagttgcattaaccacgtgctaagtgatagctatctgcgtctagtggctaccatattggatagcacctgctacagataattttcattattgcagaaagttctattagactgctttgctctagatgcttcttccatttttctagtcatcttcttttccgtcagatataacttactgtgctagccaggtgttgttagacccagccaatgggtagggtttyttccatgccttatccttaacatgatgcagcatggatgaacttgctggacattagtattcatatctttgaggacattatgctatgtgaaataagtcagccacaaagagacaaatactacatgattttacttatataaggtatctaaagtagtcaaacacatagaaacagaaagtggaattgtagctaggggaggggaaaatggggagttgttcaacgggtatacagtttcagtattgcaagatgaaaaagttctagagatgtggtgcacaactatttgaatattgtaagaccgttgaattggatactta

SEQ ID NO: 943860 - DNA, 571 bp, Homo sapiens
tctttataagccttatcttctctgtgctaaaacaattgattgattgaatcataataatgacaagcataaaagcagtgaagccttctcccttagcattggggaggtggaggggccaagccaagtggtcacttgcttgcatttttcacattattagtgatctkacatggatttgcgttggtttttcagggttgcctttcctagatactactcagttttcttttttttccttatgcaaccgtaccccataaggagcttcttaccatgaagctccattacagtagggcagacctggaaacacatgcttttgttcaacactcccccacttttatttttgctttcagagagtctatgaacattttccaggcgaatccacccaccctggtagagaccctcaagggaccaggaacacaggatccaaggatagggcaggaaaattccacctcaatccctctccccaagttccctatttctcctcccctatattctaaccgtaggcctgctgaggccccaggggtgggatactgcacttaaagcctttaaacccatcaagattaaggtgttttttttttgc

SEQ ID NO: 943861 - DNA, 571 bp, Homo sapiens
tctttataagccttatcttctctgtgctaaaacaattgattgattgaatcataataatgacaagcataaaagcagtgaagccttctcccttagcattggggaggtggaggggccaagccaagtggtcacttgcttgcatttttcacattattagtgatcttacatggakttgcgttggtttttcagggttgcctttcctagatactactcagttttcttttttttccttatgcaaccgtaccccataaggagcttcttaccatgaagctccattacagtagggcagacctggaaacacatgcttttgttcaacactcccccacttttatttttgctttcagagagtctatgaacattttccaggcgaatccacccaccctggtagagaccctcaagggaccaggaacacaggatccaaggatagggcaggaaaattccacctcaatccctctccccaagttccctatttctcctcccctatattctaaccgtaggcctgctgaggccccaggggtgggatactgcacttaaagcctttaaacccatcaagattaaggtgttttttttttgc

SEQ ID NO: 943862 - DNA, 600 bp, Homo sapiens
ttgggaaattttcttcaccagccctttgaacaagtcagggtaggaggggaatggggcttggagaataagacaagaatgacaaggtatgtgtacaattaaactcatagtgaagaatttctcattcgttagaaagcttgatggagaaaagtaacacaacctttagagaatttgaaccmctgctctcctgggcccatttcacagtctaggtaaagtcatgggaaatgtatgtccctgtgaagcaattttacttcaagaaatgaacacatttttcacataaattaaagcttttcctatttaatgtccttccttttcagttgttttttcttttttctttttctgatacagaattttattctgtcacacaggctggagtgcagtggcactaacagggctcacagcagcctccacctccctaggctcagatgatcctctcagctctgcctcccaagtagctgggaacacaagcacatgctaccacggctggataatatttttatgtttgtaaagacaaggtctccctatgtttcctaggctgtttttgatattctgcactcaagcaattcacccacgttggcctcccaaactgctgggattacagct

SEQ ID NO: 943863 - DNA, 600 bp, Homo sapiens
ttgggaaattttcttcaccagccctttgaacaagtcagggtaggaggggaatggggcttggagaataagacaagaatgacaaggtatgtgtacaattaaactcatagtgaagaatttctcattcgttagaaagcttgatggagaaaagtaacacaacctttagagaatttgaaccactrctctcctgggcccatttcacagtctaggtaaagtcatgggaaatgtatgtccctgtgaagcaattttacttcaagaaatgaacacatttttcacataaattaaagcttttcctatttaatgtccttccttttcagttgttttttcttttttctttttctgatacagaattttattctgtcacacaggctggagtgcagtggcactaacagggctcacagcagcctccacctccctaggctcagatgatcctctcagctctgcctcccaagtagctgggaacacaagcacatgctaccacggctggataatatttttatgtttgtaaagacaaggtctccctatgtttcctaggctgtttttgatattctgcactcaagcaattcacccacgttggcctcccaaactgctgggattacagct

SEQ ID NO: 943864 - DNA, 688 bp, Homo sapiens
gatcagttttgttctttcctaaaattgccattttgcctatcaactcctgtattattttaattgtattccttagattactggaattgagttttggctttctcctgaatctcgacaatctttatctgtatccagattctgaattctatgtctgtcttttcagccactttagcctgattaagcactattgccagggaaatagtgtggtcatttggaggtaagaaggagttcaggctttttgagttgccagagttcttgcactggttctttctcatctatatgggctaattttcctttaatttttgaagtttatgcctcctgagtagagttttttycttttctattctttgaccctttttaggatttgattgtggtgtaagttgggtccagttaactggcttcatttctggaagatttcagaggggcaaggctcaactcagcactcttgggctggatgctttaactctgcaggacttgtactagatactcagctttgttctctggccccccagggttagaaacctgctgtgctggaggggctggggtgttcgcagtccacaggcaacaacactttgatgaggcgtgctggtcaaagtgcttcatcagggcagtggcagtggaattggtgctcgctcatgtgtaccagcatcagtggtagtgtggcagagaggctgtgcattgttggggaaag

SEQ ID NO: 943865 - DNA, 647 bp, Homo sapiens
cggggcactaagtcctcaggctgtacacagcaggggggccctggacctggcccatgaaaccattgttccctcctaggcctctgggcctgtgataggagaagctgccatgaaggtaactaacatgccctggagacattttccccattgtcttggcaattaacatttggctccttgtaacttatacaaatttctgcagtggcttgaatttctccccagaaaacgggtttttctttgctactgcatcatcaggctgcaaattttccaaacttttatgctctgtcacctcttgaatgctttgctgtttagaaatttcttccactagataccctaatcatctctctcaagttcaaagttccacacatctctagtacaggagcaaaatgccactagtctctttgctaaactatggcaagagtcacctttataccagttcccaacaagttcctmatctccatctgagaccacctcagcctggacttcattgtccatatgactatcagcattttgatcaaagccattcaacaagcctctaggaagttccaaactttcccacattttcctgtcttcttctgagccctccaaacttttcctacctctgcctgttacccagttccaaagttgcttccacatttcaggtatccttatag

SEQ ID NO: 943866 - DNA, 770 bp, Homo sapiens
caagtgatcctcccgcctcagcctcccaagtagctgggattacaggtgtgtgccacaacacccagctaatttttgtatttttagtagagacgtgattttgctgtgttggccaggctggtcttgaactcctgacctcaagtgatctacttgcctcagccttccaaagtgctgggattacaggcatgagccaccatgcccggccctgagtctccattcctcacctctcaaagggaacagcagtgtcatccacctcacagtaatattttgagtaatatctctttacacagtagttgtatggmattgggcaacttggttatgtatacttcagtttcctcatctgtcacattgagataatactagtacacattttgtagggttattacaggatttagtgatttaaaacatttacgccaatgcttgtgataaatcctcaataaatggtaattattctcattgtagttagctgaggtgatacatgtaaagcttttagcacagtggcaggctcacagtgagaacacaataaatatgagacaatcattttctacactaacccttattaagaagtgcaagccgaagaagccagagtcagagaaataaagcagagaaggagggagaacaaatacaagagagttcattaccaagcaagccatagttgcctggcaagttgattactcagtctctgtatcagtctattctcacactgctataaagatactacctgagactgggtaatttataaagaaaggaggtttatttgactcacagttttg

SEQ ID NO: 943867 - DNA, 614 bp, Homo sapiens
tgacctgccttaatatgtttttgagaaaatccaagcaatcaaatgaaaaccacattttcctactaccaggtctactagtatattctcccatggcaatgaaggaaagttcctattccattctaagaccaactttttacttgttacctagactccattaccagttatccattgaatgattttccttctgcagttatctcctctctcttctgcaatatcaagccctatcttgctttttactgaataactttaactcaggcacagtatatctttcatcttagaaaaaataagtaaccgtcccctgaccctatgttttccttccactattacctcattattctattttgctttaccaaaaatctaagaaaattgtctattttcattagctcccccttattacctcattttttwaattttaacctgtttcatgttctcatccccacaatagtcataaatccatttatatcaaagtcattactggttccatcttgctaaattgaagcatcagttctcagacctaactgacttcttagcaggatttgatgcttcctccttcctcaaagatgtcaacattttaacttccaggacaaaacactctcctgttcttttaccacctc

SEQ ID NO: 943868 - DNA, 614 bp, Homo sapiens
tgacctgccttaatatgtttttgagaaaatccaagcaatcaaatgaaaaccacattttcctactaccaggtctactagtatattctcccatggcaatgaaggaaagttcctattccattctaagaccaactttttacttgttacctagactccattaccagttatccattgaatgattttccttctgcagttatctcctctctcttctgcaatatcaagccctatcttgctttttactgaataactttaactcaggcacagtatatctttcatcttagaaaaaataagtaaccgtcccctgaccctatgttttccttccactattacctcattattctattttgctttaccaaaaatctaagaaaattgtctattttcattagctcccccttattacctcattttttawattttaacctgtttcatgttctcatccccacaatagtcataaatccatttatatcaaagtcattactggttccatcttgctaaattgaagcatcagttctcagacctaactgacttcttagcaggatttgatgcttcctccttcctcaaagatgtcaacattttaacttccaggacaaaacactctcctgttcttttaccacctc

SEQ ID NO: 943869 - DNA, 576 bp, Homo sapiens
atcatcttatctacatcctggaggaggttcctgagaatggagtcattcttgtgcacaggggcaaaggttttcttctgcaagaacagagtgaccagaacttcagcttgtttgctgcaagtcctacgtcctatgtggcattcctcaggggcagttatctaaagggtagtcagcatttctargtccatccagtggaagctgctgacctgagtatggtttcttgcatcttcagtttatacagtctccagttcaaatcagaaccaaatgctaaccccgtgtggtgaccacaaccttgtattgcatttggaatcagctctttttccttccacctgcccagtgttctatccgaatgcatctttctctgacttgtttcctctagtggggagctggagggattcaatcctggtgaatccctcgtggaggactcagatgctgcacttagctgccccctcccttacttgcaaactgtgcacagtgcctggggcagaaagaggaaatgtgatgcagtttgctctgttagcatctccagcaggaagagtacaaataaaggcatttttcttactaaagtttgttaagcct

SEQ ID NO: 943870 - DNA, 789 bp, Homo sapiens
gcagggaaccaagtccttaggctgcaacagaagagccccacaaaaccgtttttttcttcctaggcctctgggcctgtgatgggagggattgctgcaaaggtctctgacatgccctggagacatttcctccattgcttttggctattaacatttgactctttctgcagccagcttgtatttctcctcagaaaatgggtttttcttttctattgcaatgtcaggytgcaaattttctgaaattttgttttatttcccttttaaaacggaataattttaacagcacccaagtcacctcctgaatgcattgctgcttagaaatttcttctgccagattccctaaatcatctccttcaagttcaaagttccacaaatctctagggcgggggcaaaatgctgccagcttctttgctaaaacatagcaagagtcacctttactctgattcccaacaagttcctcatttccacctgagaccacctcagcctggattttattgtccatatcattatgagcgttttggtcaaagccattcaacaagtctctaggaagttccaaactttcccacattttcatgtctttttctgagcgctccaaactgttcctacctctgcctgttacccagttccagttcctttcacattttcaggtatctttacaccagtgcctcattctactggtaccaatttactgtattactctgttctcatgatgctgaaaaagacacacctgagactgggtaatttattaataaaaaggggtttaatggactcacagttccatgtggctaggga

SEQ ID NO: 943871 - DNA, 787 bp, Homo sapiens
tttagacttgttctggcatcagattttcatcagtaatgaccttggcaaactcatcaatgaatttctcccctgcttcataatcagtggatgttttcttaccacaaatctttaaaagtttaatgctgtgtcttttctaaaatttctgcaatcaacctgttgaatattcagttctctttcacttttaaaccctttcactttaatccattgtgatagttttttcttgtttcatgatcatcatacaattaagtgacacaagttttctgtaatgctgaaggatccattcattcaatacasaattgagatcttcatgcagtgtttctgtatttttcattaatttttgttcactttcagcatagaactccaatagtttatccttctgtttcttcaggtcatactagctggtcattccaacaccatacttctctgtaagatgtttcacacttacactgctgtctagtttctctagtagcttgactttctgtgctatagttaaacacgaatgcttctcttgttcctaattactagtacccatatagggtttttcaaatccctttgaacaattttgaccaaaaacccttagcccatacaccttaaattcaccacgagagaaggattaaccaaaaaaaaaaaaaaacaaacaaaaaaaaccacaatgagtaatgcacataggtcttggcctcatgtggatcattgtagggaacatgccattggcgtgtctaacctgcagatgtgccattttattgtccttttggggcatgcttgcatgagggaatctgggcatgcacaa

SEQ ID NO: 943872 - DNA, 551 bp, Homo sapiens
ccaatcaaaagaggccagtgtacctgaactggtatggtaaggaagtcccctggttttttgttttgttttgtttcgttttttggtgttttttgtgtgtgtttgtttgttttgttttttggttttttgagatggaatctcactcttgttgcccaggttggagtgcaatggaataatctcggctcaccgcaacctccgcctcccgggttcaagtgattctcctgtctcagtctcccaagtagctgggattgcaggcatgcaccaccacgcctgcctaattttgtatttttcgtagagatggggtttctccatgttggtcaggttggtctcgaactcctgaccttaggtgatccacccrcctcggcctcccaaagtgctgggattacaggcatgagccactgtgcccagcctgttttttgttttgtgtgtgtgtgtgtgtgtgtgtgtgtgttctttttgatggagtttcactcttgttgcccaggctagaatgcagtggtatgacctcggctcactgcaacctccacctcccgggttcaagcgattctcctgcc

SEQ ID NO: 943873 - DNA, 697 bp, Homo sapiens
ggctgctccctgtggaccagaaggtcctggtgagaagtcaccacccaatcagagtttgctttccttttcagttttcaactgaaacaaactctagtatccctctggtgacttatgacaactgaccagggccacttcctggtgtggcctgaaggccaggggctgaagagttttgtctgccttgcccgggagagaggaaaaccctctcctaccttttctggtcaaaagtccctctatgtgtcacaattggcacacatggtttggggaactcagacccacctctttctcactctaaattctccccatgaagacaggcaaacctcctgctctggatgttcccaaactaggtgagctcaagcaacctcagagcagtgagtctccccattcacctcccctctcctcatacctgaaccgattatccggtgcaaggccccagtgcagagaagtctttctgatagctgggatgccctttagaaagtgcacccaagtccatcagtggatgagagtggaaygcttttcctcagcgagaagcctcaagagaaagcagtttgtgtccccagcggacattagcccccagaggttggctcatcattttccagtcccaccatgggacaaatcccatctgttccttcagactcacctctgcattgcatcctaaaacattgagacaaatttaaccctcagactctcaaaaagaaac

SEQ ID NO: 943874 - DNA, 582 bp, Homo sapiens
tttccaaatcacaaaataaaatataattggaaagaaatgaaggaaagttatatattaagtggctactatatacaaggcattatgagtactttatacttatttttatcacttaatccccaattatccttagagtgttatataacgttgtcttaaagagtctgatgatagcaagcaaactgaaacattggtatttgcccaggaccacacagacaacagaaagggaaaccacargtaaatcgaggcctgtctggatccaatattcatcctcttcctttccaccacaaaacctctccataacaaatgaaatgaacattcccagcaaatacccttgttatcttgccactgcaaattcctctgattttagggagaaaagttgataaagactgaagaagaaaatagtgtggcaaagaggtttggatgaagacacatgcctctggagaggtagaattagttcaaccattatggaagagagtgtggtgattcctctaagatctagaggcagaaatatcatttgacccagcaatcccattactaggtatatacccaaaggaatataaatcattctactataaagatatatgc

SEQ ID NO: 943875 - DNA, 549 bp, Homo sapiens
tatagacaggtgtataagtctctgtctatgattgtggatatttctgaattactttgcagttctatacttttcaatatttggtgtacaaatagagataattatccatgtacaaatagagacaattatcagttaggatattaaagattataacattatcaaccaacttggcctaaytgacattaatagaacataacactcaaaagcaacagaatatacattgtttgtatgttcacatgggcatgtagaatatttcccaagatatatcatattccaggccataaaacaagactaaatacatttaaaatgattcatgtaataaaaagtatgttacctgatcaccgtagaattaaattaaaactcaataatagcaccccccagtagaggcagactgacacctcacacggccgggtactcctctgagacaaaacttccagaggaacgatcaggcagcaacatttgctgttcaccaatatctgcttgctgttctgcagcctccgctgctgatatccaggcaaacagcgtctggagtggacttccagaaaactccaa

SEQ ID NO: 943876 - DNA, 621 bp, Homo sapiens
tcccatcactgcctctccattcaatctgctgcaatacttgtttgggttgaagtataggaagaaaatctcatctttaataatacaggtatgcaattaaaaagagagagagagagagagaaagaggaatatttcctttttagctaattgtggatattcttctttgatattccaaaacttgacaagtggtaatttagcttagttgcaatgtggaatcttaaaccaagtccatgaactttttctattatgtttcactaaaatccatttatttctcttgttctttgtatgaatcatttactcatgcatgattttgtaacagcatgccttggtcatttggaaaatattggttcactgaattattcagatcttccaaatgttgacttgtttactctgagacaaaattttaaaaactacatttgttaacattgccactaatttcatcacaaaaatctttaaatactgagaaactgtcaagcrgacacagatactgatttttccaaaattccaattttcacttgaaaactcaaattttattattgtcaacaaacactgttggttgttttccttgaagtgactcacttcattcatttttgggaaaatgtctgccaaatacccacgtctgaa

SEQ ID NO: 943877 - DNA, 638 bp, Homo sapiens
tacatgaaaaggcaattgaccaaaagtcagttactgagctatctcaatactttcattttattttaacttttggcaacagggtgcaattaaaggagagaaagaaaacaaagtgataagtgtaagataatgtacacacatgtgtaaaagaaaatgacaagacagggtgactctttgtctcttggttagctccttgggctctatgtctccttcctcagagaacctcgttttcctttgtccagatttgttagggtggataatccaggcacctgctcccccatgatggaagccaaagacgtccctggagccgcctcccgctgcaccctttgctgcactgcccacatggacacaactcagccgattagacttcctctcagaacttyagtcttgagcaaagggattaaagggtgaagtgactgaaggtatgcccttccaaagtagtacgtgagctaatggctaaagtttgtcaagcccatccaagcacattttttcgtaatttttatttatttatttttttaagacagagtcttgctctgttgcccaggctggagtgcagtggtgtgatctcggtttactgcaacctctgtctcccagcttcaaaggagtctcctgcctcagcctccccagtagctgggattaca

SEQ ID NO: 943878 - DNA, 679 bp, Homo sapiens
ggaggctgaggtggttggatcacctgatgtcaggagtttgagaccagcctggccaacatggtgaaaccctatttctattaaaaaatacaaaaattaaccaggtgtggtggcaggtgcctgtaatcccagctacttgggaggctgaggcaggagaattgcttgaacccaggaggcagaggttgctgaagagaatactccagarcagaggttgggacactatggcccatgggccaaatctgacctgcttgtgcatgtgtttgtcaataaagttttattgaaacacagccatgcccatttgctacatattgtctatggctgctggatttggctgttctctcatgctataaagaaatacctgagactgggtaatatataaagagctttaattggctcacagttttgtaggctatacagggagcatgacactgacatctgctgagcttctgtggaggcctcaggaaacttacaatgatggcagaaggtgaagtgggagcaagagagtaaggagggaggtgctacacactcgtaaacaaccagatcttgcaagaactcactcactattgcaaggacaggaccaaagggatgaggctaaatcattcatgagaaatccacccccatgacccaatctcttcccaccaggccccacctctaacactggggattgcaacatgagttttgg

SEQ ID NO: 943879 - DNA, 777 bp, Homo sapiens
aatccagaagaaacccattatccattcacaggtatttctgattcccttgtcccacagcctctggcatccattgatctattgtttcttttaacagatttgtctattctggacattttatataaatagatcataaactaagggcctctttggtttatttcatttagcataatgttttcaaggttcatttatgttgtggcatgtttcagtgcttaatttcttactattgctgagtaataaccgattrtatgcatgtagtaatttaaaaatccagctcaccataggtggcacgtgcccacctacatggtagtcccagctacatggtaagctgaggcaggaggattgcttaagcccagaagttctgggctgtactgcactatgccaactgggtgtctgcactgtttggcatcaatatgttgacctctcaggaacaggggaccaccagattggcgtaaggaagattgaactggcccaagacggcaatggagtatgccaaaactcccatgctgatcagtctggcatcatgtttgtgaacagccactgcattccagcctgagtaacatagctgtatgctgtctctaaaaaaatataaaaataaaaataagtccgttcatgtgttaatggacactttgtttctatctattggctattgtggacaattcaataatagcagtgttcagtgatctgagtccctgttttcaatttttaaagtaaatacctataagtagatcatatgttaattttatagttattattttgaggaaccaccaaattgtaaca

SEQ ID NO: 943880 - DNA, 777 bp, Homo sapiens
aatccagaagaaacccattatccattcacaggtatttctgattcccttgtcccacagcctctggcatccattgatctattgtttcttttaacagatttgtctattctggacattttatataaatagatcataaactaagggcctctttggtttatttcatttagcataatgttttcaaggttcatttatgttgtggcatgtttcagtgcttaatttcttactattgctgagtaataaccgattgtatgcatgtagtaatttaaaaatccagctcaccataggtggcacgtgcccacctacatggtagtcccagctacatggtaagctgaggcaggaggattgcttaagcccagaagttctgggctgtactgcactatgccaactgggtgtctgcactgtttggcatcaatatgttgacctctcaggaacaggggaccaccagattggcgtaaggaagattgaactggcccargacggcaatggagtatgccaaaactcccatgctgatcagtctggcatcatgtttgtgaacagccactgcattccagcctgagtaacatagctgtatgctgtctctaaaaaaatataaaaataaaaataagtccgttcatgtgttaatggacactttgtttctatctattggctattgtggacaattcaataatagcagtgttcagtgatctgagtccctgttttcaatttttaaagtaaatacctataagtagatcatatgttaattttatagttattattttgaggaaccaccaaattgtaaca

SEQ ID NO: 943881 - DNA, 582 bp, Homo sapiens
ttctccagtgtgacccaggaaagccaaaagattgtacacccctggcttacaccaatgtccaaagtattttttcctaggttttcttttagtattattgtagtttcagttcttacatttaagtcttttatccatcttgagttgattattgtatatagtgagagataggggtccagtttcgttctyctgtatatggatatccaattttccaattttcccagaattatttattgagaagggtatcctctccctactgtatgttcttgtcaactttgtcaagatcagttggctatagagatatggcttaatttctggtttctctgtttggtttcattgatttatgtgtccaattttacaccagtgccatacatcgccctgtattataatttgaagtcaggtaatgtgataccttcagctttgttcttttgcttaggatttcattgggtatttgggctcttttttggtttcatgtgaattttaggattgttttttctaattctgtaaaaaaataacgttggtattttgataaggattgcattgaatctatagattgctttgagcagtctggtcatttgaataatttat

SEQ ID NO: 943882 - DNA, 429 bp, Homo sapiens
atgagtcaggaagtagactgtattttactgggctcagggccaacaacctcattcagtggcctccaaaactaaacactttgttgagggagaagagaaatcgcttcacaagaggtatagaaaggactggaatctccgcttacagagctgtggactgcccagarcttacagcagggtcagcaaattttttctgtaaaaggtcaaatagtaaatatgttagcttttacaggccgtatggtctctgtggcaactactcaactctgtgattgtagcatgaaagcaactatagacaatacctaaacaaatgagcgtgggtgtgcttcaatcagatcttacatacaaaagcaggcaacaggccagctttggtccacaggctgtagtctggggactcctagtttagagtactgttactggcacatcacaggcacacaa

SEQ ID NO: 943883 - DNA, 429 bp, Homo sapiens
atgagtcaggaagtagactgtattttactgggctcagggccaacaacctcattcagtggcctccaaaactaaacactttgttgagggagaagagaaatcgcttcacaagaggtatagaaaggactggaatctccgcttacagagctgtggactgcccagagcttacagcagggtcagcaaattttttctgtaaaaggtmaaatagtaaatatgttagcttttacaggccgtatggtctctgtggcaactactcaactctgtgattgtagcatgaaagcaactatagacaatacctaaacaaatgagcgtgggtgtgcttcaatcagatcttacatacaaaagcaggcaacaggccagctttggtccacaggctgtagtctggggactcctagtttagagtactgttactggcacatcacaggcacacaa

SEQ ID NO: 943884 - DNA, 594 bp, Homo sapiens
gctgccagacatattggttcttctttaaatgcagtttcctttctctcactgcttttgggatcttttccttatttttgacctttggaagtctgactattaattgtcttgcagtagtcttatttgggttaaatatgcttggtgttctacaaccttcttgtgcttgactattaatatcttttcctagggtttgaaagttctctgttattawtacatcaaataaatattctaccctgatctctgcacctcctcgttaaaaccagtaactcttagatttgcccttttgaagctattttatagatcttataggcatgctttattcttttttcttttatctcctctgactgtgtatttcttttgcttgatcagttctgctgttgagagactctgatgcattctactgtaggtcaattgaatttttcagctccagaatgcctgcttgaatctttttagttacttcaatctctttggtaaatttatctaataggagtttgaattacctgtgtgaaagatcgcatatctctgttactctgggattggtcactggtgtcttatttagtttgtttggtgaggtcacattttcctggatggtcctga

SEQ ID NO: 943885 - DNA, 590 bp, Homo sapiens
tttctccacatcctctccagcacctgttgtttcctgactttttaatgatcgccattctaactggtgtgagatggtatctcattgtggttttgatttgcatttctctgatggtcagtgatgatgagcattttttcatgtgtcttttgactgcataaatgtcttcttttgagaagtgtctgttcatatccttcgcccacttgcaaaattgatagaccgttagcaagactaatggagcccttaacatagtaacaatcgttatttttaatttcctgtctggtaattcaaaaaaaacctgtgctatatgtgagtctggttcggatacttgctttctttctttttactgtgttttttcttgccttttkacatgtcttataatttcttgttggatgtactatgtaatatggtgagtaataggaactgaggtaaataggttttcagcatatggttgtatactctgacaagtagatggtctatgcttaatgtttgctgtagttgtagataccaaagtgtctttttgtttctcctgatgtctttgagttttcctaaaatcttttccttacataaagcctgccctctctagatctttcagc

SEQ ID NO: 943886 - DNA, 585 bp, Homo sapiens
tagatttgttcatattatgtctatattatttccttaatgttgatggtatcagtagcattgacacatctttcctttctgctattgatgatttctgtcttctatttatatgaagttgggtagttagaggtttataacttttattaaactttttaaagaaccagctcttggttttgtgagccttctctattgcttttctgttttcaatttcacttctttctgctttaatttttatttttttaaattttatttgttttaatttaaaatttttctgtttagattattgattttagyttagattattgattttagatctttcttctctctcaatatgtgcacttaatgctatgaaattccctgtaggcactgttttcactgcatctcacaaattttaagttgcattttcatttagttgaaatatatacatgtatatatatatatatatatatatatttctatatgaacctattgagatgtctttgactcacagaatttttagaaatgtgttgtttaattcctcaggtatttgtagatttcccagctctctgtactgtttccagattaattgtattatggcaaattctatta

SEQ ID NO: 943887 - DNA, 793 bp, Homo sapiens
tttttattagagatggggtttcaccattttggccacgctgatcttgaactgctgacctcaggtgatccacccacctcggccttccaaagtgctgggattacaggcatgagccaccgcgcccagcctagaatttatctttaaaagcaatatacagttgaggcaggaggaagyacatgagaaccacgacagccaccccaaagagatggacaccatgccaaggctggaagcttttgttaataatcagacctgtcctaaaaaagaatgcggggctgcctctgaaggaggtaagctctctcttcttagaggtgcctcggtgcttgcctttttgggatactgagaagagggcttctgcctggggctgcagacaggaacccctgacctctgagatgccttgcagctcagagtctttaatacatttattccagaatccttcgactctgagattttaacatgttaagattccttagctggattcaaagactccttgggggctttgagtggaagtaatctctgattccttgaccctgaatcacagagtctgaagcttttgggatctgagatttcccacagtccttgtactcaaaagactctgagctgcagaagcctacccagacagagaggtttgtcaccaccaccaggcttccccacaaccactaacagagggcagggacccaggtgattgactcatttgctgggtactgggatttttttgctccccaggatccaggcaagcacctagaagaaagaagatactcaatgcattcattcatgactgaatgaatgaagagtccct

SEQ ID NO: 943888 - DNA, 793 bp, Homo sapiens
tttttattagagatggggtttcaccattttggccacgctgatcttgaactgctgacctcaggtgatccacccacctcggccttccaaagtgctgggattacaggcatgagccaccgcgcccagcctagaatttatctttaaaagcaatatacagttgaggcaggaggaagcacatgagaaccacgacagccaccccaaagagatggacaccatgccaaggctggaagcttttgttaataatcagacctgtcctaaaaaagaatgcggggctgcctctgaaggaggtaagctctctcttcttagaggtgcctcggtgcttgcctttttgggatactgagaagagggcttctgcctggggctgcagacaggaacccctgacctctgagatgccttgcagctcagagtctttaatacatttattccagaatccttcgactctgagattttaacatgttaagattccttagctggattcaaagactccttgggggctttgagtggaartaatctctgattccttgaccctgaatcacagagtctgaagcttttgggatctgagatttcccacagtccttgtactcaaaagactctgagctgcagaagcctacccagacagagaggtttgtcaccaccaccaggcttccccacaaccactaacagagggcagggacccaggtgattgactcatttgctgggtactgggatttttttgctccccaggatccaggcaagcacctagaagaaagaagatactcaatgcattcattcatgactgaatgaatgaagagtccct

SEQ ID NO: 943889 - DNA, 481 bp, Homo sapiens
aaatggtgttccatgaaaaaaaaaaagtgactagttaagctcacagttcaaacaagtgcaaatgcttttctggagacaaccattgtgctgcatcggatatggcagaagtgctctatgttgcttcccagaatattaaaaagatgtataytcaaggaccagtatattgtgaatgggatcatttttattgctgcatcaaagactttcctggtcgatgttggcagtgttttcctatgagggcgtggcagtgaaaaatgcgatgacttcctgtacatcgcattggaggccgccacgttggcttttgcaccgtcagggaaatgtcaacccagcaaaaaaggcaaatgatgccttagtctcattatgaaaagagttttgaccttgcagacttccccagcagggtctgtacttggcattcatgttttaatttaacgttctcataccagaagcagggctcagtcacccttgacacagtttccaatactat

SEQ ID NO: 943890 - DNA, 542 bp, Homo sapiens
aagaattctaagatgacccaccaacattcccagccattggtgtacacataccttctcccagttattcaatctaggtactgtggtgaaggggtttgcagatgtaattaagttctccaatcaattgacctagaaatagggattatttaggcaagcctgatctaatcacatgaacactttaaaagttttctcaggctttccgagtcctggcccacgggcgttgggtatgagcagcgccctccgccctccgccctaagggttcgtggcccaccgctccttcgcagtccctgccgccaccgtccacgctctgygttgtagagaagacagtgggtcggaagagcgccatcgccgccagtgtatgtggggccctttttatcaggtactgcatctacttttaccacaaaagacgaagtgaccccaatttcaagaacaggcttcgagaacgaagaaagaaacagaagcttcccaaggagagagctgggttttccaagttacctgaccttaaagatgctgacgctgttcagaaattcttccttgaagaaaca

SEQ ID NO: 943891 - DNA, 670 bp, Homo sapiens
acccacaagaaaggaaattggtatattgaagagatatctgcactcctgtttgttgcagcactgttcaagatagctgagatttggaagcaatcacagtgtctatttacagatgaaaggataaagaaaatgtggtgtatatgcacaatggagtactattcagccacaaaaaagaatgagatcctgtcatttgcaacaacatggatggaacatgtacaatggagtactattcagccaccaaaaagaatgagatcctgtcatttgcaacaacgtggatggaactggaggtcattatgttaagtgaaataagccaggsacagaaagataaacatcgcatgttctcacttatttgtgggatctaaaaatcaaaacaattcaactaatggacatagataatagaaggatggttaccagtggctggaaagggtagtggagggctagtggaaagggagggatggttaatgggtacaaaaaaatagaataaataagacctattatttgatagcacagcagggtgactgtaatcaataataacaattgcatatttaaaaataactaaaagactataattggattgtttgtaacacaaaggataaatgcttgaggggatggataccccattctccatgatatgattattttgcattgcatgcctgtgtccacaatatctcat

SEQ ID NO: 943892 - DNA, 582 bp, Homo sapiens
tctccagtgtgacccaggaaagccaaaagattgtacacccctggcttacaccaatgtccaaagtattttttcctaggttttcttttagtattattgtagtttcagttcttacatttaagtcttttatccatcttgagttgattattgtatatagtgagagataggggtccagtttcgttctyctgtatatggatatccaattttccaattttcccagaattatttattgagaagggtatcctctccctactgtatgttcttgtcaactttgtcaaagatcagttggctatagagatatggcttaatttctggtttctctgtttggtttcattgatttatgtgtccaattttacaccagtgccatacatcgccctgtattataatttgaagtcaggtaatgtgataccttcagctttgttcttttgcttaggatttcattgggtatttgggctcttttttggtttcatgtgaattttaggattgttttttctaattctgtaaaaaaataacgttggtattttgataaggattgcattgaatctatagattgctttgagcagtctggtcatttgaataatttat

SEQ ID NO: 943893 - DNA, 553 bp, Homo sapiens
tataaaaaattggttgcttatatttcctgccttttgagacttttaatcttagaagccagttaccatgctgtggagcccaaactgtctttggagaggcccatgtggagatgaacagagacccccagctctcagccggcaccaacttgctaaccatgagtgagctgtgtgaaggagacaagctttctctaccaagccctagtaaatttcacacttttaagctaaaaataaatgatttttaaaaaacattattttaagccagtaagttttggtgagatttgttctgcagcaagacaaccgataatgattttgatacaccagaggcagggtgctgccttaacaaaatcctcaatcatagggctttggacttgagactaggtgatgggctgaagctggagggatctttaggagaatktaagtgaaaacttaaaaggacttctagaagaatactagaggaagcctatggagctttgaggacttaaaaaaaaaaaaaggaaggaaaaatctcagacaaccctctgttaaacaatagggcttcaataaatcttaagggtgt

SEQ ID NO: 943894 - DNA, 587 bp, Homo sapiens
ctttaaaaagcctttagaaaaaaatcaaagaatccaagaactgttttttttttataacaaaatagaccactagctagaataataaagaagaaaagagagaagaatctaataaacacaatcagaaatgataagggagatatcacaactsatgccacagaaaaacacaaacaactatcacagaatactataaacacgtctatacacataaaccaggccatctagaagaaatggataaattcctggacacatacaccctcccaagactgaagcaggaagaaattgaatccctgaatagaccaataatgaattctgaaattgaggctgtaataagtagcctaccaccaaaagaggcccaggaccagatggattcacagctgaattctaccagaggtacaaagaagagctggtaccgtttctattgcaactattccaaaaaattgaaaaggaaaaactcttccctaacttattctataaagccaacatcatgctgacaccaaaacttggcagagacaacaaaaaaagaaaattttaggccaatatccttgatgaacatccatgtaaaaattctcaataaaatactggcaaac

SEQ ID NO: 943895 - DNA, 587 bp, Homo sapiens
ctttaaaaagcctttagaaaaaaatcaaagaatccaagaactgttttttttttataacaaaatagaccactagctagaataataaagaagaaaagagagaagaatctaataaacacaatcagaaatgataagggagatatcacaactgatgccacagaaaaacacaaacaactatcacagaatactataaacacgtctatacacataaaccaggccatctagaagaaatggataaattcctggacacatacaccctcccaagactgaagcaggaagaaattgaatccctgaatagaccaataatgaattctgaaattgaggctgtaataagtagcctaccaccaaaagaggcccaggaccagatggattcacagctgaattctaccagaggtacaaagaagagctggtaccgtttctaytgcaactattccaaaaaattgaaaaggaaaaactcttccctaacttattctataaagccaacatcatgctgacaccaaaacttggcagagacaacaaaaaaagaaaattttaggccaatatccttgatgaacatccatgtaaaaattctcaataaaatactggcaaac

SEQ ID NO: 943896 - DNA, 587 bp, Homo sapiens
ctttaaaaagcctttagaaaaaaatcaaagaatccaagaactgttttttttttataacaaaatagaccactagctagaataataaagaagaaaagagagaagaatctaataaacacaatcagaaatgataagggagatatcacaactgatgccacagaaaaacacaaacaactatcacagaatactataaacacgtctatacacataaaccaggccatctagaagaaatggataaattcctggacacatacaccctcccaagactgaagcaggaagaaattgaatccctgaatagaccaataatgaattctgaaattgaggctgtaataagtagcctaccaccaaaagaggcccaggaccagatggattcacagctgaattctaccagaggtacaaagaagagctggtaccgtttctattgcaactattccaaaaaattgaaaaggaaaractcttccctaacttattctataaagccaacatcatgctgacaccaaaacttggcagagacaacaaaaaaagaaaattttaggccaatatccttgatgaacatccatgtaaaaattctcaataaaatactggcaaac

SEQ ID NO: 943897 - DNA, 570 bp, Homo sapiens
atccttgatgaacatccatgtaaaaattctcaataaaatactggcaaaccaaatcccacagcacatcaaaaagcttatccaccgtgatcaagttggcttcatccctgggatgcaaggtttgttcaacgtatgcgaatcaatagatgtgtttcattgcataaacagaatgaaagacaaaaaacacatgattatctcaatagatgcacagaaggccttctgtaaaattcagcatcctattatgttaaaaactctcaataaactaggtattgaaggaacatatctcaggatagagagccatatatgacaaacccatagtgatgtaataatgaatgggcaaaagtgggaagtattccccttgaaaactggcacaagacaaggatgccctccctcaccactcctattcaacatagtattgaaagttctrgccagggcaattgggaaagagaaagagataaacggtactcaaataggaagagaggaagtcaaattgtttttgtttgcagatgacatgatcctatatctagaaaactccataatctcaaccccaaagctaggaatacctctgcagga

SEQ ID NO: 943898 - DNA, 785 bp, Homo sapiens
aagtagacatgagtagggaggagagaggagcagctattgtcagctccacactgtgccctccccgactgggggactgtggaaattgacttctaaaggagagggctccaaggccctaacataggttacctttgttagtaggtttgcttaagttgcacttatgaaattagaacgtgatttcctctattttttcaacaactgttaggttactatgctgaatttctgggcattttgtagtctacatttaaccatttgctcattcccaagcatctgtggaagacctactacgtgtaagatgctgtgctagaagcttcagaagagatttttttcaacggccactaccttggagatgctcccagtttagtgggggagggcagtgttctcagacatgtaagtattaaagttcttttctttctatatttgttatcttctgctcctttagctgactagatggagctcaagtggttgggcttctcaagtgtcactgagttaatatgagtaatgttcmcatctgcattcatttctgattcctgacgtcttgactgtttctttcctctttctcttcctgccaacatgatataagaagatagacatttatttctaaaccaaagtaccgagaaatgacccatgaaactgtcttaggagaggtcacgtttcaaaaaagtagtctagaatcctgcctgtctcatttttgtctgtcctgatttccttgcagcctgggcatgcgctaatttgttctgcattatcctgtgacaactcggttgcaaggacagaaagttaattctcta

SEQ ID NO: 943899 - DNA, 785 bp, Homo sapiens
aagtagacatgagtagggaggagagaggagcagctattgtcagctccacactgtgccctccccgactgggggactgtggaaattgacttctaaaggagagggctccaaggccctaacataggttacctttgttagtaggtttgcttaagttgcacttatgaaattagaacgtgatttcctctattttttcaacaactgttaggttactatgctgaatttctgggcattttgtagtctacatttaaccatttgctcattcccaagcatctgtggaagacctactacgtgtaagatgctgtgctagaagcttcagaagagatttttttcaacggccactaccttggagatgctcccagtttagtgggggagggcagtgttctcagacatgtaagtattaaagttcttttctttctatatttgttatcttctgctcctttagctgactagatggagctcaagtggttgggcttctcaagtgtcactgagttaatatgagtaatgttcccatctgcattcatttctgattmctgacgtcttgactgtttctttcctctttctcttcctgccaacatgatataagaagatagacatttatttctaaaccaaagtaccgagaaatgacccatgaaactgtcttaggagaggtcacgtttcaaaaaagtagtctagaatcctgcctgtctcatttttgtctgtcctgatttccttgcagcctgggcatgcgctaatttgttctgcattatcctgtgacaactcggttgcaaggacagaaagttaattctcta

SEQ ID NO: 943900 - DNA, 800 bp, Homo sapiens
aacaagcagacaaatggtcattcagcgttacagagatgggttcaatccagaatcaccaaacatttcacaaagaacgccaccatgaacatcaaataaagaaacaaaataaaagaggctcaacagacagaacaactcaaatcagagggatcagagctaacagggaaaggagaataggactgtatatgtaggtttcatgtccacagagagataaaaaaatatttcagtcatgaacaaggctaggagttatgagacaagcacagacttgtgaaaaaggacccaagtagagatcttggaaatgagaagccactgggcaatggtcttaggtcaaatgatcacaaaatgaggtagaggaagctgatgaggcacaaacaaaycaaaaaacaaccaacagcgccagtgagagaagtccccagctgcaggatattttgagtaagggaaagaaagatgttgagaaaaaaacacgcggagtctaggcccacttcaaaatccaactaagatgtttctttagggtctactatgtttgtgtgattcccctcacaaattaagcatctgcagtgtcccctccagagaccatgaaggagaagacaggattcaagagaaaacactaaggatgcagaagtacagaggaaaggaaggggcagcacagctcagaggaacatgaagtgtttggcgaaaggggactcgtggtggacactcatgttgggaggagtaggaaaaattgcaagtatttattttcaaagatgttttcttaaaaactaggcaactgaaaggacattactacaattcttgaaaatataaac

SEQ ID NO: 943901 - DNA, 610 bp, Homo sapiens
acttcatagcaggcaagttgtagggtgttgattcaggcctggaaggatggatgggagggtctggacaggtgggagatgtggtgggagataggacaaggcacaagcagagtctcagcgggcacagcagcaggctggaggcaggacacagaggccagagctggagttgaggccaaacagccctgggtttgaatcctccttttgtcactcactggccgttatagctgtggagaggatacttatcccccttttccaggtgtggaaactatgggtaagagacattgacagctaccttgagttttcgtgaggactaaaggttttatatctcaaggacctggcgtgcccccaaggtgctggatgggtgtgtttcgagcttactaggtctgagataccaygggcacacaaaatgtttttaaagaactccaaaacattccctctttatctctcttgggactgcaaaaggttgatgcactggaatgatttgtggcttcactatgaatggagtccccttatcgcagagttcattatcagaaggctttagtggatatgagaaatgttgtttcttcaattctcagggacagataagcaagcaatctcagaggggttttcctag

SEQ ID NO: 943902 - DNA, 624 bp, Homo sapiens
atacattaatgtattaaggtaacatctttgtattcagattaatcccttcataaattaatacatgaaacaatgcagtgatgacaagtgttctaaaaactatagaggacttgtttatgaaattagggctcatactgaaggtcaggagaagggctgccattcatcagtcagcattgatatggagagggaaaggagattaccctattacaagtcatactgggtggaggagatttaattactcagatgctcttatgctcctcaaaggtcctagtgcacctctttagacagtttcccacacaagcctcagcccatctcatctggttttgttctgaaccccaaggttcagtcaggtgcgctgtcccatcacaggaaaaraaaccttgagctgattgcagactgtctctaggttgtcatccattaattaatgaataaattaaacaaggcttttccactctatcatcttgtcacctgaagaacatttattttcagggtgattgctaaactccacagtacaaagtatgtaatagatattacgtttttatttactactatgtatgtaaatgaaagaaagaaaagggaaggacagggagagggaggaagagaagcaaggaagaaaaaccaagggag

SEQ ID NO: 943903 - DNA, 747 bp, Homo sapiens
tctaggccccagagagccctccctcagggggcacaaagacgcaaagaagccccctcctcagaatgccaggagtcctgggtccagcaggtcctcaggggagcccctctttgaagcccgtagagccaggactctgattctcctttgaaaatatgcagcccccatgttgaccaaacatgaatctctgacagcacaccccctcctacaccggctcccaaatgcacacctaatatttttatttttcctaaatgtttgtctgtggttccccaacatctttagaggccctcataatcttttcccttccagtataagctcctagagagcagtgactatttccttctggactgactagatcaccgactcacattacaaaaggcttaggaaagtgttttatgaacgtgaagactaacagccagcagtcattggtgctggaaagggctgtgctatggctggtgcctcttcccgggtataggaatcctcatagctaccctgtactgagggtctaccaagtggcgggcatgtgatgccccctctaccgrgatgctatctcacttgatcttcaccaggactccaggacacagaagcacagagaggtgaagccatttgctcaaaatctcacagccgctaaatggtaaagccagggtccgaggcctggcaatccgaaggtggaagccgtcttagcagttatgctacactgcctcccagaagcccacatgggcacacacgctgctggtaagcacatcttccttg

SEQ ID NO: 943904 - DNA, 740 bp, Homo sapiens
gtgagaccaatgcagaaggcaggtgatttctgcatttccaactgaggtacctggttcatctcattaggactgattagacagtggttgtagcccacagagggcaagcagaagcagggtggggcattgcctcacctgggaaacacaaggggctggggaactccctcctctagccaagggaagccatgagggactgtgcagtgagggacagtggtatctggcccagatactatgcttttcccatggtttttgcaacctgaagaccaggagattccctcgggtgcctacaccaccagggccctgggtttcaagcacaaaactgggtggccgtttgggcagacactgagctagctgcaggaggattttttttttttttgtatcacagtggtgcctggaacccccagtgatacagaaccattcactcccctggaaagggggctgaagccagggaaccaagtggtcttgctcagtaggtcccacccccatggaggccagaaagctaagatccactggcttgaaattctcgctgccagtacagcagtctgaagttgacctgggacactccagcttggtggggggagaagcmtccaccattactgaggcgtgagtaggtggttttcccctcacagtgtaaacaaagccactgggaaatatgaactgggtagaacccaccacagtgtgacaaagccactgtagccagactgcctctctagattcctcctctctgggcagggcatctctga

SEQ ID NO: 943905 - DNA, 631 bp, Homo sapiens
agctgtgattatatatatttggagtatttagaaagaggaaaaaaaattgtaaatcacatgcaagacctctcaatattttatcgtggcccccatcacttcctctggctattggttattttgttgaggcatgtaagtttaatatgtwtatttaaagtatataatatgtatatattaagtatatatgtatatgttaaatatattatatacatattaaacttacattataagttaatataatatgtttatatatatatatatatatatatgcataagaatatattttctgcccgagaaattctgtttctgtaaaactggtggtgaaggctattgtttctctggggccaggctgactacttctcttttctgttttcagaattatttcaagaccagttttctcagccatagagtatgtgcagcagaggtctgtatcttctgcaggttgatgtgctcctgtgcaactggatgggtcccagttcatggccccagggccaacacagactattaatgtttcaatgaattacctaaggagcaccatgaaaaaaacagtaagagtgccagcttccctcagggactctgaaatcagggacattttcatccattgtcagtcctgctgcctgaaatgtttttcttg

SEQ ID NO: 943906 - DNA, 654 bp, Homo sapiens
cctgccaagtgcatttagtccccctcttatttgttttctgctgttggctggtcacaaaaaagaagcaaatcaaccacaaagaacaacactccgaagtccatctgttgcctggggcactagtgagactcattctgctcagcttttaactctgtttccagtggygaatataatctctcagtcaacacttggccaaatgactcatttgcagtcagcaaccagatatattcttgtgcataaacatatttatgtattttggaaaaactctgagcccatccaattctatgactatgatatttgcaccaatcctggcttactgttttaccactttccagaacaaaccccctttgtatgtgttgctgtatccaaacatcactagctagtgctgtactcactcctgtatccaaacatgactagcaggcaccattccttcttccccaagtaactttcattctttttcacctttcctcaaccccatatccttcctccccaattttatgattttcacctgttcttagaggctcagatcttatccaaaaccttcctgaagcttcttctgcccatcagagcctaataggacctctttctcctcattttattaggcattcaccatatttggacttgtgttctcatttatcttttttaaaaatgtgtttt

SEQ ID NO: 943907 - DNA, 722 bp, Homo sapiens
tgccccccaccccccctgccccccgttccattccactggggctgttgtgagccagcaagttacgtaacatcccatagaaagctcctatttaaaactctgataggtgacagcctgtttgacaaacaggcttcagtctgtcaagccagcatctccaaagcatctgcattttccgggctgctgttttcttgcttatagtccatcagggctgcactgggctattcaggcccttcccagggatggaagccgctgtgtctcagcaaggggctgtcaaattgtcccactttccctgcctagttcatataggggtatccatatttatattgatctaggcacatgaatggcatgccatgctaggcagcaacttggcggagataatccaaaacactctgcactcacttgaaatttaaattcacccacaaaatgcataggtttagcctggtcactgatgtcattggtttctccactataagcagaaattgcctcagtgactgaatatgtgtgagtggtatgtgtgtgtgtgcgsgtgtgtgtatgtatagtctgtcttcacgttaattatttaaaagttctgtccattgtccagttttccaatttccccctacagtttccctataaattaagtgattatagctcttgttgttaacacatcaccttagagctgtcatctagcacacattcggatgcaaccccccaatcctgacggtggtcagaacaaaacagga

SEQ ID NO: 943908 - DNA, 576 bp, Homo sapiens
tctctcctttccagtcacctaaaagaaaactgaagagtccaaaggtgttggtgaccttgtgaagaaccccccaaaagtctaattgcacttaaaaagcaaagaccaccctgcagaaatgattgcagatgtttctaactctatctgcaggcctaagaaaacaccgagrtcagaggggacctttttggatggatcaaatttctgaatagttcatgatatacagacttaacttctagaaggctaaactttgtaattattaacaaggttgttcacataatgtaggtaagctcctctgtcctgtgaaacaatccatttacatgcttcctgaatcatcctgggaatttaagatctttacaacagtaagctaactaaggccctggacatcaaccttctggtttgacaaccatttatttgcaagctgtgttgacatcactcctatgtgacaaatttacaaaggaagagacacagcctagcacatgaaatataagatgattctatgtcttaagtacttaaagcctattaccaaaataggtgtgcaatgttgctgttataaatatcatccttaacaccttttgattc

SEQ ID NO: 943909 - DNA, 768 bp, Homo sapiens
ctgtccttgcaaccgagttgtcacaggataatgcagaacaaattagcgcatgcccaggctgcaaggaaatcaggacagacaaaaatgagacaggcaggattctagactacttttttgaaacgtgacctctcctaagacagtttcatgggtcatttctcggtactttggtttagaaataaatgtctatcttcttatatcatgttggcaggaagagaaagaggaaagaaacagtcaagacgtcagkaatcagaaatgaatgcagatgggaacattactcatattaactcagtgacacttgagaagcccaaccacttgagctccatctagtcagctaaaggagcagaagataacaaatatagaaagaaaagaactttaatacttacatgtctgagaacactgccctcccccactaaactgggagcatctccaaggtagtggccgttgaaaaaaatctcttctgaagcttctagcacagcatcttacacgtagtaggtcttccacagatgcttgggaatgagcaaatggttaaatgtagactacaaaatgcccagaaattcagcatagtaacctaacagttgttgaaaaaatagaggaaatcacgttctaatttcataagtgcaacttaagcaaacctactaacaaaggtaacctatgttagggccttggagccctctcctttagaagtcaatttccacagtcccccagtcggggagggcacagtgtggagctgacaatagctgctcctctctcctccctactcatgtctac

SEQ ID NO: 943910 - DNA, 768 bp, Homo sapiens
ctgtccttgcaaccgagttgtcacaggataatgcagaacaaattagcgcatgcccaggctgcaaggaaatcaggacagacaaaaatgagacaggcaggattctagactacttttttgaaacgtgacctctcctaagacagtttcatgggtcatttctcggtactttggtttagaaataaatgtctatcttcttatatcatgttggcaggaagagaaagaggaaagaaacagtcaagacgtcaggaatcagaaatgaatgcagatgkgaacattactcatattaactcagtgacacttgagaagcccaaccacttgagctccatctagtcagctaaaggagcagaagataacaaatatagaaagaaaagaactttaatacttacatgtctgagaacactgccctcccccactaaactgggagcatctccaaggtagtggccgttgaaaaaaatctcttctgaagcttctagcacagcatcttacacgtagtaggtcttccacagatgcttgggaatgagcaaatggttaaatgtagactacaaaatgcccagaaattcagcatagtaacctaacagttgttgaaaaaatagaggaaatcacgttctaatttcataagtgcaacttaagcaaacctactaacaaaggtaacctatgttagggccttggagccctctcctttagaagtcaatttccacagtcccccagtcggggagggcacagtgtggagctgacaatagctgctcctctctcctccctactcatgtctac

SEQ ID NO: 943911 - DNA, 588 bp, Homo sapiens
ggctgtggtttcctctgtcctgggaccccggaggacagggaggagagaaaagccagcaccaaactgggaggggaagtgttggacccagcgctcagacagtgtctgtgcttttgcagacacgagggccgctgcctgtgccctgccgcggttcctggcgcccgctcctgccaaggtgcctgcgggccgagcctcctgaccagaaaacccgaccaggtggctcgcgccgggccctctgtgctgccagcgcggctcctcagcgtggccacatcctcggggagggctggcgcattggctgcccggggctgcgggttggggcgctttggcccacagagagccccgggcgcgcacctcccgcaaatgcscctgtccgctcttcctcccgcccctcctgcctctccactgatgtgaggaagagtccgtttctgcagtgatttgcccgggagctgaacttattcactggcggacggcttgggcatggaggagggcttggatggagactggggagtgttctctgacccacgtagtctcccttgcttcgtgcagattctgctattataattagctttctgcggggcaaggcgtcacgcc

SEQ ID NO: 943912 - DNA, 588 bp, Homo sapiens
ggctgtggtttcctctgtcctgggaccccggaggacagggaggagagaaaagccagcaccaaactgggaggggaagtgttggacccagcgctcagacagtgtctgtgcttttgcagacacgagggccgctgcctgtgccctgccgcggttcctggcgcccgctcctgccaaggtgcctgcgggccgagcctcctgaccagaaaacccgaccaggtggctcgcgccgggccctctgtgctgccagcgcggctcctcagcgtggccacatcctcggggagggctggcgcattggctgcccggggctgcgggttggggcgctttggcccacagagagccccgggcgcgcacctcccgcaaatgcgsctgtccgctcttcctcccgcccctcctgcctctccactgatgtgaggaagagtccgtttctgcagtgatttgcccgggagctgaacttattcactggcggacggcttgggcatggaggagggcttggatggagactggggagtgttctctgacccacgtagtctcccttgcttcgtgcagattctgctattataattagctttctgcggggcaaggcgtcacgcc

SEQ ID NO: 943913 - DNA, 624 bp, Homo sapiens
ctttctgcctatgtgtgtctttgtccttccacctttcctctagggaattccttcttggttaaacaaacacaaaccaaaatgaagtggtggaagcggtaactatgattttttttaacatttaaaaaaaataattattatgcttacataataattacgtatatatttatggggtatgtgtgaggttttgatacaggcatacaatgtgcaatgatcaaattagggtaactgggtatccaccactcaaccatytatcatttctttgtgttagaaacattctagttccattctttaagttagtttgaaatgtacagcaaattatagttaactatagttgccttattgtgccgcctaacattagatctatttaattgtatttttgcgcccgttaactatcacctctttatcccccattccctgctacccttcccagcctctgccaaccatcattctactgtgcgtctccacgagctcagtttgcttactttttaactcccacgtttgagtgagaacatgtgaaatttgtccttctgtgcctggcttattttgcttaacataatgttctccagtttcctatgactggttttaatgttggtaattttacctttgtaatcaccactggttgtt

SEQ ID NO: 943914 - DNA, 729 bp, Homo sapiens
tttgaacagagcccccactgggctttaatggggtgctgaatgctgagcctgtaggtgtgcaggcagcaggtgggagtgggcccagcacgaatcctgacttggccacatttcatctgactgcatatcctggggaggagagcccactagggagcaggtgccaaattcccccacggtggtggaggcaggggagtggcagagactatctgtgactttggcggtgtgctctgggcaagtgactragcctcagttttctcctctgtacaatggggagaggacgtacagggggcccataccagaccgtgagccgcagtgaaaggccaaggaatgtagctgcccctgactgttacaatcatcaagtcctggtgtctctatgtgctttccaaaccagaagccacaaaaagactactcaactacagaaaaacacaaagcctccatgtggcaaaagcccataaacaaaaataaaagatgcatggaaaaacatttgcaaatcatcacagacaaggaaccaacctccttcacatatacaaggaacctataaactgataagaaaaacaggcaaaggaaaaaaacagtgtttgcaggaaaggctgtgtaaatgatcttcagcttttgaaaacacgctcaaactcactctgtaacagaaaagcaaacttaacaattgccccaagacaggcttcttacctgacaggaagaatcctgcagcctggtgagactgtggggaaatggacc

SEQ ID NO: 943915 - DNA, 624 bp, Homo sapiens
catatcctggggaggagagcccactagggagcaggtgccaaattcccccacggtggtggaggcaggggagtggcagagactatctgtgactttggcggtgtgctctgggcaagtgactgagcctcagttttctcctctgtacaatggggagaggacgtacagggggcccataccagaccgtgagccgcagtgaaaggccaaggaatgtagctgcccctgactgttacaatcatcaagtcctggtgtctctatgtgctttccaaaccagaagccacaaaaagactactcaactacagaaaaacacaaagcctccatgtggcaaaagcccataaacaaaaataaaagatgcatggaaaaayatttgcaaatcatcacagacaaggaaccaacctccttcacatatacaaggaacctataaactgataagaaaaacaggcaaaggaaaaaaacagtgtttgcaggaaaggctgtgtaaatgatcttcagcttttgaaaacacgctcaaactcactctgtaacagaaaagcaaacttaacaattgccccaagacaggcttcttacctgacaggaagaatcctgcagcctggtgagactgtggggaaatggaccttcttgggaatgtag

SEQ ID NO: 943916 - DNA, 663 bp, Homo sapiens
aggcttgaggctacttcttataaactgtggccctgggcacattccttagctcacctgagcctcagtttcttgatgagaaaaaatcgggacaatagcaaccaacctatctcagagggctgctgtgagaccctgagccactgtttctcaaactgcccctgagatcacctacaacagaatggctgtagggtgaagtttgagaaccgcagtayaggtgaggtggtgcgtggggcaggccctcccacactgtaaagtgcagtgtggtgcggtaaaagctgatattcccgcaggcatcctcagagtgggcccaattagactcttgagcactgattccattcaaggtctgcggcttagagaggatggcaaagtgaggcaccaccaggagcttgtccctatgggctccaggccaaggacgtgcctggagatgactcctgccttgtggcgctgtcactgcctcactgtccacattccatcacgcctcagatcctggcttccaccctggtgaaaggaatctttcaatatcacccacccagccacagacgcttctctgcttctctggcaaggctgcaccccctggctaggtgggcagggccaggggctccttgagacagtctgcagccactgagctctccagcctccagggcagaggtacagtcccatggagcg

SEQ ID NO: 943917 - DNA, 667 bp, Homo sapiens
taggtgaggtggtgcgtggggcaggccctcccacactgtaaagtgcagtgtggtgcggtaaaagctgatattcccgcaggcatcctcagagtgggcccaattagactcttgagcactgattccattcaaggtctgcggcttagagaggatggcaaagtgaggcaccaccaggagcttgtccctatgggctccaggccaaggacgtgcctggagatgactcctgccttgtggcgctgtcactgcctcactgtccacattccatcacgcctcagatcctggcttccaccctggtgaaaggaatctttcaatatcacccacccagccacagacgcttctctgcttctctggcaaggctgcaccccctggctaggtgggcagggccaggggctccttgagacagtctgcagccactgagctctccagcctccagggcagaggtacagtcccatggagcgtggctgatctgaaggcagttctggcctaaaaggggtcttgtcccttcctygtcctcattgctcccaaggccaggttggcagcagtagcagcggggttggatgctattggatgggagaaggtgaatggactcggagtgcagaatcaagctgcggaagccaagggccttgaaggagggtcacacacaagggacaactgcagaggaaaataaagg

SEQ ID NO: 943918 - DNA, 777 bp, Homo sapiens
attttgtaaccaccaggcctgccctagaagagctcctgaaggaagcactaaacatggaaaggaacaaccggtaccagccactgcaaaaacatgccaaattgtaaagaccatcgaggctaggaagaaactacatcaactaacgagcaaaataacaagctaacatcatgacaggatcaaattcacacataagaatattaaccttaaatgtaaatgggctaaattctccaattaaaagacacagactggcaaattggataaagagtcaagacccatcagtgtgctatattcaggaaacccatctcacgtgcagagacatacataggctcaaaataaagggatggaggaagatctaycaagcaaatggaaagcaaaaaaaggcaggggttgcaatcctagtctttgataaaacagtctttaaaccaacaaagatcaaaagagacaaggctgttacataatggtaaagggagcaattcaacaagaagagctaactatcctaaatatatatgcacccaatacagaagcacccagattcataaagcaagtcatgagtgacctacaaagagacttagactcccacacaataataatggaaggctttaacaccccactgtcgacattagacagatcaacaagacagaaagttaacaaggatatccaggaattgaactcagctctgcaccaagcagacctaatagacatctacagaactctccaacctaaatcaacagaatatacattatcagcaccacatcacacttattctcaaattgaccacat

SEQ ID NO: 943919 - DNA, 802 bp, Homo sapiens
atgtggtttcattgctcaatcaaattaacacatctcctggtagctggtatgcagccattgacttggcaaatgcctttttctccattccggtccattaggcccaccagaagcaatttgccttcaactggcaaagccagcaatatacctttactgtcctacctcagagatttatcaactctccagctttgtgtcataatcttgttttttttttcttttgagacagagtctcgctctgtcaccaggctggagtgcagtggtgcaatctcagctcactgcaacctcygcctcctggattcaagcaattctcctgcctcaacctcctcagtagctggggctacacgcgcgcaccaccacgcccagctaatttttgtaattttagtagagacggggtttcaccatgttggccaggatggtcccaatctcttgacctcgtgatctgaacgcttctgcctcccaaagtgctgggattacagacctgagccaccatgcccagccctttgtgtcataatcttattcaaagagatcttgatcacttttcacttctgcaagatagcacactcgtccattacattgatgacattattggattggattcagtgagcaagaattcacaaacacaatggacttatcggtgagacatttgcatgccagagaatttgaaataaatctgactaaaattcagggaccttctacctcagtaaaatttctacgggccaagtggtgtggggcctgttgagatattccttctaaggtaaaggatacgttcctgcatttggctcctcctacaaccaagaaagaggcg

SEQ ID NO: 943920 - DNA, 727 bp, Homo sapiens
gtgatgttagaatctgagatcaaggtgttggcagggttggtttcttctgaggctgagcgagggcctgttctgtgcatctccctggcttcaggtgcttctggaaggatgtgctgttccctgaattacagacaaacaccccaatctctgcctccatgttcatatggcattttccctatgtgtgtctctgaccatgtttcctcggttttttgtttgtttgttttttgctgttgttgttttgttttgagatcgaatctcgctctgtcgcccaggctggagtgcagtggcatgaccttggctcactgcaacctctgcctcccaggttcaagtgattctcctgcctcagcctcccaagtagctgggattacagatgcctgccaccaccttcagctaattttcatatttttagtaragatggggtttcatcaggttggccaggttggtctcgaattcctgacctcaggtgatccacctgcctcagcctcccaaagtgctgggattacaagcctgagccactgcattcagccatttcccccttttataacaacaccgctcctgttggattgggagcccactctacttcagtatgatgtcatgttaacccattacatctgtaaccaccccattcccatataagatcccattttgaggttctggggctgaggacttcaatatcaattcggcgggggggagcctacaatgtaaatttgtaacattgtctctgtcatgg

SEQ ID NO: 943921 - DNA, 727 bp, Homo sapiens
gtgatgttagaatctgagatcaaggtgttggcagggttggtttcttctgaggctgagcgagggcctgttctgtgcatctccctggcttcaggtgcttctggaaggatgtgctgttccctgaattacagacaaacaccccaatctctgcctccatgttcatatggcattttccctatgtgtgtctctgaccatgtttcctcggttttttgtttgtttgttttttgctgttgttgttttgttttgagatcgaatctcgctctgtcgcccaggctggagtgcagtggcatgaccttggctcactgcaacctctgcctcccaggttcaagtgattctcctgcctcagcctcccaagtagctgggattacagatgcctgccaccaccttcagctaattttcatatttttagtaaagatggggtttcatcaggttggccaggttggtctcgaattcctgacctcaggtgatccacctgcctcagcctcccaaagtgctgggattacaagcmtgagccactgcattcagccatttcccccttttataacaacaccgctcctgttggattgggagcccactctacttcagtatgatgtcatgttaacccattacatctgtaaccaccccattcccatataagatcccattttgaggttctggggctgaggacttcaatatcaattcggcgggggggagcctacaatgtaaatttgtaacattgtctctgtcatgg

SEQ ID NO: 943922 - DNA, 727 bp, Homo sapiens
gtgatgttagaatctgagatcaaggtgttggcagggttggtttcttctgaggctgagcgagggcctgttctgtgcatctccctggcttcaggtgcttctggaaggatgtgctgttccctgaattacagacaaacaccccaatctctgcctccatgttcatatggcattttccctatgtgtgtctctgaccatgtttcctcggttttttgtttgtttgttttttgctgttgttgttttgttttgagatcgaatctcgctctgtcgcccaggctggagtgcagtggcatgaccttggctcactgcaacctctgcctcccaggttcaagtgattctcctgcctcagcctcccaagtagctgggattacagatgcctgccaccaccttcagctaattttcatatttttagtaaagatggggtttcatcaggttggccaggttggtctcgaattcctgacctcaggtgatccacctgcctcagcctcccaaagtgctgggattacaagcctgagccrctgcattcagccatttcccccttttataacaacaccgctcctgttggattgggagcccactctacttcagtatgatgtcatgttaacccattacatctgtaaccaccccattcccatataagatcccattttgaggttctggggctgaggacttcaatatcaattcggcgggggggagcctacaatgtaaatttgtaacattgtctctgtcatgg

SEQ ID NO: 943923 - DNA, 736 bp, Homo sapiens
tttggcaaggaggccttcccaagcatctctgggctccaggctgaggacaacgctgatctcaactgttggcttcagacagccccctggaggcccaaacagtgctgcagtctgggggagtgagacaggaacatgtcaggtctcctaggagcaygacctaactacagcaccatacaaccaggacagcagggctgtttaccatttgtgtgcatgtttgctggtgcttctgctaaccaggacccagggctcagattagggacagtgatctagagaatgctgctttgttttctcagggccagacttcagagagagcccttggccacagcattgtcagactgcctcagaagaatcagaaagtccttgatttctggaacaggctgccctgggaatacagccatgataggccagggcaagcagggacagaatccagctgggtctgtctcaggcatgtgcactaataaagatctctgtttgtccttattgtttactgaatacctactatgtgccaggctcaggtctcatgctaaggatacagaggtgagaagacagacagggattctgtcttcacaggactgacaccatgcagaaaagtgagggccaacaagtcaataggagtaaggcatattgtggtgtatccaagaggtgacactggccagaagggggagagcaataggaagcccttagggagttgtaagcaaggaagacacggagtctgatgggagacttaggagaaaagtcc

SEQ ID NO: 943924 - DNA, 457 bp, Homo sapiens
cctccactgtgattcacttacagtggcctgacaaagactccaagtagctttgctatctgccgctgacacccaaataccattgggtctgttgggtcatacggcccaagtggcagagcagcttgcacagcagcctggacctgttgcagagccttctcctgttctgaatcccactcaaacytggcagccttttgggttacttgataaatggactggagtaacacacccaaattagagatatgttgcctccaaaatccaaataggcccactagccattgtgcctttcttggttgtaggaggggctaaatgcagcaacttatccttcaccttagaaggaatgcctcgacaggccccacaccactggacacctagaaattttattgaggtagaatgcccttgaattttagttggatttaccgcccatcctcttgcatgcaaatgtctcaccagtaagtccact

SEQ ID NO: 943925 - DNA, 640 bp, Homo sapiens
ccatagatgtctgcaacttcaaaaacatccacagtgacaaatgtgtaaaaaaaattctgtgaactcttctgtggtggtgtgtgtattgaggtggataagggaccccctattaagggcctgacttctccccctgaagcacggaaataaaggagaatcttgagtttcttcaagggaaatttcaggtacctcactgtccctgagaagaaaacctgactagcaaaaaggttaaaggagcttaaaacaaccaaggaagttaraggcatgggatgtctgggtccctatagaaactaaaaacaacaacttaacatatgcccctgagttgtttttcaaacactcagaccacctccaaaagtctcggctgtcagtaggcctcagataatgggaaactgaggactgaggtctgactgcccttctttgttctaagtctcttactgaggggccctgaggaaatcacgcccatgagccagagctaacatttctttctgttgaccccaattttttggacaaagctttacgaccttaaccagttgcaaatcaggaaatttctaaatctacttacctttgatctgaaagcccctgcttcaaaatactctactgttttaggccaaatcagtgtataacctctatatattgatttaca

SEQ ID NO: 943926 - DNA, 640 bp, Homo sapiens
ccatagatgtctgcaacttcaaaaacatccacagtgacaaatgtgtaaaaaaaattctgtgaactcttctgtggtggtgtgtgtattgaggtggataagggaccccctattaagggcctgacttctccccctgaagcacggaaataaaggagaatcttgagtttcttcaagggaaatttcaggtacctcactgtccctgagaagaaaacctgactagcaaaaaggttaaaggagcttaaaacaaccaaggaagttagaggcatgggatgtctgggtccctatagaaactaaaaacaacaacttaacatatgcccctgagttgtttttcaaacactcagaccacctccaaaagtctcggctgtcagtaggcctcagataatgggaaactgaggactgaggtctgactgcccttytttgttctaagtctcttactgaggggccctgaggaaatcacgcccatgagccagagctaacatttctttctgttgaccccaattttttggacaaagctttacgaccttaaccagttgcaaatcaggaaatttctaaatctacttacctttgatctgaaagcccctgcttcaaaatactctactgttttaggccaaatcagtgtataacctctatatattgatttaca

SEQ ID NO: 943927 - DNA, 704 bp, Homo sapiens
aaaagtgcatggatctcacaaaagcttccagtaggccatgcccatcatgtatatgtgattcaactatgatatcaagatggtctgaaccctcatgatgatatcatgatagagataagagagctaatgatgctgggcagagaaagtgtgaatgtatactgtcgtccattccacctgaatgcacactgattctgatcctattctctgagggaaatagacaagacctcagtatctgcttcagtgaggtaactgtgcacctgcagccatagcattctgttccmagagatccccatctggcacagatattgctaatgccactattgcccatctgggtctgtacaaatccaaattcatcttccaggatcattcaactattgtagagatcagtccagtaaactgaaaacaaaaccccagaagtaatcacacgtactgcgggagaggagagagctgtctcagagggcacagtcttgttgaaattcctctgctccttgggaagaaacagcccagaaaaggccccaggggctgcgtctcatctgggttcctggatgaggcacaccccctactgcactgagattccacagaagctgggggtgaagtgcaaataccgtctttggttcatccttgggattttctttttatcacacactcgtcattttgtccacaatgtccaaagtttctaaagtgctgtctaatagatagaggttctt

SEQ ID NO: 943928 - DNA, 704 bp, Homo sapiens
aaaagtgcatggatctcacaaaagcttccagtaggccatgcccatcatgtatatgtgattcaactatgatatcaagatggtctgaaccctcatgatgatatcatgatagagataagagagctaatgatgctgggcagagaaagtgtgaatgtatactgtcgtccattccacctgaatgcacactgattctgatcctattctctgagggaaatagacaagacctcagtatctgcttcagtgaggtaactgtgcacctgcagccatagcattctgttcccrgagatccccatctggcacagatattgctaatgccactattgcccatctgggtctgtacaaatccaaattcatcttccaggatcattcaactattgtagagatcagtccagtaaactgaaaacaaaaccccagaagtaatcacacgtactgcgggagaggagagagctgtctcagagggcacagtcttgttgaaattcctctgctccttgggaagaaacagcccagaaaaggccccaggggctgcgtctcatctgggttcctggatgaggcacaccccctactgcactgagattccacagaagctgggggtgaagtgcaaataccgtctttggttcatccttgggattttctttttatcacacactcgtcattttgtccacaatgtccaaagtttctaaagtgctgtctaatagatagaggttctt

SEQ ID NO: 943929 - DNA, 770 bp, Homo sapiens
ccttgatgctgatcgctttccagctttttcatgaaaacctaggaaatttaaatactttgaagaggaagaaaagagtggggagagagtaaagtgcctttaagaggaaaagtagaagtttttttttttttttaaagggagatctcattgtcagtggcattttaagagccttgaagctcaatgaaccaaaggaagtgtcaaacaattaagtgaggtagcaagccatgcaggcctaggggaagggcattctaagaaagacaacagcatgtgcaaagtctttggattgggaagaatgtgatttgcttaaggaatagcaaggccagtgtgtcaaaatagtgcrtcattggggaaaacagtggagaagcatgacagagaatgaaaaagagaggaaggaggtaggcaggggccagatcactggaatctacagttggcaattaatgaccatatgtactccttaagagcatgctttaatgaaactgcaaacaacagtgttgataataccaaccaatcactcaacatacaactaaaacacttcatatttttaccacagaaacagaatacgggaggtaagtatgaaaagtctgtagatctatttatacacagtgggagtatctacctgagacaagaaaaactggcacacacacacccacttgcacacacataccctttcttcaactaaagaaaggattcaggctgtaattttagcaaagtgtcttaacccaagcaacgtaactgaaaagacctagtatagtgttcaaggtgcaaatcaatca

SEQ ID NO: 943930 - DNA, 770 bp, Homo sapiens
ccttgatgctgatcgctttccagctttttcatgaaaacctaggaaatttaaatactttgaagaggaagaaaagagtggggagagagtaaagtgcctttaagaggaaaagtagaagtttttttttttttttaaagggagatctcattgtcagtggcattttaagagccttgaagctcaatgaaccaaaggaagtgtcaaacaattaagtgaggtagcaagccatgcaggcctaggggaagggcattctaagaaagacaacagcatgtgcaaagtctttggattgggaagaatgtgatttgcttaaggaatagcaaggccagtgtgtcaaaatagtgcgtcattggggaaaacagtggagaagcatgacagagaatgaaaaagagaggaaggaggtaggcaggggccagatcactggaatctacagttggcaattaatgaccatatgtactccttaagagcatgctttaatgaractgcaaacaacagtgttgataataccaaccaatcactcaacatacaactaaaacacttcatatttttaccacagaaacagaatacgggaggtaagtatgaaaagtctgtagatctatttatacacagtgggagtatctacctgagacaagaaaaactggcacacacacacccacttgcacacacataccctttcttcaactaaagaaaggattcaggctgtaattttagcaaagtgtcttaacccaagcaacgtaactgaaaagacctagtatagtgttcaaggtgcaaatcaatca

SEQ ID NO: 943931 - DNA, 768 bp, Homo sapiens
attaacacctccattttaaaaaaatctgtactaggaatataataataaatgcataccctctcaggatttgattaaatggaataaaatatatagaattcctagaacagtgccaggagtttgaggccagcctgggcaacatagtgagaccccatctgtacaaaaaatacataaaaaatgaggggggaatagcggtgcacacctgtggactcagctacttgatmggctgagatgggaggattgcttgagcccgggggccaaagctgcagcagtgcagtgactgcgtcccagtaatcccagcactttgggagggcaaggcaggaggatcccttgaggccaggagttcaagaccagcctgtgcaacataaagagactccatctgtacaacaacaacaaaaattcttacgcacttagtatttgccagatataatgccaatttctagggcacaaaggcaaatggtaactacctccctggattgttgtaaaaataaagcatgcaaaacattttgtgcccccaatgatcccttcctcatggtgtccccacacttttattttgtgctgtcacaatgagcagggcaccaccaggatactgggaaataatgacgtgtgatttccaagaccaggtcacaaaaaacattttgccttgccctcttgaatcacctgctctggtggaaaccagacaactgttatttatgtcatagcattcaagcggccctatggagaggtccatgtggtaaggaactgaggcttcctgccaacagccaagtgaaa

SEQ ID NO: 943932 - DNA, 748 bp, Homo sapiens
tctgcatggcactgcagcctgggtgagggaggacagggtcatcatacaaagtaggcggccagggctgacatcttgtccttgggccgtctggggttgggcttcccagggggcctcctggcccggccccgccctcgaccctgccttctccctggtccaccgcggtgcatggggtggcaggaggccgcatgcttcagctccaccagctcctggaagacggggtcacaaaagacgcagcccatgtgctgcgtctcatcgcccgggagtggggacttggccttgttgaagtccacatcaagcaaggcggcctcacagacactgcaggtgtcggcggacacccgcacgcggtgggcgttctcgaagcagtgcgctaccacgttgcacttgttgcaggccaccttccacttggggcccgaggtggggtccagcaccagcaccccrctctcacattccacgcactggccgatgcccagcatgctcagcgagtgctggcaggaggggtgcgtacactcgttgcagcccatgcctggcgggagaagggagccctgtaaaggcacgcccactgtgcccacctgccctctgctgcctgctcccaatgcctcaagctcctggatccctcgtcccagcagaaggaactcttcttggccttgctcttggggacagccttgctcatgtttcggctcctggctgccattacccctgttttctgcttacctgaaacctcctcaactttcaaggcccctcgctggca

SEQ ID NO: 943933 - DNA, 709 bp, Homo sapiens
tatatgtgccacattttgttaatccatagactggtacatttttaactccatcagagcgcaagccaaaaagcttcctcctgggctgaaaaaaaaagcttccccctgggctgaaaaaaagcttcatcttgggctggaaaagctttttggcttgcactcttcctctgggcctgagccttccctgccctctcatctgcttggacagagggcagggaagactgaagcccagaacttaatcctaagtgtagcagaccatcgggaccctgacagggtaacagtggggtactgagtcacgggacgaggccatctggattcacgcacctgaaaatcttgatgtccttgaattttccaaacctgcagaagtggccctcccttactcattgaaacccatgtctcccttccttttgcctgaagatgatgcagagacctctgacctgtgagattgtatccaccaccacaagtgtccccagaaatctgccaccacctcctattaagaccaawggaccaataactagaattgagtcccaaagaaacctggcaaggaatgtgatagacctgctgcagaactaaggagctgcagaactaaggagctccagaaccagccaacacgtgcagtgggccccaggcgagtgtgtatggggctggattctgagggtgtaagatcaaagtgcaaaacctaagattggattggggagggtttatctgctggaag

SEQ ID NO: 943934 - DNA, 700 bp, Homo sapiens
agattctttatgtgggccctggaatagcctcagtccagcctgatctctctctcttccctcctgaagttttatttcaaacattttgagactctaaaagggtttctttgtctcatttctctcctccagtcctactaccagggttgtcttcaatttatatccaatgtttctctggcctggaactgagacctacctcccaagcagcgacccgacccgtggagtggggtccctggggcaagcgaatggycctttgcctggagaacctgggccagcagtcatggcaggtgacacattccattctggggcgaggaaccagggagggagcactgcatagatcagaagggtaaacaaggggagggagaaggagcaaacttagatttgggagggaaagagggaagggtgcagaggaagcagaacacggatgactgggcctccttcagttgttcttgtgactagaccctcccatctaagccaccaggggacaggaagggtatgagtttgaggactctaatggccccaaggtactactgtggtttatcctacttgtaggcggtcccaagagctttgttctctccagggactcaaaggggatgaacttgcaagtcttttgtctccactcagtgccttctctgattaggccaataaacatccccaggcctcagtctcaggccactgtaggggctgaggacagtgagaaagatgt

SEQ ID NO: 943935 - DNA, 636 bp, Homo sapiens; identical to SEQ ID NO: 917090

SEQ ID NO: 943936 - DNA, 726 bp, Homo sapiens
gactaccgagcaatcaaattagaactcaggatgaagaaacttactcaaaaccacacaactacacggaaattgaacaacctgctcctgaatgactactgggtaaataatgaaattaaggcagaaataaagaagttatttgaagccaatgagaacaaagagacaatgtaccagaatctctgggacacagctagaacagtgtgtagagggaaatttatagcactaaatgccacagcagaaagtgggaaagatctaaaattgacaccctaacatcacaattaaaggaagtwtagaagcaagagcaaataaattcaaaagctagcagaagacaagaaataactaagatcggagcagagctgaaagagatagagacgtgaataacccttcaaaaaaatcaatgaatccaggagctggttttttgaaaagattaacaatctagatagaccactagctagactaataaataagaaagaagaatcaaatagatacaataaaaaagataaaggggatatcactactgatctcccagaaatgcgaactaccatcagagaatactacaaacacctctatgcaaataaactagaaaatctagaagaaaggatagattcctggacacatacaccctcccaagactaaatcaggaagaagctgaatccctgaatagaccaataacaagttctggtattgtggcagtaattaatagcctaccaaccaaaaaaagcccaggac

SEQ ID NO: 943937 - DNA, 678 bp, Homo sapiens
atccttctgggaggatcaggaaggtagaaggggctgcagtcaggcccaggtcaggacatgagcaaagcaaagctgagacctgctgtctccaggctttgggactagggggtcgcccctggatatgggagggtggggcagggttttctgtccaggccaagagggagacaggagaagatgtggacgggattctgatcagggagcagcaggccacatctcagcagtcaggggaggcgcttgctgtggggaatactgttggggactgcatggtgccaggagtgtgtcccaggtgtgagctcttcaggtgatgggcccagaccaggatgcaggtccaggctgtgtgtgtccaggccccacactgcacatgcccatccactgtgggtgccccccgtgcyggtgacactccagagcacaggctgtgtgggtcacccgtgcatgtaggggactgcagagcacacacatgtgggtgtgtgtgtaagccgggggagctgaagtggacagcagagatcccccacacgtagagctcctggaggaaaccacactgccagtgaggcctatgacctcccttgagaagctctcctctgggccattgcagctctaatccagcacacatggcctataggtaggaagctgtccccatgggttcaggaggcggacttgggcagtgatctgtgagctgct

SEQ ID NO: 943938 - DNA, 665 bp, Homo sapiens
tgaaagtggcctggaaggcagatggcagccccgtcaacgcgggagtggagaccaccacaccctccaaacagagcaacaacaagtacgcggccagcagctagctacctgagcctgacgcctgagcagtggaagtcccacagaagctacagttgccaggtcacgcatgaagggagcaccgtggagaagacagtggcccctgcagaatgctcttaggcccccgaccctcaccccacccacaggggcctggagctgcaggttcccaggggagggggtctctctccccatcccaagtcatccagcccttcttcctacactcaataaaccctcaataaatatcctcagtcmaccagaaaccctgggttttgtgttttgcttctgtttatacattttctaccctaaattggtccaacctgcaagatgaacaaaattcttttagccttgtgggaatgaagtctggattgtttttgaggggtagttccaccatcacctagaaaggcccagagaatattccagaacagagccttgggcagcaggccccaggactgcccctttcccatacgtgctgtgtttgtgtggacatgtccacctccagcggcctggggcgaccgctccttggttccccatggcccagaagaacgagtaccctccacggatcatcaggcctc

SEQ ID NO: 943939 - DNA, 594 bp, Homo sapiens
cattctggaggctccctcatgtcccccatttgaaaaagacaacggcagcctccaccctagctgtcccacccaacatgaggccagattcaggggtgcagggatgctcccaaggttaccctaacagatgtgactggcacttcatattgggaccagccaggcctcactgaccaggcctatccaactagaactactccagaaggtggggctgaaacccaccaaggttcccagaacactgcactctagggcaatcagcctctgcatgggaggagaggagcaccctctgcaccaccccatggtgttaccaaaagttgaaccatgggttggttcaactttgcagagaagrgaccacctatcccatctgtggaaattcactccttagcgacactaatgccctctaataaattcaatcctgggcctgagtgatggttggtgcaaaaaacaaattcaagatcccagtgtcctccagaagcctggatttccagggatcctgctgtgggtcacaggatgtcaccggtcccctctctctgtgggttaagtgtgggggccatgtggactccctcatgagcagatgccaccaggaccactggccccagc

SEQ ID NO: 943940 - DNA, 712 bp, Homo sapiens
tggagcctcttgagccaaggctggagctgaatcagccatgaggttgcacaggactgtggggccctaggccagacccagcaagccattcagttcacctaggcctcaggacctgtaatgtgagaggctgcctcagagatatctgaaatgcctttgaggtctttttcccattgtcttggctatcaacacttggctcctctttagttacgcaaatacctctagcaagtgattgtttcgcagcccacttggattcttttcaggaagaggggatgttattttctgccacatagtcaagctgaaaatttttcaatcttctatgctctgctttccttttaaatataaattccaaattaaagtcatttctttgatctcacatctgagtmtaggctgtagacacagccaggccacctcttgaactctttctgcctagaaatttcttctgccagatactctaaatgattgttctgaagttccaacttccacagattcctagaacatgaatagaattcagccaaactctttcctaaggcataacatgggagatacttgccccagttcccaataagttactcactttccgtctgagatgttgacagcctatgcttcattgttcctaacaccatcagcattttgatcacaaccatttaaccagtctctataaagtctgaagcattttctaatcttcctgttgtgaacccccaaaattggacacaag

SEQ ID NO: 943941 - DNA, 721 bp, Homo sapiens
ccgagcaatcaaattagaactcaggatgaagaaacttactcaaaaccacacaactacacggaaattgaacaacctgctcctgaatgactactgggtaaataatgaaattaaggcagaaataaagaagttatttgaagccaatgagaacaaagagacaatgtaccagaatctctgggacacagctagaacagtgtgtagagggaaatttatagcactaaatgccacagcagaaagtgggaaagatctaaaattgacaccctaacatcacaattaaaggaagtwtagaagcaagagcaaataaattcaaaagctagcagaagacaagaaataactaagatcggagcagagctgaaagagatagagacgtgaataacccttcaaaaaaatcaatgaatccaggagctggttttttgaaaagattaacaatctagatagaccactagctagactaataaataagaaagaagaatcaaatagatacaataaaaaagataaaggggatatcactactgatctcccagaaatgcgaactaccatcagagaatactacaaacacctctatgcaaataaactagaaaatctagaagaaaggatagattcctggacacatacaccctcccaagactaaatcaggaagaagctgaatccctgaatagaccaataacaagttctggtattgtggcagtaattaatagcctaccaaccaaaaaaagcccaggac

SEQ ID NO: 943942 - DNA, 678 bp, Homo sapiens
aatttgaagatcaagatgatgaagccagagttcagtatgagggttttcgacctgggatgtacgtctgcgttgagattgaaaatgttccctgtgaatttgtgtagaactttgacccccgttaccccattatcctgggtggcttgggcaacagcgagggaaatgttggatacgtgcaggtgggtccctttgctgcatatttggtgcctgaggctctgtggatttcccctccatcaatcatcttaccctctcatccccctcagatgcgtctgaagaaacatcgctggtataagaaaatcctcaagtcccgagatccaatcatattttctgtagggtggaggaggtttcagaccatcccgctctgttatatcgaagaccacaatggaagacaaaggcttctaaagtataccccacagcatgtgcatcgcggagcagccttttgggrtaaaatatgattacaataacttgcctattgctgagattaaaccttacaggctgcgttattttagctttgtgcttttcctttcataaaattccactcctaagatttttctcttttctgggagcagggaggtggtttggagtatatacgtaaatctatatccaaatctaaatgtccatatccagtatgttaaactagaatctaaaatttgtggtttgctatatttctttttttccttt

SEQ ID NO: 943943 - DNA, 678 bp, Homo sapiens
ggttaaagaacagaaacctcccaaaactccaccctccagttccaggctggctccacctcatgtccaaaaaggctggtcctccaggtctttgattgctattagtaagtcccaagacacagtctttacaccaagtcgctgtgtgccttgggcaagaaactctccctctctgagactgtgtttccacactggtagaagtagctagaagacctccctgccaggttggcaagtccactctgtgacatctacaaagggagcagggatctcttccatttcctggaggagagctggggtggaggctgcaacccaggatcaccagaggagctggggtctttggggttcctgaggactcctcagagggggatcaggagctgcagagccagcttctaactctggggactcagagatccagaacctttgtcatatccccagccaatactttgtcatcctgtgcctcagactcccccagatcccaagagtgagaagctcaagaygagacaagaaagaccagccagcttgaatttagggatggtggggagtggggagctggggacccctggacctgggggagaggagtctgcagtgcctgcaggtggagtttctgggacctgggggatggagactgggcaggggactgaccagcagaaggccaaggtgggggataccctcagacatggagca

SEQ ID NO: 943944 - DNA, 779 bp, Homo sapiens
tgtatatcacacagcagagtgaacatagttaacataatttattgtacatttcaaaatacatagaagatttgaaatattcccaacatatagaaatgacaaatgctcaaggtgatggatatcctaaacactaattcgatccttacatactgtattcatgcatcaaaatagcacgtataccccataaacatatacaattataatgtatcagtaaaacatgttctttaaattaaaaaaaactgtcaattctgaattctttactcagtgaaaatatctttcagaagggaaggcaaaataaaatggttttaaccataaatatacttgcactattcatgacctgcagacacacactatagaaaataataaagaacacttctcagatagaaaatcatactaaagatgtgactctgaataaagaaaacaaaaacatcaaatatagtaactacataaaaacatayagaaatggtaaataaacatagatataaacgacttaaattacattacaaaacaactagacttaatagacaactatagaacagtccatccaacacagcagaatacataataatctcaagtgcatatggaacactctccagggtagaacctgcaaaaaaaaaatgagtaccttaaaaaaatagaaaatctataaagtatattctttgtgttacttcactcttgtattgctataaagaagtacctgagcttgggtaatccataaagaaaagaggtttaattggctcatggttatgcaggctctacaggaaatctggtgccagtatctg

SEQ ID NO: 943945 - DNA, 604 bp, Homo sapiens
gcatgtgtgggaggagcttctaaattatccactagcacaagcccgtcagtggccccatgcataaatgtacacagaaacaggtggggtcaagcagggagagagaactggccagggtataaaaagggcccacaagagaccggctctaggatcccaaggcccaactccccgaaccactcagggtcctgtggacagctcacctagyggcaatggctccaggtaagcgcccctaaaatccctttgggcacaacgtgtcctgaggggagaggcagcgccctgtagatgggacgggggcactaaccctcaggtttggggcttatgaatgtgagtatcgccatctaaggccagatatttggccaatctctgaatgttcctggtctctggagggatggagagagagaaaaaaaacaaacagctcctggagcagggagagcgctggcctcttcctctccggctccctccattgccctccggtttctccccaggctcccggacgtccctgctcctggcttttgccctgctctgcctgccctggcttcaagaggctggtgccgtccaaaccgttccgttatccaggctttttgaccacgctatgctccaagcccat

SEQ ID NO: 943946 - DNA, 579 bp, Homo sapiens
tacccattaatggttcacctcgaacacccaggcgaggtcagaacaggagtgcacggatagcaaaacaactagaaaatgatacaagaattattgaagttctctgtaaagaacatgaatgtaatatagatgaggtaatttaacttcatgatttctttaaaacagttaaagtagatttagatgtaagttctccctaacaatatttacttcttttgttatgagcatgttttttttgtaattagtgctaactcttttgcagtagcaaaatatttagaaaaaattaattcgttatatttagttrctttgattttaaagagagtagctccctcactctggaatcactgaaaagtatataatcaagacaatagttttcaaatgtagtttttttttttttttattcctctgaggttactgatacccctaatgttttaaaataccctgccaaggctgggcatggtggctcacacctgtaatcccagctctttgggaggccgaagtgggaggatttcttgaggccaggaggtctagaccagcctgaacaacatagcgagactctgtctctacaaaatacatatttaaaaa

SEQ ID NO: 943947 - DNA, 751 bp, Homo sapiens
caacaagctgctgctcatagactatgcggcccgccgcctggtggcctgcggcagcatctggcagggcatctgccagttcctgcgtctggacgacctcttcaagctgggtgagccgcaccaccgcaaggagcactacctgtcgggggcccaggagcccgactccatggctggtgtcattgtggagcagggccaggggcccagcaagctgtttgtgggcactgctgtcgacggcaagtcggagtacttccccaccttgagctcccgcaagctcatcagtgatgaagacagcgcggacatgttcagtctcgtgcgtgagccttccttctcttcttcctccacccagtcctggctctgcctcccagaagagccctgttctttctgagaggggactktcggctcctcagtgtctgggatgcagacaggttgcggagggtgggatgacagcctgaacccaggttgcgggggtcccctgtgtgcagggaggctggtcaccctgccctctgcagcctttctggcctgggcctctgtgatcatccaggcgggagggggatgcagagggaagctggcggtggcccgtgatgttggcacagggcctcaccggatgctgtctcctccccctgctccccaggtgtaccaggatgagtttgtgtcctcccagatcaagatcccctcagacacgctgtccttgtaccctgcctttgacatctactacatctacggcttcgtcagcgcctccttcgtgtacttcctg

SEQ ID NO: 943948 - DNA, 751 bp, Homo sapiens
caacaagctgctgctcatagactatgcggcccgccgcctggtggcctgcggcagcatctggcagggcatctgccagttcctgcgtctggacgacctcttcaagctgggtgagccgcaccaccgcaaggagcactacctgtcgggggcccaggagcccgactccatggctggtgtcattgtggagcagggccaggggcccagcaagctgtttgtgggcactgctgtcgacggcaagtcggagtacttccccaccttgagctcccgcaagctcatcagtgatgaagacagcgcggacatgttcagtctcgtgcgtgagccttccttctcttcttcctccacccagtcctggctctgcctcccagaagagccctgttctttctgagaggggactttckgctcctcagtgtctgggatgcagacaggttgcggagggtgggatgacagcctgaacccaggttgcgggggtcccctgtgtgcagggaggctggtcaccctgccctctgcagcctttctggcctgggcctctgtgatcatccaggcgggagggggatgcagagggaagctggcggtggcccgtgatgttggcacagggcctcaccggatgctgtctcctccccctgctccccaggtgtaccaggatgagtttgtgtcctcccagatcaagatcccctcagacacgctgtccttgtaccctgcctttgacatctactacatctacggcttcgtcagcgcctccttcgtgtacttcctg

SEQ ID NO: 943949 - DNA, 668 bp, Homo sapiens
aggctgaggcaggataatggcgtaaacccaggaggtggagcttacagtgagccgagatcgtgccactgcactccagcctgggcaacagagcgagactccgtctcaaaaaaaaaaaaaaattaaaaataaaagaaagaaaaaggaatattttgatacatgctatcaaatggatactctcaaaggattttcaagaaacattatgttaactgcaataagccggaaacaaaaggctgcatattatatgattccacttatatgatgtacttaccggcttcagatccagagtcaaaaagtagaaggttggtttccagggcctgggaggatgggggaatgrgaaattgtataatggggacagagctttagtttgggaagatgaaaagagttctgaagatggatggtggtgatgactgtacaacagtgtgaacgtacttaatgccactgaactgtacagttaaaagtggttaaggccgggcgtggtggctcacacctgtaatcccagcactttgggaggccgaggtgagcggatcacctgaggccaggagtttgagaccagcctggacaacatggtgaaacccccatctctacaaaaaaaaaaaaaaaaattagctgggcatgttggtgggtgcctgtaatcccagctactcaggaggctgaggcgggagaatcac

SEQ ID NO: 943950 - DNA, 572 bp, Homo sapiens
ctgtgctcaactcagagctccacccccacaggcttcctttcagcactcacaggcctcagctttcttctggcctagagcttttgtgtatgatggtctctctccctggaacacctttctcacttctctcatccatcccctcttgctggttgatctcttctaattattttctggctctactcaaacctcgcttcttccacgaagccttctctgatcacttggccaacactcacaccccacagttgacagtagacatcctgtcatrataagtcttttttttttttctttttctgggacggagtcttgctctgtcacgcaggctggagtgcagtggcgtgatcttggctcacttctgcctcctgggttcaagcaattctcctgctttagcctcccgagtagatgggattacagatgcatgccactatgcctggcttttttttttttttttttttttttagtagagatagggtttcaccatgttgaccaggctggtcttgaactcctgacctcgtgatccatctgccttggcctcccaaagtgctgggattacaggcatgagccactgcacccagccc

SEQ ID NO: 943951 - DNA, 615 bp, Homo sapiens
caggctggtactggggtttgtctgcacagagtcttgtgacgtgaaccatctgtgggtctctcagccatagatacaaccacctgctccaatggaggtggtagaggatgaaatgaactctgtgagggtccttacttttggttgttcaatgcactatctttttgtgctggttggcctcctgccaggaggtggcactttctagaaagcatcagcagaggcagtcaggtggtggtggctgggggggctggggcactagaactcccaagaatatatgccctttgtcttcagctacyagggtgagtaaggaaggaccatcaggtgggggcaggactagtcgtgtctgagctcagagtctccttgggcaggtctttctgtggctactgtgggaggatgggggtgtagtttccaggtcaatggatttatgttcctaggacaattatggctgcctctgctgtgtcatgcaggtcatcaggaaagtgggggaaagcaagcagtcacgtgacttgcccagctcccatgcaactcaaaaggttggtctcacttccagcgtgcaccctcccccgcaacagctccgaatctgtttccatgcagtcagtgagcaaggctgagaacttgccc

SEQ ID NO: 943952 - DNA, 641 bp, Homo sapiens
tatcctcttgggggccccttccccacactatctcaatgcaaatatctgtctgaaacggttcctggctaaactccacccatgggttggccagccttgccttgaccaatagccttgacaaggcaaacttgaccaatagtcttagagtatccagtgaggccaggggccggcggctggctagggatgaagaataaaaggaagcacccttcagcagttccacacactcgcttctggaacgtctgagrttatcaataagctcctagtccagacgccatgggtcatttcacagaggaggacaaggctactatcacaagcctgtggggcaaggtgaatgtggaagatgctggaggagaaaccctgggaaggtaggctctggtgaccaggacaagggagggaaggaaggaccctgtgcctggcaaaagtccaggtcgcttctcaggatttgtggcaccttctgactgtcaaactgttcttgtcaatctcacaggctcctggttgtctacccatggacccagaggttctttgacagctttggcaacctgtcctctgcctctgccatcatgggcaaccccaaagtcaaggcacatggcaagaaggtgctgacttccttgggagatgccataaagcacctggatgatctcaag

SEQ ID NO: 943953 - DNA, 640 bp, Homo sapiens
tatcctcttgggggccccttccccacactatctcaatgcaaatatctgtctgaaacggttcctggctaaactccacccatgggttggccagccttgccttgaccaatagccttgacaaggcaaacttgaccaatagtcttagagtatccagtgaggccaggggccggcggctggctagggatgaagaataaaaggaagcacccttcagcagttccacacactcgcttctggaacgtctgaggttatcaataagctcctagtccagacgccatgggtcatttcacagaggaggacaaggctactatcacaagcctgtggggcaaggtgaatgtggaagatgctggaggagaaaccctgggaaggtaggctctggtgaccaggacaagggagggaaggaaggaccctgtgcctggcaaaagtccaggtygcttctcaggatttgtggcaccttctgactgtcaaactgttcttgtcaatctcacaggctcctggttgtctacccatggacccagaggttctttgacagctttggcaacctgtcctctgcctctgccatcatgggcaaccccaaagtcaaggcacatggcaagaaggtgctgacttccttgggagatgccataaagcacctggatgatctcaa

SEQ ID NO: 943954 - DNA, 632 bp, Homo sapiens
tgggggccccttccccacactatctcaatgcaaatatctgtctgaaacggtccctggctaaactccacccatgggttggccagccttgccttgaccaatagccttgacaaggcaaacttgaccaatagtcttagagtatccagtgaggccaggggccggcggctggctagggatgaagaataaaaggaagcacccttcagcagttccacacactcgcttctggaacgtctgagrttatcaataagctcctagtccagacgccatgggtcatttcacagaggaggacaaggctactatcacaagcctgtggggcaaggtgaatgtggaagatgctggaggagaaaccctgggaaggtaggctctggtgaccaggacaagggagggaaggaaggaccctgtgcctggcaaaagtccaggtcgcttctcaggatttgtggcaccttctgactgtcaaactgttcttgtcaatctcacaggctcctggttgtctacccatggacccagaggttctttgacagctttggcaacctgtcctctgcctctgccatcatgggcaaccccaaagtcaaggcacatggcaagaaggtgctgacttccttgggagatgccataaagcacctggatgatctcaa

SEQ ID NO: 943955 - DNA, 578 bp, Homo sapiens
cactatgggttcatctttattgtctcctttcatctcaacagctcctgggaaatgtgctggtgaccgttttggcaatccatttcggcaaagaattcacccctgaggtgcaggcttcctggcagaagatggtgactgcagtggccagtgccctgtcctccagataccactgagcctcttgcccatgattcagagctttcaaggataggctttattctgcaagcaatacaaataataaatctattctgctgagagatcacacatgattttcttcagctcttttttttacatctttttaaatatatgagccacaaagggtttatattgagggaagtgtgtatgtgtatttctgcatgcctgtttgtgtttgtggtgtgtgcatgctcctcatttatttttatatgagatgtgcattttgwtgagcaaataaaagcagtaaagacacttgtacacgggagttctgcaagtgggagtaaatggtgttggagaaatccggtgggaagaaagacctctataggacaggacttctcagaaacagatgttttggaagagatgggaaaaggttcagtgaagacctgggg

SEQ ID NO: 943956 - DNA, 808 bp, Homo sapiens
ctccagactgtccacagcattccgctgaccatcaataaggaaggtgggcccccccgtttccgtgtacagggcacctgcagggagggcaggcagctagcctgaaggctgatccccccttcctgttagcacttttgatgggactagtggactttggttcagaaggaagagctatgcttgttagggcctcttgtctcctcccaggagtggacaaggtgggttaggagcagtttctccctgagtggctgctgctgggtggttgaggagatgcacggcttctgttcctagtcacaaggctgcagcagacgctcctcagatgctctgtgccttggatctggccccactcccgtcctcccagccctcctctcctccagctacctgccagccggcacttttggtcaagctgttttgcattcactgttgcacatatgctcagtcacacacacagcatacgctatgcacatgtgtccacacacaccccacccacatcccacatcaccccgaccccctctgctgtccttggaaccttattacacttcgagtcactggtttgcctgtattgtgaaaccarctggatcctgagatccccaagacagaaatcatgatgagtatgtttttggcccatgacactggcttaccttgtgccaggcagatggcagccacacagtgtccaccggatggttgattttgaagcagagttagcttgtcacctgcctccctttcccgggacaacagaagctgacctctttgatctcttgcgcagatgatgagtctccggggctctatgggtttctgaatgtcatcgtccact

SEQ ID NO: 943957 - DNA, 693 bp, Homo sapiens
accacgggacacctttgaccctggccgctgtggagtgtttgtgctggttgatgccttctgggtgtggaattgtttttcccggagtggcctctgccctctcccctagcctgtctcagatcctgggagctggtgagctgccccctgcaggtggatcgagtaattgcaggggtttggcaaggactttgacagacatccccaggggtgcccgggagtgtggggtccaagccaggagggctgtcagcagtgcaccttcaccccacagcagagcagatttggctgctctgtcgagctggatggatactactttttttttcctttccctctaagtgggggtctcccccagctactggagctgtcagaacagtgaaggctggtaacacatgagttgcactgtgtaagtttctcgaggccgggcgcagtggctcatgcctgtaatcccagcactttgggaggctgaggcaggtggatcgcttgagctcaggagttggagaccagcctgaccaacatggtgaaaccctgtgtctactaaaaatacaaagattagccrggctaggcagtgggcacctgtaatcacaactgcttgggaggctgagggaagagaatcgcttgaacccaggaggcggaggttgcagtgagccgagcttgtgccactgcattccagcctgggcgacagagcaagactccgcctcaaaa

SEQ ID NO: 943958 - DNA, 725 bp, Homo sapiens
ggatgctgcagggaggggtgtccaagcaggaggcagccaagcctgcctggagcaggataagatgagctcccctctgagactcagtattttctgttcaatgaaaggaacagtccagtatttgagacaggagaaccggaattgacttgactggtctgtggtgctttttttttttttttcctgtgccttgattcttccatttaaatacagaggacacctgaccctaaggcgcatggaccagagacatcatctgaacccagagtagcgtgcatggtgattattttgagatttcctctctgtmcccatctgggctcattttcactggatggaccccaccatgcttcttagaccctgcggcaggctggccagcccaggtggagggcatgcgctttgccaaaggcgagaccgctggctggagactggactgcggggccatcctccaggctcttgcacggggacctggaggatgtggcccaagctcagtctccttcagtctgcattggtggctaatcaggacacgggtatgggggaaatccctgtaggtctggaggtggctgggatggcccagggcttgtttctcaccctttacctctagtttatatcccactgacaccgaggtttattcgcaatgcacttcagcagatagggtgatggggtagaatcacagagctgaggagtccacggtaaagaattccaggtccctgtgcttctcctgcatcccagctctt

SEQ ID NO: 943959 - DNA, 797 bp, Homo sapiens
acaacaaaacatactaccttatagttctggccagaagcttaaaagaggccttatagggctaagtcttagttttccttcatctgagaaggtctttattttgccttcattcctgaaggatattttcattggatataacattctgggttgacagttcctttcttttaggactttaagatgtttcatccycttctggcctctatagtttctgatgggaaatctacagttacgtgaatccttattctcctgtatgtaatatgttgtttttctctgactgctttcaagacttttttctttaactttggttttctgtgcttttattatgatatgtctggctgtagttttctttctttatcctgtttggggttcactgcatttctcgggtctgtaaatttatgttcttcccctaatttgggaagtgttcagctattgtattttccgatactgttttctgcttccatctctcctctctttctgggacacctgggacatgaaattagacatcaacatcttttgatgttgttccatagatgcttgaggttttattccatttttctccatttttgttttctctctcttatttagattggataatttctattgatctatctttaagttcactgactccattgtcatctccattctgctgttgaacccctccaggtaattgtttattttttggttctaaaattcctatttggttcttttttatagcttctattttttttggctgagaaggcctgtctttttatttgtttcaagagtctttgtcctttcttcttagagcatggttataatag

SEQ ID NO: 943960 - DNA, 670 bp, Homo sapiens
tgtgagcatgagcacagtcaccctgagatgatagtggtttcagcatggctctgtttgtctttttccttgatacctctgttaagttgtctgcctccttctattaaactacacgaatttctggccgattgctcaataatttttcaataattttgggggtatacattgcttcacagtttgatccaattacatttaagcaggggtagctttatgtcgtgattctttgaggtttgctctaaccccaagaaaactcctcttagctgggcctttccctggttctctctgataaacaagattgtctgtggttaggctttttgctctgatagatctatcagcctcccttaattgctcaccattaaartctccatcattttctagagtatccttaggcttgaactgccacatactccttcaaagtcagttcctttgaggagaacttcagctacatctgttcttatggactgactctccccctgggcaaaatctctgagccactgctttgagcattgggaatctcttgccttgctgggttgcttctcccagtatgaaacctctgctctgcaaactagctggagtgagagtcatcaaggccctagtattcttggcctgttgcacctggcctatagagacaagcctagtatatacacaaggtctgggtggaggtagggaacac

SEQ ID NO: 943961 - DNA, 626 bp, Homo sapiens
ggggggacatgaaagacagttgtcacgctgggttttgttccaaactttttttttttttgagacagagtctcgctccgtcgcccaggttggagtgcagtggcgcgatcttggctcactgcaagctccgcctcccaggttcactccattctcctgcctcagcctcccgagtagctgggactacaggtgcccrccaccacacctggctaattttttgtatttttagtagagacggggtttcactgtgttagccaggatggtctcgatctcctgacctcatgattcacctgcctcggcctcccaaagtgctgggattacaggcatgagccactgcgcctggccattgttccaaactcttagtagtaccaacaagtcacaacccaaacctgcctccctaagatacaacaagaaccagtctccccaagtcacaaccagaacctgcctcctaaaccctcttaacagatccctacccagtggggtgctctagccaggtctctcgagtttgaggacccactgtgtacatttccccactctgcttggtgacctcatcttggcagcttgaaatggaccatggagtatttacagaaatcagcaaatgctacaaatctgggttccctccatcccaggaa

SEQ ID NO: 943962 - DNA, 732 bp, Homo sapiens
atgagaaggtcactgctgccacgcttgggaggactcagggctatagcatggccctggggtgggacctgttctcccatcccttgcctcacgtccctgtttttgtttgtttgtttgtttgtgacggagccttggtctgttgcccaggcttgagtacaatggcacagtctcggctcactgcaacctccgcctcctgggttcaagcaattcttgtgcctcagcctccccggtagctgggactataggcatgcaccaccacrccaggctaatttttttttttccaagatggagtcttgctctgtcgcccaggttggagtttagtggcaccatattggtttactgcaacctctgcctcccgggttcaagcaattctcctgcctcagtctaccagggagttaggactacgggcctgtgccatcacgcctggctaatttttgtatttttcatagagataaggtttcaccatgttggccaggctggtctttaactcctgaactcaagtgatccacctgcctcggccttccaaagtgctgggattacaggagtgagccaccgtgcccggccatgtctctctttttaacactaatgttaccctgacctttgaacgtagaatgcccttctgttgcaggaaaacctcttttcaaaccatgtttgtcctttgctggcatgccacagcaacagtcaccaacacagaagacttctgtgaccaaatatttggaggattttccccacaca

SEQ ID NO: 943963 - DNA, 732 bp, Homo sapiens
atgagaaggtcactgctgccacgcttgggaggactcagggctatagcatggccctggggtgggacctgttctcccatcccttgcctcacgtccctgtttttgtttgtttgtttgtttgtgacggagccttggtctgttgcccaggcttgagtacaatggcacagtctcggctcactgcaacctccgcctcctgggttcaagcaattcttgtgcctcagcctccccggtagctgggactataggcatgcaccaccacaccaggctaatttttttttttccaagatggagtcttgctctgtcgcccaggttggagtttagtggcaccatattggtttactgcaacctctgcctcccgggttcaagcaattctcctgcctcagtctaccagggagttaggactacgggcctgtgccatcacgccyggctaatttttgtatttttcatagagataaggtttcaccatgttggccaggctggtctttaactcctgaactcaagtgatccacctgcctcggccttccaaagtgctgggattacaggagtgagccaccgtgcccggccatgtctctctttttaacactaatgttaccctgacctttgaacgtagaatgcccttctgttgcaggaaaacctcttttcaaaccatgtttgtcctttgctggcatgccacagcaacagtcaccaacacagaagacttctgtgaccaaatatttggaggattttccccacaca

SEQ ID NO: 943964 - DNA, 732 bp, Homo sapiens
atgagaaggtcactgctgccacgcttgggaggactcagggctatagcatggccctggggtgggacctgttctcccatcccttgcctcacgtccctgtttttgtttgtttgtttgtttgtgacggagccttggtctgttgcccaggcttgagtacaatggcacagtctcggctcactgcaacctccgcctcctgggttcaagcaattcttgtgcctcagcctccccggtagctgggactataggcatgcaccaccacaccaggctaatttttttttttccaagatggagtcttgctctgtcgcccaggttggagtttagtggcaccatattggtttactgcaacctctgcctcccgggttcaagcaattctcctgcctcagtctaccagggagttaggactacgggcctgtgccatcacgcctggctaatttttgtatttttcatagagataaggtttcaccatgttggccaggctggtctttaactcctgaactcaagtgatccacctgcctcggccttccaaagtgctgggattacaggagtgagccaccgtgcccggccaygtctctctttttaacactaatgttaccctgacctttgaacgtagaatgcccttctgttgcaggaaaacctcttttcaaaccatgtttgtcctttgctggcatgccacagcaacagtcaccaacacagaagacttctgtgaccaaatatttggaggattttccccacaca

SEQ ID NO: 943965 - DNA, 755 bp, Homo sapiens
cacaactcaggctgggcgcagtggctcatgcctgcaatactagcactttgggaggccaaggcgggtggatcacctgaggtcaggagttcaagaccagcctggcgaaaccccgtctctactaaaaatacaaaaattagccaggcaaaaccccgtctctactaaaaatacaaaaattagccagccaatgcatgacagtagtcccagctagtctggaggctgagacaggagatggcaccactgcactccagccatgggggacagagccagactccatctcaaaaaaaaaaaaaaaaaggcgatcaaacagtactaaaggccctattrtcaaataaataaataaataaataaataaaggctttcactcacagtgtgactctccccctccctcccacaaccactgtttacagagccttaaaaaaaaagcaaacaaacagatgataatgtgttatcttgctctgtcactctgtggcctggcctgcagtgctgtggtgccatctggactcactgcagcctcgacctcccaggctcaagcgatcctcccctctcaacctccctagtagccgagaccacaggtgcatgccaccatgccgggctaatctttgtattttttgtagagaaggggttttgccatgttgcctaggctggtctcggactcctagattcaagtgatccgcctgcctcaacctcctaggatcaggggccaccgcaacgggctagacttttttttttttttaagtcagggtcttgctttgttg

SEQ ID NO: 943966 - DNA, 604 bp, Homo sapiens
tgcgtgccgctgcacctcctgggctgcctcctcagggccaagggcaccatggctgaggtaaggctcccgcccggcccgccctcccctcccctgctgtgaacattcaacccagcctgcttcctagccagggagtggccccgactagggtggcaggcagtgggaaccggagagaggcagaggaagtcaccgtggggacgagcaggtgaccctgggggcttcagcatgtcctcctctcctgcagygctggcagcacctgacccagcccatctggggcctccaccacttggagtaccgagctcaggacgcagatgtcaggggcctgaccaccctgaccccagtgtccgagagcagcaaggtcgtcgtggtggagagtgtcatgtgacaactcagctcacatcaccagctcacctctggtagccatagcagcccctgcttcagccccaccgcacccctccagggggcctgcctttccctgacacttttggggtctgcctgggggaggaggggagaaagcaccatgagtgctcactaaaacaactttttccatttttaataaaacgccaaaaatatcacaacccaccaaaaatagatgcctctccccctc

SEQ ID NO: 943967 - DNA, 578 bp, Homo sapiens
atacccctctccccatccctgttatagaagcttagagagccagccagcaatggaaccttctggttcctgcgccaatcgccaccagtatcaattgtgtgagcttgggtgcgagtgcacgcgtgcgtgagtacggagagtatatatagatctctatctcttagcaaaggtgaatgccagatgtaaatggcgcctctgggcaaaggaggcttgtattttgcacattttataaaaacttgagagaatgagatttctgcttgtatatttctaaaaagaggaaggagcccaaaccatcctctccttaccactcccatccctgtgagccctaccttacccctctgcccctagccaaggagtgtgaatttatagatctaactttcataggcaaaacaaaagcttcgagctgttgcgtgtgtgagtctgttgtgtggatgtgygtgtgtggtccccagccccagactggattggaaaagtgcatggtgggggcctcggggctgtccccacgctgtccctttgccacaagtctgtggggcaagaggctgcaatattccgtcctgggtgtctgggctgctaacctggcc

SEQ ID NO: 943968 - DNA, 585 bp, Homo sapiens
tgccgtgagcaaggctctgctctggaggcctctgcggccggcacccttctggggactgggaagggggcagggaaggcagcagcccaggggaaggccttgtccccctggagccgaggcagttggggagagcaggacgagagtgagctggagagcagccacacccgcggggaagggtgggcgtaaagccatgggtgctgaaattttcaaaatgttaccccaagaatttgtcactgaacaggtgccttgtgtcacttgggccaggctggtagcagcagaggggataactctgcatcagggatcaattttgaargtggagccaataggggttgtgcatgaccaggatgcagggctcaaagaggagttaaggacaacagatttggcctgagcaagaggaaagatggagctgccaggtcctgcaatggggaggcaaggagagaatggtctggagtcagccttgggtgtgtcatgcaggaagtgtcatccaagtggagatgtctagttggcaggtggacacaggagttccagaaagtactggagatggaactgtgcaagttcttaccacatagagatgacactgaaagccct

SEQ ID NO: 943969 - DNA, 642 bp, Homo sapiens
ttggccctgtgactatggctctggcaccactagggtcctggccctcttcttattcatgctttctcctttttctacctttttttctctcctaagacacctgcaataaagtgtagcaccctggtacatctgtgatgtttgccttctactctcttctgttccaaaaagacccaggtcccatttaaggscagtaatgtgttacaggtgctgtgataaaggctgggtactggatagcttgtgggcttatgggaggaggcctgagatgggtcagggggagaaggtattcagcaggtggctgggggactgtgtgcagcagttcgctatggcctgcctgtggtgcccatgtgtttgtacgggagggttagcttgagaaggaatcagattataaaaggtcttgaatgtcaagccagagagtccagactttttcctaagggcaatgagaagccattgaggagttctgagcagagtagtaacatgatcagttatgcttctcagaaagattgctccagatctttcagaaagaagcagtgtaggttgatgaaagggagggactggcactggggaaacaaggtaggaggcaggtggcaagaaatgcaagagcgacaggacagaggggttagggagagggattaggaagagattaaa

SEQ ID NO: 943970 - DNA, 521 bp, Homo sapiens
actgcctaccaatcacagaaactgtggggctaggaggcccttgaagaccctcttcctggtgaggaagagcccccagcacacagttctggctcagcggctccaataaagcctctgcagcaacggcgtggacggctgccacagagccgatgaacaaacacgcccttgaaagaacgctgggaacaactggtggaggccgggctgagagcctgcacttcagaaaaccaagagagagcttccccaagggtttcaatcagggcgatratgtggtgaagagggtgcttaaggaagatggttcgagcagttccaaaagaatgaaatggagacagtaagaccaagagtaggaaaaggagctaagaggcagaagcggccaggtcgtccgggagctgacacgccggtctgcgtgttgccgtggttttaagtgagtacatagcctcatacttctctgaacttaaaacagcggcagtgcttgtaaacactagtcgctagaggagctctgctcggacggccttatctacaggaat

SEQ ID NO: 943971 - DNA, 579 bp, Homo sapiens
atacccctctccccatccctgttatagaagcttagagagccagccagcaatggaaccttctggttcctgcgccaatcgccaccagtatcaattgtgtgagcttgggtgcgagtgcacgcgtgcgtgagtacggagagtatatatagatctctatctcttagcaaaggtgaatgccagatgtaaatggcgcctctgggcaaaggaggcttgtattttgcacattttataaaaacttgagagaatgagatttctgcttgtatatttctaaaaagaggaaggagcccaaaccatcctctccttaccactcccatccctgtgagccctaccttacccctctgcccctagccaaggagtgtgaatttatagatctaactttcataggcaaaacaaaagcttcgagctgttgcgtgtgtgagtctgttgtgtggatgtgygtgtgtggtccccagccccagactggattggaaaagtgcatggtgggggcctcggggctgtccccacgctgtccctttgccacaagtctgtggggcaagaggctgcaatattccgtcctgggtgtctgggctgctaacctggcct

SEQ ID NO: 943972 - DNA, 661 bp, Homo sapiens
tcccttcctgggggactttgaggacataggcaagtcctgtaggcctcagtgacccacattaagcagagcggacatcatctgccgtaacaacctgcccacaaagccagggctagaggcaaagccttccttgtgagagagtctaaataccagaaggkgtgaggcatcgttgccatgagtatgaagggcctgaggtgtctccttttccgtgtctctcccccgatccttctctctcctaggagagccagtttctgagtgccccagaggagaatgctgtagtgaacacagccctgtacagagaagacagcagcttgattcctctcatttctcagtcattagcccctcactcgctctccgggaggataacggggtgtgcgcagctcctccccttctttcctgaagaaacctcagtggcttccgtgcccttgccagggtgagtgttctcctgagtccttcctctgctcctgcaagatagagaaggggcttctgttgccatcagcttagtaagcctggtgcgatggatgcccctgacagggaaagccatttaggggaagacctggcactacagcccggaggtcctgggttcttttgtggttttccccgtgctcgcctctctcagatgaagcctgctgcctgttagcatgagtgtgaggagactcgctca

SEQ ID NO: 943973 - DNA, 509 bp, Homo sapiens
ctctcccttcctgggggactttgaggacataggcaagtcctgtaggcctcagtgacccacattaagcagagcggacatcatctgccgtaacaacctgcccacaaagccagggctagaggcaaagccttccttgtgagagagtctaaataccagaaggggtgaggcatcgttgccatgagtatgaagggcctgaggtgtctccttttccgtgtctctcccccgatccttctctctcctaggagrgccagtttctgagtgccccagaggagaatgctgtagtgaacacagccctgtacagagaagacagcagcttgattcctctcatttctcagtcattagcccctcactcgctctccgggaggataacggggtgtgcgcagctcctccccttctttcctgaagaaacctcagtggcttccgtgcccttgccagggtgagtgttctcctgagtccttcctctgctcctgcaagatagagaaggggcttctgttgccatcagcttagtaagc

SEQ ID NO: 943974 - DNA, 681 bp, Homo sapiens
ttaagtggtctgcatagaagatcaaacaagccaaaacatttccttaacccaaagtctaatccagagcaaggccctaattccctctgattctgtgaaagctgggagagatgagaaagctgcaggagaaaagctggaaggtagcagaggttggttcatatggtttaaggaaagaagctgtctccatgatgtaaaagtgcaaggtggggcagcaagtgctgatggagaagctgcagcaagctctccagaagatccagctaaggtaagtgatgagggtggctacagtaaacaatagatcttcagtgtacgcaattttttttttttttttggagacggagttttgctcttgttgcccaggctggagtgcagtggcgcaatctcggctcactgcaacctccgcctcccgggttcaagtgattctcctgtctcagcctccygagtagctaggattacaggcatgcgccaccaggcctggctaattttgtattttttgtagagatggggtttcaccatgttggccaggcaggacttgaactcctgacctcaggtgatctgcctgcctcggcctctcaaagtgctgggattacaggtgtgagccaccgcactcggcaccatctgtgactttcatagctagagagaagtcaatgcctggttttaaagcttcaaaggacagtctgactctct

SEQ ID NO: 943975 - DNA, 676 bp, Homo sapiens
agacagtcttgctgtgttgctcaggctggagtgcagtggcgtgaacacaggtcactgcagccttgacctcctgggcttaagtgattctctcacctcagcatccagagtagctggaaccacaggcacctgccaccacgcccagctaatcttttaatttttgtaaagacaggttcttgctatgttgcccaggctggtctcaaactcctgggctcaaacgatcctcctacytcggcttcccaaagtgcagggattaaaagcgtgacccactgcccccagccagaatcagttttcttttttttttttttttttttgagactgagtctgactctgtcgctcaggctggagtgcagtggctcgcggcaacaaggcctgggttcaagggattgtcacgcctcagcctcccgtgtagctgggattacaggcacaagccaccaaacccggctaatttttgtatttttagtagcgacggggtttcgctatgttggccagggtggtctcaaactcctgacctcaagtgatctgcccgcctcggcctcccaaaatgctgggagtacaggcgtgagccaccacgcccggaccagttactttttaaagtggctctaggtccctttagggaaggattggaggaatatttcttggtatatgctcagatgctggtattgtaagatccttcctg

SEQ ID NO: 943976 - DNA, 664 bp, Homo sapiens
gaagaattaccaagaggaaccgtgatcagagatgcttgggtcccatgctgtggtgaaggtttattagctcactgagaacttagcaatgccaggtcctcacacaatagaattgccccttaaatctgctgagatcagaggtctaagcctaccaggtgatgaaggcgtaagggctgggatagatcctatgactaaatacaggactgtaatgacctagaaggtcatcacacagctcagagccagcccacatgctcagaatgtcccagccaacctgaccaacagagccacccaccaaccagtgggcacttgggagttcaagatcaaacattctgcacttgaccagaactatctgccatcagaagtgggtggaaacaaggggaagaatggaagaggaagcaaatgcattgctgttgagcaaatkgggcggaggttcaaaatgtctaagaaatcagcagtctcagaaaatgttcttagtttacttttgtctttaggttaacccagttactctgtatcccctgagaatgattgctgaaatttggccctatattctgtatgatcagagcacagtatcaaataagggtctagatattttttttgtggtgctaaaaatgcattcgaagctactatttctataatgcagcattagagaacttgctagaaatgcaaa

SEQ ID NO: 943977 - DNA, 746 bp, Homo sapiens
ctgaggctgggcagagcagcaggaccctgggcctggcacacaaaactattcactcctcctaggcttcagggctggtgatgggaggtactgcctggaagatttctgaattgtcttcaggcaattttcccaaagtctttgctattagcacttggctcttttwtaactatgttaatatctctaacaagtggtagctccacagcctgcttgaattcttctcccacaacattttctttatttgccacatggttaggctgcaaattttccaaacttttacactctgcttcctgtttaaatatacattccagctttcagtgttttctttgctctcacatctgagtgtaggctgttagaagcagccaggccacatcttcaacactttgctgcttataaatttcttccaccagatacactaggtcatcactcgcaagttcaaacttccacagattcctagggcagaggcaaaatgcacccaagttctttgctaaggcataacatgtgtgacctttgccccagttcccaataagtttctcatttccatctaagacctcaacagcctggacttcactttccatatcactatcagcattttggtcacaaccatttaaccagtctctcagaaattccaaactttccatcatattcctgtcttcttctgagccctctaaactcttccaacttttgcccattacccagttccaaagctgcttacacattttcagttatttttataacaatacccaacttct

SEQ ID NO: 943978 - DNA, 574 bp, Homo sapiens
ggtcctgaggcttgtgtcagttacatcacagaggccatggctgctgacccagagtgaatgaaggggagcagaggaggaaaggggctcaaagaagaatggagggttttgtagaccatcgtaagaactcggccttgtttcctgagtacaaatggaaccactcaaggatttgtgcaaaggagtgatgacagtctcctcatggagaacctgtagagtgtagaagtatagaggtagaggggtctgttaggagaataatttgctaatccaggcaagaggtggtggcttagatcattgtgagcagtggagatggtgagatgtgattgaatttargatacatttagaagataaagccaacatttttctaagagatcaaacgtggggtatgagagaaagagaggatttatgaataagcctgggtttatgcctgagtaactggaactgtgccaggagatatctgattcttcaatgttctgctgtgccctctgtggtgcagaacatcaatcctgttgcagacaggtccagagtcaggtcttaggagtgggtctggtatttgagtgacaatgtccacgcctcccac

SEQ ID NO: 943979 - DNA, 627 bp, Homo sapiens
tgtctgatcctggacttttttttattggcaactttttaattaccatttcaatcttgctgcttgttataggtctgtacagagtttctatttcttcctggtttaatctgggagggttttatatttccaggaatttatccatctcctctagattttctagcttatgcatgtgaaggtgttcatwgtagccttgaatgatcttttgtatttctgtggtattggttgtaatgtctcccatttcatttctgcttgagcttatctgattcttcccttttcttttcttggttaagctcattaatggtctatcaattctatttatcttttcaaagaactaggtttttgtttcatgtatgttttgtattttcttttgttgttatttccatttcatttagttttgctctaatcttgattatttcttttcttcttctaggtttgggttttgttggttcttgtttctctagttccttgaggtgtaaccttagattgtctatttgtgcaatttcacactttttgatgtagacatttaattctgtgagctttcctcttagcacctcttttgctgtatcccagaggttttgataggttttgtcactattattgttcagttcaaagaatttttaaattttcttc

SEQ ID NO: 943980 - DNA, 627 bp, Homo sapiens
tgtctgatcctggacttttttttattggcaactttttaattaccatttcaatcttgctgcttgttataggtctgtacagagtttctatttcttcctggtttaatctgggagggttttatatttccaggaatttatccatctcctctagattttctagcttatgcatgtgaaggtgttcattgtagccttgaatgatcttttgtatttctgtggtattggttgtaatgtctcccatttcatttctgsttgagcttatctgattcttcccttttcttttcttggttaagctcattaatggtctatcaattctatttatcttttcaaagaactaggtttttgtttcatgtatgttttgtattttcttttgttgttatttccatttcatttagttttgctctaatcttgattatttcttttcttcttctaggtttgggttttgttggttcttgtttctctagttccttgaggtgtaaccttagattgtctatttgtgcaatttcacactttttgatgtagacatttaattctgtgagctttcctcttagcacctcttttgctgtatcccagaggttttgataggttttgtcactattattgttcagttcaaagaatttttaaattttcttc

SEQ ID NO: 943981 - DNA, 717 bp, Homo sapiens
tgccagcagtttagccacagcgctgcagaatcacccctttcctgtgcagaaaccctggtgtttctccttctccttctacctcccagcagtcctgggcaaagtctttcctgttcctccctccccatgagaaaaagtggttttgggttgtgacaaagacagaaaatgaggtttcaacataggaaaccttatgttgatttgaggattatraaatgggttttgaggattccttaaaaaattgtctctgctcaaaacacataggagtaagataaaccttggctactgacactggagatttccctgccctcctgcatttgccatcccatgagaatggtgggggctcttgagaagggctgcattttctgaactgtgaggccctcttcattctctcctaactctaagctgcaaacagaaatttccctcacacgttttctagattgtaaaagaaagttcttctttactatgattgtggacattcctttataatgccaatttcaactttacattacttcaggatttttcactactcctaaagagtgtctcaaatgtggctagagcaagcaggttagtacactagatgtaagctacctggcctggaatctaaggatccatttgtctctgttctgcgtaagatgagccgggtgctggccaaaggctgtagcacactcacagagcactgatgacgcctcctggtaaggacccacactggggtatctaaaa

SEQ ID NO: 943982 - DNA, 607 bp, Homo sapiens
aaattaaaaacattttgatacaagactgggggcagggaagtgctgggtagagaagggcggggtccctggtgagggctccaccctcgggcctgtgcccacagacctaaatgaggacaggcgtttctgtttttgcactcaaaaagttgccttttggcccgccacgcctcccatcctgtgcccatataaacccgagaccttaagcggacacggacacaagaggctggacatctagaagagcagaagaatacagcagcagacaccggcagatcagcgatggcggaaggacacgaatgcraggggagttcagccaggggaagtctgcgagagtcctgccactgggcagccaactgcaggggaaaaccaccgttccactccatccctcgacttctggctccccatctatctcactgagagccacttacaccacttaataaaagcttgcactcaacctttcagcccacatatgatctgattcttccagtacactggtcaagagctcaggctgtcacattggccccctgtccttgcaataagcagagggtctattgagttgactaatgcaacgagacggcagacggcatagctgaaagagtgcactgtaagtcct

SEQ ID NO: 943983 - DNA, 607 bp, Homo sapiens
aaattaaaaacattttgatacaagactgggggcagggaagtgctgggtagagaagggcggggtccctggtgagggctccaccctcgggcctgtgcccacagacctaaatgaggacaggcgtttctgtttttgcactcaaaaagttgccttttggcccgccacgcctcccatcctgtgcccatataaacccgagaccttaagcggacacggacacaagaggctggacatctagaagagcagaagaatacagcagcagacaccggcagatcagcgatggcggaaggacacgaatgcgaggggagttcagccagrggaagtctgcgagagtcctgccactgggcagccaactgcaggggaaaaccaccgttccactccatccctcgacttctggctccccatctatctcactgagagccacttacaccacttaataaaagcttgcactcaacctttcagcccacatatgatctgattcttccagtacactggtcaagagctcaggctgtcacattggccccctgtccttgcaataagcagagggtctattgagttgactaatgcaacgagacggcagacggcatagctgaaagagtgcactgtaagtcct

SEQ ID NO: 943984 - DNA, 615 bp, Homo sapiens
gatcatggccagactgcttctttaagcaggaccttgatccatcccttctcagtgggcaggacctccctgtggaggcttcagccattctagccagtgttctacattgagagctctgatctctccctaggatggagctcctggcagggaggggcagcctccatctctgcagttcagtcaactcagtccttctagcctgttggctttgcagaatcccaaaatggtctggacgagaaagcctcctcataatgcagcacatttgctctaccaaaaagcagacagactgcttctttaatcaggcccctgatcctgttcatcccaactggatgagamctcccaacagggtctccagccacctcctacaggtgtgttctggccagcaacaggtcagtaccccccagggatggagcttccagaggaagaagctggctgccatctttgctgtttcacagccttcactgatgatacctccagtatgggaaaaaccgaggcaactaaggtctggagcggacttccagcaaaccacagcagccctacaataaagtggcctgactagtaaaggaaaaacaaaaaacagaaaacaacaagaacagtatcaatgaaaaggaccccacaaaa

SEQ ID NO: 943985 - DNA, 771 bp, Homo sapiens
gtttcacgccctgcctcaggcctcaaccaacccttccctggcagacacatgccctgccattcttgccacctctcctcttttgactgtgctgtgatattctatttcctccatctggcatttcttcttcccatcctccttgggctctttttaagcctcacttgttccaccttctccttgatttcactcccaccgctgttattcatccatatccgagctgtggttggagaagctgggaagggagaccaggtggggctggcccatgaaatgaagcagtaggcttcaggcttggctctgacagcaccacaatagcaccactatagctgctcttaacctcgaatgcacctgrggaggctgaaaaattactcatgccagagactcaactctagaaattctcacttcaattgtctggtgtgcagcctgtgttctgggcttttaagcttcccaggtgatttttaacatttctaggcatgcagccaaggttaagaattgctgttgttttgaccaataataacgtatacctttgttctgcaaaagtgagcctggggcttccctcaactctgccctcactgggcagatttgagctgagggggaaactggtcatggccaagtcgatgtcgccagggggttttcctagcttggccaaagtagccagacaatccggggcttaaataaccaggtggagtacacaggtggtgaataaaagagagaagacttcagtgcttgagacagccacatcccaaatcctatcccactggaagtattgtgaggata

SEQ ID NO: 943986 - DNA, 762 bp, Homo sapiens
cttttcttttatctctttgtcttgtgtctttatttctatgctctctcatctctgcacacgaggagaaaacccaccaaccctgtgggtctggaccctacacgtggtcactgtctggtggtctgctgccagtgtgatccaccacagctttctgaatcctggcaaaacsattacatctgagaagtatcttcagcaaattgatgagatgcaccaaaaactgcaatgcctgcacctggcattggtcaacagaaagggcccaattcttgtccacaacaacatctgaccgcaggttgcacaaccaatgcttcaaaagttgaataaattgggctacaaacttttgcctcatctgccatattcacctgacctctcaccaacaaactaccacttcttcaagcatcttgtcaactttttgcagggaaaatgcttccacagccagcaagatgcagaaaatgctttccaagaattcactgaattccaaagcatagatttttatgctacaagaataaacaaacttatttctcattggcaaaaaatgtgttgattgtaatggttcctattttgattaataaagatgtgcttgagcctagttatgatttaaaattcaccaaaactacaattacttttgcgccaacttaataccatcgaatctacattgctttggccagtaaggccattttaatgatattgattcttcctatccatgtgcatagaatgtttttctatttgtttttgtcatctctgatttctttgagcagtgttttgtaa

SEQ ID NO: 943987 - DNA, 571 bp, Homo sapiens
atagggttagtaattgtattcttcattttcactcctgactttgcaatttctattttcttgctttttatcttgttcagtctgactaaagtgttatcaattttatagcatttcaagtaaacagttgtagttccattgattttctctattatttttctattatctattgaattgatttttaatttgatcyttttttttttttttttttttttttgagatggagtcttactctttcgcccaagctggagtgcagtggtgctatctcggcacactgcaagctccgtctcccaggttcacgccattctcttgcctcagcctcctgagtagctgggactacagccacccgccaccacgcccagctaattttttgtattttttcttttttagtagagacggggtttcaccgtgttagccaggatggtctctatctcctgacctcatgatccgcctgcctcagcctcccaaagtgctgggattacaggcacaagccactgcgcccggcctaatttgatctttgttatttcttccttatgtttacttttggttgacttttctcttatttttccagtgtctt

SEQ ID NO: 943988 - DNA, 638 bp, Homo sapiens
ggggaaaagcttcttaatactggtcttggtaaacaatttttagatattactgcaaaagcataggcaacaaaaaccaaattagacaagtgggattacatcaaactaaaaagtttctgcacaggaaaggaaaggaaaggaaaggaaataatcaacagaataaaaaggcaagctacaaaatgggagaaaatatttgcaaaccacatgtctgaaaaaggattaatatccaaaatatataagaaattcacactcattagcaagaaaacaacccaattaacatatggccaaatgacctgaatagacatttctcaagagaaagcatacaaatgaataaatgtttatcattgctaattatcagagaaatataaattaaagccacaatgagatatcacttcacaactgatacactggctaacactacaaagacaaaagataacaagcaktgataaggatgtgcagaaaagggaatcatgtacattgttggcagaaatgtgtgatggttaatattgagtgtcaacttggttggattaaggatgcaaagtattgttcctgggtgtgtctgtgatggtgttgccaaaggagattaacatttgaatcagtggactgggaaaggcagaccaccctcaatatgggtgggtaca

SEQ ID NO: 943989 - DNA, 751 bp, Homo sapiens
tatgacacaaatgccatgacatcaggaagttaccctgtatgttctaaaaaggggaagcatgaataatccatcccttgtttagcatataaaaggatataaccataaaaataggccacaagcagccctcagggctactctatctatagagaagctattcttttattcctttattttcctaataaacttgctttcactttatgctatggactccccctgaattctttcttgcttgagattcaagaatcctctcttggggtctggataaggagcctttcctgtaacagctttctggtgatgatgaagggactgtagtgaggaaacsctggaaagaaaggataactttgggtaagtgttggggtcctgtaacatcttcctggcaaaccctgaagggatgatactaagacgacctccccccaacccaaggaaatagactgcagcaccgattggacaactttgggtaagtggtggagtacctacccaggtaaagaatgggattgggatagaggctcaacttaggggagttagagtctctcctaagacagagagggttaaaggcccctcttaataaaaggcaaggacacttgaatgaccttgggttagaggcccgatttaggaggattagaatccctttccaagatttagggggttagtggcccttcttagaaagtctgtcttggtaaagtcctttcgggctaagaacgggttttgcactacaggatgttaactgctattctctttggattaatctgcc

SEQ ID NO: 943990 - DNA, 638 bp, Homo sapiens
gccctcagggctactctatctatagagaagctattcttttattcctttattttcctaataaacttgctttcactttatgctatggactccccctgaattctttcttgcttgagattcaagaatcctctcttggggtctggataaggagcctttcctgtaacagctttctggtgatgatgaagggactgtagtgaggaaaccctggaaagaaaggataactttgggtaagtgttggggtcctgtaacatcttcctggcaaaccctgaagggatgatactaagamgacctccccccaacccaaggaaatagactgcagcaccgattggacaactttgggtaagtggtggagtacctacccaggtaaagaatgggattgggatagaggctcaacttaggggagttagagtctctcctaagacagagagggttaaaggcccctcttaataaaaggcaaggacacttgaatgaccttgggttagaggcccgatttaggaggattagaatccctttccaagatttagggggttagtggcccttcttagaaagtctgtcttggtaaagtcctttcgggctaagaacgggttttgcactacaggatgttaactgctattctctttggattaatctgccttcaactc

SEQ ID NO: 943991 - DNA, 746 bp, Homo sapiens
ctagcaatgatgactaagtcaattttgctaaagagcaaagaagctgtgtgtcttggattttaaacagcaatagactagcaaaataatctatgatgtgaatctgagattttacaccctagactcttttaaaatgtagtgactaaaaatatataccagtggataaatgaagtcagggatatacttgaaattttttctgccagagtagaaatgacttcaaaatatatgataatgcagctttcatgtaatcccagctactggggaggctgaggcaggagtattgcttaaacccgggaagcggaggttgcagtgagccaagatcatgccactgcactccagcctgggtgacagmgtgatactctgtctcaaaaaaaaaaaaaaagataatgcagctttcaatattataagctttatgttctcacacttctaagtgataatcaaatgtgttacaccactttataccctgagatccaaaatacataaatatttgacagtttgtacaagactgtattaataagaaaatgtggcacatgtataaagaaaggaatctcacagattaaggaaaatgacattgattacaaatgtcctcagcctgagttggctgtgttgcgtttgtacacttcagccctctgagctgaagtgggagtggtttctctcctgaaaatgtttctgaggcccaaatagctgaagaggtggagacgttacagaaaccacctggagcccccagaactggcagacacctgcctgat

SEQ ID NO: 943992 - DNA, 746 bp, Homo sapiens
ctagcaatgatgactaagtcaattttgctaaagagcaaagaagctgtgtgtcttggattttaaacagcaatagactagcaaaataatctatgatgtgaatctgagattttacaccctagactcttttaaaatgtagtgactaaaaatatataccagtggataaatgaagtcagggatatacttgaaattttttctgccagagtagaaatgacttcaaaatatatgataatgcagctttcatgtaatcccagctactggggaggctgaggcaggagtattgcttaaacccgggaagcggaggttgcagtgagccaagatcatgccactgcactccagcctgggtgacagagtgatactmtgtctcaaaaaaaaaaaaaaagataatgcagctttcaatattataagctttatgttctcacacttctaagtgataatcaaatgtgttacaccactttataccctgagatccaaaatacataaatatttgacagtttgtacaagactgtattaataagaaaatgtggcacatgtataaagaaaggaatctcacagattaaggaaaatgacattgattacaaatgtcctcagcctgagttggctgtgttgcgtttgtacacttcagccctctgagctgaagtgggagtggtttctctcctgaaaatgtttctgaggcccaaatagctgaagaggtggagacgttacagaaaccacctggagcccccagaactggcagacacctgcctgat

SEQ ID NO: 943993 - DNA, 746 bp, Homo sapiens
ctagcaatgatgactaagtcaattttgctaaagagcaaagaagctgtgtgtcttggattttaaacagcaatagactagcaaaataatctatgatgtgaatctgagattttacaccctagactcttttaaaatgtagtgactaaaaatatataccagtggataaatgaagtcagggatatacttgaaattttttctgccagagtagaaatgacttcaaaatatatgataatgcagctttcatgtaatcccagctactggggaggctgaggcaggagtattgcttaaacccgggaagcggaggttgcagtgagccaagatcatgccactgcactccagcctgggtgacagagtgatactctgtctcamaaaaaaaaaaaaagataatgcagctttcaatattataagctttatgttctcacacttctaagtgataatcaaatgtgttacaccactttataccctgagatccaaaatacataaatatttgacagtttgtacaagactgtattaataagaaaatgtggcacatgtataaagaaaggaatctcacagattaaggaaaatgacattgattacaaatgtcctcagcctgagttggctgtgttgcgtttgtacacttcagccctctgagctgaagtgggagtggtttctctcctgaaaatgtttctgaggcccaaatagctgaagaggtggagacgttacagaaaccacctggagcccccagaactggcagacacctgcctgat

SEQ ID NO: 943994 - DNA, 550 bp, Homo sapiens
gaaaatgagatgctctgtcttaaggaagttagctttaagagcgacatttgaatcattagatgcctcattggctgttacaaaaacaaacttcaatcttctgcttccccttttctaatattagctaacaataattaagttgcttagayaattccaggtgactcaaatttcatagcacgctcttcaaaaggctaagggatcactttaagttcctaaagccctaagactaagtgtgtttcactcactttgtgtagctccagcccagcatcatgtaccaaagggataacatgattaaaaatcatcaacttgtcttccgaaatctgtttctaaaccacagcacaaggaacagacatttaaatacagaaagggatggagaactacaatcttttaaaagtgcacactttagtgcccagtgtggtggctcacacctgtaatcccagcactttgggaggccgaggtgggtggatcacaaggtcaagatattgagaccatcctggccaacatggtgaatccctgtctctactaaaaatacaaaaattagctgagtatggtg

SEQ ID NO: 943995 - DNA, 774 bp, Homo sapiens
  misc_feature 156: n = A,T,C or G
gcccaagttaggaagctgatggagagtcccagcaaaatacaggaatctgagcaattttatagttttataaatataggaacatgaatgagaataggaatgaagagagaggaccgctttgacaatgattccaaaagtaaaatattcagagaagggtgngaatggagtctaccaagaagaaaaactggataaaggcagaataaaaacttggaataaataatattactgaaattacttagcaatgttaataatgttaaatgtgtctgtggtaggcctgaccytctggctgtccattattccatatgtggtcttttctgactggcttctttcacttactgtaatgtttataaggttcatccatgttgtaacatgtatcagtacttcattccttttttttacaagatgatattgaattgacaggatatgccatgtttgtccattcagaaattgataagatatttggcttgtttctagtttttttgtttgtttgtttgtttgtttgtttttgagacagtcttgccctgttgctcaggctggagtacaatggcacaatctcagctcactgcaatctccgcctctcaggctcaagcaatcctcccacttcagcctcccaagtatctgggactacaggcacatgccaccatgcctggcaaatttttgtattttttgtagaggtgaggtttcaccatgttgcccagactggtcttgaacttctgagctcaagtgatccactcgcctcagcctcccaaaatgttgggattacaggcatgaacgacc

SEQ ID NO: 943996 - DNA, 774 bp, Homo sapiens
  misc_feature 156: n = A,T,C or G
gcccaagttaggaagctgatggagagtcccagcaaaatacaggaatctgagcaattttatagttttataaatataggaacatgaatgagaataggaatgaagagagaggaccgctttgacaatgattccaaaagtaaaatattcagagaagggtgngaatggagtctaccaagaagaaaaactggataaaggcagaataaaaacttggaataaataatattactgaaattacttagcaatgttaataatgttaaatgtgtctgtggtaggcctgaccttctggctgtccattattccatatgtggtcttttctgactggcttctttcacttactgtaatgtttataaggttcatccatgttgtaacatgtatcagtacttcattccttttttttacaagatgatattgaattgacaggatatgccatgtttgtccattcagaaattgataagatatttggcttgtttctagtttttttktttgtttgtttgtttgtttgtttttgagacagtcttgccctgttgctcaggctggagtacaatggcacaatctcagctcactgcaatctccgcctctcaggctcaagcaatcctcccacttcagcctcccaagtatctgggactacaggcacatgccaccatgcctggcaaatttttgtattttttgtagaggtgaggtttcaccatgttgcccagactggtcttgaacttctgagctcaagtgatccactcgcctcagcctcccaaaatgttgggattacaggcatgaacgacc

SEQ ID NO: 943997 - DNA, 473 bp, Homo sapiens
atttgataatcctactgcctggcgtgtggaccaggaggaaggagaggaagcagagttaggctgtctgtccactatcaaaaactgcaactgaagtgggtcctgggacacaaatgactggcagtggacacgctagagagaagatctgagactgatctgtcacgcgtgggtggagaaatcacagtcgatggggggtgccatcccacaacatgcagctttcagcagacatcgcacaagttagaagtgcaacctgtctgcatcagaaatacagtgcccatgagcagcttcactccagttggccccaccggagaacaagcccttcatcatgggcatctgcaagasatgtgggaggtctgtgctgcatctgtgctgtgtggtgatggtttcgaaccccactaacaggtgtttaaaacctgccagggttccagagtcaaagatgcctttgttgcattgagctatgcctgctttctgcttgg

SEQ ID NO: 943998 - DNA, 621 bp, Homo sapiens
gttttttatttatgtaagaaaatctatgttatttcttgaattgggacaacataacatagcagaggattaagtaccttttataatgtgaaagaacaaagcggtaaaatgggtgagataaagaaataaagaaattaaattggctgggcacggtggctcacgcctgtaatcccagcactttaggaggcagaggcacggggatcacgaggtcaggagatcgagaccattctggctaacacagtgaaacaccatctctattaaaaatacaaaacttagccgggcrtggtggcgggtgcctgtagtcccagctactggggaggctgcggcaggagaatggtgtgaaccctggaggcggagctcgcagtgagccgagatcgcgccactgcactccatccagcctgggcaacagagcgagactccgtctcaaaaaaaaaaaaaaattagctgggtgaggcggtgggtgcctgtagtcccagctactcaggaggctgagaaggagaatggtgtgaacccaggagacagagcatgcagtgagcccagatcgcactgctgtagcctgggcgacagagcaagactctatctcaaaaaaaaaaaaaaattaaattatagttaattcttgtcttt

SEQ ID NO: 943999 - DNA, 577 bp, Homo sapiens
gcctggcacagaacaggtggcagcaaatgttctgagtcttgctctgtcacccaagctagagtgcagtggcgcaatctccgctcactgcaagctccacctcccaggttcacgccattctcctgcctcagcctcctgagtagctgggactacaggcgccctccaccacgcccggctaattttttgtatttttagtagagacggggtttcaccgtgttagccaggatggtctcgatctcctgatctcacgacccgcctgtctcagcctcccaaagtgctgggattacaggcgtgagccaccacrcccggccgcaaatgttctttagaagactgtcaagacagatcagactcaactggcctggaagagatgtactgtataagccacctgcctgtcattcctcctggcctttcagtaacgtgacacccacccaccccccaaaccaaaaaacaggaaggccttggttaacagtcatcggtttcataagcaaagaccagcagtgtccttctgggggttctcaggccctccggtccagcctttagtcctcccccagcccctgccctgccctgcccagcccctcag

SEQ ID NO: 944000 - DNA, 602 bp, Homo sapiens
cttgtctgctccttactgtacacgtggctggcaaagaagggatgatggagcccccatcttgaacatgtctagtccctccctagtccctagttcctgctgacattcagccatgcaagctcccagcttgtttgtctgtatctgcagcttgactttataggttgctgtttggtagaaaatgattttgggctgcttttcattaaaaagaaaagccttaccgaggactcccatatccttactatctgcctaagtgatttcttcttaactcctattatcagtggggtactctaagcagcgggagtggctttgttatcccagcttggacctstagtttttggctctcatgtaaatagaaatgaaccctggctgggtgcggtggctcacgcctgtaatatcagcactttgggaggccgaggcgggcagatcatgaggtcaagagatcgagaccatcctggccaacatggtgaaaccccgtctctactaaaaatgcaaacattagctgggcatggtggcacgtgactgtagtcccagctactctggaggctgaggcaggagaatcgcctgaacccgggaggtggaggttgcagtgaattgagatcatgcca

SEQ ID NO: 944001 - DNA, 671 bp, Homo sapiens
cccaggggctctgtcccagggagatgagagttttaatctataagcccctgactggggcttctgcctttctttcagagatgccctgcccagagaggaggaatctagagaggcaatctggctgcagtggcttcaccacactggtttcacacccagttcacttcctggtggctttgtttacactatgaggggaaaacagcctactggagcctcactaatggtggatgcccctccctgcaccaagcttgggcgtcccaggtcgacttyggactactgtgctggcagtgagaatttcaaaccagtgggtcttagcttgttgggctccgtgagggtgggatccgctgagaagaccactcggctctctggcttcagcccccttttcaggggagtgcatggttctgtcccgctggtgttccaggcaccactggggtacaaaaaaaaaaaaaaaaaaaaaaaaaactcctgcagctagctttgtgtctgctcaaatggccacctagttttgtgcttgaaacctagggccctggtggtgtaggcacctgaggaatttcctggtctgcggtttacaaagaccatggaaaagtgtagtgtctgctctggagtgcactgttcctcatggtacagtccctgacggcacagtcccttatggcttcccttggctaggggaaggagtt

SEQ ID NO: 944002 - DNA, 596 bp, Homo sapiens
ctgtctcaaaaaacaaacaaaacaaaacaaaacaaaataaaacaaaacaaaacaacaggatttaggccgggcatggtggcttgtaatcccagcattttgggaggccaaggcaggtgaattgcttgagtccaggacttccagaccagcctaggcaacagggtaagaaccttgtgtctactaaaaatacaaaaattctggccgggcgtggtggctcatgcctgtaattccagcactttgggaggcagaagcaggcagatcacgaggtcaggagttcgagaccagcatggccaacaaggtgaaaccccatctctactaaaactacaaaacttagctggcgtggtggcagtcacctgtaatcccagctgcttgggaggctgaggcaggagaatcacttgaacccgggcggcagagattgcagtgagctgagattgtgccactgcactccagcctgggtgacasagtgagactctgtctcaaaaacaaacaaacaaaaaaaccaaatttagctgggcatggtggcacatgcctatagtcccagctacctgcaggggctgaggcgagaggatcacctgggcccaggaagttgaggatgcagt

SEQ ID NO: 944003 - DNA, 580 bp, Homo sapiens
cacgaaattctcatgctgtgtttttcacctccatcaggtcatttatgttcttctctaaactggttattctagttagcaattcctctaaccttttttcaaggttcttagcttcctcgcattgggttagaacatgctcctttagcttggaggagtttgttatyacccaccttctaaagtctacttctgtcaattcgtcaaattcattctccatccagttttattcccttgctggcgaggagctgtgatcctttggagaagaggcattctagtttttggaattttcagcctttttgcactggtttttcctcatcgttgtggatttatccacctttggcctttgatgttggtgaccttcagatggggtttctgtgtggacatcctttttgttgatgttgatgctattcctttctgtttgttagttttccttctaacactcaggcccctctgctgcaggtctgctgtaggttgccttaggtccactccagagcctgtttgcctggatatcaccagcagaggctgcagtacagcaaagattgcttactgtttcttcctctggaagcttcgtcccagaggggcacct

SEQ ID NO: 944004 - DNA, 612 bp, Homo sapiens
tctcttactgtgtccatcacatctgcaattatttccctcactgacgtcttgaacccctcaaagtcattcatgagggttggaatcaacttcttccctttaatgttgttgatattttgacctcctcctatgaatcaccagtgttcttagtggcatccagaaaggtgaatcatttccagaaagttttcaatttctttttctcaaatccatcagaggagtcaccrtctgtagcaactatagccttatgaagtgtgtttgttaaataaggagacttaaagttaaaactactccttgatccatgggctgcagagtgaaggtttcatgcacgttagcaggcataaaaataaaaaaatctcctggtatatcttcatcacagcccttgagtgaccagacacagtgtcaatgagtggtaatattttgaaaggaatctttttttctgagcagtaggtctcaagagtgggcttaaaatcttcagtaagccatgatgtaaacagatgtgctgtcctccaggcttcgttctttcatttctagagcacaggcagagtagctttaacatcattcttacaggctctaggatatacagagtggtaaatgagcattggcttcaacttacag

SEQ ID NO: 944005 - DNA, 486 bp, Homo sapiens
ccttgtcctggccacatttctgtgctttttggygtttcagtaacttctgattggatgttgggtattataaagattatattattgagtgtctggatttggggtggtagttacttgtggatcagtatgatccctttgaggcctatttttaagctttctttgagacaggtcttttgtagctttggctctaggaatagatcagccctactactaaggcctctggattctctgctgcatgtcccaggtgatcacagaggactctctatactggttgatcagaccttgaatgtctccctacctttgtgtgtcctgagaattgttcagcttacagcttcctggtcacccttttcctgggcttttggagtttcactctatgcatgcatgggcctagtagtcaggaaagactcaaggggaggcttatacagattttttgaagctctttttactgcataactaactcctttctggaactctgctctgcaacttcca

SEQ ID NO: 944006 - DNA, 766 bp, Homo sapiens
tgtcacatcctctggatgtctgtcatctcagactcaaaatgtataaaattagatgcctcaccatccccccaaattccacttcaccacagcctttctcatctcagcaatgctaggtctttccttttagttgctcaaaccaaaaatttgcaatcatcttaaactcctctttttcttttctctttccacctccaatataacaggaagtcccactggctctcccttcaggaggtattcagaatgtgaccgtttctctccttcattgctgctgctgtaccgagagtacccacctcatctctcgtgtacactgctacggatattcccaacaggccttcctgcttctacactcatacaggccgtccttaactctggagtgagagtaagactgtaaagctgtgttaactcatcatcaccgctctgccgagaggcctgcttgggtccctccatgactcagatgaaaagccaaagcaccccatccccaccccagaaatggataagggccttgtgatctgtctgcctcatcacctacgactctccctagctgtcagtctactcctgccactctaattccytgatgtttcttcaacatgccaggaacatgcttacctcagagcctgctgtggactgaaaagtgtaccccaaaatccatctgtggaagccctcatccctaatggaagggtatctggagatgaagcgtttggaggtgattaacttaagcttagtcaagctcagagggcagagcctcaggatggcatcaatgccctggtaa

SEQ ID NO: 944007 - DNA, 625 bp, Homo sapiens
cctctctttgtactctctctctttatttctcagccagccgacacttatggaaaatagaaagaacctatgttgaaatattgggggtgaggtcccccaataacctgtgatcatcgacagatgaatggataaaagaaatgcactatatatcacaatggaatattattgagccataaaaagaatgacatcctgtcatttgcagcaacatgaatgcaactggaaaacactacgtttagtgaaataagccgggcacaggaagacacatgtcacgtrttctcactcatatgtcagagctaaaaaaaactgatcttatagaggtagtgaatagaatggtggttaccagaggtggttaccaggaaagacagggaggaaggaacgttggacaacagatacaaacatacagttagacagaggaaatgagtcctagtcttcaatagcacggtagagtgactatagttaaccagaattatcacatatttgaaaatacttggaagatttgcaatattctcaacaggtagaaatgataaaagtttgaggtgctaaatatcccaactaccctgattggatctttacacagtgtattcatgtatcaaaatgtcacacttaccccatatatatttacaactat

SEQ ID NO: 944008 - DNA, 564 bp, Homo sapiens
ttggcttctggcaaaggcctcgggaagcttataatcatggtggaagccgaagtgggagcaggaccatcacatggcacgagcaggaacaagagtgaggaaggggagggcccggactttgaaacaaccagatcttgtgtgaactaactgaatgagaactcacttttcactaaggggatggtgctagctgttcatgagggatccccccatgatcccgtcacctccctccaagccccacctccaacactgggaatcacatttcaacatgaggtttgtctgtctctgtcacatgcccrctgcttcacctgcattcctggccacctgtcagggtgcaggaagggatgtcactgcaggaaggctgctcagtgaggtgtgtgtgttgggggcgggaggggggcatatccaagggggcctctgcagacatcaggtcagcaggctggagtgtgcagcatggaaatgggggaaaatttggggccatcctgagcccagcatgatgcagaccttgtttccagtcctgcagaggccagtccaggatgaggcaacctctaggcctctggactctaggag

SEQ ID NO: 944009 - DNA, 647 bp, Homo sapiens
gtagctgtaatcccagctactcaggaggctgaggcacgagaatcgcttgtacctgggaagcagaggtggcagtgaacccagatcacaccactgcactccagcttgggcaacaaagtgagagcctgtctttttttttttttttttttgagaaggagtctcactctgtcacccaggctggagtgcagtggcgcgatctcggctcactgcaagctccacctcctgggttcacaccattctcctgcctcagcctcccragtagctgggactacaggcgcccgccaccacgcccggctaattttttgtattttttagtagagacagggtttcactgtgttagccaggatggtctcgatctcctgacctcgtgatccacccacctcgacctcccaaagtgctgggattagaggtgtgagccaccgtgcctggccgagatcctgtctggaaaaaaaaaaagacaattcagagcccattaaatcaatctccttcatgtgacaaggagaaaatagtgctgaaagccattgcttagctgcctggtatcacaacatcacagaaggtgatgttttggaaagaggttctgcctcagtcacctctgggctactgggtgctcccctggccagacgtatacttcaattcattctatttctcac

SEQ ID NO: 944010 - DNA, 642 bp, Homo sapiens
tgtgaaaccaacaacattaaattggtcttatttgtcaaaagtcacacaaacagagatcattttggttttggctagatttatagttttataacctttcgtgccaaatcctgacacctcaaagtatctagcatggacaaatgtaaaatccagacaaaaatgtatgctgacaattttaaagacatttctatttttattttaccaataattttaaagccagcttgtttattaaagaagatatattcaagtcatgtgaayttgaaaaatgctaggacatatttatttaacttatgtgctcctttaatttaagcactctcaattataagccaatttggaagacacaacatataacctaataaatgtacatacaaataaacacatctagacatgtatatacatgcacaaagttccaatggcttttaccttggaactctagccataagatagcaatacaagctcactagtttatgaacattttcacattgctaaattttgtttgccctggtaggtaatccagttatggttgtgaaccaaaatttggagtaaagcagtttccatggcattttgatttttaaaggccaaacgtctttagactccaaagaactccagggccaaacagtaccacagaagaacatcacgtattaa

SEQ ID NO: 944011 - DNA, 809 bp, Homo sapiens
tgagattaatatcagggatgcaaggatggtccaaaatatgcaaatcaataaatgtgctacatcacatcaaccaaatgaaggacaaaaagtacattatcatctcaacaggtgaagaaaaagctcgtgataaaattcatcatcactttatgacaaaaactctcgggtggagccaagatggccgaataggaacagctccagtctagagctcccagcatgagcgacgcagaagacgggtgatttctgcatttccaactgaggcaccgggctcatctcactggggagtgtcggaaagtgggtgcaggacagtgggtgcagtgcaccgagcatgagccgaagcagggtgaggcatcgcctcacccgggaagtgcaaggggtcagggaattccctttcctagtcaaagaaaggggtgacagacggcacctggaaaatcgggtcacacccacccaaatactgcgcttttccaatggtcttagcaaacggcacaccmggagattatatcctgcacctggcttggagggtcctacacccacggagcctcgctcattgctagcacagcagtctgagatcaaactgcaaggcggcagcgaggctgggggaggggcacccgccattgctgaggcttgagtaggtaaacaaagcggcctggaagctcgaactgggtggagcccactgcagctcaaggaggcctgcctgcctctgtagactccacctctgggggcagggaatagccaaacaaaaggcagcagaatcctctgcagacttaaatgtccctgtctgacagctatgaagagagtagtggttctcccag

SEQ ID NO: 944012 - DNA, 624 bp, Homo sapiens
tacaaagctataataaccaaatcatagtgttggcataaaaacagacatatagatcagtggaacataataaggaactcagatatcaatccaagcatacagccaagtcactttcaacaaaggcaccaagaacatatgatgggaaaaggatagtcctttaataaatggtgctgggaaaactagataaccaaatgcaggagaatgaagctggatcactatctctcaccacgtacaaaaatcaaataaaaatggacaaaagacttaaatstaagatctgaaactatgaaactcctacaagaagttattgagtgatgctccaggacattgatctggacacagactttttgtgtaggacttcaataatacaggcaaccggagcaaaaatgcacaaatgggatggtagcagttgaaaagcttctggatagcaaagggaacaataaacaaagtgaagagacaattcacagaatgggagaaaatatttgcaatctatccatctgaaaacgggtaaataatcagaatacatagggagctcaaacaactcaataacaaaaaaccccatataatccaattaaaaagtgggcaaaagatctgaatggatattttccaaaagaagacacacaaatggcc

SEQ ID NO: 944013 - DNA, 624 bp, Homo sapiens
tacaaagctataataaccaaatcatagtgttggcataaaaacagacatatagatcagtggaacataataaggaactcagatatcaatccaagcatacagccaagtcactttcaacaaaggcaccaagaacatatgatgggaaaaggatagtcctttaataaatggtgctgggaaaactagataaccaaatgcaggagaatgaagctggatcactatctctcaccacgtacaaaaatcaaataaaaatggacaaaagacttaaatgtaagatctgaaactatgaaactcctacaagaagwtattgagtgatgctccaggacattgatctggacacagactttttgtgtaggacttcaataatacaggcaaccggagcaaaaatgcacaaatgggatggtagcagttgaaaagcttctggatagcaaagggaacaataaacaaagtgaagagacaattcacagaatgggagaaaatatttgcaatctatccatctgaaaacgggtaaataatcagaatacatagggagctcaaacaactcaataacaaaaaaccccatataatccaattaaaaagtgggcaaaagatctgaatggatattttccaaaagaagacacacaaatggcc

SEQ ID NO: 944014 - DNA, 624 bp, Homo sapiens
tacaaagctataataaccaaatcatagtgttggcataaaaacagacatatagatcagtggaacataataaggaactcagatatcaatccaagcatacagccaagtcactttcaacaaaggcaccaagaacatatgatgggaaaaggatagtcctttaataaatggtgctgggaaaactagataaccaaatgcaggagaatgaagctggatcactatctctcaccacgtacaaaaatcaaataaaaatggacaaaagacttaaatgtaagatctgaaactatgaaactcctacaagaagttattgagtgatgctccaggacattgatctggacamagactttttgtgtaggacttcaataatacaggcaaccggagcaaaaatgcacaaatgggatggtagcagttgaaaagcttctggatagcaaagggaacaataaacaaagtgaagagacaattcacagaatgggagaaaatatttgcaatctatccatctgaaaacgggtaaataatcagaatacatagggagctcaaacaactcaataacaaaaaaccccatataatccaattaaaaagtgggcaaaagatctgaatggatattttccaaaagaagacacacaaatggcc

SEQ ID NO: 944015 - DNA, 624 bp, Homo sapiens
tacaaagctataataaccaaatcatagtgttggcataaaaacagacatatagatcagtggaacataataaggaactcagatatcaatccaagcatacagccaagtcactttcaacaaaggcaccaagaacatatgatgggaaaaggatagtcctttaataaatggtgctgggaaaactagataaccaaatgcaggagaatgaagctggatcactatctctcaccacgtacaaaaatcaaataaaaatggacaaaagacttaaatgtaagatctgaaactatgaaactcctacaagaagttattgagtgatgctccaggacattgatctggacacagactttttgtgtaggacttcaataatacaggcaaccrgagcaaaaatgcacaaatgggatggtagcagttgaaaagcttctggatagcaaagggaacaataaacaaagtgaagagacaattcacagaatgggagaaaatatttgcaatctatccatctgaaaacgggtaaataatcagaatacatagggagctcaaacaactcaataacaaaaaaccccatataatccaattaaaaagtgggcaaaagatctgaatggatattttccaaaagaagacacacaaatggcc

SEQ ID NO: 944016 - DNA, 738 bp, Homo sapiens; identical to SEQ ID NO: 935047

SEQ ID NO: 944017 - DNA, 595 bp, Homo sapiens; identical to SEQ ID NO: 935048

SEQ ID NO: 944018 - DNA, 636 bp, Homo sapiens
aacagattctgccctgttgattattataccaccattttgtaattatttggacttcattctttcttttttttttttgagacggagtctcactctgtcacccaggctggagtgcagtggcatgatctcagctcactgcaagctccgcctctcagattcacgccattctcctgcctmagcctcccgagtagctgggactacaggcgcccaccaccacacctggctaatttttgtatttttagtagagacggggtttcaccttgttagccaggatggtctccatctcctgacctcgtgatcctcccgcctcagcctcccaaagtgctgggattacaggcatgagccactgtgcccggcctattctttctttatttttgggacagggtctcactctgttgcctgggctggagtgcagtggtgcagtcttggctccctgcaacctctgcctctcagattcaagggattcttgtgcctcagcctcccaagtagctgggattacagaaacacaccaccatgacccactaattttttgtagagacagaatctcactatcttgctagggctgatctcaaactcctggggtcaagcgatcctctcacctgggtgttccaaagtgctgggattacaggcatgagccac

SEQ ID NO: 944019 - DNA, 636 bp, Homo sapiens
aacagattctgccctgttgattattataccaccattttgtaattatttggacttcattctttcttttttttttttgagacggagtctcactctgtcacccaggctggagtgcagtggcatgatctcagctcactgcaagctccgcctctcagattcacgccattctcctgcctcagcctcccgagtagctgggactacaggcgcccaccaccacrcctggctaatttttgtatttttagtagagacggggtttcaccttgttagccaggatggtctccatctcctgacctcgtgatcctcccgcctcagcctcccaaagtgctgggattacaggcatgagccactgtgcccggcctattctttctttatttttgggacagggtctcactctgttgcctgggctggagtgcagtggtgcagtcttggctccctgcaacctctgcctctcagattcaagggattcttgtgcctcagcctcccaagtagctgggattacagaaacacaccaccatgacccactaattttttgtagagacagaatctcactatcttgctagggctgatctcaaactcctggggtcaagcgatcctctcacctgggtgttccaaagtgctgggattacaggcatgagccac

SEQ ID NO: 944020 - DNA, 636 bp, Homo sapiens
aacagattctgccctgttgattattataccaccattttgtaattatttggacttcattctttcttttttttttttgagacggagtctcactctgtcacccaggctggagtgcagtggcatgatctcagctcactgcaagctccgcctctcagattcacgccattctcctgcctcagcctcccgagtagctgggactacaggcgcccaccaccacacctggctaatttttgtatttttagtagagacggggtttcaccttgttagccaggatggtctccatctcctgacctcgtgatcctcccgcctcrgcctcccaaagtgctgggattacaggcatgagccactgtgcccggcctattctttctttatttttgggacagggtctcactctgttgcctgggctggagtgcagtggtgcagtcttggctccctgcaacctctgcctctcagattcaagggattcttgtgcctcagcctcccaagtagctgggattacagaaacacaccaccatgacccactaattttttgtagagacagaatctcactatcttgctagggctgatctcaaactcctggggtcaagcgatcctctcacctgggtgttccaaagtgctgggattacaggcatgagccac

SEQ ID NO: 944021 - DNA, 607 bp, Homo sapiens
taatagccctcactcgggtactagaatcaggagaaggaaaaagggtaaatatatatacagactctaagtgtgcttacctagtcctccatgcccatgcagcaatatggagagaaagggaattcctaacttccgagggaacacctatcaaacatcaggaagccattaggaaattattattggctgtacagaaacctaaagaggtggcagttttacactgccggggtcatcagaaaggaaaggaaagggaaatacaagggagccaccaagttgatattgaagtcaaaagagccacaaggctggaccctccattagaaatgcttataggaggacccctagtatggggtaatcccctcygggaagccaagccccagtactcagcaggagaaatagaatagggaacttcatgaggacatacttccctcccctccagatggctagccaccaataaaggaaaaatacttttgcctgcagctaaccaatagaaattacttaaaacccttcatcaaaccttccacttaggcattgatagcacccatgagatggccaaattattatttactggaccaggccttttcaaaactatcaagcagatagtcagggcctgtaa

SEQ ID NO: 944022 - DNA, 618 bp, Homo sapiens
gttaggctacttggggtcagggacccacttgaggaggcagtctgtccattctcagatctcaaactctgtgctgggagaaccactattctcttcaaagctgtcagacagggacatttaagtctgcagaggtttctgctgccttttgttcagctaggccctgcctcccaaggtggagtctacagaggcaggcaggcctccttgaccttcggtgggctccacccagttcgagcttcccggctactttgtttacctactcaagcctcagcaatggtgggtgcccttcccccagcctcgctgccgccttgcagttccatctcagactgctgtgctggcaatgagcgaggctccgtgggtgtgggtccctccaagccaggcacagratataacctcctggtatgccctttgctaagaccattggaaaagtgcagtattagggtggaagtgtcccgattttccaggtgccatctgacacagctttgcttggctaggaaagggaatttgctgacctcttgcacttcccggatgaggcgatgcctcgccctgcttcacctcatgctcagtgcgctgcacctactgtcctgcacccactgtccaacaagccccagtgagatgaaccca

SEQ ID NO: 944023 - DNA, 605 bp, Homo sapiens
atgagactccttagtcagagacaaaggattttgttacttatggcacagcaaacagcctaaacattagtaagttcacttcagttgctctttccttaagtccccaaaagatgatacagtgagtgctgatgagtagtttgcatgcagtggtgctgtgtcatagatgaggaactctgagcctgggaaatttatagcaacagtaaacagtaagccagcttgctctttgtcgtacagggagtcattaactcatcccttaaggttgattgctgcaagcctaactctgaaaagtggtcctggtagggwggtcatggctttacactattggcatacccagcaggtcatgtaggggtacaagagactcatagtggactgtctttcaacactatccactccatggtcttatgtcatgttagctgctggaaatttttcttatgagtattccactccatcagtcattctgattaatttgactagagaggtagagagtaaacgcatagaatttgtcttacacaagatttaattaaggctactgtcagtagaactctaagcatgaagaggagaccaacctgcaatagcaacctcaatcatgcctcataggatcctagatt

SEQ ID NO: 944024 - DNA, 701 bp, Homo sapiens
gctgcccagctgtggctccagacccaggaatccttgtgcttttgggggcctgggaagcctccctgcccccacaggctcagaagtgcctgctcccattccctggcctctcctcactcctggcacccactccgagtttggagcaaagttgtggccgagtctgggtgctgtcgcaacccggcyggttgtacacgtgctcggagaagtactgtcacaccagccccttactgctgccttggccccctctggactttgggtactgttgaacatgggaaggaggcttggagtaggggccaagggaaggttggtgtgggcctacaggcacacctctgcgatggcctgaagcctgggggctgggctgccagttctgggtggagtccaccgcccagagtgggaacttaccgtgctttttctgggtccacacatggaccaatcagcacacacttttgaacccataaaaataggtttcgaacccataaaatgtcttttgaaaaatgtcttttgaacccataaaaaatgtcttttgaacccataaaaatcttgaactcggccagattcacacagatgtcgggactatcaactgcagaaaggagctacccactttgggtctccctgacttgtcaggacaacctgcctgtggaaaggagctacccatttcaggtctcctgagcgctgttctgtcactcaatgaagctcctctctgc

SEQ ID NO: 944025 - DNA, 701 bp, Homo sapiens
gctgcccagctgtggctccagacccaggaatccttgtgcttttgggggcctgggaagcctccctgcccccacaggctcagaagtgcctgctcccattccctggcctctcctcactcctggcacccactccgagtttggagcaaagttgtggccgagtctgggtgctgtcgcaacccggccggttgtacacgtgctcggagaagtactgtcacaccagccccttactgctgccttggccccctctggactttgggtactgttgaacatgggaaggaggcttggagtaggggccaagggaagsttggtgtgggcctacaggcacacctctgcgatggcctgaagcctgggggctgggctgccagttctgggtggagtccaccgcccagagtgggaacttaccgtgctttttctgggtccacacatggaccaatcagcacacacttttgaacccataaaaataggtttcgaacccataaaatgtcttttgaaaaatgtcttttgaacccataaaaaatgtcttttgaacccataaaaatcttgaactcggccagattcacacagatgtcgggactatcaactgcagaaaggagctacccactttgggtctccctgacttgtcaggacaacctgcctgtggaaaggagctacccatttcaggtctcctgagcgctgttctgtcactcaatgaagctcctctctgc

SEQ ID NO: 944026 - DNA, 654 bp, Homo sapiens
gacacagcagtgaataaagcagagctcctgcctgaggagctcacattctagtggagagggacaggcaacaaattgcacaaatatgtcagtggcaccggatgtgacagtgatgagtggtggggaaaagcagagcctagtagggagacagcaagggcctcactgcgagggcagtgtctgaggaaagccctgaaggaggtgagaggacagccacctaggcctttggggaaagagcatcccagacagaaggaagagcaaatgcagagactggcaggcgagaagcagccccagatgtctgcagacagtgaggratgcagtatgttttgtggtggagttggaggagggcaggcaatagggaatgatctaagagatgaatatgggacctcagaggccagtgcaggacttggatttcaccctgagtgaggtagaagccactgcgggaaccagctctggctaatgtgttaacaggatccttctggctgcagacccaacagactaaaggggggtgagggcagaaggcgatgacctgagagaatgttgtgataatccaggaggagccagtggtgcttggaggtggcaaggaggggtcagactctgaaggtagtgacaacaggcggatacccacagggcggatgtggagtttaagagaggactcgg

SEQ ID NO: 944027 - DNA, 635 bp, Homo sapiens
ttgcttcctttgactcagggggaaaccaaggctcagagaagtgacagcaccttgttcaaggacacgcagatgatctggtccaaattgtgatgctcctgctgccacaccacaatgatttttgcatctgctgccctgtcatctggtcagaaacaccctaattttctttctttttttaatttaaarcattttttattttttaattttaggtgtgtgtgtgtgtgtgtgtgtgtgtgtgtgtgtgtatactttttttttttttgagacggagtcttgctttgtcacccaggctgatgtgcagtggcatgatcttggctcactgcaccctccgcctcctgggttcaagcgattctcctgccttagcctcctgagtagctgggattacaggcatgtgccacgacccctggctaatttttgtatttttagtagagatggagttttaccatgtaggccaggctggtcttgaactcctgacctcaggtgatccgcctgccttggcctcccaaagtgctgggattacaggcatgagccaccgcgcccggcctgatatatatatttctggatgacgtgagatattttgatacaggcatgcaatgcataataatcacatcaaggtaaatgaggtctccatccccgca

SEQ ID NO: 944028 - DNA, 635 bp, Homo sapiens
ttgcttcctttgactcagggggaaaccaaggctcagagaagtgacagcaccttgttcaaggacacgcagatgatctggtccaaattgtgatgctcctgctgccacaccacaatgatttttgcatctgctgccctgtcatctggtcagaaacaccctaattttctttctttttttaatttaaagcattttttattttttaattttaggtgtgtgtgtgtgtgtgtgtgtgtgtgtgtgtgtgtatactttttttttttttgagacggagtcttgctttgtcacccaggctgatgtgcagtggcatgatcttggctcactgcaccctccgcctcctgggttcaagcgattctcctgcctyagcctcctgagtagctgggattacaggcatgtgccacgacccctggctaatttttgtatttttagtagagatggagttttaccatgtaggccaggctggtcttgaactcctgacctcaggtgatccgcctgccttggcctcccaaagtgctgggattacaggcatgagccaccgcgcccggcctgatatatatatttctggatgacgtgagatattttgatacaggcatgcaatgcataataatcacatcaaggtaaatgaggtctccatccccgca

SEQ ID NO: 944029 - DNA, 540 bp, Homo sapiens
tcagttgcattgatgcacaccaataatgattaatctgaaaaggaaattaagaaaacaataccatgaacaacagtattaaaaagaataaaatgctctggaatcaatttaaccaggatgacaaactatttgtacaataaaaactttcaaaatgctgctgtaagaaatcaaaggtacaaataaatggaacagtatcttctgttcataggtgaaaagactttttaaaaaayttcaacttttattttagattcaggggttacaggcacagatttgttatgtaggaatattgtataatgctcaggtttggagcacataggtagtgagcacagcaaccaatatgtagtatattaacttgtcctcccctctgcacactttagtagtccaccgtgtttactgttcccatatttatgtccatatatgctcaatgtttagctcttataagtaagaacatgcagtatttggctttctgtttctgcattaatttgcttgaaattatggcctctggttccacctatgttcataccaaggacatgatttcattat

SEQ ID NO: 944030 - DNA, 664 bp, Homo sapiens
tcagtggagttgcttggcgagttttactggtttccatctgctcaacagagatgttcatctgagccatctgatgaactgggggtgcagggatgttccgaggtcttttcctcttccttggattctggctcatggcacagcttaagatgtcttgtgggcacccagacaggaagctgattctcttctggtgagatacaagaaaacccttgaccccatgtaatgattttgcccttttcccaggttttggttctgatgtccttccaccacacatgttttccttcataagcatttattttttgccttgtcaaatgctgctctgctgccattgtaacgtgatctctagacaaattcagaaaatgtgaagtgataagagccaatkgtagctgcatataaggagtagcgtattctctggtttccccctctgtcttttgtttttgtaattgagattttaaggttcgattagcctgttcaacagtggcttgaccttgagaattatagggtattccagtactgtgctcgatgttccactgttaaaggaacgcctgtaaagatttactacagtagcctgggccattgtttgttttaatcttttgtgggatgcccatggcagcgaaacagggaagtaatgtcttaatatgagcagccgcctcgcctgtttggcaagttg

SEQ ID NO: 944031 - DNA, 734 bp, Homo sapiens
agagtagggaacacaatgaactgtaatggtaaacttgactctattctattaacctgggcctgttgtattttttcttcaattatttgtaattctttgtcagcctcaggagtcagttatcatttactattgagagcagggtctcctcttaaaatagagaacagattagacataacatggtagggattcccaaagtaggtcaaattcaactgatatcccctaataatttttgaaaatcatttagttttcagagagtcttttcgaatttgaaccttttggggtttaattgccctttcctgaacctgcatttccaaatattggaaaggagtggccgtttgaattttatctggtgctatgagcaatccagcattggctagcacctcctgtaaatatgaataacactggataagttggtctcgattttcagccgcacacaatatgtcatccatataatgaatgacatatgaatcgggaaactgatctctcacaggttgaacatccttccccgcaaaagtttgacaaatagtaggactattcaacmtaccctgcggcaagactttccaatgatatctggctgctggttccttgttgttcatagcaggaatagtaaaagtaaatttctcaaaattggactctgctagaggaatattaaaaaagcaatccttcaaatctataattattaatggccagtctctaggaatcatggtgggcgatggaagccctggctgcagggcccc

SEQ ID NO: 944032 - DNA, 570 bp, Homo sapiens
agatgggaggatcacttgagcccaggatatcaaggctgcaatggaccatgattgtgcttctgcactccagcctgggtgacagagcaagaccctgtctcaaaaaacaaaaacaaaaaaatgtgatcacagcagcattattgataaaaaccacaaaaaaaatgaagacaacccaagtgctcaccaacagatgaatgactaaacaaatgtggtctattcatagggtggaatattattcaagcataaaaaggaatgaagtaacgatagatactacaacctgaatgaacctgaaaaacattatgctkccagtcacaaaagaccacatgttgtatgattccatatatatgaaatatccagaataggcaagtctacagagatggaaagtggattagtggttgccaggggatgtgtggagggggaatagaaagtgagtgctaataggtatgggattactttgtgaggtgacaaaaattatctgcaattagatagtggtaatggctgcacaatattgtaaatgtacaagaagccactgaactgtacattttaaaataatagttaaaatgataaatttta

SEQ ID NO: 944033 - DNA, 570 bp, Homo sapiens
agatgggaggatcacttgagcccaggatatcaaggctgcaatggaccatgattgtgcttctgcactccagcctgggtgacagagcaagaccctgtctcaaaaaacaaaaacaaaaaaatgtgatcacagcagcattattgataaaaaccacaaaaaaaatgaagacaacccaagtgctcaccaacagatgaatgactaaacaaatgtggtctattcatagggtggaatattattcaagcataaaaaggaatgaagtaacgatagatactacaacctgaatgaacctgaaaaacattatgctgccagtcacaaaagaccacatgttgtatgattccatatatatgaaatatccagaataggcaagtctayagagatggaaagtggattagtggttgccaggggatgtgtggagggggaatagaaagtgagtgctaataggtatgggattactttgtgaggtgacaaaaattatctgcaattagatagtggtaatggctgcacaatattgtaaatgtacaagaagccactgaactgtacattttaaaataatagttaaaatgataaatttta

SEQ ID NO: 944034 - DNA, 720 bp, Homo sapiens
aagacccatttcaaacacctgctagaagtcatctctcccttcaaaattggactcaagaaggctggacatggtggctgatgcctgtactcccggcactttgggaggctgaggtgggtggaacgttggagcccaggagtttgcaaccagcctgggcaacatggccagaccccatctctacaaaaaaatttttttaaaaatttaaaaaattagccagacatggtggtgcatgcctgtagttccagctacttgggaggctgaggtgggaggattgcttgagtccagaaagtcgaggtttcagtgagccacgatcacaccactgcactccagcctggccaacagatcgagactctgtctcaaaagcaaaaacaaaaatgaattggactcaacaataattttccctttcccctgttgtcttctctctcttgctttctctcattctctctccacatcattcttcttctagtcactcacagattcccaccctggaaggtamgatggaaacttctagttgcctatgcattattaccccttattccttccaaaggaactctgattatgttgggagaggcaatatgttgggctagaaaactacattacccattcagagatcattctggccaaagaggtggaagtagaagttattgggtagagactctgctaaaactccctaaaagggggctgtctcagatgagagtcacacttttgctcatctctttcttc

SEQ ID NO: 944035 - DNA, 573 bp, Homo sapiens
tgttggtcttatttgaatatagtttggcagttggctgcctctgattggctgaaactaggtgattggcacaagagtaggttatagtttgtttatgtatttagttaggttatagtttcttatgtatagagaaacctttaagctgaatttaaaatayataaggaggcaggtttagactaaatttaattgaatggtttttcctttttgatcagtctctcaaaatttcacttttgagagattgaccaaaactttaggcattaatgtcactttggttttaaattttactaggaaatagtagaccagtggactttgcaaggtgggaacaaggacttcagataatttttttgtaagggttagagtagagggaacctttttttgttggaattttttgcttataggagaaaaaatctggtctgttttaaacttatttttttttaagttttagtttgattatatcatatttagtataagtgattgtattttggttggtttggtctgttggggcttagtgtaggagtttagtctaaaataatggcctcgcatagcagctttaggctaaactgaatttaacagcac

SEQ ID NO: 944036 - DNA, 573 bp, Homo sapiens
tgttggtcttatttgaatatagtttggcagttggctgcctctgattggctgaaactaggtgattggcacaagagtaggttatagtttgtttatgtatttagttaggttatagtttcttatgtatagagaaacctttaagctgaatttaaaatacataaggaggcaggtttagactaaatttaattgaatggtttttccyttttgatcagtctctcaaaatttcacttttgagagattgaccaaaactttaggcattaatgtcactttggttttaaattttactaggaaatagtagaccagtggactttgcaaggtgggaacaaggacttcagataatttttttgtaagggttagagtagagggaacctttttttgttggaattttttgcttataggagaaaaaatctggtctgttttaaacttatttttttttaagttttagtttgattatatcatatttagtataagtgattgtattttggttggtttggtctgttggggcttagtgtaggagtttagtctaaaataatggcctcgcatagcagctttaggctaaactgaatttaacagcac

SEQ ID NO: 944037 - DNA, 751 bp, Homo sapiens
ttgtgacggttgattttaggcatccgtttggctggattaaaggatacccagatggctggtagagcattacttctgggtgtgtctgtgtgggtgttgccagaagagattggtgtttgaatcagtgactgagtaaggaagatctgccttcatcgccatcagttgagggcctggatagaacagtagaagaaagacaaattctctctttctcttccggagccaggacactatcttctcctgtccctcgacaccagaactccagattctccagctttttttttttttttttttttttttttgagacagtctcacttgatgcccaggctggagttcaataatgcaatctcagctcagtgcaacctcctcttcccaggttcaagcgattctcctgcctcagcctccccagtagctgggattacaggcacccatcaccacacctggctaatttttgtatttgtagtagagaacrgggtttcaccatgttggccaggctggtcttgaactcctgacctcaggtgatccacctgcgtcagcctcccaaagtgctgggattacaggcatgagccactgcgcccagcccaggttctccagctttggactctaggactcgctccagtggctcccaagttctcaggcctgtagcctcgaactgagagttacaccatcagattccctggttctcgggccacaactgcgactgagctatgtcaccagtttccctggctttccagtttggagatggcacatcgtagga

SEQ ID NO: 944038 - DNA, 592 bp, Homo sapiens
caaactcaaaatggtgctgtaacctgaagcacacatggacacgccattcttccgaggacccttagatccaccccaggaggagccctagctgctgttccccattcaacgccccttttcaccaggaagtagccagaagaagtcgtcgcccaaaaccccctaacagcagttaatgtggcatctccacagggggtaatgyaggagttaagcaattattttaggcaaatagagaggaaaaggggtccttgggaaatgtttggtttttaaagcaactccggaaaagtttcttgtaaagccccggctcttagagccaggccagcaacctttgatatgcaaatgcaagccattagaaactgggtccacccaaacatggcgattcccacagccttcttgccctttccccacatgttcctagcaacatggccgccaccacacctccccaagtgtgcagatcatggtaccctgcatttgcatattaaaaggctaggtgggagggccagctttttcatgcgctacgtgaaagacatgcctagtcaaaccaatcccctgaggcctatgcaaatcagacactgcctcttccagcctctgtacatat

SEQ ID NO: 944039 - DNA, 619 bp, Homo sapiens
actccagtcagcactttcctatggaagggacgtgtttggtcacaactgggaagttgtaccccacaaaaagaaggctctggggaaatgtgatacagtcttcaaatattttaagggctgtcatgtggaaaaggattagctcttttgtgttacttcccagagctgagctaggataggtggggtgtgttgcaggaaaggtagggtgtgtgtgtstgtgtgcgcgcgcgcgtgtgcgtgtgcgtgtgcgtgtgtgtgtgtctcgctctgttacccagactggagtgcagtgcagtgatcgccactcactgcaacctccgcctcctgggttcaagtgattctcctgcctcagccttccgagtagctgggactacaggcatgcactaccacacccagctagtttttgtatttatagtagagatggggtttcgcaatgttggccaggctggtctctggctcctgaccttaggtgatccaccctactcagcctcccaaagtcctgggatcacaggcgtgagccaccgggccccaccaggaaagtagattttggcccagtgatataacaaacttactggatgtgataagcccactgtcagtggtggtttattcttaagatcaaagatgt

SEQ ID NO: 944040 - DNA, 603 bp, Homo sapiens
tcaggagttgacacgagcctggccaatatggtgaaaccccatctctactaagaatacaaaaattagctgggcatgatggtgcacacctgtagtcccagctactcagaggctgaggcagaggaattgcttgaacccgggagacagaggttgcagtgagccaaggttgtgccactgcactccagcctgggcgacagagtgaaactctgtctctctctctatatgtgtgtgtgtgtgtgtgtgtgtgtgtgtgtgtrtgtatgtgtgtgtgtgtgtgtgtatctatataaatctcaaaaataaaagatcatttttgagattatcattttaaaagacaagataatgttcaacttaatgactaatttaattattactattggactttttgtagactgcacagagcattcaaaacaaatgaaggagaataaaaaatatgtattacatgtagtaaaataaatgtgatgtggttaattcttttattcaaaattatagaacatatatatgtactatagaatgtatttcttattatgagtcatgttaaaaagtagtttagaagctgttgatttgaatttccttttcaaattttgcaggataattttttttttt

SEQ ID NO: 944041 - DNA, 603 bp, Homo sapiens
tcaggagttgacacgagcctggccaatatggtgaaaccccatctctactaagaatacaaaaattagctgggcatgatggtgcacacctgtagtcccagctactcagaggctgaggcagaggaattgcttgaacccgggagacagaggttgcagtgagccaaggttgtgccactgcactccagcctgggcgacagagtgaaactctgtctctctctctatatgtgtgtgtgtgtgtgtgtgtgtgtgtgtgtgtatgtrtgtgtgtgtgtgtgtgtgtatctatataaatctcaaaaataaaagatcatttttgagattatcattttaaaagacaagataatgttcaacttaatgactaatttaattattactattggactttttgtagactgcacagagcattcaaaacaaatgaaggagaataaaaaatatgtattacatgtagtaaaataaatgtgatgtggttaattcttttattcaaaattatagaacatatatatgtactatagaatgtatttcttattatgagtcatgttaaaaagtagtttagaagctgttgatttgaatttccttttcaaattttgcaggataattttttttttt

SEQ ID NO: 944042 - DNA, 792 bp, Homo sapiens
tttgaatttgaatttaaagataaagtattgagtaatataggaagatgattatctgcaactttcaaatgtttcagtaagtatatatatatataaagagatataaagacatataaataaatggataggtagagaaaaagcaaatgtataatattaacaatctaggtaaaaagtatatgagtgttctttgtactgtttttctgatttttctatatgtttgaaatcattttaaaataagaaggtttttgggktttttttgtttgttttttgtttttagagacagcatcttattctgtcaccaggctgtagctcagtggcccaatcattgctcactgcagcctcaacttcctgggctccagtaattccccctacctcaggctcatgagtagctggtacttcaggtgtgcaccactgcactcagctaatttttattttttaaatttttgtagagatggcatgttgctatgtcacccaggctagtctcaaactcctgcccccaagtgatcctcccactttggcctcccaaagtgctagaattataggcatgagccactgcacccagccccaaataaaaaagtattttattttaattaactaattaactttgagtcagagtttcacccttgtcacccaggctggagtgcaatggcatgatgttggctcactgcaaactctgcctcctgtgtttaagcgattctcttgcctcagactcctgagtagctgagattacaggtgcctgccaccatgcccagctaatttttatatttttagtagagacggggtttcagcatgttg

SEQ ID NO: 944043 - DNA, 613 bp, Homo sapiens
tttttcctaaaaaatgggtttttcttttctactgcatcaccagactgcagtttttctgaactgttatgctctgtttcccttttaaaacggaatgcttttaacagtacccaagtcacctcttgaatgttttgctgcttagaaatttcttctgccagatacyctaaatcatctctctcaagttcaaagttccacgaatctctagggcaagggcaaaatgcctccagtctgtttgctgaaacatagcaagagtcacctttgctccagttcccaacaagtttcttatctccatctgagaccaccttggcctggaccttattgttcatatcactatcagcatttttgtcaaagctattcaacaaatttctaggaggttccaaactttcccacattttcctgtcttctttggagccctccaaactgctccaacctctgtctgttacccagtccaaagttgcttccacatttttaggtatcttttcaataacaccccactcctggaaccaatttactatatgagttcgttttcacactgctgataaagacatactggagactgggaagaataagaggtttaattggacttacagttccacatgactggggaggcctcaga

SEQ ID NO: 944044 - DNA, 776 bp, Homo sapiens
ctgccttcaagcaatcctcctccattggcctccaaagtgttaagatcacaggcacgagcctctgtgacccactaattttgtaaattttaaatagtgtgatattaaatattaatgaagtcacactttatgtatacaatctgaaataattcaaataactgaaataatttttaagtatcccatgatttaaaatcatgcaggttgatctgtaaccctatgtatagtaatgtcaataatgaccctacatttttagctgacaaaaaaatttactcttattttttagaattagttttaattctgctattttaacattacataaatactttttgaatacaaccttttaataaaatgcaatatcattaaatttgctttccacagtatttcttgaggactgagtctgagttgggcagcatttgtagatttctgtatgactctagtcattttgccattcagtataatccttatattacacacacacacacacacacacacacacacacgcacacaaatgcacacaactccaaaatgctggattcttgcctcatgaatcattgaaatttatatgaaatttatttgaaatcttattgctaaaaatttcttagcrcatttgtgcatttgaatgtgactttttcatactaaaagttttattttatatatttgggatcataattggttaccttttcttctcctttttatttttatttttatttattttttattttattattattatactttaagttttagggtacatgtgcacaatgtgcaggtttgttaca

SEQ ID NO: 944045 - DNA, 737 bp, Homo sapiens
cattcagtataatccttatattacacacacacacacacacacacacacacacacgcacacaaatgcacacaactccaaaatgctggattcttgcctcatgaatcattgaaatttatatgaaatttatttgaaatcttattgctaaaaatttcttagcgcatttgtgcatttgaatgtgactttttcatactaaaagttttattttatatatttgggatcataattggttaccttttcttctcctttttatttttatttttatttattttttattttattattattatactttaagttttagggtacatgtgcacaatgtgcaggtttgttacatatgtayatatgtgccacgttggtgtgctgcacccattaactcgtcatttagcattaggtatatctcctaatgctatctctcccccctcccccaaccccacaacagtccccggtgtgtgatgttccccttcctgtgtccatgtgttctcattgttcaattcccacctacgagtgagaacatgcggtgtttggttttttgtccttgccatagtttgctgagaatgatggtttctagcttcatccatgtccctacaaaggacatgaactcatcattttttatggctgcatagtattccatggtgtatatgtgccacattttcttaatccagtctatcaatagactttattttaaagcagttgttggttcacagaaaaactgagcagaaggtgcagagatatcccag

SEQ ID NO: 944046 - DNA, 629 bp, Homo sapiens
gcagatccaacagttggaaacattggtcacttcagtgtaggtgtgggcccagtccacaatgcagttggagcatgttaacctacagttggaatgacagagtaggcataggtactaacagaggaaaatcacatccctcaggtaaaatacaggctaacctttcatccctggataacaatgcagcccccaaggggttctgccctgggcaatagtaccacaccttttcagctccccatggttcctttgggtcctgtattcatgcgaaagtcacaggggagcttgtagtaggccacacagacagtacatttgaaccctggaggaaagtttcttccctggcckttttcctacaaacagttaacttcggggaccattcattgaacacccaaagagtgacatacaagtcatactgtaggccctccccacagggagctacgatggacaaccaccagcagccgggggcttggaggggctatggccacagccaggttttctgttcccctgccttcagggacgttggggcaggcaacaacaggttactgttcatccccatacctggtcagaggcggttacccttggtgtgtatctgcaactgaataggggtggtggcccatgtaacaaagcctccacctggg

SEQ ID NO: 944047 - DNA, 641 bp, Homo sapiens
tcttccatgcccctcttcctgctatctcttttgcctaataaatatggagggctgtgtaaagctcagggcccttgtccactagaggcaaactgcccgctgaccccttcttccaaatatgctcttttgtctcatgtcttttattcccgctttcaccccactttgttcagtccccctaggkccgtgtgggttacatagtggcgccctgaacagcgacagaatcaggtgctctacaagtggcgtccgaacacagggactatgaggatgtgaatgaagaagatctgctggagcagaggaattgaaattgacaaggtgaatggggatcccgggacaagtctgccggcagcagatataaggtcagtgccctaaagaggtactgggagcagtgccttaaagtagtactgggaatgggaagttttctgaatcagggtaacatggggcagaattggtctgttgaagaaaaacattatgtgcagttgcttaaagttttgttgaaacaaactggtgctcaggttagttctcacattaactacgatgctacaggaagtcattatgcataacccatggtttccacaggcagggactcttgatgtagaaaattgggatagagcagaaggattaaaacaggctcatcaaaaaggttt

SEQ ID NO: 944048 - DNA, 641 bp, Homo sapiens
tcttccatgcccctcttcctgctatctcttttgcctaataaatatggagggctgtgtaaagctcagggcccttgtccactagaggcaaactgcccgctgaccccttcttccaaatatgctcttttgtctcatgtcttttattcccgctttcaccccactttgttcagtccccctagggccgtgtgggttacatagtggcrccctgaacagcgacagaatcaggtgctctacaagtggcgtccgaacacagggactatgaggatgtgaatgaagaagatctgctggagcagaggaattgaaattgacaaggtgaatggggatcccgggacaagtctgccggcagcagatataaggtcagtgccctaaagaggtactgggagcagtgccttaaagtagtactgggaatgggaagttttctgaatcagggtaacatggggcagaattggtctgttgaagaaaaacattatgtgcagttgcttaaagttttgttgaaacaaactggtgctcaggttagttctcacattaactacgatgctacaggaagtcattatgcataacccatggtttccacaggcagggactcttgatgtagaaaattgggatagagcagaaggattaaaacaggctcatcaaaaaggttt

SEQ ID NO: 944049 - DNA, 641 bp, Homo sapiens
tcttccatgcccctcttcctgctatctcttttgcctaataaatatggagggctgtgtaaagctcagggcccttgtccactagaggcaaactgcccgctgaccccttcttccaaatatgctcttttgtctcatgtcttttattcccgctttcaccccactttgttcagtccccctagggccgtgtgggttacatagtggcgccctgaacagcgacagaatcaggtgctctacaagtggcgtccgaacacagggactatgaggatgtgaatgaagaagatctgctggagcagaggaattgaaattgacaaggtgaatggggatcccgggacaagtctgccggcagcagatataaggtcagtgccctaaagagstactgggagcagtgccttaaagtagtactgggaatgggaagttttctgaatcagggtaacatggggcagaattggtctgttgaagaaaaacattatgtgcagttgcttaaagttttgttgaaacaaactggtgctcaggttagttctcacattaactacgatgctacaggaagtcattatgcataacccatggtttccacaggcagggactcttgatgtagaaaattgggatagagcagaaggattaaaacaggctcatcaaaaaggttt

SEQ ID NO: 944050 - DNA, 653 bp, Homo sapiens
atccttgggccatgcagtgagtgtcatagctctattagaagctcttccaaaagtcgtgctgctatctatggactaaaacatactcaaacaataatgacctctggcgtttaggctcaatgctcagagctaattgcagtcattcaggttttacagctcacagcttcagatcctrtcaacattgtctgtgttcagtttatgtcgtaaatgtagccggtcacatagaaactgctacaattaaaagtacgctaaacccagaactgctaatttatttttaagacttcaacaagttatttgttctagtgcagctccttttcatatttctcatattccttctcacacacaacttcctgggccgctatctctaagtaatgagaaaacagacaaactgattgcctctgtgtttcagcaagctcaaccatctcatgtgcttctgcaccaaaatacttccgcccttactcacatgttcctacaggtttgtattatattatgcagtatatccctcgagccacacctatagaaggatgtaatccacgaggtttggctccaaatgaaatctggcaaatggatgttacacacacagcaacctttgataagctgagctatgttcatgtgactatagacacttattctcatatgctgcctgctacatgcca

SEQ ID NO: 944051 - DNA, 653 bp, Homo sapiens
atccttgggccatgcagtgagtgtcatagctctattagaagctcttccaaaagtcgtgctgctatctatggactaaaacatactcaaacaataatgacctctggcgtttaggctcaatgctcagagctaattgcagtcattcaggttttacagctcacagcttcagatcctgtcaacattgtctgtgttcagtttatgtcgtaaatgtagccggtcacatagaaactgctacaattaaaagtacrctaaacccagaactgctaatttatttttaagacttcaacaagttatttgttctagtgcagctccttttcatatttctcatattccttctcacacacaacttcctgggccgctatctctaagtaatgagaaaacagacaaactgattgcctctgtgtttcagcaagctcaaccatctcatgtgcttctgcaccaaaatacttccgcccttactcacatgttcctacaggtttgtattatattatgcagtatatccctcgagccacacctatagaaggatgtaatccacgaggtttggctccaaatgaaatctggcaaatggatgttacacacacagcaacctttgataagctgagctatgttcatgtgactatagacacttattctcatatgctgcctgctacatgcca

SEQ ID NO: 944052 - DNA, 565 bp, Homo sapiens
atctctattaaatttcagctatgtttttgcagaatttgatatgctgatcataaaatttatatgaaaatgcaagagacacagaatagtcaaaactttgaaaagaagaaagttggaggacttacacttgttgattttaaggctttttacaaagctataataatcaagacaatgtgttactgacataatgatagacatattgatcaatatagacaatggatgaatggagtagaattgacagtctagaaataaaaccttatatatatggtcaatttatttctttatgtattctgtcatccagaatayataaagaacaccttcaactcaataacaacaataccaacaagggtgccaagaccaatcaatggaggaaataatagtcttttcaagaaattttgctgagacaactaagtatttatatgcaaaataatgagtttgaatggctaccatatacaaaaattaactcaaatggactatattaggtcagtgcaacagtaattgcagtttaccaccattacttgttttttttttttggtttttttttttgagacagagtcttgctctgtca

SEQ ID NO: 944053 - DNA, 565 bp, Homo sapiens
atctctattaaatttcagctatgtttttgcagaatttgatatgctgatcataaaatttatatgaaaatgcaagagacacagaatagtcaaaactttgaaaagaagaaagttggaggacttacacttgttgattttaaggctttttacaaagctataataatcaagacaatgtgttactgacataatgatagacatattgatcaatatagacaatggatgaatggagtagaattgacagtctagaaataaaaccttatatatatggtcaatttatttctttatgtattctgtcatccagaatacataaagaacaccttcaactcaataacaacaataccaacaagggtgccaagaccaatcaatggaggaaataatagtcttttcaagaaattttgctgagacaactaartatttatatgcaaaataatgagtttgaatggctaccatatacaaaaattaactcaaatggactatattaggtcagtgcaacagtaattgcagtttaccaccattacttgttttttttttttggtttttttttttgagacagagtcttgctctgtca

SEQ ID NO: 944054 - DNA, 597 bp, Homo sapiens
ttgtgaagagtctatcatctcctcatttaataatagtattgacacctttgttgaaagtcaattgataataaatgtatgagtttatttctggaatctaaattctattccattgatctacatgtctatccttgtatcagtatcacactatcttgattactgtagatttgtagtaagttttgaaacyagaaagtgtgagtactgcaatattcttctttttcttttttaaagattgtcagggcctcttgcaatttaatagggatatgaggattgacttttctattctacaaaattaaaattttgttagagattgcattgacactgtaggtagctttcagtaacattgccatctcaacaattttaagtattctaatacatgaatatgagctttctttctctttatttaggtcttctttaatttctttcagcagtgttttgtagttttggggtacaagtctttcacctttaaattttggtgaaatttattcctaggtattgcatttttttatgctattgtaaataaaattattttctcaatttcctgttggatgttcattgcaggtgtatagaaactcaactgattctttgtgttgatcttat

SEQ ID NO: 944055 - DNA, 622 bp, Homo sapiens
agaccaatctcagtggaatggtgggggcagaagccaggctgcagggtgtagagtagggaatgagcagtgatgaagtagaaacagagtttggacaactagtgaaactgcctggaagagggggagaagagacagtaaatggtctgaccaatgtttgaggtcaaagtgggtttgtaatctttatttaagggacagatctgagcatttaaaaattctgaataatctaatagagaggaaaaagttgggactcaaagaaaatgtgggaaaaaatgatgaaggttaaacggaatgagatccagagtgcagggggagagattagcctttggtgttagaggagcaactckgtccatggagagaggaaaaatgtagacataccacagttgcatttgaagttggggcctgaggagttgaggagttctgagaaaagcagaagatgagatcatttcctgagagtaaatgggagtcattagaacgggggtgaagagactggaagctttaggtagcttgaaatagttgatggaaaaattggataaagtgacaatttgtcacactcagaacagctatcagggaatctagaagaatctctggaagctagttgaagatcttaaattaccaatgtatcttg

SEQ ID NO: 944056 - DNA, 560 bp, Homo sapiens
cacagataggggctacctatctagcctcccaatgcaacagtagcctaaaacctgcgagggctcactgctgaaggcagtgcatggtctctgctcagttatttatccctctggaagcccttcttccctgatccccccacaagtaacctgtcccctcccatctgttgctctcttggcccctctgtctcatttttcttggtagcacccagcagagacatttatttgtgtcctgtctggcttctccattagcttgtccactctttgagggcagagactgacttgttcaccatggtgtcccagagcccaatgtggcacctgtcgtcacatagtaggtcttttctgagcatgtggtgaaggaatgggtgcccmcagtgattctcagagggaggtgggttctcactcgttacttgaagtgaatgtgttcaacactcttaaatcgctcccgccagttagtatctggctgcaggtattgagtggtttggaggaattggaagggtttcctttagaaagggcagtggagttgaaggcacctgcgtaggtgtcatgcagtgcctttgaccatc

SEQ ID NO: 944057 - DNA, 769 bp, Homo sapiens
aagagactcccactgtagtacaaggcctgaaaaaggaaagcaaaggagcactaattagttcagtcctatttatctacacaaaataaaaatataaaaatattggttgcaaaacaatttgctggctgtcaatagactgtgtctaccccggggagaccctggttttgcttctttctggaatttgtttataaccttctgttaatcaaacctgagcagggagagatgtggaaattaggtagagagaacggacttcatgacgacctggagcagacctgggaagaattgggatgagttcgtggcagtagcttgggttgccaggtgccaagacactggccctgccttgctgggagcctggtgatagggcctttttggaatcaggccttcacacagggaatgtaatctacaggatggcaggtgtgtgaggatggctgttccagaagattccayataggtcgggctccctagaagctgagtctgagatggggacgtgtggggatgtttgggactgtggaggacataggctcaggagaaggggagtcagggaagcagtggagggcgggcaagaagcaaggccagggcgtgggctcagtgcacccaaggagagctctggagcctcgtgtgtggcaccacatggctgtcccacctcaggcagtgagatgggtcttttgcaccctgtgtcaacccgtcatcagttgcggttgcccccagtggtagttccagccagtcagctccctcagctaaggacagttctccagacagggcacatctgtga

SEQ ID NO: 944058 - DNA, 608 bp, Homo sapiens
attgcttgtttttatcagctttgtggaagatcagatggtcatgggtgtgtggccttacttctgggcccctattctgttccgttggtctatgtgcctgtttttgtaccagcaccatgctgttttgattactgtagccttgtagtatggtttgaagttggataatgtgatgcctccagctttgttctttttgcttaggattgcctgggctagtcaggctcttttttggttccatatgaattttaaaatagtttttttttctatttctgtgaagaacgacattggtagtttcatagkaacagcattgaatctgtaaattcctttgggcagtatggcctttttaatgatattgattcttcctatccatgagcatgaaatgtttttccatttgtttgtgttttctctgatttctttgagcagtgtttgtaattctgattgtacagatccttcacctcctggttagctgtattcctaggtattttattctttttgtggcaattatgaatgggattgcctttccgatttggctcttggcttggctgttgttggtgtataggaatgttagtgatttttgtacactgatttttttatcctgaaactttgttgaagtt

SEQ ID NO: 944059 - DNA, 608 bp, Homo sapiens
attgcttgtttttatcagctttgtggaagatcagatggtcatgggtgtgtggccttacttctgggcccctattctgttccgttggtctatgtgcctgtttttgtaccagcaccatgctgttttgattactgtagccttgtagtatggtttgaagttggataatgtgatgcctccagctttgttctttttgcttaggattgcctgggctagtcaggctcttttttggttccatatgaattttaaaatagtttttttttctatttctgtgaagaacgacattggtagtttcatagtaacagcattgaatctgtaaattcctttgggcagtatggcctttttaatgatattgattcttcctatccatgagcatgaaatgtttttccatttgtttgtgttttctctgatttctttgagcagtgtttgtaawtctgattgtacagatccttcacctcctggttagctgtattcctaggtattttattctttttgtggcaattatgaatgggattgcctttccgatttggctcttggcttggctgttgttggtgtataggaatgttagtgatttttgtacactgatttttttatcctgaaactttgttgaagtt

SEQ ID NO: 944060 - DNA, 608 bp, Homo sapiens
gtccagctgatctgtgcaggagacaggaaatacaaccatcaggaccccaaggctgcaccatgggacagaccctgacatggttccagggcacagccttgctctgcgaccatcatacaccttgaggacagacttcagcctgtgccgcaaatgtgtattcgtgagcacaccctttgggaaccagaaaatgtgttttccaaagtaatttacttygtttgctttgttttgttttgtttttagacggagtctggctctgtcgcccaggctggagtgcggtgaagcgatctcggctcactgcaagctccatctcccaggttcacgccattctcctgcctcagcctcccgagtagctgggactacaggtgcccgacacctcgcctggctaatttgttgtatattttttagtagagacggggtttaccatgttagccaggatggtctcgatctcctgaccttgtgatctacccgcctcggcctcccaaagtgctgggattacaggcgtgagcactgcacccggccttgtttttgttttttgagacacagtcctgctctgttgcccaggctgcaatgcagtggtgtgatctcaatctcagctcactgcaacctctgcc

SEQ ID NO: 944061 - DNA, 445 bp, Homo sapiens
atgttcagtgtttttggggaaaggacgatgcatgttttattcacagttatctctccactacatagctttagtaggcagatttctaagacagcccccaacattccttcccctcatggtatacaccctttataactccctctcttgaatgtacaaaggatttatgagcaagaatgatatttcactttcatgatgaggatatattttatgggaaagatgaagccattttgtaygtgtaattaaggtccctaatcagtagactttgagttcattaactgaggcattaccctaggtggactgactaatctggtgagtctttaagtcaagcgagagagatcagcagcagcaacaaatgtttgtccagtgtcttgaagaagttagctctcatgtgagagtaagagtacaggcggcaaggacctgagggtgacctctgggagctgagagtggt

SEQ ID NO: 944062 - DNA, 445 bp, Homo sapiens
atgttcagtgtttttggggaaaggacgatgcatgttttattcacagttatctctccactacatagctttagtaggcagatttctaagacagcccccaacattccttcccctcatggtatacaccctttataactccctctcttgaatgtacaaaggatttatgagcaagaatgatatttcactttcatgatgaggatatattttatgggaaagatgaagccattttgtatgtgtaattaaggtccctaatcagtagactttgagttcattaactgaggcattaccctaggyggactgactaatctggtgagtctttaagtcaagcgagagagatcagcagcagcaacaaatgtttgtccagtgtcttgaagaagttagctctcatgtgagagtaagagtacaggcggcaaggacctgagggtgacctctgggagctgagagtggt

SEQ ID NO: 944063 - DNA, 851 bp, Homo sapiens
gacatgcaccaccacacccggataattttgttttgtatgtagatatgatgtctctctatgttgcacagtctgatctcaaactcattgcctcaagtagcctcaaagtgctgggatcacaggcatgagccactgtgtccagcccttcctctcctattaaaacattccagtggcttccaatcacaattgtaatataatccaaagttcttcttactctggttagctagatctcccataaactaacccccactttcctctctatacccatctcttaccctctccttcccacacactatactccaaccacagtgggtttctctctgttccttaaatactctaagtttgccctcacttccgtgcctttgctcttgctgttctctctggctggaatgttcttcctccagagcacacgattarcttcctgtcattcagcttttatctcaagtggcatcttctgagaaagaccttctgtaaatccttgttcaagtcaggatccaaggaaagcagaaatctttctaagtatacagaacagagggaatttaatatgggcgataagtcatacatgggatggataaccttcaaagtcaaataaggaaggacaacacagatatttacagcagcaggaaaactaacggaaaagtggtattaccagatcccatgagccaaggtcaccagatgaaatctgggggaagctttagacctgtccagcagaagcgagacccacagaagaaacacagccaccctcaagaacccgatgagcacaggaagggtgagaaaaataccctaccttctcccttccttccattctctaatctcccaccagtgcctccactacctaaacccacttggaaaca

SEQ ID NO: 944064 - DNA, 629 bp, Homo sapiens
atgattctttctgagtgaaatattgtcagtgtcattgaccttttcattatttcaactattattattccaggttatcaatactctggctgaccatcatcatcgtgggactgactttggtggaagtccttggttacgtatcattattgcgtttccgagaagttataaagttgtccttaccctctggacagtttacctttgggtgagtatactaactttctgtagaggtatacttgtaatcacaaataagaakaaattatataaaacaattcacatttctggacttcattatgaatatgtggttttacccaaaaaatcagggaaatgatttattagcataagaattatgaaaatatctgccatttacattatgaaaattaaataggtcagtgtttgtttaatagaatgtcaacagagcttttggtcaaaaataagtttttttaacctttgtgctatttgtcacaaatggagtatgaggtttcgtcacttaaataggaaattctttctaaactcttctgctttatagttctatcgtatgggtggaaggaaagcttccagtctcgtctctgaagattcactgcagaaatgagctgaaaagacagcttaacaggaaaagaaaaacatagaacagg

SEQ ID NO: 944065 - DNA, 781 bp, Homo sapiens
cctatttccctccagaactcgtcctagagacttacatggagaaggtgctcaaaaataaacctcagatggaaattagtgtctgggcccatattaatatgatttaatagtgagctataaaaaataattaaaatttgccagcatgttcctgtcccttattgcttatctaattgcccttggaatctacaagtggagtctggtcttaaaaagctcttatctmggccgggcgcggtggctcacgcctgtaatcccagcactttgggaggccgaggtcggcggatcacgaggtcagcagatcgagaccatcctggctaacacggtgaaaccccgtctctactaaaaatacaaaaaagtagccgggcgaggtggcgggcgcctgtagtcccagctactcgggaggctgaggcaggagaatggcgtgaaccccagggggcggagcctgcagtgagccgagattgctccactgcactccagcctgggcgacagcgagactccgtctcaaaaaaaaaaaaaaaaaaaaaaaaaaaagctcttatctcggtaaagtatttgtaagaggaaagcgatgggaaccaggagacgggagagactaagatttagtcaaagccaaaggtattctgtatgacactagagctaagagaacctctaagagagataatttaaaaattctgatggcaaattaaaaatccagagaatttagaatcgagagaccaggagaccagttaaggactatgatggcaatccctatgagagatgatatacagcctgaactaataagtcagtg

SEQ ID NO: 944066 - DNA, 781 bp, Homo sapiens
cctatttccctccagaactcgtcctagagacttacatggagaaggtgctcaaaaataaacctcagatggaaattagtgtctgggcccatattaatatgatttaatagtgagctataaaaaataattaaaatttgccagcatgttcctgtcccttattgcttatctaattgcccttggaatctacaagtggagtctggtcttaaaaagctcttatctaggccgggcgcggtggctcacgcctgtaatcccagcactttgggaggccgaggycggcggatcacgaggtcagcagatcgagaccatcctggctaacacggtgaaaccccgtctctactaaaaatacaaaaaagtagccgggcgaggtggcgggcgcctgtagtcccagctactcgggaggctgaggcaggagaatggcgtgaaccccagggggcggagcctgcagtgagccgagattgctccactgcactccagcctgggcgacagcgagactccgtctcaaaaaaaaaaaaaaaaaaaaaaaaaaaagctcttatctcggtaaagtatttgtaagaggaaagcgatgggaaccaggagacgggagagactaagatttagtcaaagccaaaggtattctgtatgacactagagctaagagaacctctaagagagataatttaaaaattctgatggcaaattaaaaatccagagaatttagaatcgagagaccaggagaccagttaaggactatgatggcaatccctatgagagatgatatacagcctgaactaataagtcagtg

SEQ ID NO: 944067 - DNA, 699 bp, Homo sapiens
gtttggcctctggatggactgtttggtgcctctcccaggtgatctttgctctcctcaccaccattatcccacactcatagtatccattcccatacacattccctgaatttctgtctgtagaaatttaaaaagtcaagtagttcagtggagtgcagcacacctcttatgggccagtcacacagtgtacctcatcttcaggggctgctggactgaagtctaacaaagaggagtggtggggtrggtcctgaggagttcaacattgtgttgctcagcacctgcctcaggggaggccattactatttcctcaggcaatgcaggcttcatcctctcagaggtggaaagaccaataccactgagggttgggaatgccactgttgctggggttgttgggaagcaaaggtgggagtgctccttcactgataaaggagacatcagaatttaggggctcaatgtcctcagctttatcaaagttttcccaaacatccccatcccaacttgcaagatcccattctttcccaattaatgctctcactttaactgcacatagcctgcaaagctgtgagttcaacttgcgttgtaattcagccacttgcaggatgaggttctgcatttgactttcagcaatttccgcccttctgtacagtaaataaaggtctccctcagggcacacataaaagttcctaggtcatttttgtggtg

SEQ ID NO: 944068 - DNA, 491 bp, Homo sapiens
aacttgcgttgtaattcagccacttgcaggatgaggttctgcatttgactttcagcaatttccgcccttctgtacagtaaataaaggtctccctcagggcacacataaaagttcctaggtcatttttgtggtgcatgaactaggaatgtgaatccctgacctcatcctttccttccaccagcatgacattagggttccaaccarcatcattatattcattcattttccaaaatgttcgaaagtatcatatataagccaggcatggtggctcacacctgtaatcccagcattttgggaggccaaagtgggaggatcacttgagcccaggagtttgagaacagcctgggccacatggcaagacccttgtctctaaaaaaaaaaagctgggcaaagtggcacatacctgtagtcccagctactcaggaagctgatgtgggaggatcacttgagcctaagcagtcaaggctgcagtgagccatgattgtgctact

SEQ ID NO: 944069 - DNA, 710 bp, Homo sapiens
ggagaggggagcatgtacagagagaggatgggagatccacgggaaggcgcaccaggtgttcattctgagggaggtaggtggggaggacaaaagggcccctgccttgggggtttacacatagtcctctgcccctgtcccygctgcacaggtggtttcagttgggcaggagcctgtgctgttctccggttctgtgaggaacaacattgcttatgggctgcagagctgcgaagatgataaggtgatggcggctgcccaggctgcccacgcagatgacttcatccaggaaatggagcatggaatatacacaggtatcttctacaaattgtaagcttgctccttcagtaaaaaagagaaaatcagacttactcttagtggtgaaggtcgtgtccctgtagcttgatgtttgctgttcctctgccctttcctccattcctacgtctccttccccacacactgaattcttcagcctccctcttgatcaagagtctttgtttgcagagagcaatgcagcagtggtgctccctccatgggcagccccgtcaggtccccaccccatggccctcctcccactgggccctccccgcactgggccctcccacctcccgaggtcctactggaagtacctgctgtgcacttgtccctccttgtgtgttgtctgtgtcacttgtatctgaggaagggaatttctctgatttcctcagatgtagggg

SEQ ID NO: 944070 - DNA, 654 bp, Homo sapiens
atgttagcaaccattgatactaattgcttaggtctgttaatttattggggattgctaaatggtggtattctgtcattttttcttcatttatatgctttattaatgctacaaagagacagttcccttcatttactagtgaagagacacttccctccacttactagtgggctacttagtggtacagtggaaaggcaggatcagtgtttgactctccttttatttaccarttttcaagttagcaaattggtttcctactattaataaaacctacagatggccaatcaggttttacttttcattctttaaataattataaacagaaggatttaaatgtttgataggttttactctattgcaatttttatgcttgttaaagcttatatcctacatttttggtgagtgaaaacttcttcaagtggctaaaaatgaaactgagttcttttgacgcaaatttcttttgataatttctttgttatctgggatgacaacatgtttctggttcatcttgttcatttcttggccagacctggaggtagccatttttccagaaatccctggtttagtttagtgggaaatgacatttaagactataatccagcgttagggtgttttgtcccactgaacccgctgctggagtcacctcaaaagtggcgt

SEQ ID NO: 944071 - DNA, 654 bp, Homo sapiens
atgttagcaaccattgatactaattgcttaggtctgttaatttattggggattgctaaatggtggtattctgtcattttttcttcatttatatgctttattaatgctacaaagagacagttcccttcatttactagtgaagagacacttccctccacttactagtgggctacttagtggtacagtggaaaggcaggatcagtgtttgactctccttttatttaccagttttcaagttagcaaattggtttcctactattaataaaacctacagatggccaatcaggttttacttttcattctttaaataattataaacagaaggatttaaatgtttgataggttttactctattgcaatttttatgcttgttaaagcttatatcctayatttttggtgagtgaaaacttcttcaagtggctaaaaatgaaactgagttcttttgacgcaaatttcttttgataatttctttgttatctgggatgacaacatgtttctggttcatcttgttcatttcttggccagacctggaggtagccatttttccagaaatccctggtttagtttagtgggaaatgacatttaagactataatccagcgttagggtgttttgtcccactgaacccgctgctggagtcacctcaaaagtggcgt

SEQ ID NO: 944072 - DNA, 654 bp, Homo sapiens
atgttagcaaccattgatactaattgcttaggtctgttaatttattggggattgctaaatggtggtattctgtcattttttcttcatttatatgctttattaatgctacaaagagacagttcccttcatttactagtgaagagacacttccctccacttactagtgggctacttagtggtacagtggaaaggcaggatcagtgtttgactctccttttatttaccagttttcaagttagcaaattggtttcctactattaataaaacctacagatggccaatcaggttttacttttcattctttaaataattataaacagaaggatttaaatgtttgataggttttactctattgcaatttttatgcttgttaaagcttatatcctacatttttggtgagtgaaaacttcttcaagtggctaaaaatgaaactgagttcttttgacrcaaatttcttttgataatttctttgttatctgggatgacaacatgtttctggttcatcttgttcatttcttggccagacctggaggtagccatttttccagaaatccctggtttagtttagtgggaaatgacatttaagactataatccagcgttagggtgttttgtcccactgaacccgctgctggagtcacctcaaaagtggcgt

SEQ ID NO: 944073 - DNA, 596 bp, Homo sapiens
ttgtcagtacctcagagggtgacgttatttggagatggggttgttgcagatggaatgagttctgttagaataaggtcatactagaatgggtaggtcctactccaatctgactagggtcctaacaagaagggaacatttgggccgggcacggtggctcacacctgtatcccagcactttgggaggccgaggcgggcagatcagctgaggtcagaagttcaagaccagcctggccaacatggtgaaaccccatctctactaaaaatacaaaaattagcctggtgtggtggygggcatctgtagtcccagctactcaggaggctgaggcaggagaatcgcttgaacccaggaggcagaggttgtagtgagccaagatcatgccactacactctagcctgggtgacagactgagactccatctcaaaaaaagaaaaaaaagaaggggacatttggacacagagacggagacacagggagaacaccatgtgaagatgaaggcagagattagggtgatgcttctataagccaaggaacaatgccaaagattgttagcaaactcccagaaactaaatgaggggcccggaacagattctgcctc

SEQ ID NO: 944074 - DNA, 609 bp, Homo sapiens
atatgaaaagtccagaagaggcaaacccacggagacagaaagcagattagggaacgcctggagccgaggctaggagtgaccgtgtagtgagtctggaggtctccttctggggtgatgagaatgttagacaaccggacagaggtgatggttgaaccacactgcagatgtacttaatgcactgaattacatgcttccaaatggttaatttcacattacgtgaaattatgtgaattctacatcaatttttttaagtaagcccttgtcataaatgcgtttaatacagttgctgcctcagcatccaactttagcagttgtaccctgtcacctttgccctagataacacccctccctccctgtcatgtgattgtttgcgayatagcccacgtggtcctcgcctcactgacccaaaacccaacacatcccacggctgctgaccacgataagacctaatgctcaacaccagagtcatgtaaatcagtttcctcctcgtgcatgttttctttaaaccagccaatccacaacccccgcaggaaagcctgtgggatcacttcacaccctgtgaccttaatacaggcacagccccggaagcttccccgcccttccgttctg

SEQ ID NO: 944075 - DNA, 648 bp, Homo sapiens
atcggacccagcagaacacagaagtagtcagcttgaggatagcttaatagaagagacccaaactgaagctcgggcaggaaaaaagaggggaaaaacaacaagaaacaacaatagaaaaccagaatagagcataagagacacgtgtaacaaactcaaaaggcctaaaaaacataattggaatcccagaaagagagaaaagagagaaggggcagaagtaatattcaaagaagtcatggctaaacatttccccaaattccaaaagacaaaaatctctagccacagattcagcaagaaaactacaaacaaaaaaccaaccagcatacctggktatatcatagtgaaattgccaaaaacaaagacaaaaaatttgacaagcagcaagagaaaaaggacatactactttgaaacgaacataagatggatagctgtcttctcaacaaatgaacagaaacaatggaagctgacaagcagtgaaataacgtatatttaaactgccgaaggaggttgggcacagtggctcccgcctgtgatcccagcactttgggaggctgaagcgggaggatcacttgagccaggagttggagaccagcctggccgacatggtgaaacctcgtctctactaaaaattcaaaaatcagccaggcgtgg

SEQ ID NO: 944076 - DNA, 512 bp, Homo sapiens
atgatggcccccaaaggtgtccatgtgtgaatccctggaacccatgaatctatgaggtgtgtggcaaaggggaagtaaaggttaaagatggaactacgcctgctcgtcagttgaccttccgatcatgaaattttcctggattatgtcggtggccccagtggaaccacaggagtcctcagtagtggagaagggggcaggagagtcagaggagctgggcctgggaagaaggctgtagacgtgcaatgccgctggctctgaaggtccgggaggcggccgtgcgtcgggaagtagctgtgcaagctggaaaagggaaggaaacagactcttccctggagcctccagaaggcacgcggtcctgctgacacctgsttctagtccagagagacccaggctggaattctgtcctccagaactgtaagatgtgaatgttgtcatcttaagccgtggagtttgtagtgatttgttgcagcagccacaggaactagcacacgcctcctggggacacgcacagc

SEQ ID NO: 944077 - DNA, 789 bp, Homo sapiens
aagttcagagttccacaaatctctagggcaggggcaaaatgctgccagtctcttcgctaaaacataacaagggtcacttttgcttcagttcccaacaagttcctcatctccacctgagaccacctcagcctggaccttattgtccatgttgctatcaggcatctggtcaaagccattcaacaagtctctaggaagttccaaattttcccacattttcctgtcttcttctgagccctccaaactgttccaacttctgcctgttattctcttccaaagttgcttccacattttyggatatcttttcagcaataccccactgtactggtaccaatttactgtattagtccattttcaccctgctgataaagacatacctgagactgggatgaaaaagaggtttaattggacttacagttccacatggctggggaggcctccgaatcacagcaggaggcaaaaggcacttcttacatggcagtggcaagagaaaaatgaggaagatgcaaaagcgaaaacccctgataaaaccatcagtccttgtgagacttattcacacgagaacagtatgggggaaatcacccccatgattcaaattatctcccactgggtccctcccacaacacgtgggaattacgagagtataattcaagatgagatttgggtggggacacagccaaaacatatcaaaaggtggcccacaggaccaaggagcggacaatgccaatgacaaatccttcaaaccaggtggtttctgctgctttgacttcaataaaattgaagaaggacttg

SEQ ID NO: 944078 - DNA, 694 bp, Homo sapiens
ccaccagaaaggtggtattttacaccggcttcctggggagactgggctagcacacccaatttaggatagtgtccttagggcaatgtttttttctttggatttcagtttttgagaatgtttccaattatttttagggatatcatgattacaaaaaacacctaaaagcagaatcaactacttaaatgtcagatacatttaagaattgtacactcatgttcatagcagctttatacataacagccaaaagggggaaacaacccaaacgtccatggaaggaagaacagatacatgtggtccctccacaccatggcatgacattagcattagaaagggcgtggtggctcacacctgtaatcccagcactttgggaggtcgaggcaggcggatcacgaggtcaggagattgagaccatcctggctaacacggtgaaaccccgtctctactaaaaatacagaaaattagccrggtgtggtggcgggcgcctgtagtcccagctactcaggaggctgaggcaggagaatggcgtgaacctgggaggcggagcttgcagtgagccgagatggtgccactgcactccagcctgggcaacagagcgagactctatctcaaaaaaataaaaataaataaataaataaagttaaaaaaatgaaaaaaaaaaaaaaaaaagaaagggaggatgttctgatacaagcca

SEQ ID NO: 944079 - DNA, 599 bp, Homo sapiens
tttatccctgaaatgcaaggatggttcaatatacacaaatcaataattgtgatacatcacattaatagaataaaaaaaccatatgatcatctcattagatgcagaaaaagcatttgataaaattcaacatcattttatgatgaaaaactcagcaaattagatgtagaaggaatatatcccttcaagggtaccactgagtgaaaatgtaaaacaraaaaaaagaaagaatgtgccttaacgcaataaaggccatatataacgagaagcccacagctaacattatactcaatggtaaaaaattgaaagcctttcctgtaagatatggaacaaggcaaggatgcctactcttcccacttctattaaatatagtattgaaagtccttgccaaagcaattaggcaagagaaagaaagaaaaggcatccaaataggaaaagaagtgtaattgttactgtttgatggcaactttattcgatatatatatatatatatatttgagatggagtcttgctccgtcacccaggctggagtgcagtggtgcgatctcagctcactacaacctccacctactgggttcaagcgattctcctgcctcagcctc

SEQ ID NO: 944080 - DNA, 532 bp, Homo sapiens
actgccacgttcataatggaaggaaatgcccagtgtctgttcgaggttggtggaaagaaagatgtcgttttttccacctcagtccgtggagccctgaattctgtgtgcagacgtttggggtctaagcaggacagtgggaagctttgcttcccacctttgctttggctcaaagccctcatctgtctgctctccccatagggatcacaggtctctggtctctggccatcatttcctgggagaggtggctggtggtstgcaagccctttggcaatgtgagatttgatgccaagctggccatcgtgggcattgccttctcctggatctggtctgctgtgtggacagccccgcccatctttggttggagcaggtaagggtgcgaggacgcaagatggagtgggcagggtcagactctgtgaccttaaggcaaatcacttcctttctctgggcccctctgagcgtgcaatgtctatcaatgtatgaatgtggctgcaacataggaaaggctctgtggtccccgaacctctggaaacat

SEQ ID NO: 944081 - DNA, 649 bp, Homo sapiens
agggaatacttccaaactcattctatgaggccagcatcactaccaaaaccagacaagaacacaacaacaacaacaaaactacaggccagtatcactgtaaaacacaaaatcgtaagtctagcaaaccaacagcgcattaaaaagatcattcaccatgatcaagtggaatttacctcagggatacaaggatgattcaacataaaatatatcacatcaacagaaccaagaaaaataaccatgtgatcatttgaatagatggtgacaaaatgtgataaaattcaacagtcctttatgataaaaacctcatcaaactgagtataaaagtagcatacctcaaaataataaaggcaatatctgacaaatccacagctaacattgtactgaccagggaaaacttttcctctaagatctaaaacragataaggacacgtacttttactactcttattgagcataatgctgaaaatcctggtcagagcaataaatcacacaagagaaagaaaggtcatccaaattagaaaagaaaaaagtcaaactatccttgtttgcagatgacatgatcttatattaagaaaactgttaagactctacaaataactcttagaactgataaattcagtaaagttgcccagtaaaaaaaaaaaaaaac

SEQ ID NO: 944082 - DNA, 649 bp, Homo sapiens
agggaatacttccaaactcattctatgaggccagcatcactaccaaaaccagacaagaacacaacaacaacaacaaaactacaggccagtatcactgtaaaacacaaaatcgtaagtctagcaaaccaacagcgcattaaaaagatcattcaccatgatcaagtggaatttacctcagggatacaaggatgattcaacataaaatatatcacatcaacagaaccaagaaaaataaccatgtgatcatttgaatagatggtgacaaaatgtgataaaattcaacagtcctttatgataaaaacctcatcaaactgagtataaaagtagcatacctcaaaataataaaggcaatatctgacaaatccacagctaacattgtactgaccagggaaaacttttcctctaagatctaaaacgagatarggacacgtacttttactactcttattgagcataatgctgaaaatcctggtcagagcaataaatcacacaagagaaagaaaggtcatccaaattagaaaagaaaaaagtcaaactatccttgtttgcagatgacatgatcttatattaagaaaactgttaagactctacaaataactcttagaactgataaattcagtaaagttgcccagtaaaaaaaaaaaaaaac

SEQ ID NO: 944083 - DNA, 775 bp, Homo sapiens
acagatggggcactacactgggactccagctaactttataagcagcaggcaagactgggggaattggggtgcagggacagaattccctccccactcggatcatgcctcccagtcagtgtcaatatctacctctctgctcaataaatsctgatgatcatcttaatagaaatcattacctactaaatggcaaaggaatgagaaagcaaggcaatatggatgagagaaagaggttttgagatgagatgtgagtagatttggaaaagccgggtagggagaatcagtctgtcatggctagcacggatgggtcaatgccggcagcagaaacaaggctccctgaaggtcaaggtgacagggggaagccaggaggagctggaagacagttatggatgggctccaaattggtccctaaagaaaatgatgttttctatttcttatgacaatattgttatagggctgttaacaagaatcaagaaatgtcagactgtgccaagggatgacatccagtaacagcctgagctggtttgattaagccatttaattagcatctgtttggggctgggcactgaacagagggtgatccattcaccatctgattcaattctctcattaaaggaggtagtaggtattactcttgtatatatcgcaatgaggaaccaagacccataaaggtgctaatattttgctaaaccaaataaagtaaaagagtgtatctaatgccctgtttctctcaccaccctacagcaatgtcagtgaagatggaaaacagaacgtggag

SEQ ID NO: 944084 - DNA, 781 bp, Homo sapiens
ttttgaatgttctcaccacaaagaaataataaatgcactgggcgatggatacaccaactaccttgactagatcattatccaaaatagataagtctcaaaacatcaaattgtactgcaataatatgtacaattatatcaatgaaacaattaattttaaaatttaaaaagtacagatgtccacagaagttttcatttaattgtttggggcatggggagttttcaacagtgcccagaaaattctaacatgcagccaaggtaaggactgtggccaatggtcattactgcctaatgttttcagctcttgtgtctgccaaccctcagggcatgcagcaaatccttatggcctagaacggaatttgttagaatttcagccattacatccatgtaaggaaaagaagtcaaaaactggatgtaatcttttattttcaaggcaagttcctagaaatctctctactctatattctccatcacatctttgggcagaacttagtcacatggccrtttctttctgcaagggaggctaggaaatgtaatcatttagttgggtagcttcaagcccagctaaaaatttagtgttctgttactaagggagaagacaaggatggatatttaaagacaagtagaagacttggtgacactgatacattaccagttatttatttttatcttttcagatgagaaaaccaaggttaggggttgctagataaaacagaagctgcccagttaaatttaaattgcagaggaacaattttttttagtataattacattccagatattat

SEQ ID NO: 944085 - DNA, 618 bp, Homo sapiens
gagtgtggtgaggcttggggttgggtgcccatggccatgcttcagtgcagcttttcccatgctaaaccctctggactccatgcaggcaagatttctatctctgccagctctcccggcaattctccctgcaatctcaaatgtctgtgggggtcatggggtctcctgcagcttggattccagaggtccatggcgagaatgagccactctatgcttgttttactcgccccttccccaggagtcactcaggccccaaaatgagtcctggtcctcagcaacctgatgcagggttcccagcttcctcccytttcagctcagggtctgtgtccttcctccatccattttcaatgccttctttccaaagatctgtttggaatgtgctggtcttcttgatgatcgggtctcttattgggaggagttcttcctgtctgcatctggtcagccatctttgccccaaagccttcagtaatttttaaatctgagaatgtgttaattttccccttcatttttgaaggatggttttgctggatatgtaattcctgcttgacaggtttctccttttttagaactttgaatatatcgcctactgcttgaggactacatatctcttatgagatacag

SEQ ID NO: 944086 - DNA, 588 bp, Homo sapiens
agaatatcctttgacactaccaaaaaattcttagaattgatgaacaaattcagtaaagttgcaagatacaaaatcagcatagaaaaatctgtaacatttgtacataccaacaataacctagctgagaaagaaatcacaaaaacaatcccatatacagtagctacaaaatwaaatacttggaaataaatttaaccaatgaggtgaaagatctctacaagaaaaactataaaacattgatgaaggaaactgaaaaggacacacacacaaaaggagaggcaacatatgctcatggactagaagaattaatattgctaaaatgaccctactatcccaagcaatatccagattctatgcaatccttatgaaaataccaatgacattcttcacagaaataggaaaaaaatcctaaaatttgcatggaaccaaaaaagacctagaatagccaaagcaatcctgaggaaaaagaataatactagaggcatcacaatatcagatttcaaaatatactacaaaactacagcaaccaaaaaacagacacacataccaatggaacggtataaaggacccataaatagatccacatattca

SEQ ID NO: 944087 - DNA, 720 bp, Homo sapiens
ttttgtttttgactttcctcttgactttgggcttccctaaatgctcctcctcagagagagtctgttgttgtagttttaggggtgaggagtggtgttctataattttccaattacatctcagttcttcagtgggcctgtgtctatggcttctgccctacccacgtgtttttcttcttgtatagcttcccygcttaggggagacatgaagcagagagggggctgaagtgacaggaatgcccttccccttgggactctgagacaaagctctagtgaggtcttttcctctggagaaagtctttcttatgaagaaggttgggaggtatttcagaaggattactctttccttcccctgccagtgccagcaggcaatctttcttggatatttaccatgagaagagattcctggaggcaaaatccatgatgatgtcaggtccctcttagcctggggtctccctaagactgggggacccaggagtttctcattctggggctagtccacactcagcctccagcagttcatcaaagtgaccatttaagtgtcctaccacttcctggcttcagtagcttctgctccagggaagtagatcttggttgtgactctctggattttgtcagtctcttcagggtgatggtttgccttataaattcagttttctagtggatctgagaaaagtgatttatttgtctagcatttttattgtaaggacaggagtggcagct

SEQ ID NO: 944088 - DNA, 720 bp, Homo sapiens
ttttgtttttgactttcctcttgactttgggcttccctaaatgctcctcctcagagagagtctgttgttgtagttttaggggtgaggagtggtgttctataattttccaattacatctcagttcttcagtgggcctgtgtctatggcttctgccctacccacgtgtttttcttcttgtatagcttccccgcttaggggagacatgaagcagagagggggctgaagtgacaggaatgcccttccccytgggactctgagacaaagctctagtgaggtcttttcctctggagaaagtctttcttatgaagaaggttgggaggtatttcagaaggattactctttccttcccctgccagtgccagcaggcaatctttcttggatatttaccatgagaagagattcctggaggcaaaatccatgatgatgtcaggtccctcttagcctggggtctccctaagactgggggacccaggagtttctcattctggggctagtccacactcagcctccagcagttcatcaaagtgaccatttaagtgtcctaccacttcctggcttcagtagcttctgctccagggaagtagatcttggttgtgactctctggattttgtcagtctcttcagggtgatggtttgccttataaattcagttttctagtggatctgagaaaagtgatttatttgtctagcatttttattgtaaggacaggagtggcagct

SEQ ID NO: 944089 - DNA, 730 bp, Homo sapiens
aacagatgtcaacacaaaagcttatacagaacattcttagcagaattgttcataatagtcaagaagtggatggccgggcactgtggctcatgcctgtaatcccagcactttgggaggctgaggtgggtggaccacctgaggtcaggagttcaagaccaagctggccaacatggcgaaaccctgtctctcccaaaaacaaaaaaataaraaaatttaaaaaattaaaaaattagctgggcatggtggcaggcacctgtaattccagctacttgggaggctgaggcaggaggattgcttgaacccaagaggtggaggttgcagtgagccgagatcacaccattgcactccagcctgggcaatggagcaagactctgtctcaaaagaaaaaaaaaaagaagtggaaaaaactgaaatggccatcagctgatgaatggataatacaatggggtatattcatacaatggaatatttgtgggtaattaaaataaatgaagaactgatacatgctacatcagggatgaactttgacaacattctgccatatgaaaaaaagccagtccaaaagactaaatactgtatgatttcactttcatgaaatgtccagaacaggcaaatccaaaaagacagaaagcagattagtggttggtatgggatgggaagaggaggaaatgagtagtattggggctggggatttctttttaaggttataaaaatgctctgatattaaata

SEQ ID NO: 944090 - DNA, 501 bp, Homo sapiens
ggcagctggctgttcccagagtggaaatccaaaagggagcagggagcctgtaatcccagcattttgggaggccgaggtaggtggattgcttgagcccaagagttcaagaccagcctggacaatgtggcgagaccccatctctacaaaaaaatacataaattagccaggcatggtggcgtgtgcttatagtcctaggtactctagaggctaaggtgggaggatcccttgagcccgggaggtggaggctgcagtgagctatgattttgcaccactgcacttcagcctgggcaacagagcgagaccctgtctaaaaaaaaaawatatatatatatatatatatatatatatatatatacacacatatatatacatatacatatatatacatatatatatacacacatacacatatatatagtgggttccattgattcaaataaaaaaattttttaaaaattaaataaaacaacaacaacaaataacaaatttaggtcaagcatg

SEQ ID NO: 944091 - DNA, 501 bp, Homo sapiens
ggcagctggctgttcccagagtggaaatccaaaagggagcagggagcctgtaatcccagcattttgggaggccgaggtaggtggattgcttgagcccaagagttcaagaccagcctggacaatgtggcgagaccccatctctacaaaaaaatacataaattagccaggcatggtggcgtgtgcttatagtcctaggtactctagaggctaaggtgggaggatcccttgagcccgggaggtggaggctgcagtgagctatgattttgcaccactgcacttcagcctgggcaacagagcgagaccctgtctaaaaaaaaaatatatatatatatatatatatatatatatatatayacacacatatatatacatatacatatatatacatatatatatacacacatacacatatatatagtgggttccattgattcaaataaaaaaattttttaaaaattaaataaaacaacaacaacaaataacaaatttaggtcaagcatg

SEQ ID NO: 944092 - DNA, 652 bp, Homo sapiens
gctgccctccttccttcttgattgggttgtgtcattaatgtatttgaaaaatacttactgagttcacactgtgtgccagaaactaaaataggatctctagaaaagtagtaaacagaacagacaaaatccctaccctaatggaacttataatggaggaaggtagatgataatctagtttcaaaaattaacctgtagtggtgagaagcaatatgaagaaaagttaagcagaatrggaagatagcgatgaggtgctgttttatacagtgtgaccagagaagacctctttaatcgggttaaccttgagtaaagagtgaaaagaggtgagggagcagatatcttgtgtaagaaaattccaggcgagagagtaataagggcaaagtccttcaggcagtagaatgattggcatgttggagaaattaaaaaggtatctgagtgactggagcagggtaagccagtgccaaacttttggaccatgacccacagtgagaaataaatcttatattctaaccaagtacacacacacatgccctcacacacactgaattcaaagtttcacaaaagaacccacctttactgtgtgtaatgcactgtgatagtgtctcttatattttattctatttcattaaaatgtcctggtcattactatctaaat

SEQ ID NO: 944093 - DNA, 457 bp, Homo sapiens
tgagaagagggtggacagaggtagtgtgatggtgacctggaaaccctgggcactggatgaagtgctgaacaaatgccagggggtattaatatacaaaagaaatcccagccatcctgcctgaaatgctgaacaaagcacttcctagaggcatctaataaagcatgtacaaatgcctaaaaacaggaatgtgagtsacatcaacctgtagtcaaatgtgcatccctaatatccaaattatagaacccagtcatattccttgggagcatttgggggacagggttttctctttggcataattaaggcaaagtcctacagcatttcccaaagcagatacaagaataatggcatctgaatcaactgtggttttgttaaaatgcagattcctaggttatgccccctgtctgactgaactagaatcctaggcatgagactcaagcatatgaattataaacaaatt

SEQ ID NO: 944094 - DNA, 457 bp, Homo sapiens
tgagaagagggtggacagaggtagtgtgatggtgacctggaaaccctgggcactggatgaagtgctgaacaaatgccagggggtattaatatacaaaagaaatcccagccatcctgcctgaaatgctgaacaaagcacttcctagaggcatctaataaagcatgtacaaatgcctaaaaacaggaatgtgagtgacatmaacctgtagtcaaatgtgcatccctaatatccaaattatagaacccagtcatattccttgggagcatttgggggacagggttttctctttggcataattaaggcaaagtcctacagcatttcccaaagcagatacaagaataatggcatctgaatcaactgtggttttgttaaaatgcagattcctaggttatgccccctgtctgactgaactagaatcctaggcatgagactcaagcatatgaattataaacaaatt

SEQ ID NO: 944095 - DNA, 640 bp, Homo sapiens
ggaatgttccacttggaatttatagtgggaatcagacagcccctttctcagggtaaacaggatttacagtggcttttatacagtccataagacttactgctccctcaagaataacctgctgtattagtttgctagtgttgccataacaaaataacacagaaaaggtgatttatacgcagaaatttattattgcactgatctagagactgtaatttcaagatcaaggtactagccaagtttgatttcttctgaggcctctctccttggcttgtatatrgttgcctcctcattgtgtcctcacatggtcttttctcttccttggtacatttgatgtctttctttgcctaaattttctcttcttatgccactcattttggattgaggcccatgcgtatgatctcatttaacctcaattatctctttaatggctccacctccaaatacagtcacattctgaagtattggggggttagggcttcaacattttagttttgtgtgaaaacaattcagcctatagcactctgccctttgggccctccaaattcatgtctttctcacatgcaaaatacatttgcaccctctcccctcatctcaatagccaaaaagtcttaattcattccaagatcaaaggttcctcatc

SEQ ID NO: 944096 - DNA, 633 bp, Homo sapiens
agaggtatgtggatggacctctccgagtggtcaaaaacggaagatatttgtgtcccctgtgagtgctcaccaatgggtgaactcagcagaggaggattttaataatcaagtgggtaggatgacctgttctgtggacaccactcagcttctttccccagccacccctgtcatcgcccagtgggcccatgaacaaagtggccatggtggcagggatggagattacacatggagattcagcaacgtagccctccactagccaaggctggcctgtctacagccactgctgagtgcccaayttggcagcagcagagactaacactgagcctcaatatggcaccattcctcagggtgatcagccagctccccggtggcaggttgattatattggacctcttccatcctggaaagggcagaggtttgtcctcaccggaatagacacttactcctgatgtgggtttgcctatcttgcacgcagtgcttctgccaagactgccatccatggactcacggaatgcctcatccaccatcagggtgttccacacagcattgcctctgagcaaggcactcactttacagctaaagaagtgtggcagtgggctcatgctcatggaattcactgatcttaccacgttc

SEQ ID NO: 944097 - DNA, 649 bp, Homo sapiens
tagaacggtggaatggccttctgaagtcacaattacaacaccaactaggtgacaatactttgcagggctgggaccaagttctccagaaggccatgtatgctctgaatcagcatccaagatatgatattgtttctcccttagccaggatgcacgggtccaggaatcaaggcactcaagtggaagtggcaccactcgccatcacccctagtgatccactagcaaaatgtttgcttcctgttcccacgacattatgttctgctggcctagaggtcttagttccagagggaggaacgctgccaccaggagacacaactgttccattaagctagaagttaagattgccacctggacactctgggctcctcctacctttaagtcaacaggctaagwaggagttacagtgttggctggagtgattgacccagactctcgagatgaaatcagtctacagctccacaaaggaggtaagtaagagtatgcatagaattacaaaagatccattagggcgtctattaatattaccatgccctgtgattaaggtcaatgggaaactacaacagcccaatccaggcaggactacaaatcccccagacacttcaggaatgaaggtttgggtcactccaccaggaaaaaaaaaaacatgaactgc

SEQ ID NO: 944098 - DNA, 649 bp, Homo sapiens
tagaacggtggaatggccttctgaagtcacaattacaacaccaactaggtgacaatactttgcagggctgggaccaagttctccagaaggccatgtatgctctgaatcagcatccaagatatgatattgtttctcccttagccaggatgcacgggtccaggaatcaaggcactcaagtggaagtggcaccactcgccatcacccctagtgatccactagcaaaatgtttgcttcctgttcccacgacattatgttctgctggcctagaggtcttagttccagagggaggaacgctgccaccaggagacacaactgttccattaagctagaagttaagattgccacctggacactctgggctcctcctacctttaagtcaacaggctaagtaggagttacagtgttggctggagtgattgacccagactctcgagatgaaatcagtctacagctccacaaaggagktaagtaagagtatgcatagaattacaaaagatccattagggcgtctattaatattaccatgccctgtgattaaggtcaatgggaaactacaacagcccaatccaggcaggactacaaatcccccagacacttcaggaatgaaggtttgggtcactccaccaggaaaaaaaaaaacatgaactgc

SEQ ID NO: 944099 - DNA, 612 bp, Homo sapiens
agtggtgaatgcccacagggaggcaggcacctctgcatccactagcacttggctgtagctgctgcaccttgatccccccagtacagtagactccaaacatcaaggagccagagaacaaagttggggcccaatacaagtcccccagagatacagcatgcagtccaggggttgggagctgaacattggccccctagtaycttccagaaacgaagccagatggatgaatccaccttataccacaatcaaacccccaaggtcatcaaataggataaaagaaaaaaaacatccaaaggtcagcaacctcaaaagttgaaggtaggtaagcccacaaagatgagaaagaatcagtgcaagaatgctgaaaactcaaaaaaccagagtaccttctttcttccaaatgactgcatcacctgtccagcaagggtttggaaccaggctgaggctaagatggctgaaatgacagatgtataggaaagaagttcactgagctacaggggtacattgtaacccaatgcaaggaagttagaaatcatgataaaatatcataggagctgacagacaaaatagccagtatagagaagaatgtaactgacctgatagagctgcaaaaca

SEQ ID NO: 944100 - DNA, 618 bp, Homo sapiens
cttgagacatgccagccaccataatcgcatatcccattattttggtcctgggatttctagaattggcattttaatttgattagattcaaagaggctagtgattctatttccaatagtaaagggggcactgacagttatggcatgatctagcaatggggatatgcaaaatatcaccattggctactcgtaatcaagtacttacaagmagcaaggagctaggtgactgtgtatataattgtaaacatttttatcaaaataatacatatagtgagattggctggatgttcttaacgtcacttgacaaagtggagaaagaaaagaatatactcgtggatttgaatgtccagatcaagcaccacataattaacttgaaagcttctatatgtgccctaaagatgatccttatttcccgttgtcacagcactgattgttaaaaacccaaagcagtatctcatcctatgactgatgaaattacaacttaagttaaattcccagtatcatagtgttcctactgtcaaagtgaaggcacttattgtgaatcatcataaaaatcaaaagggggacatgtggaaaaacccagataaaattgggaacatttagtccatcaactgtgatgag

SEQ ID NO: 944101 - DNA, 423 bp, Homo sapiens
cagtgtcccaaatgaggaaagagagtaatgaatggacatcaccatggggtcaccaagtgatagatacatcttaaagcttcacatggctgggaataaaatgacacaaatccattggactggcctctgactttagtacttccattttctatcccatcaccttcacagtcagcacctgcctagagcgtggggtcaccccaattgtgtcagtttctaatatgaagggcaattttgcccccaaaggacccytggcaatacttggagacacttttggttgtcatgacttgggcactggggtgctactggatccagggggcagaggcaaggaatgccactcaacatcctcagacaggacagcccccgcaacaaaaaactatctggcccagaacatcatgagtgctaaggttgaggcaccttgctcagaag

SEQ ID NO: 944102 - DNA, 728 bp, Homo sapiens
attttttatttttttgagatggagtctcactctttcacccagggcggactgcagtggtgctatctctgctcactgcaagctctgcctcccgggttcacgccattctcctgcctcagcctcccgagtagctgggactacaggcgtccgccactgcgcctggctaagtttttgtatttttagtagagatggggtttcaccatgttagccaagatggtcttgatctcctgacttcgtgatccgcccgcctcggmttcccaaagtgctgagattacaggcgtgagccaccacacccggcctggactgattattgatagtcttctcttgcacgatgctagtatacaaagactgcgtgaggtggcttgtttttcaaatactcaaattctaacaaaaaataggaaggcatacagaggaacatggcccaatcaaaagaagaaattaaactctagaaaccaacctaaagaaacacagatctatgagctgcctgacaaagaatttaaaataactgccataaagatactcagtgaactaaaagagaacatagatatacagataagtaacatgaataaaagaatggattaacaaaatgagaatatcaatgaaaaacagaaactattaaaaaagaaattttagagctaaaaaatacaataatgaaactaatatttattaaagggatttaacagcacaactgatctggcagaagaaataatcagcaaacgtaaatataggtc

SEQ ID NO: 944103 - DNA, 764 bp, Homo sapiens
ctacaggcgcacgctgccgcgcctggctaattttttgtatttttaggagagatggggtttcactgtgttagccaggatggtctcgatctcctgaccttgtgatccgcccccctccacctcccaaagtgttgggattacaggcatgagccatcgcatccagcccaggatttattattaaacatgaaaagcagtgagcagaatggtgttgatagtgaatactcctgtgtgtgtgagaaaatgagggcgaggatctgaacaattttattatttatttatgcaaatattttttatttgcataaggaagcactgaaaggacacataggaactaacaaaagtcatttctggggatgggggyagcaaagcgttggatgagaatggggcgggaacgaggcttttcaacatacatctttgatttatttatttatttatttatttatttatttattgagatggagtctcactttgttgcccaggctggagtgcaatggcgccatctcagctcactgcaacctcagcctctcaggttcaagcgattctcctgcctcagcctcctgagtagctgggactacaggcgtgcaccagcacgcccagctaatttttgtatttttagtagagatggggtttcaccatgttggccaggctggtctcaaacccctgacctcaggtgggatccacccaccttggcctcccaaagtgttgggattacaggcatgagccaccacacctggcctgataccttttagatctttgaactatgtgaatat

SEQ ID NO: 944104 - DNA, 764 bp, Homo sapiens
ctacaggcgcacgctgccgcgcctggctaattttttgtatttttaggagagatggggtttcactgtgttagccaggatggtctcgatctcctgaccttgtgatccgcccccctccacctcccaaagtgttgggattacaggcatgagccatcgcatccagcccaggatttattattaaacatgaaaagcagtgagcagaatggtgttgatagtgaatactcctgtgtgtgtgagaaaatgagggcgaggatctgaacaattttattatttatttatgcaaatattttttatttgcataaggaagcactgaaaggacacataggaactaacaaaagtcatttctggggatgggggtagcaaagcgttggatgagaatggggcgggaacgaggcttttcaacatacatctttgattkatttatttatttatttatttatttatttattgagatggagtctcactttgttgcccaggctggagtgcaatggcgccatctcagctcactgcaacctcagcctctcaggttcaagcgattctcctgcctcagcctcctgagtagctgggactacaggcgtgcaccagcacgcccagctaatttttgtatttttagtagagatggggtttcaccatgttggccaggctggtctcaaacccctgacctcaggtgggatccacccaccttggcctcccaaagtgttgggattacaggcatgagccaccacacctggcctgataccttttagatctttgaactatgtgaatat

SEQ ID NO: 944105 - DNA, 764 bp, Homo sapiens
ctacaggcgcacgctgccgcgcctggctaattttttgtatttttaggagagatggggtttcactgtgttagccaggatggtctcgatctcctgaccttgtgatccgcccccctccacctcccaaagtgttgggattacaggcatgagccatcgcatccagcccaggatttattattaaacatgaaaagcagtgagcagaatggtgttgatagtgaatactcctgtgtgtgtgagaaaatgagggcgaggatctgaacaattttattatttatttatgcaaatattttttatttgcataaggaagcactgaaaggacacataggaactaacaaaagtcatttctggggatgggggtagcaaagcgttggatgagaatggggcgggaacgaggcttttcaacatacatctttgatttatttatttatttatttatttattkatttattgagatggagtctcactttgttgcccaggctggagtgcaatggcgccatctcagctcactgcaacctcagcctctcaggttcaagcgattctcctgcctcagcctcctgagtagctgggactacaggcgtgcaccagcacgcccagctaatttttgtatttttagtagagatggggtttcaccatgttggccaggctggtctcaaacccctgacctcaggtgggatccacccaccttggcctcccaaagtgttgggattacaggcatgagccaccacacctggcctgataccttttagatctttgaactatgtgaatat

SEQ ID NO: 944106 - DNA, 620 bp, Homo sapiens
ctgcgtcttgtccaaggcctgctgtaaccactactggctaacaactattattactcaaggctctagggctctacaatctactgatagcaaatccagcaaggtttgtgttcttctcttcagggtggagagctcccccgggccccaggtgggtcctgagatgctttctgggagccagrgattggaatcaaagaccttagaaatttgcctgatattctattctactgtggatatgctggcattcaaatcacaatataaagttcttcccactctttcctcttctttccaaaggcaaaggagcccctccctgtggacatcaccaccaccccaccaggagtgttctgccaggccactgttggtgttcacttaagaactaagggcttctcagtcagtttgtggtgaatgctgccaggcctgggaatcactcttcaggacagtgggctcccctgtggctcaaggcaggtctagaaatgctgcctgagagcctaggcctagttttggggaccccaagtgcctgcttgttgctccaccctactgtgggcacgttggtacctaaggtacaaagcaaagtccaatttacttttcctctgcttttttcaaacagacagagtctttcaccatca

SEQ ID NO: 944107 - DNA, 620 bp, Homo sapiens
ctgcgtcttgtccaaggcctgctgtaaccactactggctaacaactattattactcaaggctctagggctctacaatctactgatagcaaatccagcaaggtttgtgttcttctcttcagggtggagagctcccccgggccccaggtgggtcctgagatgctttctgggagccagagattggaatcaaagaccttagaaatttgcctgatattctattctactgtggatatgctggcattcaaatcacaatataaagttcttcccactctttcctcttctttccaaaggcaaaggagcccctccctgtggacatcaccaccaccccaccaggagtgttctgccaggccactgttggtgttcacttaagaactaagggcttctcagtcagtttgtggtgaaygctgccaggcctgggaatcactcttcaggacagtgggctcccctgtggctcaaggcaggtctagaaatgctgcctgagagcctaggcctagttttggggaccccaagtgcctgcttgttgctccaccctactgtgggcacgttggtacctaaggtacaaagcaaagtccaatttacttttcctctgcttttttcaaacagacagagtctttcaccatca

SEQ ID NO: 944108 - DNA, 608 bp, Homo sapiens
agctgccaggaccacgaactctgaaaccaggtgaactttgcatttctaaaccagtgaccagaaaataggtggcaagggcaggacactggtggggtgaggctggctggttctgtgcccaccaaggctctgactgcaatggcagttggcagtgggaggaagggtgggctgtactcctgttgcagcagtggcacagcaaggttcactgacacatgcacactgtagggacaaagaaagcataaaccacctatgcacacacatgtcatcaaagtgatgtgaagggttgccatgggcccaggggaagctgcagtgtgggaagggagcaagtgggcttgtgcatggctgtgggggctgctccactggagcccttctctggtcctctggtcaggcacagtccaccagtgcagaagctatgacacgtgctcccaaggcactcraggctgccctgcaagaaggcatggtcaggctggggccccagagaggacagcagaccaaagggtgctcaggtcaaacctgccctgtctgatgggcaagaccacccagcagagttcaggtctgacatttcgcctagggctaaaggctcctatgggaacaagttgaaccttggggga

SEQ ID NO: 944109 - DNA, 560 bp, Homo sapiens
gcaggcagaagaagatggaagagcatccttgctaagtcttccagccttcatcattctcctgtgctggatgctttctgcccttgaacatcagacttcaagttctttggcttttagagttttgtacttacaccagtgttttgccaggggccctcgagtcttcagccacagactgaaggccacascgtcagcttccctatttttcaggtttttggactcagactaagctactactagttcccttgctcctcagcttgcagatggcctatcgtgggacttcaccatgtgattgtgtgattcaattattaataaaattcctttcatatatagatatattctattagttctatccctctagagaaccctagctaatacagatttcggtaacaggagtggttctagaggaacaaaattttaaagacggatttctttagttgattttgaggtttctggagttggctgcttaatgtgattagaccccaaaatgctaagaacactactaatagtatgcagaacactgacagtccttggcacatactcttttgagagttatgcaaagtaaa

SEQ ID NO: 944110 - DNA, 569 bp, Homo sapiens
agacctctggccttttagcaggataattgcattggtgaaaaagaaatgatcagaccttaggagactactggacactggctctaaactgacattaattccaggggacccaaaacatcattgtggccctccagtcagaggagaggcttatgaatgtcagttaatttatgaagttttagctcagatctgatgtacagtgagtccagtgggtccctggactcatcctgtggtcacatctccagttccagaatgcgtaattagaatagacatacttagcagttggcagaatcctcacattgactccctgactggtagagtgagcgctattatggtgggaaatgccaaatggaagtcattagagctgcctctacctagaataatagtaactcaaaaccaaattacatccctggagggattgcaaagataatygctcccatcaatgacttgaaagatgcagggatagtgattcccaccacatccccattgtgcactctcctatttggcctgtgcagaagacagatgagtcttggagaatgacagtggattatggtaagcttaatcaagttgtgact

SEQ ID NO: 944111 - DNA, 483 bp, Homo sapiens
aaaatggctttggctattctggatattttgtggttccatacaaattttaggatttttttttctattttagtgaaaaatgtcattggcatgttgttaggaattgaatagaaattgtaggttactttcagtagtatgaacattttaacaatatcagttcttccaatscatgaacatagaatatttttccttttttaggtgttctctccatttttttcattagtgctttataggttttattacagaattttttacttcttccattaattcctgggtattttacttgtagctattgtaaatgagattatgtttttttatttctttttcagtttgtgccctgttacatatagaaatgcactgacttttgtatgttgattttgtatcctgcaactttactgaaattgtttatcagttctaatactgttttttttggtgaagtcatgagggttctccaaatataagatcatatcatctgcaaagaaggtt

SEQ ID NO: 944112 - DNA, 483 bp, Homo sapiens
aaaatggctttggctattctggatattttgtggttccatacaaattttaggatttttttttctattttagtgaaaaatgtcattggcatgttgttaggaattgaatagaaattgtaggttactttcagtagtatgaacattttaacaatatcagttcttccaatccatgaacatagaatatttttccttttttaggtgttctctccatttttttcattagtgctttataggtttyattacagaattttttacttcttccattaattcctgggtattttacttgtagctattgtaaatgagattatgtttttttatttctttttcagtttgtgccctgttacatatagaaatgcactgacttttgtatgttgattttgtatcctgcaactttactgaaattgtttatcagttctaatactgttttttttggtgaagtcatgagggttctccaaatataagatcatatcatctgcaaagaaggtt

SEQ ID NO: 944113 - DNA, 595 bp, Homo sapiens
ggaatgtggctactgcaaacacgctgtgcccgggcccggtgcagtggctcacgcctgtagtcccagcactttgggaggccaaggcaggaggatcacttgaggctaggagtttgagaccagcctgggcaacatagtgagaccctgtatctaccaaaaattcaaaaattagccaggttgtggtggtgtgtgcctgtagtcctagctccttggggggctgaagtgggaggatcacttgagccagcaagttcaagactgcagtgagctatgatggtaccactgtactcragcctggacaacagagcaagaccctgtctcctaaaaaacataaagtaaaattttaaaaatacacagtgaattttgaagattcagtatgaaaaaagatattaaaaatttttttatattggttatatgttgaaatggtgtgctgggtatattgggttaatatattattagaattaatttcatttatttttatcttccattgtggctcctagagagtttaagttacatacgtagctggcattatattcctactggacagggctgcataagcatccgtccacttccatttccctctgttaagaggtcccaggca

SEQ ID NO: 944114 - DNA, 607 bp, Homo sapiens
ctgcaataatggaggagctgtgggttgcttctgggatatattcttcagagaactgttcaggcaggagcagaatagttgtgagacagccaggaggacagagtccccagagaaactccagttggcctacgcactgggaggagtgtgcactggggtggagccacagaagtttgtgccctttgcagtggggaggagcctgcccctcctcttcttgggtggtacctgggattcaatctgtgaggtgggaagcctatactagaagaactctcactctgttgggttcctcttccccgttttcaacctttttgcccaatatgtccaattagtctcaccttcaaattgtctgcaagcctaatcttttctggctgtgtgacaaggaccccatctttagctgaactgaagaaaagtaccacaacattttggcatggaaygtgggggctcgagaagtggtgagtgagatgcaaaccaagaaatcatttcccctcttgtttctaagccttttcatccttggactgctgagggtaagggaaaccatgcccccacccccatcactcccgggggtcgggggcctttccatgacctttttcttcctttttcaggatggactgat

SEQ ID NO: 944115 - DNA, 637 bp, Homo sapiens
tttctaggtggaacctgggattcaatctgggaggtgggaagcccactggcaggaaacacattgtctcattttgctaaaggtctctgtttccccttttctttctttttttgttttcactgaataaaatctgaccctattcatccttcaaattgtgagactaatagctcatggccgtgtgacaakgaccccaactttagctgaattaaggaaaagtcttgcaacagttgctctggaatctcaggtcgggagtccctgcccagtgaggagaagtgggaatggtgacaatcttggaaaatattctggccacttttccatggggtggctgcactgtgctgggaatctgtgccagtatcaaatcataatgcaccctccagagcctgagtgacagtggcaagggctgtggggcagcaaaaatcgcggcctgcctcttcatctgagagccctgttccagggggagtgcacagctattaccagcttgagagcccagatatggctgctgtggccacattgaggtcccaggccaataagccttatcctgtgaggtgcagtggaggtgaaacctgcaattcactgctgctcagcctcttgaatttgactactttcctgggggcatacatgggagcctgacctcccccat

SEQ ID NO: 944116 - DNA, 637 bp, Homo sapiens
tttctaggtggaacctgggattcaatctgggaggtgggaagcccactggcaggaaacacattgtctcattttgctaaaggtctctgtttccccttttctttctttttttgttttcactgaataaaatctgaccctattcatccttcaaattgtgagactaatagctcatggccgtgtgacaaggaccccaactttagctgaattaaggaaaagtcttgcaacagttgctctggaatctcaggtygggagtccctgcccagtgaggagaagtgggaatggtgacaatcttggaaaatattctggccacttttccatggggtggctgcactgtgctgggaatctgtgccagtatcaaatcataatgcaccctccagagcctgagtgacagtggcaagggctgtggggcagcaaaaatcgcggcctgcctcttcatctgagagccctgttccagggggagtgcacagctattaccagcttgagagcccagatatggctgctgtggccacattgaggtcccaggccaataagccttatcctgtgaggtgcagtggaggtgaaacctgcaattcactgctgctcagcctcttgaatttgactactttcctgggggcatacatgggagcctgacctcccccat

SEQ ID NO: 944117 - DNA, 430 bp, Homo sapiens
aaggaaaagtcttgcaacagttgctctggaatctcaggtcgggagtccctgcccagtgaggagaagtgggaatggtgacaatcttggaaaatattctggccacttttccatggggtggctgcactgtgctgggaatctgtgccagtatcaaatcataatgcaccctccagagcctgagtgacagtggcaagggctgtggggcagcaaaaatcgyggcctgcctcttcatctgagagccctgttccagggggagtgcacagctattaccagcttgagagcccagatatggctgctgtggccacattgaggtcccaggccaataagccttatcctgtgaggtgcagtggaggtgaaacctgcaattcactgctgctcagcctcttgaatttgactactttcctgggggcatacatgggagcctgacctcccc

SEQ ID NO: 944118 - DNA, 597 bp, Homo sapiens
gcaggaaacacattgtctcattttgctaaaggtctctgtttccccttttctttctttttttgttttcactgaataaaatctgaccctattcatccttcaaattgtgagactaatagctcatggccgtgtgacaaggaccccaactttagctgaattaaggaaaagtcttgcaacagttgctctggaatctcaggtcgggagtccctgcccagtgaggagaagtgggaatggtgacaatcttggaaaatattctggccacttttccatggggtggctgcactgtgctgggaatctgtgccagtatcaaatcataatgcaccctccagagcctgagtgacagtggcaagggctgtggggcagcaaaaatcgcrgcctgcctcttcatctgagagccctgttccagggggagtgcacagctattaccagcttgagagcccagatatggctgctgtggccacattgaggtcccaggccaataagccttatcctgtgaggtgcagtggaggtgaaacctgcaattcactgctgctcagcctcttgaatttgactactttcctgggggcatacatgggagcctgacctcccccattgccagag

SEQ ID NO: 944119 - DNA, 760 bp, Homo sapiens
acccaatgcgaacagctctacgtgcacctgtggaacctcgctggttactgagatgcttgtttccatgtgagcttaaggtagagttaagaaagaaagtcctaacaaaggagggaccccttatgtcctaatcctcctcccagccttccagcttgagggagtcgtacgcacaggtgcttttttagagaactgtgcttaggcctggagtcctaacaattcttcctgggactctattttgtgacctatttacaaaaaaacatgcttacagagaaggaagggtcaggaagaacagtgtccactgcttctgccgaggtttgaagataaaacctttataatccagtaatttggaaatcagrtttgattggattcgattgattgatcttttaaagtgtgaagggacaaaaaaaatcaccacccccccacccacagacacaatcacacacacacaattcctatgtaaccttctttagatatcatttggagatatatgccagtcaagcaacagatgaaacaaattaagagctcaataatgataaagtgatggcagaacaggatttgttctgagaattagaattctctaaatatagaatcatttttgaaattctgaaggaaaaaaatattgtacattatatacataatttacgtatgtatttaaagagagagtagcataagagtttgctgagtcatgtaacataagtttagatgtcagccctctggagatggtatggcctcttcatgacgctgctggagatgatatccctgc

SEQ ID NO: 944120 - DNA, 760 bp, Homo sapiens
acccaatgcgaacagctctacgtgcacctgtggaacctcgctggttactgagatgcttgtttccatgtgagcttaaggtagagttaagaaagaaagtcctaacaaaggagggaccccttatgtcctaatcctcctcccagccttccagcttgagggagtcgtacgcacaggtgcttttttagagaactgtgcttaggcctggagtcctaacaattcttcctgggactctattttgtgacctatttacaaaaaaacatgcttacagagaaggaagggtcaggaagaacagtgtccactgcttctgccgaggtttgaagataaaacctttataatccagtaatttggaaatcaggtttgattggattcgattgattgatcttttaaagtgtgaagrgacaaaaaaaatcaccacccccccacccacagacacaatcacacacacacaattcctatgtaaccttctttagatatcatttggagatatatgccagtcaagcaacagatgaaacaaattaagagctcaataatgataaagtgatggcagaacaggatttgttctgagaattagaattctctaaatatagaatcatttttgaaattctgaaggaaaaaaatattgtacattatatacataatttacgtatgtatttaaagagagagtagcataagagtttgctgagtcatgtaacataagtttagatgtcagccctctggagatggtatggcctcttcatgacgctgctggagatgatatccctgc

SEQ ID NO: 944121 - DNA, 580 bp, Homo sapiens
cattagaagcaataagaagagaactgccaaagctctcagcaccacatctacccaccttccagtacctattccatataccctgctttccctcttgctcctttgcatgaaccctgtgctcctactccatggaaacccttcacttgtgctctaggtatcacccctttcrccgattctaggacaatgctccacccacatctcctctttctccggcatccacttttctttttctaatggatcatttccattcatttcaacacgccattgtaatatcttccttaaaaataaaaaccctttcttgaccctatattcaccatcaattaccacccatttcccccctgttctactttacagcaaaaagtctatacctctggattctgctctctctttcattctctctcgacctcactcccatccctccacctgctatggtcatcaatgacctccatgttgccaaatataatggcagaatttcagctcttgttttacttcgctatgaagctgcacttgacatagttgatcattccacctctttgaaacactttcctcacttggcttctgggacaccactctctcactcttg

SEQ ID NO: 944122 - DNA, 580 bp, Homo sapiens
cattagaagcaataagaagagaactgccaaagctctcagcaccacatctacccaccttccagtacctattccatataccctgctttccctcttgctcctttgcatgaaccctgtgctcctactccatggaaacccttcacttgtgctctaggtatcacccctttcgccgattctaggacaatgctccacccacatctcctctttctccggcatccacttttctttttctaatggatcatttccattcatttcaacacgccattgtaatatcttccttaaaaataaaaaccctttcttgaccctatattcaccatcaattaccacccatttcccccctgttctactttacagcaaaaagtctatacctctggattctgctctctctttcattctctctygacctcactcccatccctccacctgctatggtcatcaatgacctccatgttgccaaatataatggcagaatttcagctcttgttttacttcgctatgaagctgcacttgacatagttgatcattccacctctttgaaacactttcctcacttggcttctgggacaccactctctcactcttg

SEQ ID NO: 944123 - DNA, 655 bp, Homo sapiens
aggcattctgggaagaaagacccatctggtttcaggaactgggcatctgacctttgcatcccttcttattttccaaacgctcgccttctgcttgaagaggcagagtggtggggtagttaagaggatgggctctggcttccaattccagcacggcagcatactggcgatgtaatcttgagtaagtgacataatctctgtgtaccttagttttcactgcggatgtgaaaagggatggcaacgatgatctcatctacctcatggctttkgctataagaactggtacaaattaatatatgcaaactgcctagaagaatacctggtacccagtaggcactctataggaattagttatgactatcaaatttttttattctcttttgcctcctttcttccatcccttctttgagtattaattacaaggtcaaaggggatataagcacatgctctttctttataaacacaggtcactagactataggctacttgagggcaggggctgttctcattcacctttatacccctggggccacaccctggtatacacagtcctcagtgagaatttactatgtgccaggcactgtgccatgcatcttattcagcttacagtgtttgatcttcatgaaaatcctacgaggtatgcatctctcctcccttt

SEQ ID NO: 944124 - DNA, 574 bp, Homo sapiens
accactgctctcttcaaagctgtcagacagggacatttaagtctgcagagggtactgctgtctttttgtttgtgtgtgccctgcccccagaggtggagcctacagaggcaggcaggcctccttgagctgtggtgggctccacccagttcgagcttcccggctgctttgtttacctaagcaagcctgggcaatggtgggcgmccctcccccatcctcgctgccaccttgcagtttgatctcagactgctgtgctagcaatcagtgagactccatgggcgtaggaccctccgagccagatgcgatatatattctcctggtgcgccattttttaagcccttcggaaaagcgcagtattggggtgggagtgacccgattttccaggtgctgtctgtcacccctttctttgctaggaaagggaactccctgaccccttgcacttccagagtgaggcaatgccttgccctgcttcagctcgtgcatagtgcactgcacccactgtcctgcgcccactgtctggcactccctagtgagatgaacctggtacctcagatggaaatgcagaaatcacccgtct

SEQ ID NO: 944125 - DNA, 727 bp, Homo sapiens
tgttggagtttgctggaggtccactccagaccctgtttgcctgagtatcagcagcagaggctgcagaacagtgaatattgctgaacagcaaaagttgctctctgatcgttcctctggaggtttcgtctcagaggggtacctggctrtgtgaggtgtcagtctgcccctactgcccctactagggggtgcctcccagataggttactcgggggtcagggacccaattgaggaggcagtctgtccgttcttagatctcaaactccgtgctgggagaaccgctactctcttcgaagctgtcagacagggacatttaagtacgcagaagtttctgctaccttttgttcagctatgccctgtccccaggggtggagtctacagaggcaggcaggcctccttgagttgcggtgggctccacccattttgagcttcctggctccttttttacctactcaaccctcagcaatggcgggcacccctcccccagcctcgctgctgccttgcagttggatctcagactgctgtgctagaaatgagcgaggctctgcgggtgtgggaccctctgagccaggcacgggatataatctcctggtgtgccttttgctaagaccattggaaaagcacagtattagggtgggggtgacccgatttcccaggtgccgtctctcacagatttgcttggctatgaaagggaattccctgaccccttgtgcttcctgggtgaggcaat

SEQ ID NO: 944126 - DNA, 727 bp, Homo sapiens
tgttggagtttgctggaggtccactccagaccctgtttgcctgagtatcagcagcagaggctgcagaacagtgaatattgctgaacagcaaaagttgctctctgatcgttcctctggaggtttcgtctcagaggggtacctggctatgtgaggtgtcagtctgcccctactgcccctactagggggtgcctcccagataggttactcgggggtcagggacccaattgaggaggcagtctgtccgttcttagatctcaaactccgtgctgggagaacygctactctcttcgaagctgtcagacagggacatttaagtacgcagaagtttctgctaccttttgttcagctatgccctgtccccaggggtggagtctacagaggcaggcaggcctccttgagttgcggtgggctccacccattttgagcttcctggctccttttttacctactcaaccctcagcaatggcgggcacccctcccccagcctcgctgctgccttgcagttggatctcagactgctgtgctagaaatgagcgaggctctgcgggtgtgggaccctctgagccaggcacgggatataatctcctggtgtgccttttgctaagaccattggaaaagcacagtattagggtgggggtgacccgatttcccaggtgccgtctctcacagatttgcttggctatgaaagggaattccctgaccccttgtgcttcctgggtgaggcaat

SEQ ID NO: 944127 - DNA, 727 bp, Homo sapiens
tgttggagtttgctggaggtccactccagaccctgtttgcctgagtatcagcagcagaggctgcagaacagtgaatattgctgaacagcaaaagttgctctctgatcgttcctctggaggtttcgtctcagaggggtacctggctatgtgaggtgtcagtctgcccctactgcccctactagggggtgcctcccagataggttactcgggggtcagggacccaattgaggaggcagtctgtccgttcttagatctcaaactccgtgctgggagaaccgctactctcttcgaagctgtcagacagggacatttaagtacgcagaagtttctgctaccttttgttcagctatgccctgtccccaggggtggagtctacagaggcaggcaggcctccttgagttgcggtgggctccacccattttgagcttcctggctccttttttacctactcaaccctcagcaatggygggcacccctcccccagcctcgctgctgccttgcagttggatctcagactgctgtgctagaaatgagcgaggctctgcgggtgtgggaccctctgagccaggcacgggatataatctcctggtgtgccttttgctaagaccattggaaaagcacagtattagggtgggggtgacccgatttcccaggtgccgtctctcacagatttgcttggctatgaaagggaattccctgaccccttgtgcttcctgggtgaggcaat

SEQ ID NO: 944128 - DNA, 487 bp, Homo sapiens
cccccaggtgctctgtcccagagagatgggagttttgtctgtaagcccctgactggggctgttacctttccttcagagatgccctgcccaatgaggaggaatctagagaagcggtctggccacagccgctttgctgctcctggcccagacctcctagcctccttagaactgtcargggaaaactgcctactgaagcctcggtaatggtggacgccccttcccccaccaagctcagtcattccaggtcgacttgagactgatgtgctggcagtaagagcttctagccagtggttcttagtttgctgtgctctgtgggagtgggacccgctgagtgagaccacttggctcctggcttcagccccctttccaggggagtgaaaggttctgtctcactggggttccaggtgccactggggtacgaaaaaatactcctgcagctagctcagtgtctgcccaaatagcctcccagttttgtgtttgaaaccca

SEQ ID NO: 944129 - DNA, 596 bp, Homo sapiens
taccttgtagattccaaatttagttcctctacagcaggggtctccaacccccaggtcatggaccagtactggtccctggcctgttaggaaccaggcctcacagcaggaggtgagccgtgggccagcaagcattaccacctgagctccgcctcctgtcaggtcggtggtgacattagattctcataggagtgtgaaccctattgtgaactgcacatgcgagggatctaggttgcatgctccttatgagaatctaatgcctgatgatctgaggtagaacagtttcatcctgaaacctacccccacaccccatcggtggaaaaattgtcttcctgmaaaccggtcttggtcccctggtgccaaaaaggttggggaccactgctgtgcagagaattaacttgtttgttggttgaagcaacaaattaattcagtctctgtctcttctgcagttagcatcagatgaaatattttagctaaggctaaaagaactgaagctctctgttctccccaccatgtatagttcaggggtcagccagatgtttgagccaaagttatatacagaatttgtggcactctgtttgcgactttcacctttcagt

SEQ ID NO: 944130 - DNA, 769 bp, Homo sapiens
tattctcaacttttggcttctgtcacctacaatggtgcatccccataggtgtgctgtgattcttctcaagcaaccagcagttggtcaatgataaatccttagttttaaagcttatgtggggaaaacatgtaaaacaaaaacttggacagctcgccctctagtggtaattttatgaattgccccccaacaattgcccttttagctcacaggaaaactgatagtaaaaatgaatgggattaagtttacatagttgaaacacctggtttaacaaatgaatttgttaatcacaaacacataataagctagtatagggtacamatgcttgcatattttctcaagtgctgattagccattatacctaacaagggatttccaatttggggaaaaaaaaatccagaatcagcaattctatacatagttatatatcctgtcccccaataaataattgtacatagtcattagagtctagttttattgcactcaatgttctttttttctaaaataatgttataattgttgataataacaacttatcctcttacaggtatgtataaacttttcacagggttttgtttttacaacagatagatgcggcaggatttgccttcctggttgtactgaagaggaagtaggaggcttatctataaagaggccaaatgagtttgcttgggacacccagggcactttgcaggggactgcactaatttttactcctaggaatctcctcctggcaaaataaattgcatagatgctggcatgttcctttcta

SEQ ID NO: 944131 - DNA, 769 bp, Homo sapiens
tattctcaacttttggcttctgtcacctacaatggtgcatccccataggtgtgctgtgattcttctcaagcaaccagcagttggtcaatgataaatccttagttttaaagcttatgtggggaaaacatgtaaaacaaaaacttggacagctcgccctctagtggtaattttatgaattgccccccaacaattgcccttttagctcacaggaaaactgatagtaaaaatgaatgggattaagtttacatagttgaaacacctggtttaacaaatgaatttgttaatcacaaacacataataagctagtatagggtacacatgmttgcatattttctcaagtgctgattagccattatacctaacaagggatttccaatttggggaaaaaaaaatccagaatcagcaattctatacatagttatatatcctgtcccccaataaataattgtacatagtcattagagtctagttttattgcactcaatgttctttttttctaaaataatgttataattgttgataataacaacttatcctcttacaggtatgtataaacttttcacagggttttgtttttacaacagatagatgcggcaggatttgccttcctggttgtactgaagaggaagtaggaggcttatctataaagaggccaaatgagtttgcttgggacacccagggcactttgcaggggactgcactaatttttactcctaggaatctcctcctggcaaaataaattgcatagatgctggcatgttcctttcta

SEQ ID NO: 944132 - DNA, 564 bp, Homo sapiens
actgactaatacagtaaattggtactggtagagttgggtgctgctgtaaagatacctgaaaatgtcaaagcaactttggaactgggtaacaggcagaggttggaacagttaggaggactcagaaagagacaagaaggtgtgggaaagtttagaactttctagagactgttcagtggctttgaccaaaatgctgatagtgatatggacaatgaagtcgaggctgaggtggtctcagatgggtatgaggaacttgttgggaaatggagcaaaagtcgcttttgctatgctttagcaaagagactggcagcattttgcttctgccccaaagatctatggaactttgaacttgaaggagatgatttagggcatctggcaaaagaaatttytaagttgcaaagcattcaagatgtgacttggatactgttaaaagcatttagttttatacattgacaaagatatggcttggaattggaacttatgtttaaaacggaagcagagcataaaagtttggaaaatttgcagcctgatgatggattagaaaagaaaaacccattttctgaggaa

SEQ ID NO: 944133 - DNA, 564 bp, Homo sapiens
actgactaatacagtaaattggtactggtagagttgggtgctgctgtaaagatacctgaaaatgtcaaagcaactttggaactgggtaacaggcagaggttggaacagttaggaggactcagaaagagacaagaaggtgtgggaaagtttagaactttctagagactgttcagtggctttgaccaaaatgctgatagtgatatggacaatgaagtcgaggctgaggtggtctcagatgggtatgaggaacttgttgggaaatggagcaaaagtcgcttttgctatgctttagcaaagagactggcagcattttgcttctgccccaaagatctatggaactttgaacttgaaggagatgatttagggcatctggcaaaagaaatttctaagttgcaaagcattcaagatgtgacttggatactrttaaaagcatttagttttatacattgacaaagatatggcttggaattggaacttatgtttaaaacggaagcagagcataaaagtttggaaaatttgcagcctgatgatggattagaaaagaaaaacccattttctgaggaa

SEQ ID NO: 944134 - DNA, 573 bp, Homo sapiens
gagaacatctcactactgggagaacagtaccaagactttcatgagggacctacctccatgagccaaacacctcctaactagccccaacaccatcacattggggatcaaatttaaacgtaagtttagggaggataaaccaacagtatcaaagtaataacaaagacctcatcattaatgtataaaaacagaactgatttttatatgttgatttggtatcctgccactttcctaaattcattcactagttttcattttttaagtgcctttaaggttttctacatataaggtcatgtcatgtacaaaacgagacaattgtgcttcttcctttctgatgtgggtgccttttgtttactttttttcctaattgctctggctaagtcttctagtactatgttgaatacaagtggtgagaataggaaaattcaaaaatrtgtaaaaaataaataacacattcttgaaaccaataagtcataaaaaaatagagaaattaaaaaatatatcaggacaaatgaaaatgacaacgcatcacacaccaaacttatgagatgcagcaaaagcagtaataatttggaa

SEQ ID NO: 944135 - DNA, 572 bp, Homo sapiens
aaagttgtttctaaatacacacatttgtcttttctcagtaaaaacttaaaaacaaaaacctagaaaactagattgaaattaaatgtgtgaaacatatttttcaaaaggtacaagtcagaaactaatagatttaagaattgttagatacattaattagtaatatttttaataactagaaaaacaaaaatatttggtatttgttttttacctttaatgatactgtataactggtgacctttctgttataaaatatttatgatctatgttaagtgatgaaaattgaagataaagaggtttatattggtgaatcattattctgtgatagtttgaactatttactgactagcatttcttccatcctttttcttgccatttttcctctgccttgttggctttgttcttggccatgttattttgctgcatataaacagatgtkttaaatgtaatttttgtgtgctgtgccctcttgctctgactcttcatcattaaaatagtatgtcctaggtaatgaatacattccttcagtgtagattctgaaatgagaagacttgtggagccatgtttaaccaaat

SEQ ID NO: 944136 - DNA, 769 bp, Homo sapiens
cactgaactccagcctgggtgacaaagtgagaccctgtgtcctaaataaataaataaataaataaatgatatggtttggctctgtgtcctcacccaaatctcatgttgaattatatttcccaatgttgggaggagggacctggtggcaggtgatcggatcatgggggcagatttctcccttgctgttcttgcgatagtaagggagttctcacgagaactgatggtttaaaagtgtgtggcacttcctcttctctctctcctgctgccatgtgcaaatgtgcctgcttccccttcaccctcctaccatgattgtaagtttcctgaggcctccccagccatgcctcctgtacagcctgtggaactgtgactcaattaagcctcctttttttttaataaattaaaaaattttaattaattttttaaataaagtacccagtctcaggtagttctttataacratgtgagaatgaattaatataatacagtaaataaataacaaataaataaatatgaataaataaatattggtacagggtaccagcagcagggtaggagagagaattatctctagccctccctcctccttgcaaggccattgcctcctcccttctgaaaatgaccttcattttttcaagagctcttatgccatggctaactttgaagccattcagaggggaagctttgagacctggagttaatcctgccaacaaggaaagctaaagttgggtttgccctgatatatttatttccacgtttatttgagttccgt

SEQ ID NO: 944137 - DNA, 648 bp, Homo sapiens
aaagcaatgttgacacaaaggccagccatagtaaataagacatatattcagaaaaactatgtagtaaccattgaatcataaagatcttagaacagaaaatggcctttagaagttatctcatcattattccttcaacaacacccagatagaggtgaggaagcctaaatatttcagggatggcaatacttattacaattattttaaaagtttctgttttttgcagggcatgtaatcccagcactttggaaggccaaggagggcagatcacttgagtccaggagttcaagaccagactggctaacatggmaaaaccctgtctctactaaaaatacaaaaattagccgggtttagtggcgtgcacctgtaatcccagttactcaggaagttgaggtaggagaatcacatgaacctgggaggcggaggttgcagtgagccaagatcacaccactacactccagcttgggcaacagagcgagactctgtctcaaaaaaaaaaaaaaagttcctgtttttgtggggcttaaattaaaaaatatgtatgaaaaagttagctaagctgattctagtcactcttagtcccgttttcccttctgacaacatggacagcaagtttattactttctcaaaaggaatcacaggaatacaaat

SEQ ID NO: 944138 - DNA, 648 bp, Homo sapiens
aaagcaatgttgacacaaaggccagccatagtaaataagacatatattcagaaaaactatgtagtaaccattgaatcataaagatcttagaacagaaaatggcctttagaagttatctcatcattattccttcaacaacacccagatagaggtgaggaagcctaaatatttcagggatggcaatacttattacaattattttaaaagtttctgttttttgcagggcatgtaatcccagcactttggaaggccaaggagggcagatcacttgagtccaggagttcaagaccagactggctaacatggcaaaaccctgtctctactaaaaatacaaaaattagmcgggtttagtggcgtgcacctgtaatcccagttactcaggaagttgaggtaggagaatcacatgaacctgggaggcggaggttgcagtgagccaagatcacaccactacactccagcttgggcaacagagcgagactctgtctcaaaaaaaaaaaaaaagttcctgtttttgtggggcttaaattaaaaaatatgtatgaaaaagttagctaagctgattctagtcactcttagtcccgttttcccttctgacaacatggacagcaagtttattactttctcaaaaggaatcacaggaatacaaat

SEQ ID NO: 944139 - DNA, 667 bp, Homo sapiens
tacttaagctgcatgaaaacaattactgacttcttcctttccctctatagcagaggttattaaacttgtcatggtactcatctccttgacactttggtgaaatctacagaccccttcacaataatatttttaaatgcataaaataaaatacaaggatgacaaaccaattatactgaaatgaagatataaaaatattgtataacataaattgtatcatgataatatatgcagtgaattattaatacattaagtaaaaatatccaggatttcaaagtaatgcttttagtgatattggcaaaagctgtaatgttatgtaaaataatatctatgatttctattggtgaccaagttaaggttctgataataacactgtggactgttagcagcattcattaattggaagaagtgcttaatttctatgaraggttaattaaaataaaaatgtgttttttaattcaatttcaaggactttctgaatgccctaactttaaggaattttgctctagaggctcttcctgaaatctttcaagcagatccccttagacagatagagctagagggagttgatgagatgtagagaagagattggggaggttaacgcatttctatttacggaggggtaaacagacctgtacccaacactgaaaatgtcaaatgactgattcgt

SEQ ID NO: 944140 - DNA, 667 bp, Homo sapiens
tacttaagctgcatgaaaacaattactgacttcttcctttccctctatagcagaggttattaaacttgtcatggtactcatctccttgacactttggtgaaatctacagaccccttcacaataatatttttaaatgcataaaataaaatacaaggatgacaaaccaattatactgaaatgaagatataaaaatattgtataacataaattgtatcatgataatatatgcagtgaattattaatacattaagtaaaaatatccaggatttcaaagtaatgcttttagtgatattggcaaaagctgtaatgttatgtaaaataatatctatgatttctattggtgaccaagttaaggttctgataataacactgtggactgttagcagcattcattaattggaagaagtgcttaatttctatgaarggttaattaaaataaaaatgtgttttttaattcaatttcaaggactttctgaatgccctaactttaaggaattttgctctagaggctcttcctgaaatctttcaagcagatccccttagacagatagagctagagggagttgatgagatgtagagaagagattggggaggttaacgcatttctatttacggaggggtaaacagacctgtacccaacactgaaaatgtcaaatgactgattcgt

SEQ ID NO: 944141 - DNA, 585 bp, Homo sapiens
ccccaggagctctgtcccagggaaatgggggttttgtttgtaagcccctgactgggcctgttacctttccttcagagataccctgcccaatgaggaggaatctagagaagcagtctggccacagccgctttgctgcgcccaacccagatctcccagcctccttagcactgttaggggaaaactgcctactaagkcctcattaatggcggatgcctctgcccccaccaagcttgatcatcccaggtcaacttcagattgctgtgatggcaaaaagaatttcatgacagtggttcttagcttgctgggctctgcgggagtgggagccgctgagcgagaccacttgactccctggcttcagccccctttccaggggagtgaacggttctatctccctggggttccaggctccactgtggtatgaacaaaatctcccatggctagctcggtgtctgcccaaacggccgcccagttttgtgcttgaaacccaggaccctggtggtataggcacatgagggaatctcctgatctgcagattgcaaaaaaacgtgggaaaagcatagtaacctggcagggtaacacaattcc

SEQ ID NO: 944142 - DNA, 558 bp, Homo sapiens
gcaggcagaagaagatggaagagcatccttgctaagtcttccagccttcatcattctcctgtgctggatgctttctgcccttgaacatcagacttcaagttctttggcttttagagttttgtacttacaccagtgttttgccaggggccctcgagtcttcagccacagactgaaggccacascgtcagcttccctatttttcaggtttttggactcagactaagctactactagttcccttgctcctcagcttgcagatggcctatcgtgggacttcaccatgtgattgtgtgattcaattattaataaaattcctttcatatatagatatattctattagttctatccctctagagaaccctagctaatacagatttcggtaacaggagtggttctagaggaacaaaattttaaagacggatttctttagttgattttgaggtttctggagttggctgcttaatgtgattagaccccaaaatgctaagaacactactaatagtatgcagaacactgacagtccttggcacatactcttttgagagttatgcaaagta

SEQ ID NO: 944143 - DNA, 571 bp, Homo sapiens
gaagacctctggccttttagcaggataattgcattggtgaaaaagaaatgatcagaccttaggagactactggacactggctctaaactgacattaattccaggggacccaaaacatcattgtggccctccagtcagaggagaggcttatgaatgtcagttaatttatgaagttttagctcagatctgatgtacagtgagtccagtgggtccctggactcatcctgtggtcacatctccagttccagaatgcgtaattagaatagacatacttagcagttggcagaatcctcacattgactccctgactggtagagtgagcgctattatggtgggaaatgccaaatggaagtcattagagctgcctctacctagaataatagtaactcaaaaccaaattacatccctggagggattgcaaagataatygctcccatcaatgacttgaaagatgcagggatagtgattcccaccacatccccattgtgcactctcctatttggcctgtgcagaagacagatgagtcttggagaatgacagtggattatggtaagcttaatcaagttgtgact

SEQ ID NO: 944144 - DNA, 724 bp, Homo sapiens
atgtaattgagactactgaaaaaaacagttttacactcaaggtatgtgaagaaagtgaaatgtgcttttgataaatgattataagaaggcatgggaatgtacatttttatctagtttagaggtaaggattgttttaaattagatggaaaaaaagctgaaggtttcagcaagttgtagaagattttaaaaaaataatattttaaaaaattctatgtatgaacatattggctaaatttaaagaacattcagtttttccataagttgaacattggaataaaagaacaacagggttttcttagaacactgatctgctttttaacaaaaatttgtaaagtattataaaaggtttatgagaatctcaccttacagtcaaactgattaagattggatagatttgtccataaggttttattaaaaattggggttgacattaatagtatattaatgcaagggtaaaatttgcctttctytcttgaataagattttcatgtactattaaaggataataaaagatttttgtttgcattttgaatgaactacaggaaaagaagggaaagacaagagacagattgtttggaaagcgaagtcttcccactatgaatgagtaaaggtttttgcctttttaaaatttgtgagtcattttggcgaaatgaatggcttatcatgacctggaattctattttatactatcaagtgttttaaacctttatcatatttggcaggt

SEQ ID NO: 944145 - DNA, 713 bp, Homo sapiens
ggcgaatgaccatcttctgatttgaaagacaaatgaagtatccctattagaatgtccaccatccagaacatgaacaacaccaagtgcaggcgagggcttggagcagcgggaactctcatcactgtgggcggaatgcagaacggggcagccatcttgaggacagtctgagagctccttacaaagctaaactcaggccagatgtggtgactcacacctgtaatcctagcactttgggaggccaaggtgggtggatcacttgaggtcaggagttcraaaccagcctggccaacatggtgaaaccctgtctctactaaaaatacaaaaattagctgggtgtggtggcgggcacctgtaatcccagttacttgggaggctgaggcaggagaaccacttgaacccgagaggtggagatttcagtgagccaagatcacaccactgcactctagcctgggtgatagagccagactccatctcaaaaaaaaaaaaaaaaaaaaaaatagggctaaaagctaaacacagtctttccatatgatccagcaatcacagtccttggtattttatccaaattcattgaaaagttatgtccacccaaaaacctgcatactgatgtttatagcagctttattcacaatcactaaaacatggaagcaaccaaggcatccttcagccaatggatgcgtaaatacattttggagcatccagaaaatggaata

SEQ ID NO: 944146 - DNA, 739 bp, Homo sapiens
gtgaaatgacttgatatctgagatttgctttaaaatattccagtgatctacagagacaggaagcagaggagcaattgccaaggacttgggggagaggaatgggtagtcactgctaattgatgtgggataatgaaaatgtgctacaattatacagcggtgatgcttccaccttgtagatattctaaaaaacactgaaggccaggtgcggtggctcacgtctgtaatcccagcactttgggaggccgaggtgggtggatcacgaggttaagagttgagaccagcctggccaacagggtgaaaccctgcctctactaaagacaaaaattagctgagmgtggtggcgggcgcctgtaatcccagctacttgggaggttgaggcggaagaatcgcttgaacccgggaggcggaggttgcagtggagcaagatcgcgccactgcactccagcccgggtgacagagtgagactccatctcaaaaacaaaaaacaaaaaacaaaaaactgaaaacactttagaagggtgaattttatagcatgagaattagatctgaaaaaagtatccagaggtgtttgagaggaagattggagatgtacataaaatataattgagcatcagtggataatggttgaagttgggtcaaaggtttttcttttttttttctttttttttttttttagtgtgaggctaaaggtacatggggttccagtttaccattttctcttcttttgtatatatttgaa

SEQ ID NO: 944147 - DNA, 713 bp, Homo sapiens
gcagtctcctaatggatagaaaaaaccttggccgggcgcggtggctcacgcctgtaatcccagaactttgggaggccgagatgggcggatcacgaggtcagatcgagaccatcctggctaacacggtgaaaccccatctctactaaaaaaatacaaaaaaattagccgggcgtggcggcgggtggcgcctgtagtcccagcactctggaggctgaggcaggagaatggtgtgaacctgggaggcagagcttgcagtgtgcccagatmgcgccactgccctccagcctgggagacagagcgagactccgtctcaacaaaaaaaaaaaaaaagaaaaaaagaaaagaccttaaactggtgatcagcagcttcctgattagatctcaggagttgggtgagtgggctcaagcctgtgcactaagaggcaaaatggcggagtgtatgtaactggtatatgaccttcttctaggaacacgtgactgggaagggcaaaacgcctccagtgagcatgcgcacaacttcagtaaacacactgtgcctgcagcccctcccaagtgctggcaggccactgcgcatgcagacagcccacctcaagggaagaatcaggggagaaggaatgcaagaccccggaagcaaccccaagtcaaaggtcaaactgtgcacttgatctctcaagttgcccgactggccctcttccaagtgtactttacttcgt

SEQ ID NO: 944148 - DNA, 618 bp, Homo sapiens
tgcattgctataaagaaatacctgatgttggataatttacatagaaaagaggtatatttggctcgcaattctgcaggctctacaagaagcatagcaccagcatctgcttctggtgagggcctcagaaagcttccattcctagaagaagaccaagagggaacagctgtgtcacatgatgagagaggaaggaagagatatttcaacaattagctcctgcatgaactcataggatgagaactcactcattaccatgaggatggcaacaagacattcataaggggtttacctccatgaccctaatgccttctattaggccccacctccaacattggggaacacagttcaacatgagatttagagctgacaaaacacctaaaccgtatcaggggggtaatggaaatactgagaaaaacccactcacaccccagtcccatcmtaagaacaaggtaacagcaaccaatatctggaggaatttaaagttcatgccacacttaaggtaaaaacagcaacaacaaaacccaaattccattcaatttctgactacattgattcaacccctaacactaatggcctgactgaataagatacgtactcattgccaggataaatactatttac

SEQ ID NO: 944149 - DNA, 618 bp, Homo sapiens
tgcattgctataaagaaatacctgatgttggataatttacatagaaaagaggtatatttggctcgcaattctgcaggctctacaagaagcatagcaccagcatctgcttctggtgagggcctcagaaagcttccattcctagaagaagaccaagagggaacagctgtgtcacatgatgagagaggaaggaagagatatttcaacaattagctcctgcatgaactcataggatgagaactcactcattaccatgaggatggcaacaagacattcataaggggtttacctccatgaccctaatgccttctattaggccccacctccaacattggggaacacagttcaacatgagatttagagctgacaaaacacctaaaccgtatcaggggggtaatggaaatactgagaaaaacccactcacaccccagtcccatcataagmacaaggtaacagcaaccaatatctggaggaatttaaagttcatgccacacttaaggtaaaaacagcaacaacaaaacccaaattccattcaatttctgactacattgattcaacccctaacactaatggcctgactgaataagatacgtactcattgccaggataaatactatttac

SEQ ID NO: 944150 - DNA, 696 bp, Homo sapiens
aacgcccctgtactactttcccatcccctgaaacattcgccatttttaagaccaagctgaaatgtccagtcttccacaaatatcttccagtcttcccatctagaattaatccatttgcattctataatttatgtctggttaaatgatccttgctttagctcctgagtagctgtttctgggcctgtcgcgtgggttgtcctgagagcacagtccctgtctgggcccctcgctatgtctggttcagggcctggcacacaccacttgggtgcctccagggagggtgatcagaggctgcttcccatgggacaggcttacagatgtgctggctgagcggccccacacacccttctttcttcccttgtaccaaagggctcagtagctgtcctcccacttccataaatgccagccggcmacccctgtgccttcacgcagcttccaaaggcccctcgcagggaccctctgagtcccccagggctctcccctcatgctagtgggctcatgtctgtaaggtagagggcccagtcctccttcttcctcatcctccagctctcagtacacttctgggaaccgcgtaggtgcttagtaaatgctgttggataaaagggattagataatttatgaccaaagatagagaataattgccaatgagaattacatactaataacgcaaatagctctgagttcatcttgaagttt

SEQ ID NO: 944151 - DNA, 749 bp, Homo sapiens
tcctacacaccaacatggccctcagtgtgctctctaaccacctgatttttccagcataagattcagtgttctatttggcttttgggtttgatcctcaaccagaagttaccaaatgtaatctagaaagaatgcaatttagagtgttagtgctaaagaaggattaaaaggattgtctactacagttgtctttgatctgakatctttatttggacttcagaaagtcagtgaactccctagagttatatagaaaattttgtacgcatatgcatttttccaggaagaatgtccataactttaattagactcacaacaaagtgctccctgacccaaaagcgtctaagaaccaccagttctagtcactccctcccactacgctaccagtgaaaagcccaactccagaaatggagaataacttgcctgagcccacacagctagttaatgatagatctgagagttgaagtcttttctaactcttggtccaaaaccaactctttgcactttaccagagttgttttagcaagtagaggggctgtaggagataccagggagactgtagacagtattgatttgtaccataagtgtaacgaactagattacctttgagatccctttcccctctgagagtctatttccactgttaatagagaacagcattgacagagacgattagtttcctcccccgcccccagtccgttggcctctgttgctaataacgcttggttgaggattatattaaaatgagtctgcat

SEQ ID NO: 944152 - DNA, 638 bp, Homo sapiens
ttcatattattcaatgaattatagtttcttgctatttctgtttattttgatgctcaaattgttttgtaaacagtgactgactgccacttcaaggtggactttgcatgtttttgacatgtcctcatctttctctgagcactttttgtcttaataggatattccagtctcaccttgcactttccctgccctgtgcctggaatcaggcatttctctaaggaggctaatttcttttctcggcgtggtatttagaagccaagttctgttctcggcactaggtgtgttcattgctattggggtattgctattcccaggccctcatggtgaacagaggtaggaaatatacacatacatttatatatatatatacacacacacacacatatatatatacatactaatttctatcaatattcacctttttatctatttatatatcatctatctatctagaraaaaccatgagtttccattattacctccaactccagttcaacaccacagggttcattcttgttttctcctttttcatatttgtaactctcttctctgacaatgtaaaatcaagatccccttatcctttatatatttactccagtcacttgttaacctatttcattctggcttctacccccaatcac

SEQ ID NO: 944153 - DNA, 626 bp, Homo sapiens
ctggcaatgggggaggtcaggctcccatgtatgcccccaggaaagtagtcaaattcaagaggctgagcagcagtgaattgcaggtttcacctccactgcacctcacaggataaggcttattggcctgggacctcaatgtggccacagcagccatatctgggctctcaagctggtaatagctgtgcactcccctggaacagggctctcagatgaagaggcaggcygcgatttttgctgccccacagcccttgccactgtcactcaggctctggagggtgcattatgatttgatactggcacagattcccagcacagtgcagccaccccatggaaaagtggccagaatattttccaagattgtcaccattcccacttctcctcactgggcagggactcccgacctgagattccagagcaactgttgcaagacttttccttaattcagctaaagttggggtccttgtcacacggccatgagctattagtctcacaatttgaaggatgaatagggtcagattttattcagtgaaaacaaaaaaagaaagaaaaggggaaacagagacctttagcaaaatgagacaatgtgtttcctgccagtgggcttcccacctcccagattgaatccc

SEQ ID NO: 944154 - DNA, 626 bp, Homo sapiens
ctggcaatgggggaggtcaggctcccatgtatgcccccaggaaagtagtcaaattcaagaggctgagcagcagtgaattgcaggtttcacctccactgcacctcacaggataaggcttattggcctgggacctcaatgtggccacagcagccatatctgggctctcaagctggtaatagctgtgcactcccctggaacagggctctcagatgaagaggcaggctrcgatttttgctgccccacagcccttgccactgtcactcaggctctggagggtgcattatgatttgatactggcacagattcccagcacagtgcagccaccccatggaaaagtggccagaatattttccaagattgtcaccattcccacttctcctcactgggcagggactcccgacctgagattccagagcaactgttgcaagacttttccttaattcagctaaagttggggtccttgtcacacggccatgagctattagtctcacaatttgaaggatgaatagggtcagattttattcagtgaaaacaaaaaaagaaagaaaaggggaaacagagacctttagcaaaatgagacaatgtgtttcctgccagtgggcttcccacctcccagattgaatccc

SEQ ID NO: 944155 - DNA, 626 bp, Homo sapiens
ctggcaatgggggaggtcaggctcccatgtatgcccccaggaaagtagtcaaattcaagaggctgagcagcagtgaattgcaggtttcacctccactgcacctcacaggataaggcttattggcctgggacctcaatgtggccacagcagccatatctgggctctcaagctggtaatagctgtgcactcccctggaacagggctctcagatgaagaggcaggctgcgatttttgctgccccacagcccttgccactgtcactcaggctctggagggtgcattatgatttgatactggcacagattcccagcacagtgcagccaccccatggaaaagtggccagaatattttccaagattgtcaccattcccacttctcctcactgggcagggactcccracctgagattccagagcaactgttgcaagacttttccttaattcagctaaagttggggtccttgtcacacggccatgagctattagtctcacaatttgaaggatgaatagggtcagattttattcagtgaaaacaaaaaaagaaagaaaaggggaaacagagacctttagcaaaatgagacaatgtgtttcctgccagtgggcttcccacctcccagattgaatccc

SEQ ID NO: 944156 - DNA, 626 bp, Homo sapiens
ctggcaatgggggaggtcaggctcccatgtatgcccccaggaaagtagtcaaattcaagaggctgagcagcagtgaattgcaggtttcacctccactgcacctcacaggataaggcttattggcctgggacctcaatgtggccacagcagccatatctgggctctcaagctggtaatagctgtgcactcccctggaacagggctctcagatgaagaggcaggctgcgatttttgctgccccacagcccttgccactgtcactcaggctctggagggtgcattatgatttgatactggcacagattcccagcacagtgcagccaccccatggaaaagtggccagaatattttccaagattgtcaccattcccacttctcctcactgggcagggactcccgacctgagattccagagcaactgttgcaagacttttccttaattcagctaaagttggggtcmttgtcacacggccatgagctattagtctcacaatttgaaggatgaatagggtcagattttattcagtgaaaacaaaaaaagaaagaaaaggggaaacagagacctttagcaaaatgagacaatgtgtttcctgccagtgggcttcccacctcccagattgaatccc

SEQ ID NO: 944157 - DNA, 634 bp, Homo sapiens
ccccagcagggaggggaaggaggcaagagccactgttcatcagtccatcctgaaaaaggaagaaaaaggtcatggaaaggcccccgacccccgggagtgatgggggtgggggcatggtttcccttaccctcagcagtccaaggatgaaaaggcttagaaacaagaggggaaatgatttcttggtttgcatctcactcaccacttctcgagcccccacrttccatgccaaaatgttgtggtacttttcttcagttcagctaaagatggggtccttgtcacacagccagaaaagattaggcttgcagacaatttgaagggtgagactaattggacatattgggcaaaaaggttgaaaacggggaagaggaacccaacagagtgagagttcttctagtataggcttcccacctcacagattgaatcccaggtaccacccaagaagaggaggggcaggctctcccgactgcaaagggcacaaacttctgtggctccaccccagtgcacactcctcccagtgcgtaggccaactggagtttctctggggactctgtccctcctggctgtctcacaactattctgctcctgcctgaacagttctctgaagaatatatcccagaagcaacccacagctcct

SEQ ID NO: 944158 - DNA, 683 bp, Homo sapiens
tcactccctgccgccctctgcctcttgtatctcctcagctacccctttccttcctacccgcccttccccaggagtgggtgacagtcctggtggctgtgtcctctgggcttgctgggcccaccttctccttgtggtcctggtcctgaccctgcagccacccaggcaaaggaggccgcctcgccctgtctgtcatctaagggccctctgggtggtcacgtcaccctgtcacctgcctccagaccgaggccacacagtgcagggtcatgtttcagttctcatctcccagcgaaattatctcaatttcttggagcctgctccagaattgcttttctctaaaccctcattaccgagaacacagtcttagatgctatgtacttctcaggcgtcctcaaagaagcccctgaattacatgcgagctgcccctggcaggtccccactcagggcggccactttgctgtcaacagcagagctggcgagaggaggtgcctggtggctcagggaccagaacgtgcggctctcagataaattgagttttgcarctgaactgtctaattcctcgaggaaattgtcaaaccatgtccacggaaatcctggtaaatcttagaagtggctgctagaggctaaaagtcagagacaccaaaggttattaggaaaattactcctcctggtgctgggggtgttgg

SEQ ID NO: 944159 - DNA, 571 bp, Homo sapiens
ctctcccaggctgaaattgtataccagtggttcaattggtctagggcctcaggggtggccttaccctactgcttcactgggcattgcgcagtgcaatctctccatggtggccctgcacatggtggctttctgcctacgcactgtggctttccagagcatcctttgaaatctaggtggaggttaccatgccygcacagcttttcagagcacagcactcactaaaccaggatctgttggagccatacctggggtagcctaggagccctgtgatggaatgtggagagcagagcctcaaggtggcccatgatagtgagtgctgaagccccacaagtacctgcagcccctcctttgaaatcattctgtccctcatgcccttgtattccgcacctcggataggagtggcagccctgatctgaaatgtctttgggtcattctttcattgccttgatgaatagcacccagattccactgagatggttgatccatactaatttcctcatccgatggttacatagacacaccactggtgttctgtcctgaacatgatttcttagttttcacaatatggata

SEQ ID NO: 944160 - DNA, 559 bp, Homo sapiens
atgtgagatctggcagactgcctcctcaagtgggtccttgacccccgagcagcctaactgggaggcaccccccagtaggggcagactgacacttcacatggccgggtactcccctgagacaaaacttccagaggaacgatcagrcagcagcatttgcggatcaccaatatctgctgttctacagccaccactgttctgcagctactgctgctgatacccaggcaaacagggtctggagtggacctctagcaaactccaacagatctgcagttgagggtcctgcctgttagaaggaaaactaacaaacagaaaggacatccacaccaaaaacccatctgtacatcaccatcatcaaagaccaaaagtagataaaaccacaaagatggggaaaaaacagagcagaaaaactggaaactctcaaaagcagagtgcctctcctcctccaaaggaacacagatcctcaccagcaacggaacaaagctggatggagaatgactttgacgagttgagagaagaaggcttcagatgatcaaactattacgagctacaggaggaaatt

SEQ ID NO: 944161 - DNA, 745 bp, Homo sapiens
ccctgaaggccatgcctgtggtggtggagggccaagcacttccctggaggaagcccgcacctcctgcactgggtggtgacccctgggctagggcctgctgccccctgcccagtgcaggagggtggagggtcactccttaggtggtcccagtggggctggtgggcaggggctgcacctgggccactggggtgacacttgtctaagtgctccttgtagagaaggcctctgtgtacagcagcactgacgaagatgcggacaaagcrggggaaggacacccctgcctttgtgaaggcctagccgaggcgtctctgctgtggctcgcccagaagccctgctactccttggcattgagtggataggactggctgcaggaaggctgtgacggtgccagctgtggtcaaggctggagcagaaacagcggctgataaggagctggtttccctgccagccagggcagagctggttgcaggctggtgtgaagtggggagccaggcaggtacagggaggagcgggctggacaccaagctggcagaaaaggccagtcaggtgaccagagctggaagatccaccagaagcatttaagggggccagccaggcaggagaacaaagggaagacgaaatggatgctcaggtccacgcctgaccttgctggatgttttctgccagggtggaaaccaagccctggggagggcctgcaggagaaccaatggcctgagaaggtgcatgatgtcatttcagctgtgct

SEQ ID NO: 944162 - DNA, 480 bp, Homo sapiens
ctataatcccaacacttcggggggctaaggtgggaagattgcttgagcccagaagtctgaggccatcttaggcaacatagcgagacttcgtctctacaaaaaaaaatttaaaattagccaggcatgctggtgcatgcctgtagtcccagctacttaggaggtcgaggcaggagrattgcttgagcccaggagttcgaggctgcagttagctgtgatcacaccactgcactccagcctgcacaacagagcaagaccctgtctcaaacaaacaaaaggaggcaataggagattctactaagaagagagaaattacaacctcatgtaacctaatcaagaaagtgacatcagttttgccatgttctatttgttagtagcaagtcacaggatttgcccacaggggattacacaagggcatgaataccaaaagatgtgaatcaatggaggccattctagagtctgcctgccacagatacttggagg

SEQ ID NO: 944163 - DNA, 480 bp, Homo sapiens
ctataatcccaacacttcggggggctaaggtgggaagattgcttgagcccagaagtctgaggccatcttaggcaacatagcgagacttcgtctctacaaaaaaaaatttaaaattagccaggcatgctggtgcatgcctgtagtcccagctacttaggaggtcgaggcaggagaattgcttgagcccaggagttcgaggctgcagttagctgtgatcacaccwctgcactccagcctgcacaacagagcaagaccctgtctcaaacaaacaaaaggaggcaataggagattctactaagaagagagaaattacaacctcatgtaacctaatcaagaaagtgacatcagttttgccatgttctatttgttagtagcaagtcacaggatttgcccacaggggattacacaagggcatgaataccaaaagatgtgaatcaatggaggccattctagagtctgcctgccacagatacttggagg

SEQ ID NO: 944164 - DNA, 709 bp, Homo sapiens
gtgcagctgaaatttgaagctggtttttgggtccagaactcacaccaggctggactgttaccaggctggacttcatttcattcaatcaacctatggacaaatcttactgaatgcctctaaatgccagggacctgcttggtataaggatacatctgtgggtgggacacccacagaggccaccggtgtgaagatccagaaacctgactatgtttgcaagtgaaggaaagagcaaaaagagtcaaaatatggagaaagaggccaggcacaatgcctcacacctgtattcccagcactttgggaggccaaggtgggtggatcacttgaggtcaggagttcaagaccagcctggccaacatggtgaaacgtcgtctctactaaaaatataaaaaattagcttggtgtggtggcaggcgcctgtagtgtcagctactgtggaggctgagacaggagaatcrcttgaacccgggaggcggaagttacagtgagctgagatcgcaccactgcactccagcctgggcgacagagtgagactctgtctaaaaaaaaaaaaaaaaaaaaaaaaaaaaaaaaaaaattaacaacaacagtagaaagagacagtgaacaagagggcataatttgaagatccagctatacctgaagctagacccaagcttgaaattcttaatatgggccagtagactccttttcatccttaaggcaacttaag

SEQ ID NO: 944165 - DNA, 823 bp, Homo sapiens
tgctccttagacaagggaaagagcagtcaatagaaatcgtccttgcggaaacccagatggtggatataactaaataatgcctttaaatcagctattagaaatatgttcaaagaactagagaactgtctaaagaattcaagaacattatgagaatgatgtgttcacaaataaagcacatcaataaggagatataactataaaaaagaatccaattctggagttgaaaagtaaaatacctaaaacaacattttcattagagggtctcaacagtagtttcaagctggcagaagaaagaatgagcaaacctgaagacagatctgttgaaatcatccagtttgaggaacagaaaggaaaaagaatgaagaaaaatgaacagagcctcagagacctgtgggacaccattgggtgcactcatgtgtgcgtaagaggagccataaaggaaaagtgagaggggacagaaagagtagttaaagaaacaatagctgtattctcaaacaatagctcacgcctgtaatcccagcattttgggaggctgaggtgagtggattacttgaagccaggagttcaagaccagcctggcaataccccatcatggcaaaaccccrtctctactgaaaatacaaaaattagctggcatcgtggtgtgcacggtgcacctatagtcccagctacttgggaggctgagacacaagaattgctttaacctgggaggcagaggttgcaataagccaagactgagccactgcaatccagcctgggtgacagagtgagactctatcaaaaaaacaaaataaaaaaagaaaaaagaaaaggaaacaatagc

SEQ ID NO: 944166 - DNA, 581 bp, Homo sapiens
agacactctctacaaaaaatactgaatagactttttcagactgaaatgaaagggcaccagacagcaactgaaatccatatgaagaaatagagagcactggtaaaggtagctacacaggtaaatataaaagacagtacaggccaggcgcggtggttcatgcctgtaatcccagcactttgggagtctgaggcgggcggatcacgaggtcaggagatrgagaccagactggccaacatggtgaaaccccgtctctactaaaaatataaaaattagccgggtgtggtggcacgtgcctgtaatcccagctacttgggaggctgaggcaggagaatcacttgaaccagggggtcagaggttgcagtgagccgagatcacaacactgcactccagcctggtgacagagtgagactctgtctcaaaaaaaaaaaaaagacagtacaattgtatttctgtttgtaactcctttgttctcctatccagtttaaaagacaactacactaaggaatacagtcatggactgttaatgacagagatgcattccgagaaatgcaccattaggtgattttgatattgtacaaaca

SEQ ID NO: 944167 - DNA, 581 bp, Homo sapiens
agacactctctacaaaaaatactgaatagactttttcagactgaaatgaaagggcaccagacagcaactgaaatccatatgaagaaatagagagcactggtaaaggtagctacacaggtaaatataaaagacagtacaggccaggcgcggtggttcatgcctgtaatcccagcactttgggagtctgaggcgggcggatcacgaggtcaggagatggagaccagactggccaacatggtgaaaccccgtctctactaaaaatataaaaattagccgggtgtggtggcacgtgcctgtaatcccagctacttgggaggctgaggcaggagaatcacttgaaccagggggtcagaggttgcagtgagccgagatcacaacactgcactccagcctggtgacagagtgagactctgtctcaaaraaaaaaaaaagacagtacaattgtatttctgtttgtaactcctttgttctcctatccagtttaaaagacaactacactaaggaatacagtcatggactgttaatgacagagatgcattccgagaaatgcaccattaggtgattttgatattgtacaaaca

SEQ ID NO: 944168 - DNA, 695 bp, Homo sapiens
agatgtgggaatgtttggaacttcctagagacttgttgaatgcctttgcccaaaatgctgattgtggtatgaacaatgaagtccaggctgaagtgatctcaggtggagatgaagaacttgttgggaactcgggtaaaggtcattcttgctatgctttagcaaagggattggcagcattttgcccctgccctagagatctgtggaactttgaacttgagaaagatgatttggggtatctggcagaagaagcttctaagcggcaaagtgttcaagaggaagcagagcataaaagttcaggaaatttgcagcctgacaatgygatagaaaagaaaaagccattttctggggagaaattcaagctgcctacagaaatttgcctaatgaagagctgaatgttaaccaccaagacaatggggaaaatgtctccagggcatgtgagagaccttcacggctgcccctctcatcacaggacctgaggcctaggagagaaaaatggtttcctgggctgggcccagggtcccactgctctatgccaccttgggacatagtgccctgtgtcccagctgtttcagctcctgccatggctaaaaggagccaaggtcaggtcaggccattgcttcagagggtgcaagccccaagccttggtggcgtacacgaagtgttgggcctgcaggtacacagaagtcaagaattga

SEQ ID NO: 944169 - DNA, 695 bp, Homo sapiens
agatgtgggaatgtttggaacttcctagagacttgttgaatgcctttgcccaaaatgctgattgtggtatgaacaatgaagtccaggctgaagtgatctcaggtggagatgaagaacttgttgggaactcgggtaaaggtcattcttgctatgctttagcaaagggattggcagcattttgcccctgccctagagatctgtggaactttgaacttgagaaagatgatttggggtatctggcagaagaagcttctaagcggcaaagtgttcaagaggaagcagagcataaaagttcaggaaatttgcagcctgacaatgtgatagaaaagaaaaagccattttctggggagaaattcaagctgcctacagaaatttgcctaatgaagagctgaatgttaaccaccaagacaatggggaaaatgtctccagggcatgtgagagaccttcacggctgcccctctcatcacaggacctgaggcctaggagagaaaaatggwttcctgggctgggcccagggtcccactgctctatgccaccttgggacatagtgccctgtgtcccagctgtttcagctcctgccatggctaaaaggagccaaggtcaggtcaggccattgcttcagagggtgcaagccccaagccttggtggcgtacacgaagtgttgggcctgcaggtacacagaagtcaagaattga

SEQ ID NO: 944170 - DNA, 644 bp, Homo sapiens
ttagagaattgagtgagttattaaatgaaatgatgtacttaaaactggacctggggccgggcgtggtggctcacacctgtaatcccagcactttggaaggctgaggtgggcggatcacttgaagtcaggagttcaagaccagcttggccaacatggcaaaaccccatctctactaaaaaatacaaaaattagctgggcgtgatggtgtacgcctgtaatcccagctactcgggaggctgaggcaggagaatagcttgaacccaggaggtggacgttgcagtgagctgagatcacgccactgcactccagcctgggcgacagagtgagactccatctcaaaaaccaaaaamcaaaaaacaaaaaagctggacctggtcaagccatcgagtgggagaaaatgtttgcaaaacacatgtttgataaaagactggggtccaggagatggagagaacttccgcaactcaagaataaaaacacagtcaacgcagtaaaagaatagatagataaagggtttgaacagacacgtcaccaaagaagattgacagatagccaatatgcatctggaaaagtgctccccgtcaccagccacctgggaaatgcacatgagaagaacagggaatgccccgcagacccatgggaaaggc

SEQ ID NO: 944171 - DNA, 662 bp, Homo sapiens
aaaataaagatcttttaaaaatttttattttatctattttttgagatggagtctcactctgtcacccaggctgcagtgccgtggcgtaatcttgcctcaccgcaacctcctcctcctgggttcaagcgattctcctgcttcagcctcccaagtagctgggactacaggcgtgtgccaccatgctcagctaatttttgtattttagtagagatggagtttcaccatgttgggtcaggctggtctcaaactcctgacctcaagtgatcggcccaccgcagcctcccaaagtgctgggattacaggtgtgagccaccactcccgaccccaaaaatgaagatcttgattgggtattgagagagtgaatccatcagcatcacactgaacatccacttaatgatacacctgtcaagcrgcaagcaaagctgtctctccatgaactaaaagttgaaaagaactgttactcttcaacaggctggttgcagaaatttaagaatagatatggcattacatttttaaaggtttgtgctgatcatgaagcggtggagaaattccttagtttgccaagatcatctctaatgagaagctgatgcctgaacaagtctatagtgctgatgaaccatcattgttttggtgttcttgccccagaaagacactgacgacag

SEQ ID NO: 944172 - DNA, 748 bp, Homo sapiens
gggacctgaagaaacagaaggagaaaccgttgaagttctgtgccgaaattgatgaatagaagttaatgaaaaattaaaaaccagtgcataaagccaaaaaataaagatcttttaaaaatttttattttatctattttttgagatggagtctcactctgtcacccaggctgcagtgccgtggcgtaatcttgcctcaccgcaacctcctcctcctgggttcaagcgattctcctgcttcagcctcccaagtagctgggactacaggcgtgtgccaccatgctcagctaatttttgtattttagtagagatggagtttcaccatgttgggtcaggctggtctcaaactcctgacctcaagtgatcggcccaccgcagcctcccaaagtgctgggattacaggtgtgagccaccactcccgaccccaaaaatgaagatcttgattgggtattgagagagtgaatccatcagcatcacactgaacatccacttaatgatacacctgtcaagcgkcaagcaaagctgtctctccatgaactaaaagttgaaaagaactgttactcttcaacaggctggttgcagaaatttaagaatagatatggcattacatttttaaaggtttgtgctgatcatgaagcggtggagaaattccttagtttgccaagatcatctctaatgagaagctgatgcctgaacaagtctatagtgctgatgaaccatcattgttttggtgttcttgccccagaaagac

SEQ ID NO: 944173 - DNA, 643 bp, Homo sapiens
tcagtaagtggaccaggaaaattggatatcagcatgcagaagaaggaacctagacccctgtctcccaccacacacaaaaatcagctcaaaatggattaaagacataaatgtaagactcgaaactaggaaagtactagaagaaagcatagagaaaatgcctcaggacattggtctggacaaagtgttttttttttttataagacctcgaaagcacaggcaacaaaagcaaaaatagacaaatggggaatgcaacaagccaaaaacatctgcatggcaaaggaaacaatccacagagagaagaggcaacctatagaatgggagggaatatttgcaaactatccacccaacaaagaattaatgtccagaacacagaaggagctcaaataactcaacaggaagaaaaaaaaatacaatttttaaatgggcaaaagacttgaataracatttctcaaaagaagacatgcagatagccaacagataacatgaaaaacaaatgttcaacgttgccagtcgtcagggaaatacaataaaaccacaataagatattatctcaccccagttaaaattgctataatcaaaaagacagaacatggcaaatgctggcaagaatgcagagaaaggggaactcggccactgttggtgg

SEQ ID NO: 944174 - DNA, 656 bp, Homo sapiens
ctcagggtcagtcagctccctcctcctcaccacaggccttcgaatttgggaggcacagtcccacccagcagtgtgctgggaaatgttcaacttagagttccagtttagttatttttctggtaaatattccagtatatgaatgtattgaaatgttatttatccaattcatgcagataatgacattaaatacatatcacacaaaaactaaaaacagtcaatatatcgccacaccctaaattctgtccaaagtgtgtaaagacctactcatatttatttcgtttttccttttttgagacagggtctcactctgttgcccaggctggagtgcaatcatggctcactgcagcctacatctcccgggccaggatttgtaagtggcttgcaatgtttgcactacaaacgattctgctgtgaacatccatgtgctcctgggctggtgtgtgaggtttagcatacacacacatatcttgcacttcaackgacagtgctacgcccatctccaggggcctcctcgtctactcccagcccatgcttggcctgtaagacttcatacttttgccagctagatgggtgtgaattggcatctcactgaggttttaatttatattaactgattcccagtggtattaagcatcattgtaagtgattactggacc

SEQ ID NO: 944175 - DNA, 656 bp, Homo sapiens
ctcagggtcagtcagctccctcctcctcaccacaggccttcgaatttgggaggcacagtcccacccagcagtgtgctgggaaatgttcaacttagagttccagtttagttatttttctggtaaatattccagtatatgaatgtattgaaatgttatttatccaattcatgcagataatgacattaaatacatatcacacaaaaactaaaaacagtcaatatatcgccacaccctaaattctgtccaaagtgtgtaaagacctactcatatttatttcgtttttccttttttgagacagggtctcactctgttgcccaggctggagtgcaatcatggctcactgcagcctacatctcccgggccaggatttgtaagtggcttgcaatgtttgcactacaaacgattctgctgtgaacatccatgtgctcctgggctggtgtgtgaggtttagcatacacacacatatcttgcacttcaacggacagtgctacgcccakctccaggggcctcctcgtctactcccagcccatgcttggcctgtaagacttcatacttttgccagctagatgggtgtgaattggcatctcactgaggttttaatttatattaactgattcccagtggtattaagcatcattgtaagtgattactggacc

SEQ ID NO: 944176 - DNA, 801 bp, Homo sapiens
gctcctaaatgaacctgctccagaaactgaagtttgaaatggagctcctaactcattttgtcacgcagctgagaaatgccccttttaatggaaagaaacagaaaaggacaattccatctttgattgatggactgcattacggggtataaataaaaggaagtgtgataacctcactgtggcacaggccaaccgcagagtccctaactggggtggctgtgtctacatgggactaccagaggtggccatgcatggcctggtggtcagggcagggagcatcgatggagagcttgcaccccgtgagtgggactgccagagggcccccaagacatccccaacgtgagcgtttcacttttcaggtggggaaactgaggcccaccatggtctgtcccaccagaggttgtctcgtgacaaacccaggcacaggaattcccacccaggtcttcttaggagctagaacattctgcccacttcttcaccatttgtcgtctccwggaaattattggaaattaaagtggatttgtcaacactcgactgagcaatgtctttgatgttgcagaggaaatttggtctttgaattcgagtgggagccccactgtccaccaagccccagtggtgtgtctggggccctctcctgcagagcacagggcatgggacgcactgtgccgtcattcctgcaggctgcttcccgggcctggggtcgccagtcttttttgaccacgggggatgcacatggggaggctctaggtagcagccggtgtcctcggaatgtcagaagcttcctgaagcgtaaagcgcgaggaa

SEQ ID NO: 944177 - DNA, 600 bp, Homo sapiens
ggaaagggactcactccttcaccttgcgccttggtgttagatgtcggcatttcaaggcaggcccatcgggttgagcgtgttcctctcggcagctgcctcactgaggcttcgtatcagaaaatggtcttgggtttcatcgagtatctctctgcatctgttgagatgatcctacggttttaattttttggtttggcaatgtggtgaattatattgattgattttgagatgcsatctcagctcactgcaacctccgcctcctgggttcataccattctcctgcctcagcctcctgagtagagtagctgggactacaggcacccgccaccacgcccggctaatgtttttgtatttttagtagagacggggtttcaccgtgttagccaggatggtctcgatctcctaacctcgtgacccgcccaccttggcctcccaaagtgctgggattacaggtgtgagccaccacgcctggccttacttcttttttaaatgtttggaaggattggagaattcaccagcaaagccatttgggccttgggttttctttgtgggaaagtttaaagtttggtttttgtttttgtttttgttttccttatctgaaat

SEQ ID NO: 944178 - DNA, 600 bp, Homo sapiens
ggaaagggactcactccttcaccttgcgccttggtgttagatgtcggcatttcaaggcaggcccatcgggttgagcgtgttcctctcggcagctgcctcactgaggcttcgtatcagaaaatggtcttgggtttcatcgagtatctctctgcatctgttgagatgatcctacggttttaattttttggtttggcaatgtggtgaattatattgattgattttgagatgccatctcagctcactgcaacctccgcctcctgggttcataccattctcctgcctcagcctcctgagtagagtagctgggactacaggcamccgccaccacgcccggctaatgtttttgtatttttagtagagacggggtttcaccgtgttagccaggatggtctcgatctcctaacctcgtgacccgcccaccttggcctcccaaagtgctgggattacaggtgtgagccaccacgcctggccttacttcttttttaaatgtttggaaggattggagaattcaccagcaaagccatttgggccttgggttttctttgtgggaaagtttaaagtttggtttttgtttttgtttttgttttccttatctgaaat

SEQ ID NO: 944179 - DNA, 629 bp, Homo sapiens
gagactctgtctcaaaaaaaaacaccccaaaactaaaaactgtactgctcatggacaatgcgcctggccacccaggagctctgatggagacgtacaaggagatgaatgttttcatgcctgttgacacaacatccattytgcagcccatagatgaaggagtaattttgactttcaagccctattatttaagaaatacatgttgtaaagttataggtgccatagaaagtgattcctctgatggatctgggcaaagtccattgaaaaacttctgcgtagggttcaccattctagatgccattaagaacatttgtgattcgggggcagaagtcaaaatatcaacatgaacattagtttggaagaagttgattccaaccctcagggatagctttgaggggttcaagacttccgtggaggacgtcactgcagacatggtggaaacagcaagagaactagaattggaagtggagcctgaagagggactgaattgctgcagtctcaggataatccttgaatgaatgagaagttgttttttatggatgagcagagaaagtggtctcttgagttggaatccactcctggtgaagacgatgtaaacatcgttgaaatgacagcaaaggatttagagtatt

SEQ ID NO: 944180 - DNA, 838 bp, Homo sapiens
atgttcccgcagtggcctggttttaagcagaaagcttgtctgcgaccgccggctgccaagactgtctctctgttcattctcaaccctgcctccctgccctcggcagcccctcactctctgatgtgtgactaaggctctgtttatgctctcattaaggcagacagagtgcaatgccgtttgcaagtgagctacagaattattcaccaaaacagcgtctagaggttcatccttaaggaacagtcacaggaaaattggtttctgtaccacacatggaaaatagagacaaatggttgagctctaagttccatgattcgttctccatggccaggagaaccacttaaaggattccacgcagatgggcagtggccgaggcagtttcctcatccaggaagttcttgtcctggtagaaactaaacgatagaaaggccagctccgacgccacagcggcctccacagaggggcttacggtcacggcacaagcggctgatttccagataaagggagcaagtcataactgggatgagtgttcctagggccagagggatggaggcagtaccccaggtgaggaagggctacgggagggtcacggcagtgtctgggaaagcgtgggtctgcctgcagttagagttacaagcatcagagtctgcactcctacccggatgatggcagagtgacgcaygcagtaagggaacagccaggctgatcccccggcatcgcgtcccaggcaggccaaccctgtgacaagccctccagccggggccgccctctgaggctggagtcatggggaatggacaaggctggctggagccaagtgaccaaggggacaagccggcagagc

SEQ ID NO: 944181 - DNA, 766 bp, Homo sapiens
tttctcatcactgtctgtttcacatagttgtcactgattctctgccactttgcagcatcttcacttttaggttttatgagcaacatgaaatatgcttagttaagggctgaacacttatttttttcccctcccaatacaaccagataaatttataacagtgtggcaggaagtggtgaaaaaacacagcaaatatttattcataggcatgtgctaatgcataggccaaaggtgtagctcacctagcttctggatttcacttaaattatttgtcagttaaaagatttggatgagccgggtgcggtggctcacgcctgtaatcccagcactttgggaggccgaggcgggcagatcacctgaggtcaggagttcagtttgagaccagcctcaacatggagaaaccccatctctactaaaaatacaaaaaattagctgggcgtggtggtgcatgcctgtaatcccagctactcgggaggctgaggcaggagaattgcttgaacctgggaggtggaggttrcagtgagccgagatcgtgccattgcactccagcctgggcaacaagagcgaaactccatctcaataaataaataaataaataaaaataaaagatttggacgaggccaggcacagtggctcacgcctgtaatcctagcactttgggaggccaagacaggaggatcacttgaggtcaggagtttgagaccagctgggccaacatggcaaaaccccatctctactaaaattgcaaaaagtagtcgggcatggtggc

SEQ ID NO: 944182 - DNA, 687 bp, Homo sapiens
agataatgtaattttaagtagtgataaatgagatgaagaaaatagagcagtcctgtgtttaatagaagtggcaaaagtgggcatccttgtcttgctccagatcttagagtaaaagctttcaacttatctctgttcagtacatcagccttggrtttgccatatatggtttttactgtgttgaagcacattttttctattcctaatttgctgagagtttctatcatgaagggatgttgaattttgtcagatgcttttactgcagctattgaaatgtgagataaattatattgaaatgatcatgtatggtttttgtctatttgttctcttcatcatggtactagaagtcctagccagagaaacagacaagagaaaaaaaaaagcattcaaattgaaaaggaagaagctaaattgcctctgtttgtaggcaacataatcttgtatatagaaaaccctacagactccactaaaaaattgttggaactcataaacaaattcagtaaagttgcaggacacagtgtcaacatacaaaaatcaataacatttctatacactaacagaacactatctgaaaaaaatcaagacaacaatcccatttataatagctaccaaaaaaaacttataaataaatttaaccaaggaagtgaaagatctctacactgaaaactataaaacattgaagaaaaaatt

SEQ ID NO: 944183 - DNA, 781 bp, Homo sapiens
acaaagataaacctgtagggcattatgttaagtgaaataagccaggcacaaagagacaaatactgcatgatctcccttgtatgcatagaagtagagagtagaagagtggtcaccagaggctgtggtcattagtggggagggtgggttggagagagttggtcagagaatacataattacagatacataggaagaataagttcaagagatatatggcacagcatggtgactatagtcaacaactacatattgtactcttgaaaaacagagtggatgttaagtgttctcaccacaaaaatgataactggccaaacatggtagctcttgcctgyaattccaacactttgggaggccaaggctggtgaatcccttgagaccaggaattcaagaccagcctgagcaacatggtaaaacctcgtctctacaaaaaatacaaaaaattagccggacatggtagtgcacacttgtagtcccaactactttggaggccgaagtgggagaaccacctgagcccaggaagttgaggctgcagtaagccatgattgtgccactgtacagcctgggtgacagagcaagaccctagctcaaaaaaaaaagaaaaagaattataacaatgtgaggtaatgcatttgttaattagctagatttagctattccacaatgtattaaaatatatacttcaaaacatcatgttgcacatgataaatacatacaattttatctgtccattttttaaaactttttcacaatcctaagagggaacaactattaatattactctca

SEQ ID NO: 944184 - DNA, 792 bp, Homo sapiens
aaaaccactatagcacatgtatacctatttaacaaacctgcacgttctgcacatgtatcccagaacttaaaagttaaaaaaaaagatttatgcattcctatgttcattacaacattattcatgatagctaagacatataagcaatttaaatgtccattgatgaatgaataaataaactgtggtttatacrtatagtagaatattatttagccccaaaagagaaggaaaccctgccatttttgacaacatggtgaacttgaaaaatactatgctaattgaagcaagtcagacacagaaggaaaattatcacataataccatttataagatgaatctaaaagagtcaaattcatcaaagtagagagtgagatggtggttacagaggttggcaggagatgaaaagggggaggtattaatcaaagggtacaaagtttcagttacaaaaaaagaataagtcatataggtttaccatacagcatagtgcttataatagttaatactattctgtatacttaaaaattggctgaaattatagatctcttgttaagcattcttatcacaaaaaaaaaaagaaataagaggatgaaaggaaacttttggaggtgttgaatgggtttacagcatcgattgtgattatggtttcatagatacatacctccagactcatcaagttgtatacattaattgtgtatagttttccacatgtcaacaacaatagagagagagagagagaggcccttcccagagcagctctccttgctcctatgccaactgggaagcttcagttccagct

SEQ ID NO: 944185 - DNA, 619 bp, Homo sapiens
caacattattcatgatagctaagacatataagcaatttaaatgtccattgatgaatgaataaataaactgtggtttatacgtatagtagaatattatttagccccaaaagagaaggaaaccctgccatttttgacaacatggtgaacttgaaaaatactatgctaattgaagcaagtcagacacagaaggaaaattatcacataataccatttataagatgaatctaaaagagtcaaattcatcaaagtagagagtgagatggtggttacagaggttggcaggagatgaaaagggggaggtattaatcaaagggtacaaagtttcagttacaaaaaaagartaagtcatataggtttaccatacagcatagtgcttataatagttaatactattctgtatacttaaaaattggctgaaattatagatctcttgttaagcattcttatcacaaaaaaaaaaagaaataagaggatgaaaggaaacttttggaggtgttgaatgggtttacagcatcgattgtgattatggtttcatagatacatacctccagactcatcaagttgtatacattaattgtgtatagttttccacatgtcaacaacaatagagagagagaga

SEQ ID NO: 944186 - DNA, 830 bp, Homo sapiens
ccaaaagctaggcctcttgtcccaaacagcctagctgtgaacacaaaggaaaggttcttcaagggaattaaaagtgctgtgaggctgggcgtggtggctcaaacctgtaatcccagcactttgggaggccgaggcgatggatcacctgaggtcaggagtccgagaccagcctggctaacatgctgaaatcccgtctctactaaaaatacaaaagattagccgggcgtggtggcacacacctgtagtcccagctactcgggaggctgaggcacgagaattgcttgaaccccagagacggcggctgcagtgagccgagatcrcgccactacactccagcctgggcaacagagtgagactctgtctcaaagaaaaaaaagtgctgtgactccagtgaatgcacacatgataagaaagccaaacagccttattgctgatattgagaaagtctgagtgatctgaataaagatcaaaccagctgtataacattcccttaaaccaaagcctaatccagggcaagaccctaactctcttcaattctgtgaaggctgagagaggtgaggaagctgcagaaggaagtttgaagctagcagagattggttcatgaggattaaagaaagaagttgtctccataacaccaaaagtgcaaggtgaagcagcaagtgctgatggagaagctgaagttatccagaagatccagctaaaatcacggatgaaggtggctccactaaacaacagattttcaaggttaaaaaaaaaaaagccatctaggactttcttagctagagagaagtcaatgcctggcttcaaagcttcaaaggacaggctgcctc

SEQ ID NO: 944187 - DNA, 571 bp, Homo sapiens
tacatgccatgatctccttgggacagaattcataactaagagctaaaatgtattgggtgcctactgtgtgccaggcactgtacatatagtactatatttatttgctcatatgatccttttatcaacctgatgaggtaggcagtgttagctccattttacagataaggacagtgagatttagagactcagccaagtttacacaatgtggcagagaaggctgtggtctggcaaaatgtattgtttcattgccataatatagagtggttgcatggaagcggaacctaacatgactattccccagccacctggcatccaggcaggacctgtgactagttctcagcaayagaatccaagtggaagtgatgtgtgtccattccaagtgaaggtatttaagaatcagttgtgcctttccccacttccgcctttatctgctatctggatgcagagaactctaaggagcccaccgtaaagaaaggctcttgaatctctctgactacaccaatcaaccaggaatatccacctggaagcaccacctacatgagaaacaaatgtattgaggcactgaaattgg

SEQ ID NO: 944188 - DNA, 733 bp, Homo sapiens
tttacttcccatcagcaatatttgagagttccagttgctctccatccttgatatcagttatgttagtttattattttagctattctggtaggtgtgtaatatctcattgtggctttagtttgcatttccctactggctaaaaatattaaatttttttgtgttaatttactatttatgtatcctctttggtgcaatgtctgtccaggttttgcccattttctaatgagattgtttggtatcttactaaatttggagagtgatttaaaaaatatatttacaatgtaagtgctttttcagatatttgattcagacatattttttcctggtttatggcttcatttttgttttctttttttctttttttttttttttgagacagagtctcgctctgttgcccaggctgsagtgcagtggcgcgatctcggctcactgcaatctccgcctcctggttcactccattctcctgcctcagcctcccgagtagctgggactacaggcgcccgtcaccatgcccggctaattatttttttaatattttttagtagagacggggtttcactgtgttagccaggatggtctcgatctcctgacctcgtgatccgcccgccttggcctctcaaagtgctgggattacagccgtgagccaccgcacctggcctgttttcttaacagtgtctttcatggagtaaaagttttagatttaataaggcccaccatattggtcttttttctt

SEQ ID NO: 944189 - DNA, 611 bp, Homo sapiens
accagaggtacaaagaggagctggtaccattccttctaaagctattccaaacaatagaaaaagagggaatcctccctaactcattttatgaggccaacatcatcctgataccaaaacctggcagagacacaacaaaaaaagaaaatttcaggccaatatccctgaggaacatcgatgtgaaaatcctcaataaaatactggcaaaccgaatccagcagcacatcaaaaagctaatccaccatgatcaagtcggcttcacccctgggatgcaaagctggttcaacatccacaaatcaatgggcaaaaactggaagcattccctttgaaaactggcacaagacaaggatgccctctctcaccactcctattcaatatagtattggaagytctggccaggatggaagggaagggaagggaagggagagagaaagaaataaagggtattcaaataggaaaagaggaactcaaattgtctctgtttgcagatgacatgattatatacttagaaaaccccatcatctcagcccaaaatctccttaagctgataagcaacttcagcaaagtctcaggatacaaaatcaatgtgcaaaaatcacaagcattcctataca

SEQ ID NO: 944190 - DNA, 711 bp, Homo sapiens
tttgaaaattaattcataatatagagatgaaatatttagatatataaatttatgtatctatatattttctaaatgttcaaagccatcagttcagcaacatggtgggttcatgaattatgtatcctgtctccattagtgtcagaaatagatgcatgcttctatgctcaattgatttttgaaaggcaccaatgtgattcaaagtacagccactatgagaaatagtatggaggtgcctcaaaaacactaaaattagaactaccatatgatccagcagtcccacgactgggtataaattcaaaggaaatgaaaccgatttgttgaggaagtatttggtcctccatgttcattgcagcatcactcacagtagtcaagatatggaatcaaactacgtgcayatcaatgaataagctcaataaagaaaatgtggtatatgtacataatgaatactatccagcttttaaaaagaaggaaatcctgtcatttgtgacatgtacaaacttggagaacattatgtgaagtgaaataagccagaaatagaaagacaaatactgcatgatctcacttatatgtggaatctaaataagttgaactcatagaagcagagagtagaattgtagttaccagtgctcagggatgggagtgaggtgggatggggtggggaaatgttagtagaagaatagcaaattttagttacataagggaaataagttc

SEQ ID NO: 944191 - DNA, 486 bp, Homo sapiens
ccgcccactagatcagtgcaggtttggatcttaatcctgaaagatgcaatcccaaatgccataatcccaaatgttgaactcccaaaagatcaaaatctctaaattctaaagcccctaatgcctaaaatcgcaaaaagcacaatctcgaaagattaaaaycccaaagccaaattctaggcaagggatttgtgtgttttcagttgtacacagcatagttgcatcatgttaggtggaactacaaccttgctattgtcgttatttggaaattaagtttggtttaaggagatgcctctgggtaccaagttgccgagagcagatttgtggacttaatttcaggtgtcaacttgactggatgaaggcacacctagaaacctggtaaagcactgtgttgggcgtgcctgcgagggcgtttctggagattagtgtgtgggtctgtgggggcaggaagggtgcggggggaagatttgccctcagtgttggcgagca

SEQ ID NO: 944192 - DNA, 420 bp, Homo sapiens
tgagacacaaatatgcttaaagtaatgagttcttaatcattattaagaaaaaatcattaagaaaataacactgattgctcacttttggaggatgccagggaaccagctcattattttgcaaagtaggaaatgcagggaaagaatcaaggctatcctgcctttcttatattaactgtgtcttgttgtyaccaaatagttggagaggggaagttgttattacagaagtcctccaaccagtaagagaagaagaaatgatagacacagaatgtcatcattttataatctctaatgaatggatggatctgagtatgatcaacaatggttgataagatcacgaaaagagagacagtctatatatgtttgccaccacctatgaagtatttttgtcccccccactccccacaaaatgaacatgggtct

SEQ ID NO: 944193 - DNA, 677 bp, Homo sapiens
atgtttggcagttatgaagcaaacaagagagtgtcctcttttcagcaaagttatgaactctcaacattttccaaagtattgtgtttttatgatacaggtggaaagtgaagacccagagagcagaggggcccaaccaagagggcaggaagacttttagaaaggggtggtatccggccaggcgcggtggctcacgcctgtaatcccagcactttgggaggccaaggtgggcgtatcacgaggtcaggagatcgagaccatcctggctaacatagtgaaaccccgtctctactaaaaatmcaaaaaaaaaaaaaaaaaaaattagccgggcattgtggtgggcgcctgtagtcccagctacttgggaggctgaggcaggagaatggcgtgaacctgggagatggagcttgcagtgagccgagattccgccactgtactccagtctgggtgacagagcgagactccttctcaaaaaaaaaaaaaagaaaaaaaagaaaaaagaaaaagaaaggggtggtatccaggtctgcttggtggtggaggtggaacagggcaggctgtccaggcagaggaggtggcccctcccaacagactcctgagctcaaatccctgccccactgctcattatctgtgtccttatggacatgtcactaactgttctctgagcccgcactccttca

SEQ ID NO: 944194 - DNA, 677 bp, Homo sapiens
atgtttggcagttatgaagcaaacaagagagtgtcctcttttcagcaaagttatgaactctcaacattttccaaagtattgtgtttttatgatacaggtggaaagtgaagacccagagagcagaggggcccaaccaagagggcaggaagacttttagaaaggggtggtatccggccaggcgcggtggctcacgcctgtaatcccagcactttgggaggccaaggtgggcgtatcacgaggtcaggagatcgagaccatcctggctaacatagtgaaaccccgtctctactaaaaatacaaaaaaaaaaaaaaaaaaaattagccgggcattgtggtgggygcctgtagtcccagctacttgggaggctgaggcaggagaatggcgtgaacctgggagatggagcttgcagtgagccgagattccgccactgtactccagtctgggtgacagagcgagactccttctcaaaaaaaaaaaaaagaaaaaaaagaaaaaagaaaaagaaaggggtggtatccaggtctgcttggtggtggaggtggaacagggcaggctgtccaggcagaggaggtggcccctcccaacagactcctgagctcaaatccctgccccactgctcattatctgtgtccttatggacatgtcactaactgttctctgagcccgcactccttca

SEQ ID NO: 944195 - DNA, 887 bp, Homo sapiens
caccgacttctctgggatgatcccaagccctggacatcacggcatggacgacgtccatctcaacctgaccactggagaagctggtcagcatccacagaaccgacatgggggagctgggggggccccacccgctcagccagggacacagacagccttcatcctgcactacctggcctccaggactcacggatgaggaccggccctcaggacggtggacactcacctgtcaagcccagaaagagtccggctctctggaacccagcctcaggagggcccctggggactaatcctcagagttaactcctcagtcctgctgagttttcccatagctgaccgatatctgctcaggggtcagggggacccagctccccgctgggcccagggcttctgagaactcaccctggctarcatcctccaagctcctttggcagactggcccctgaatcctctgtgggcccgagacactggctggctccctagtcatcgagcagctcctgctggactccccacaggggatggagcaggccgcgtggtgaggccacacagggacagcgtcggaacggctcatggtgggagcagccacagcgcacctgcctagaacgcctggtctcctgcctctgtgcagtgtgggcgagggggtggctgcctgctaagggctaatgagaagacaggacctgagcggtcactgccaagcggggcgcccctctgcaggtgctggatgtggccacattatgaaaaggacgcctcatccctcagctgtttcgtaaattatctaaaaatcaaccttccgttccaaaagtgacctaaaatgataagctccgtggcgggaaatgttgccaaatgttttcttatgaaaaccatgatgtcagaaaaaaggcgtaatgtct

SEQ ID NO: 944196 - DNA, 887 bp, Homo sapiens
caccgacttctctgggatgatcccaagccctggacatcacggcatggacgacgtccatctcaacctgaccactggagaagctggtcagcatccacagaaccgacatgggggagctgggggggccccacccgctcagccagggacacagacagccttcatcctgcactacctggcctccaggactcacggatgaggaccggccctcaggacggtggacactcacctgtcaagcccagaaagagtccggctctctggaacccagcctcaggagggcccctggggactaatcctcagagttaactcctcagtcctgctgagttttcccatagctgaccgatatctgctcaggggtcagggggacccagctccccgctgggcccagggcttctgagaactcaccctggctaacatcctccaagctcctttggcagactggcccctgaatcctctgtgggcccgagacactggctggctccctagtcatcgagcagctcctgctggactccccacaggggatggagcaggccgcgtggtgaggccacacagggacagcgtcggaacggctcatggtgggagcagccacagcrcacctgcctagaacgcctggtctcctgcctctgtgcagtgtgggcgagggggtggctgcctgctaagggctaatgagaagacaggacctgagcggtcactgccaagcggggcgcccctctgcaggtgctggatgtggccacattatgaaaaggacgcctcatccctcagctgtttcgtaaattatctaaaaatcaaccttccgttccaaaagtgacctaaaatgataagctccgtggcgggaaatgttgccaaatgttttcttatgaaaaccatgatgtcagaaaaaaggcgtaatgtct

SEQ ID NO: 944197 - DNA, 736 bp, Homo sapiens
aagcccagaaagagtccggctctctggaacccagcctcaggagggcccctggggactaatcctcagagttaactcctcagtcctgctgagttttcccatagctgaccgatatctgctcaggggtcagggggacccagctccccgctgggcccagggcttctgagaactcaccctggctaacatcctccaagctcctttggcagactggcccctgaatcctctgtgggcccgagacactggctggctccctagtcatcgagcagctcctgctggactccccacaggggatggagcaggccgcgtggtgaggccacacagggacagcgtcggaacggctcatggtgggagcagccacagcgcacctgcctagaacgcctggtctcctgcctctgtgcagtgtgggcgagggggtggctgcctgctaagggytaatgagaagacaggacctgagcggtcactgccaagcggggcgcccctctgcaggtgctggatgtggccacattatgaaaaggacgcctcatccctcagctgtttcgtaaattatctaaaaatcaaccttccgttccaaaagtgacctaaaatgataagctccgtggcgggaaatgttgccaaatgttttcttatgaaaaccatgatgtcagaaaaaaggcgtaatgtctttatagagggctggagcggccggatggggcctctggggcaatcaccttaaaagctttccaatatttttagacttgta

SEQ ID NO: 944198 - DNA, 695 bp, Homo sapiens
ttcacagagctccatttccattggcaggaagacggggccttctgtctccttggctgtcagtccgcattgactgtatgaggaagggcaggtagccagcatttcccaaccccaccgcctccgaggtgcagaagctgagtccttgttgaggggaagtaacaaatagtttgagactyccctcttacacccagcccccactcagagggcagtggctctgccccaggcatgccaggctgagaatatgagggccccaggtcaggctcacatagttgaatttccaaacttgaagagaaaagagaagaagatcagaagctacttcagagactttgctcgggggaaatttagtccacaagaatgcagactgccaaagctctcccccagtagaattaacttcaaaacacagtgttcaaaatagtgtgttcaaaccaaaagaatctcttgaaaataaggaagattgtggtggtgggaaatcaaagggcccatgctccatcagaacaagctaaacataagctagctagtttaccagacagaaccaggaaaagagacagctaagagagccctcttggggttcaaatgaaccttaaatactggcttaaaactttcccttcctgaatttaattttatcaaattatggagcaacttatgtaccagggaatagggggtgaaaaaacaaaaacatacccagcaatgagtaaagt

SEQ ID NO: 944199 - DNA, 561 bp, Homo sapiens
tgagtccttgttgaggggaagtaacaaatagtttgagacttccctcttacacccagcccccactcagagggcagtggctctgccccaggcatgccaggctgagaataygagggccccaggtcaggctcacatagttgaatttccaaacttgaagagaaaagagaagaagatcagaagctacttcagagactttgctcgggggaaatttagtccacaagaatgcagactgccaaagctctcccccagtagaattaacttcaaaacacagtgttcaaaatagtgtgttcaaaccaaaagaatctcttgaaaataaggaagattgtggtggtgggaaatcaaagggcccatgctccatcagaacaagctaaacataagctagctagtttaccagacagaaccaggaaaagagacagctaagagagccctcttggggttcaaatgaaccttaaatactggcttaaaactttcccttcctgaatttaattttatcaaattatggagcaacttatgtaccagggaatagggggtgaaaaaacaaaaacatacccagcaatgagtaaa

SEQ ID NO: 944200 - DNA, 695 bp, Homo sapiens
ttcacagagctccatttccattggcaggaagacggggccttctgtctccttggctgtcagtccgcattgactgtatgaggaagggcaggtagccagcatttcccaaccccaccgcctccgaggtgcagaagctgagtccttgttgaggggaagtaacaaatagtttgagacttccctcttacacccagcccccactcagagggcagtggctctgccccaggcatgccaggctgagaatatgagggccccaggtcaggctcacatagttgaatttccaaacttgaagagaaaagagaagaagatcagaagctacttcagagactttgctcgggggaaatttagtccacaagaatgcagactgccaaagctctcccccagtagaattaacttcaaaacacagtgttcaaaatagtgtgttcaaaccaaaagaatctcttgaaaataaggaarattgtggtggtgggaaatcaaagggcccatgctccatcagaacaagctaaacataagctagctagtttaccagacagaaccaggaaaagagacagctaagagagccctcttggggttcaaatgaaccttaaatactggcttaaaactttcccttcctgaatttaattttatcaaattatggagcaacttatgtaccagggaatagggggtgaaaaaacaaaaacatacccagcaatgagtaaagt

SEQ ID NO: 944201 - DNA, 712 bp, Homo sapiens
tagcaggcacatatgtttatgggttgaatgtgatattttgatacaggcatataatgtgtaataatcacatcaggataaataggacatccatcccctcaagacttttaaatttattgtgactttttcatgacccataacacggtgtatgtcttggtaagtgtttcctgtgcactggaaagtaatgtaagttttgctgttgtcaggtggagtgttttataaacatcaatgatatcaagtttagatttccatatcattacttcttttctgtctacttactctatcaattattgagagagcagttttgaaatctcaggctataaacgtagattttctttaacttatctttatcgtatcagtttttgccttatatactttgaagctttcttattagagatacagaagtttagatggttatgagatcttggtgaatgtacccatttaccattataaaatgtacggtaatactctttgctctaaggtgtactttctatgatattaacatagtcactaatttaacattagtgctagcatagaatatatgtatttaatacttttatttaaatctatrtgtctttttatttaacatgtgtttattgtagacagcatatatttgagtcttgctttcttgactaatctgacatctcttcatcttaattggggcatttaaataatttatagttaatgtgaatattgctattctttatatccacca

SEQ ID NO: 944202 - DNA, 785 bp, Homo sapiens
ggaacaatctggaaaccttgctcctcacactgggccatctctggaggcaatttcccggcttcctcctgtgaggtccaggtcgagggatcaggctgcctacgatgctgccactgagggccgttgcttcctacgtgatggacttctcacctcttccttctcttgttgagccttaacaatgagagtaagaaaaagtaggctgggtgcagtggctcatgcctgtaatcccagcactttgggaggccaaggtgggtggatcacgaggtcaggagatcaagaccaacctggctaacatggtgaaaccccatctctactaaaaatacaaaaaaatagctggacatggtggcgtgcacctgtaatcccagctactcaggaggctgaggcaggagaatcgcttgaacctgggaggcagaggttgcagtgaggtgaggctgcaccactgcactccagcctcgtgatasagcgagactccatctcaaaaaaaaaaaaaaaaagggaaaaagtaagagtattcttcaatcactctgccagagtctgctctgtgtcacggaggaggagactgaggtctggatcaggggtgccactgactcacaagaacaaagcaatgtggggccacagcaggaataagacccagtgattccagatcctgccagattattccagatcattgtcatcagcctcttccatggaagaattctctctggtccacacggcatttcccaacgccatctgggaggcctccaaggcctgggatatggcggcttgagatgctccaagagggatcgtct

SEQ ID NO: 944203 - DNA, 617 bp, Homo sapiens
gtgaaattatccttcaaaagtgatggtaaaataaagacttcctcaaacaaacaaaaattaaagcactttgtcaccactaaacttgtcttgcaagaaaggacaaaagatctccagtagaagaaaaatgatatgtcggaaatatagacctaaaaagaaagaaaaaaagagcactagaaaagaaataaatgaagattaaatattttatttttcaaattcttaatggacctaacagataagaatttgtctataataataattgtaatgatacatttggtgattgtatcttacaaataagtaaaaagaatgatagtaccattataagggactaaatggagaaattggaaatagtctgtkgatcctgtacaacccataactacgttactggaatttgaaaagtggacataaactaaccacaaatgcatattgcaagctctaaggcaaccattaaaaaatgaaaaagaagaagtataatttacatggtaagagaagacagaaaataagatcatataaaatattctcttaaaaaagagaagtcaaaagaagactgaaagacaaaaataaaaacaaaaacaataagtagaagatggtaaacaatatagtagatactattacaccat

SEQ ID NO: 944204 - DNA, 848 bp, Homo sapiens
tggaattgttgtgaaattattccccacattgagtggaaatttatctctatgtaactttccccaacttcattttatttgtttgttctctgctccctaaagtaactgaaagtaagttccacccctcttctatggtcctttgaatataaggacacaatttgtatgccttccttaaggcgacttccscagggaaaagagcctttccaaacttttctcatgtatttgtgctttacagactcttccctgtgttggttgttttgtctgttttgtctttgtccctcataaagtcatggcagctagaattgaagatcgcatttcgggagtgttctgaccagcacaaatcagaatgctatcatctacaatcccctcgttctaggtaatatatttctagtaatgcccaattaactagtttctgtgatagtgcctcacactgctgactcataatgaactgttgattgctaaagcctcctccaagctgcgtttggaggtttggcatgtgaatctatttatacccacttttttatatttaaaaaaggcatcacattgatgcccaaatcaggactgttatgcacatgtatgtagatgagtaagtttccctttatgaatttaaaaaaacacacacacgtcatttaactttattattcttgttgctttgcaaaatattaaggacatcttgatgctttcagaatgaacaccaaaacccatgtaagtggtataatacttaacaatgttcacacatgaaaatacataagtggtttatttaattcatgatcaattatttgtttttgaaggaattttcagcattttttatttggacattctggaaatgaaatagtaaacatgattagttc

SEQ ID NO: 944205 - DNA, 609 bp, Homo sapiens
ttattcttcttgctgaattgactgctttatcgtactagcacacaagcttgggcagacaagggagtgctgacatcacccctcacctaacaccaggcttcacagctcctgtctcttaaaaaggcccatttttttttttacttgaggagaggagagggaagactttagcatgcatcttgaataccagctcagccacagcataatagggcaccagtcagagtcataaggcccccatttcagtttcaagtaccaatatgacatttctagacacaccctgggccacaggaaaaactgctgcttaaaacaaacaaacaaacaaacaaaaaaaacacggtcatggcagcwttcataatctgctaactgaagaggtcttgggccctgaataacaaggagtaatacccagatactacatcagaggccttagtggctttgagacttgctggcttcaggtgagattcagcacattaccaactgtgtggctttggggcaaaactgcttgaaaaaagcagagggaaaagtaaaagggactttttcttggactttaggtaccaacaccaccacaggggcatagaacaccaagcaggctcttggagtccctgattccagggcttg

SEQ ID NO: 944206 - DNA, 591 bp, Homo sapiens
gcagaggtctcaggaaacttatgtctttactcagtgctgtgcacttatgtcagcagattttgtattggttctgtgggtcaaccttgaagccagtaggtatcatttgtcattaaagctggctgcagtagtagcacgtggggakatatatatatatatatatatatatatattttttttttttttttttttgagatggaatctcactctgtcacccaggctggtgtgcagttgtgtgatcctggcttactgcaacctccacctcctaggttcaaacaattctccttcctcagtctcccaagtagctgggatacaggcgcctgccaccatacctgattaacttttgtatttttagtagagatggggtttcaccatgttgtccaggctggtcttgacctcctgacgtcaagtgatcctcccgcctcagcctcccaaagtgctaggattacaggcatgagtcacgatgcgggtgtaggtaatatacttgatctttgtttactgggagatctctgttgcctcaggcaatacgtttgtcattgagatgcacagtggcctgagtctccccttcaactctggatgatgagacaaagcagg

SEQ ID NO: 944207 - DNA, 565 bp, Homo sapiens
tcttttcatatagtcctatatttcttggatgctttgctcatttcttttcattctttttttctctaaacttcccttctcgcttcattttattcatttcatcttccattgctgataccctttcttgcagttgatcacattggctcctgaggtttctgcattcttcacgtagttctggagccttggttttcagctccatcagctcctttaagcacttctctgtattggttattctagttatgcattcttctaaatttttttcaaagttttcaacttctttgcatttggtttgaaagtcctcccatagctcggagtaatttgatcatctgaaaccttcttctctcagctcgtcaaagtcattctccatccagctttgttccgttgcttttgaggaactgtgttcctttrgaggaggacaggcgctctgctttttagagtttccagtttttctgctctgttttttccccatctttgtggttttatctacttttggtctttgatgatggtgatgtacagatgagtttttggtgtggatttcctttctgtttgttagttttccttctaacag

SEQ ID NO: 944208 - DNA, 593 bp, Homo sapiens
tgcgtgctgggagaaccactgctctgttcaaagctatcagacagggacatttaagtctgcagaggttactgctgtctttttgtttgtctgtgccctgcccccacaggtggagcctacagagacaggcaggcctccttgagctgtggtgggctccacccagttcaagcttcccggctgctttgtttacctaatcaagcctgggcaatggcaggcgcccctccctcagcctggctgccaccttgaagtttgatctcagagtgctgtgctagcaatcagcgcaactccatgggcgtaggaccctctgagccaggtgtgggatataatctcctggtggggcgttttttaagcccttcggaaaagcgcagtattcrggtgggagtgaccctatcttccaggtgccgtctgtcacccctttctttgactaggaaagggaactccctgaccccttgcgcttcccgagtgaggcaatgcctctccctgctttggcttgcacatggtgcacgcacccactgacctgcgcccactgtctggcactccctagtgagatgaacctggtacctcagatggaaatgcagaaatcactcgtcttctgt

SEQ ID NO: 944209 - DNA, 593 bp, Homo sapiens
tgcgtgctgggagaaccactgctctgttcaaagctatcagacagggacatttaagtctgcagaggttactgctgtctttttgtttgtctgtgccctgcccccacaggtggagcctacagagacaggcaggcctccttgagctgtggtgggctccacccagttcaagcttcccggctgctttgtttacctaatcaagcctgggcaatggcaggcgcccctccctcagcctggctgccaccttgaagtttgatctcagagtgctgtgctagcaatcagcgcaactccatgggcgtaggaccctctgagccaggtgtgggatataatctcctggtggggcgttttttaagcccttcggaaaagcgcagtattcaggtgggagtgaccctatcttccaggtgccgtctgtcacccctttctttgactaggaaagggaactccctgaycccttgcgcttcccgagtgaggcaatgcctctccctgctttggcttgcacatggtgcacgcacccactgacctgcgcccactgtctggcactccctagtgagatgaacctggtacctcagatggaaatgcagaaatcactcgtcttctgt

SEQ ID NO: 944210 - DNA, 624 bp, Homo sapiens
cccatggtttttgcaatctgcagatcaggagattccctcatgtgcctgcaccaccaaggtcctgggtttcaagcacaaaactgggcagttgtttgggcagacaccaacctagctgcaggagattttttgcatacctcagtggtgcctggaaccccagtgagtcagaaccattcactcccctggaaaacgggctgaaaccagggagccaagtggtctcactcagygggtcccactctcatggagcccagcaagctaagaaccactggcttgaaattctcactgccagcacagtagtctgaagttgaccttggatgatcgagtttgatagggggaggggcatccaccattactgaggctttagtagatggttttctcctgacagttctaaggaggcggggaggtgtggacagggtggaatttaccacagtgcagcaaagcgactgtggccagactgcttctctaaattcctcctaactgggcagggcatcgctgaagaaaaggtaacagccccagtcaggggcttacagataaactcccatctccctgggacagagcacctgggggaggggtggctgtgggtgcagcttcagtggatttaatctctcctgcctgctggctctgaag

SEQ ID NO: 944211 - DNA, 624 bp, Homo sapiens
cccatggtttttgcaatctgcagatcaggagattccctcatgtgcctgcaccaccaaggtcctgggtttcaagcacaaaactgggcagttgtttgggcagacaccaacctagctgcaggagattttttgcatacctcagtggtgcctggaaccccagtgagtcagaaccattcactcccctggaaaacgggctgaaaccagggagccaagtggtctcactcagtgggtcccactctcatggagcccagcaagctaagaaccactggcttgaaattctcactgccagcacagtagtctgaagttgaccttggatgatcgagtttgatagggggaggggcatccaccattactgaggctttagtagatggttttctcctgacagttctaaggaggcggggaggtgtggacagggtggaatttaccacagygcagcaaagcgactgtggccagactgcttctctaaattcctcctaactgggcagggcatcgctgaagaaaaggtaacagccccagtcaggggcttacagataaactcccatctccctgggacagagcacctgggggaggggtggctgtgggtgcagcttcagtggatttaatctctcctgcctgctggctctgaag

SEQ ID NO: 944212 - DNA, 499 bp, Homo sapiens
atcaaagtcacacacattggaagttgttaagacaggatctaatctgtctggtcccagaaacaactaaagtgtacaaagaaataaagacacaggagggggccgcctagaagcagctacagtgcatggttttcacagagagaaaaggaatgagcaaatacagcaccttcaattgaaacatccaggtacttgcagtgggactgatcaaggaaatagctcaactcatggagaatggagaaaaacagggaagrgaaatggcctaccagctccagaattcctggcaaaggtgactgcaactcaggcaaggcaggaggttgaactatcatacatacccctaaaagggggctgaatacagggtgctgagtagtgatggtctgcgggccccacttctatggtgcctcacagcataagactcactggcttggaattccagccagccaccggcaacagtgttgcacctatctgggacctgggacaggatgaagttcccaaggggaggggc

SEQ ID NO: 944213 - DNA, 688 bp, Homo sapiens
aaatgcgttcactcagccactcccaccccgcacatctctgcgcctcctgatcagctgactggttgatctgtgggtgacaggcctttcggggatgctggaggagacacgggcctgaccccatggcctcaggaatgccctcacscagccctgtcttctctttcagagctcccctgaacagcagctgcagcagccatggccccgccctgggtgcccgccatgggcttcacgctggcgcccagcctggggtgcttcgtgggctcccgctttgtccacggcgagggtctccgctggtacgccggcctgcagaagccctcgtggcacccgccccactgggtgctgggccctgtctggggcacgctctactcagccatggggtaggtgggcgtgcactggcctggggataagcctggccctttgcaaggggaggcctggcccaggacagagggtcttctccaggcgggccatggaccatggcatggtttccccagccccatttggcaagccagggtggggaagctgtgggcctgtcgattgcacaactgaactttctcctcctgggcccctggggggatgggtcagatgctcaccccaccctggcatccccgccatgttcacagctccaggcagaggccggcttagtgtgtgaaggttggtcttgggcagaggcatggacgctaagattaacaac

SEQ ID NO: 944214 - DNA, 745 bp, Homo sapiens
tctggacagagtccgtgtgagcatcagtcctgagacctgccctggaagggaggctaaggagagaagcagcacagtccacaggcagcctgcctcagggccgctctgccttccgctttttttttttttttttttttgagacggagtctcactctgtcgtcaggctggagtgcagtggtgtgatcttggctcactgcaaccyccgcctcctgggttcaagcgtttctcctgtctcagcctcctgagtagctgggactacaggcgcgcaccaccatacccggctaatgtttgtttttttttgtatttttagtagagacagggttttatcatgctgtctgactgtctcgatctcttgactttgtgtgacctgttctctgtcctgcctcggcctcccaaaatgctgggattataggcgtgagccaccatgcctggcctgccttctgagtcttaacctccttggtcaccatgtggcgctgcttccacccactgacggtgtccatgcacctgctcagcagtggcccgaggagccctgcagacgccccagcagccagggtttctcaccgtccccaccccaggacaaggaggcaagtgtggggaggctgctatctccagggccactagagctgtggggccactcgaggaccgaggctcccggccggcttggaaacagatccagcacatggaaatcagactgtggggtggaggcctgcgatataaaggccatcttatttcttctcccactttttgt

SEQ ID NO: 944215 - DNA, 665 bp, Homo sapiens
ctgtactgacttgagttctttgtagacctaccattattttttacatttaatgtgaatatttgcttgtttcactgttgaaacatgtgtgggtgtgattacagggagcagtccagcctctgctgggaatggtcaggaatataccatatgcaccccgtgtcctttctaaaatagtggaaattctgaatgcctaaacacatctggattccaggaatttacattaagggatatatatttgaaataacccacaaaaacaatactcacccctgctacgcttggtacactctgatattttcaaattgattttctttttaaaatgctgcttttgaaccaataatttcataacccaatgatgtgttgatattcacattttgaagacactggtataaagtgtttgacccaacaggcatgtggcagatggaagtgatcactgggatgtttccacttccttggcctggaaggctcacttcatgttggtgctgagctgaaaaggattcattcctctscaaagcaccatggcactcccctggtgtttcaatgttctcaggctgccatagtaaaatatcacaggctgggtgacttcaacatctggcttttattttctcacagatccagaggcaagaagtccaaggtgaaggtgccaaaagggttggagtctggggaggact

SEQ ID NO: 944216 - DNA, 644 bp, Homo sapiens
cttcccaaatcctataaaacggccccacccctatctcccttcgctgactgtctttttggactcagcccgcctgcacccaggtgaaataaacagccatgttgctcacacaaatcctgtttggtggtctcttcacacggackcgcatgaaaccttggtcgtgggccctcgtggtagagcccatgtcccccaagatttctttggctgtgttaccttagatttgaacaagcactgtacctaaggcgggcgccttcctcctcccgctttcaggaatgccctgctctgccattcttttgctttctcacttctctaatacacttgctttcactttagtccgtggactcgccccgaattctttcctacgcgacatccaagaagcctctcgctgggtctgagtggagacctctttctggtaataaacggactagggagattcgactttgaaggtgaaaacaaaaaccaccatccagtttataagaaggcgctcgaggccgggaacggtggctcaggcctgtaatcccagcactttgggaggctgaggtggtggggcggggggagggaatcacctgaggtcacgagttcgagaccagcctgaccaatatggtgaaaacccgtctctactaaaaatataaacattagccgggcgt

SEQ ID NO: 944217 - DNA, 569 bp, Homo sapiens
gctgagatagaaactggatatgaaaccacaatgcaatggagaagtctgtctcatttcctgagctcagccatttctcagtgccaggcactttcagctcttccttccctcttcaaacagggtcacttaccgtgtcctgatggtggaatcctctactttggtttttctggccagcagtgttttctttaatgggttggagcaaaggttctcaaaggcmtacagacctgggccagtcccccacagagtcagcaccaggacatggtgaaatcagagaaacagggacaaagtcgggagtttttatgaagataaattaattctgaaattgtctgccctacttttttctgtgtcaggatgccctttcttttatgaaacaagggtgctaggagttggccatttttttcagtgtccttgtttgtcaaaatcacctatttaattttcttttgaaatttactggtctgtggacagtggctgagccaggatgagaacttggattttgtagttccaggtttgcagtctctcccctctgccacccctccctggagaggatcagatgcaggggagacaggacggct

SEQ ID NO: 944218 - DNA, 908 bp, Homo sapiens
gccttatgtggtggtctaggagcagcattccaagagggggaaggcacaagcttgcaagatctcttgcggcctaagctcctgaactcataaagggtcacttctgccacattctgttgtcagagcaagtcacaagcccagcccagatccaaagggcaaggaaagggatgccacttcttgatgtgaggggagcagcaaagtatttgtggccttatttatgagacatgatcagccgggcgtggaggctcacacctgtaatcccagaactttgggaggccagggtgggcagatcatttgaggccaggagttcaagaccagcctggccaacatggtgaaactccatctttgtattttataaatttataaatgtatacatattatattttatataaaaagagacatgatccatattgcagagagtaacaaaaatgatttcgaggtgtaccaaagttgtrattagtatgaaatcttttttttttaattttttgagacagggtctcactccattgcccacgctggagtacactggcacgatcatagctcactgcatcctcaagctcccaggctcaaacaatcctcctgccttggcctcctgagtaggcatgcaccacaacaccagcaagacgctatcttgccctgttgcccaggcaggactatagcaacacaatcatagttcactgcatcctcaaactcctcatctcaagcgatcctcccacctgagcctcctgagtagctgggactacaggagtgtgccaccctgcctggctatttttttcttattttttgtagcaatgggggtctcactatgatgcccagactggtcttgaacttatgcctggggctgtcttcctgccttggcctcccaaagtgctgggattacaggtgtcagccaccatgcctggcctatgtgg

SEQ ID NO: 944219 - DNA, 586 bp, Homo sapiens
tgactcagtttcagctgtctttgccacagttcacaacaattcctgccaacacaggaacccacacagtgatgtggaaaaaatctttcaaatactcagtggtagccacacttacaacatcccgatataaggtccaccatatgcacacccaattgcagaaatctgtcctaatttctgcactataaataaaagtcctgaaggaaatccagcccacccagacattagatgggaatcacaacaaccaaagcccctggtaaaaagccacttgaaagttgaatccactgcawacccagcagccttgtgacaaagttataaactcttccctactacaagctcatagggcatcccattaccctggggacccattaccctggggacccaacaaaaggagatctgtacctcctgaaaccagtttataaaaattaaagagctgtttgcttcttcaaatttatagacaccggggtaaggctacatggttccattgtaaatgtttctattttaacatagcagtgaaagtactttgcagaagaattagtcaagaaaatgaccctaaaaatgacattcaaattgaggaaaagaattaaaatgt

SEQ ID NO: 944220 - DNA, 711 bp, Homo sapiens
cctcccagtaacccctacctgcaacattggggatcaaattttaacatgagatttggaaggggcaagcattcaaaccatagcaagagttaaatttccttttaaagaaaatcactgatatgattccatttcgccatagataaaaactagtatttcagcctaccattgagtgtacttatagctaacggaaagggcactctgtctcaggaatacagatttgcctagaggtatcctattgcagtcaaagaaagagcaatgagggatagaaaaggttagtgatggagacaccaacgctgcattttacaacaaacaatgtaaaaactttacggattggttctgctaacttactacaatttacattcctctcaggtgggagaattgttgagtattttcttaagayagaaaagcaattcagataatctgaaatctccacaagaaggataagaagcacagcagaaactattctaggcaggaagtcaatccattcaactgtctgtgctccatagaaacaattgtctgcactgggagtcatatgaggtacagacaacagccagacctctgatcttctcattagtgatttcagaagaaattgccagtcagctgagtaattcacttagtaaagtaaacatttggcactgacagaggttagacggatagctatttgtatcaccatattcatgaagctggaatattttccattactgatatcacatc

SEQ ID NO: 944221 - DNA, 664 bp, Homo sapiens
ttataaaggggagtttccctggacacagtctcttgcctggcaccgtgtaagatgtaactttgctcctcattcaccttctgccatgattgtgaggcctccccagccatgtggagctgtgagtcaattaaacctttttccttgataaattacccaaccttgggtatgtctttattagtatcatgagaacagactaatatggtaaattggtacacatagagtggggtactgccataaagatatccaaaaatgtggaagtgactttggaactgggtaacgggcagagattggaacagtatggagggctcagaagaagacaggaaaatgtgggaaagtttgaaaattcctagagacttgttgaatggctttgaccaaaatgcttayagtgacatgaacaacaaggtccaggctgaggtggtctcaaatggagatttggaatttgttgggaactggagtaaatgtcactcttgctatgcaaagagagtggcagaattttgcccctgctccagagatccgtggaactttgaacttgagagagatgatttagggtatctgggggaagaagtttctaagtggtgaagcattcaagaggaagcagagcataaaagtttggaaaatttgcaggctgatgatgcaataaaaaagaaaaaaaccattttctgggaga

SEQ ID NO: 944222 - DNA, 576 bp, Homo sapiens
gggtgaaagaagtttccaattgagctttgtaataattttgactgggcacaaactcttttgagcagaacctgggggcaaacaggaactgctgcagaaaagagcacaggggccatggatgacagtgtaggcagattttgggtcgtggtggtgggggtgtggtggcaaggcctgaaagccctgcttgctttctcaggagaaaagtttgtagcctagggcaatgtctgagtcttgtgcacaggctgcctggagataaacycagagctgttagtggggcacagtgggagtgagacaggtctagtcaactgcatggaagctgggtgagtctatctctgccagctttgccccactttcctggtgacaggggcagccataattccttctgaaacataacccattggcctgagtaccacggcctcatccaccccccacttagctagacatccccaaggagaatctgagctcagacccacctaaccctgcctctacctgatggtatttctctacccacctttggtagctgatcacaaaatacataaactcttgggagctttatggctctggtcatagcctaagaaa

SEQ ID NO: 944223 - DNA, 616 bp, Homo sapiens
tcttagccatgactttcacctaagctattctgagtgctactaaagtttgagtatatattcatatattactcctactgtgttgagattagctgagctcagtgtggcctgcttgggaggaagtcaatacaaatatagtaaaactagaattgacatggatattgcatgtgctgaaaagaacactagactgggacttcaaaaacttgataatctcggccttgagtaagtcacttagcatctctaggtttcagcttataaaatgaagagtcagtctcccgagagtataatgaagatcaagtgaatccaggtgtgaaaatgtatggaaaagttgaatgtattgttacattaaattttgtttagcyagaaacttcagttagcataattgtcctcttccgttgtccttgacttaaaagaggcaatacacaataaacctctcacattggaaatttcaccaaagctatgtccagaactcagctcatgtatagttttatctatattcatttctaactctggacattaaaaatagatgttcaaaataataactctaaaaccctgaaagagcctcaagtaccgaagattcaatcatatttttaaggtgggacatgaaaccagacatttc

SEQ ID NO: 944224 - DNA, 584 bp, Homo sapiens
cctgtatgaggtatctgttgacccctgctgggaggtgtctcccagtcgggaggcacaggggtcagcgacccacttgaggaggcagtctgtcccttggcagagcttgagcgctgtgatgggagattcgctggtctcctcagagccagcaggcaggaacattgaagtctgctgacttcaatgtgggctgtgcccacagccaccccttcccccaggtgccctgtcccagggagactggagttttatctataagcccctgactggggctgctgcctttctttcagagatgccctgcccagagaggaggaatctagagaggcagtctggctacagcagctttgctgagctgttgtgggctctgcccagttcgaacttcccagtggctytgtttacactgtgaggggaaaactgcctactcaagcctcagtaatggcagacgcccctccccccaccaagctcgagcattccaggttgacctcagactgctctgctagcagtgacaatttcaagccagtggatcttagcttgctgggctccatggggggtgggatctgctgagcaagaccacttcacttgactccctggct

SEQ ID NO: 944225 - DNA, 837 bp, Homo sapiens
aacctgggaggtcctctgtggtgcctcctgggccccagctttgccataaaagctgataagtcactgcctgctgggaagcagtcatcttttctctccattgcaatccttgttagttactgccgggcccagaggcactgacttagcaaccctgggtttgcctttgcggagtgccgtcccacttccttactgacactatattcattcactctctcctgaacttctttgamcttgggtagccttccttcggctaacaagcatgccagggatcaggtacaagatcccaggtgcatggttgctggagcctcgttgtaggaagaatccacccgttgtcttgccaccccctccatcatgcaacttcaatgccccagtgccagcctctctgaccttgcaccaggcaaaactcactggagaccagccactgctgacccctagaccaattcttatcccagttttgccccatggctctcctgtctcattttctctgcttaaaggatgtatgcacttttttctatcatattttcccccaacctggatctctctatctctgataagggatacatgttatcctttctccttcctgaattttcgctagtgttgatagctcttgtctccattttcctccaccatgtttgcagagtaggtaatcctgaaaaacaacggttctgccatcacttcaatactaatagtaacaataataataataggtagtcattcgttgagtgtttcctttgtgctaagcactgttttagatgctctccagaggctcttatttaatcttcacaattctgaagatatgtgctgtgatacccattaactccatcttaagaggctcagaga

SEQ ID NO: 944226 - DNA, 613 bp, Homo sapiens
cctgtattccctgcccaaaagtttcataattgaaaacaacttcaacaaagctttagaatttgaaatcaatgtacaaaaatcgctatcgttttaatataccaccaacagccaagccaagaaccaaatcaggaagcccattcacaatttccataaaaaataaaatacctaggcatacagctaaccagagaagtgaaagatctctacaaggataactacaaaagactgctcaaagaaatcaggatgacacaaacaaatgaaaaagcattccatgcttatatttaggaataattaatatgttaaaartggctatttggcccaaattcattaaagattcaatgctcttcctatcaaactaccaatgacattcttcacagaactagaaaaaactattttaaaatttatatggaaccataaaaaagcctgaatagccaaggcaatcctaagcaaaaagcacaaagctggagcatgatgctacccaacttcaaactatactatagggctgcaataatcaaaactgcatggtactggtacacaaacaaaaacatagaccaatgtaacagaatagatagcttagaagtaacactgcacacctttaaccatctcatctttggca

SEQ ID NO: 944227 - DNA, 613 bp, Homo sapiens
cctgtattccctgcccaaaagtttcataattgaaaacaacttcaacaaagctttagaatttgaaatcaatgtacaaaaatcgctatcgttttaatataccaccaacagccaagccaagaaccaaatcaggaagcccattcacaatttccataaaaaataaaatacctaggcatacagctaaccagagaagtgaaagatctctacaaggataactacaaaagactgctcaaagaaatcaggatgacacaaacaaatgaaaaagcattccatgcttatatttaggaataattaatatgttaaaaatggctatttggcccaaattcattaaagattcaatgctcttcctatcaawctaccaatgacattcttcacagaactagaaaaaactattttaaaatttatatggaaccataaaaaagcctgaatagccaaggcaatcctaagcaaaaagcacaaagctggagcatgatgctacccaacttcaaactatactatagggctgcaataatcaaaactgcatggtactggtacacaaacaaaaacatagaccaatgtaacagaatagatagcttagaagtaacactgcacacctttaaccatctcatctttggca

SEQ ID NO: 944228 - DNA, 691 bp, Homo sapiens
atacatgcttgccctaaggtggcctgaataagtatttgggtttctgcagttaggggtggggccatagagctcccaagaggttatgatttgtgtcttctgctaccagggcagctaggaaaagatcatcatcatgtgggggcatggttaggcatgtctgagttcagactcttctttggtaggaattgctgtgaccactgatgaggatgrggctgtgattctaaggccaatagagttttgttcttagggggattatggctgcctctgctgtcatacaggtcaccagagaaataggggaaagctggatgttacaggcctcacccaactcccattcagtcaacctagccagtctcactctcaccatgccccaccaacaggtctgagtttttatccaggcagccagtgagcagaactgagatcttgccccaggctacaagcctcagtgctgagaaagcatgcatggctgtcaggcccctctgctccccacctgccatgacctctatgctcatatctgtacttctcattcatgcccaccctacccctggattttacccaggatatttaatgcttggtcaaaagttattacaaagttcagcttgaggttttcttctccatgtgtttcgtccccaattttactgacagccctccccatggagacttggtgataaacttagaaatgccatccctgagcttc

SEQ ID NO: 944229 - DNA, 444 bp, Homo sapiens
ggagctagggcctggaaaggaggcctgatgattctgacccatggtgccctgttttgccatggctgacctggtacccaaaatgcaagaaaaagtcctccccacacttccctctcctcagacagtgggaatgagtctctttcagagccataagctttttagcctggagttatggaaggagtgatgccagcacttttttagctaccatggctgttttctcagtaggtcatmtgcgccacctgcaaatccactgtttctgggtccaattcagcaccaggactcaactgcagtggcagtccttgtggcctagactgcctttcaaggttatttagggccccatagcactttagtctgaaacagtcagtcttttgggaactcaggtttgaactgctggtattggcgagtcccctctggctatgactggttttaatgctccctccatgggtg

SEQ ID NO: 944230 - DNA, 593 bp, Homo sapiens
tgtattattttttggacttacttgcattgggctttgccttactttgatctctccctgattagcttaataactgacctcctgctttctttttcaggtaaatcagagatttcttcttggtttggatccattgctggtgaactcgggtcggggggtgttgaggagccttgttttgtcatattaccrgggttggttttctgcttccttctcatttgggtagactctgtcagagggaaggtctagggctgaaggctgttgttcatattatattttcccacaggctgttccctttatgtagtactctcccccttttcgtgtggatgtggcttcctgtgaactgaactgcagtgattgttgtctctcttctgggtctagccacccagtgagtctacctggctctgggctggtactgggggttatctgcacagagtcctgtgatattaactgtctatgggtctctcagtcatggataccagtgcctgttccagtggaggtgacacaaggggcaatggactccatgggggtcctcagttttggtggtataatggcctatttttgtgctggttggcctcctaccaggaggtggcactttccag

SEQ ID NO: 944231 - DNA, 627 bp, Homo sapiens
agaaacaatcctgctggcaacgggttggtgccccttgaggtcaggggtcccagaaaaaggagcaggcgcccagctttgctgctctccagcctccttgaataacatctccaggcacaggagcgaatcagatgaatagggcctgaagtgaacccccagcaaactgcagcagccctacagaagagggaccaaattattgaaagaaaawcaagaggaaagcaacaacagcacaaacaacaacaacaatgaaaaagcccccacaaaaaccccatccaagggtcatcatactcaaagaccgaaactaaacaaactcacgaagatgagaaagaatcaatgaaaaaatgatgaaaacccaaaaggccagagtgcctcttgtcctccaaatgatcacaacatctctccatcaagggcgcagaactggacagaggatcagatggatgaattgacagaagtaggcttcagaagatgggtaataaaaaactacagtgagctaaaggagcattttctaacccaatgcaaagaagctaagaaccttgaagaaatgttagaggaattgctaactagaatatccagtttagagaggaacataaacaacctgatggagctgaaaagcacagaacaagaacttca

SEQ ID NO: 944232 - DNA, 627 bp, Homo sapiens
agaaacaatcctgctggcaacgggttggtgccccttgaggtcaggggtcccagaaaaaggagcaggcgcccagctttgctgctctccagcctccttgaataacatctccaggcacaggagcgaatcagatgaatagggcctgaagtgaacccccagcaaactgcagcagccctacagaagagggaccaaattattgaaagaaaatcaagaggaaagcaacaacagcacaaacaacaacaacaatgaaaaagyccccacaaaaaccccatccaagggtcatcatactcaaagaccgaaactaaacaaactcacgaagatgagaaagaatcaatgaaaaaatgatgaaaacccaaaaggccagagtgcctcttgtcctccaaatgatcacaacatctctccatcaagggcgcagaactggacagaggatcagatggatgaattgacagaagtaggcttcagaagatgggtaataaaaaactacagtgagctaaaggagcattttctaacccaatgcaaagaagctaagaaccttgaagaaatgttagaggaattgctaactagaatatccagtttagagaggaacataaacaacctgatggagctgaaaagcacagaacaagaacttca

SEQ ID NO: 944233 - DNA, 627 bp, Homo sapiens
agaaacaatcctgctggcaacgggttggtgccccttgaggtcaggggtcccagaaaaaggagcaggcgcccagctttgctgctctccagcctccttgaataacatctccaggcacaggagcgaatcagatgaatagggcctgaagtgaacccccagcaaactgcagcagccctacagaagagggaccaaattattgaaagaaaatcaagaggaaagcaacaacagcacaaacaacaacaacaatgaaaaagcccccacaaaaaccccatccaagggtcatcatactcaaagaccraaactaaacaaactcacgaagatgagaaagaatcaatgaaaaaatgatgaaaacccaaaaggccagagtgcctcttgtcctccaaatgatcacaacatctctccatcaagggcgcagaactggacagaggatcagatggatgaattgacagaagtaggcttcagaagatgggtaataaaaaactacagtgagctaaaggagcattttctaacccaatgcaaagaagctaagaaccttgaagaaatgttagaggaattgctaactagaatatccagtttagagaggaacataaacaacctgatggagctgaaaagcacagaacaagaacttca

SEQ ID NO: 944234 - DNA, 587 bp, Homo sapiens
tgggcattttgtacattggccccttgagtaagcttcaagatagttggggaaagaggttgacattctaatgcaagtaatcttgttcacatagttatcgataccctccatcacagttgatgccctctgttgggcacttatatggaacacaaatgtatttaccattagtagaggtccaaccacataccacttccccaaaaccttcttgttaccaatactataaattttgttcattccaagtccctgaaccatatggtatagagccataccttaggccacttctccttccaagcaaagtgaacaaccagatataccacttgaaattatgttctcagaaaagactcttcttcagtgaccttccgggctacccctgtgtggggctgtgatctacaacaatgtgctctggctggtgcccttaggtcatgcagaaatgtgctaaaataggtttaratgttctactcttcaaatagctggttatacagaggtccctgtattagtttgctagggctgccataacaaagtaccacagacaggtgacttaaacaacagaaatgtatttccttacagttctggaggctagaagttcaaga

SEQ ID NO: 944235 - DNA, 812 bp, Homo sapiens
tcaggagactgaagcaggagaatcgtctgagcctgggaggcagaggttgcagtgagcggagatctgtcactgcactccagcctgggtgacagagtgagactctgtctcagtaaaaaaaaaaaagaagcatttacaatctattctctctgaagcctgctacctggaggcttcatctgcatgataaaactttggtctccacaacctcttatcwcatctcagacatttcctttctgttgataccaggtcttcagataaactcaaccaattgtcaaccagaaagttttaaatctacctataacctgaaagccctcctccctgctttgagttgtcccacctttctggaccaaaccaatgcacatcttaaatgtatttgatttaagtctcgggcctccctaaaatgtatacaaccaagctgcaccctgagcaccttgggcaaatgttctcaggatctcctgggggctgtgtcacaggccatggtcactcatatttggctcagaataaatctcttcaaatattttaaagaggttgactctttttgtcgacacaaacaaatatttattgtgcacctagcaggtggcaggcttagtcctagatgctggggatgcagcagtgaataacacaaagttttacccttatggagctcacattctaggggcggaaggaagaaaaataaacagcaatttcatatattacctttgtgaggtcatagtaaatactaagaaagataaagcagaagaagaacgcagagatcaagtagggtagatgtcaggcctcagagtccaggctaagccatcatatcccctgtgacctgc

SEQ ID NO: 944236 - DNA, 812 bp, Homo sapiens
tcaggagactgaagcaggagaatcgtctgagcctgggaggcagaggttgcagtgagcggagatctgtcactgcactccagcctgggtgacagagtgagactctgtctcagtaaaaaaaaaaaagaagcatttacaatctattctctctgaagcctgctacctggaggcttcatctgcatgataaaactttggtctccacaacctcttatcacatctcagacatttcctttctgttgataccaggtcttcagataaactcaaccaattgtcaaccagaaagttttaaatctacctataacctgaaagccctcctccctgctttgagttgtcccacctttctggaccaaaccamtgcacatcttaaatgtatttgatttaagtctcgggcctccctaaaatgtatacaaccaagctgcaccctgagcaccttgggcaaatgttctcaggatctcctgggggctgtgtcacaggccatggtcactcatatttggctcagaataaatctcttcaaatattttaaagaggttgactctttttgtcgacacaaacaaatatttattgtgcacctagcaggtggcaggcttagtcctagatgctggggatgcagcagtgaataacacaaagttttacccttatggagctcacattctaggggcggaaggaagaaaaataaacagcaatttcatatattacctttgtgaggtcatagtaaatactaagaaagataaagcagaagaagaacgcagagatcaagtagggtagatgtcaggcctcagagtccaggctaagccatcatatcccctgtgacctgc

SEQ ID NO: 944237 - DNA, 658 bp, Homo sapiens
tctctattcttgtctgcctgtattatttcagaaatcaagtctttgtgctctgagattttattttctgcttggtctatctgttattaatacttgtgattgcattataaagttattgtagtctgttttttagctctatccagtcagttatgttcttctcttcactgactattttatctgttagctcctgcaatgttttattatgacttttggcttccttgtattgggttacaacatattcctgtagctcaatgaactttgtacctattcakattctgaattctatttgtgtcatttcggccatctcagcctcagcccagttctgaacccttgctggagaggtgatgcactcatttgtaggaaagaatacactctggccttttgagttttcagcattcttgtgctaattctttctcacctttgtgggtttatatatcttaatctttgagtttgctgacctttggatgtctttttttttcctatttaataatattgagggtttgactgtgatatgaagtggattcagttgattgccttcaatttggggacatttttagggagccaacaatcagctcctaactcctggactgtgttctctaactctgggggacttgtattaagcccaaactttgttatctggcttcttgaggtttataatcca

SEQ ID NO: 944238 - DNA, 658 bp, Homo sapiens
tctctattcttgtctgcctgtattatttcagaaatcaagtctttgtgctctgagattttattttctgcttggtctatctgttattaatacttgtgattgcattataaagttattgtagtctgttttttagctctatccagtcagttatgttcttctcttcactgactattttatctgttagctcctgcaatgttttattatgacttttggcttccttgtattgggttacaacatattcctgtagctcaatgaactttgtacctattcatattctgaattctatttgtgtcatttcggccatctcagcctcagcccagttctgaacccttgctggagaggtgatgcactcatttgtaggaaagaatacactctggccttttgagttttcagcattcttgtgctaattctttctcacctttgtgggtttatatatcttaatctttgagkttgctgacctttggatgtctttttttttcctatttaataatattgagggtttgactgtgatatgaagtggattcagttgattgccttcaatttggggacatttttagggagccaacaatcagctcctaactcctggactgtgttctctaactctgggggacttgtattaagcccaaactttgttatctggcttcttgaggtttataatcca

SEQ ID NO: 944239 - DNA, 590 bp, Homo sapiens
gtatcatgctattttgatttctgtacctctacagtataatttaaagtcataaagtcatgtaatagcttgggccattctgggtcttttttgattctatgcaagactccatgtatctctgtgtgtcagactgaagaccctggtagagtgggttcatgaggtagtttcctgacccaagggttgcaaaaatccatgggtgaagcatgggtttccagggtcacacatttactcaccacttccccaggtgggggagttcccttggttccatgtagctcctgcataagccattgtcttgccttgctagtctccattctccatgagtcaagttattttcttgattattctcaatgcaagtacagggatgcttgagttgaagttcctgtatttactcattcccttttttctctccatgagagccrcatacattagatgcttctagtcgtccatcttgtccacctcccaaatgtcttttagacacacctatgttgttgggcacttaagttgcttccaaatcttgactactttgaacagagctgcaacaaatatggcagtgtagatgtctctttgatatgttgatttcttttcttttggat

SEQ ID NO: 944240 - DNA, 549 bp, Homo sapiens
attttttttcctccttattctgttgatttggtgaattatattgagttttaaatattaagccaaacttgcaccttgcacctgggataaatcttacttgtttataatacgttaaaacacgaacacacacacacacacaccacacacacaygcacagaggttttgacttgctaatactttgttcaaaatttttgcatctatgacttaacaagaactttgcctataatgtaattttattttaatttttatatcatctgacaatcttgattgctaattggattgtttattctatttacctttaaataaattactgataaatttgggtttacatttactttcttattatttgttttctatttgttacatctattctctgtttagtgctttctcatggagtagctgagtattttctagtatcccattttatgtcctttcttagccttttagtctctcttttctttaaaggggttgctctaggtattacaacatgcacccttaaaagatcgcagtgtaccttgcattaatattataccatttccggtataagaacgt

SEQ ID NO: 944241 - DNA, 770 bp, Homo sapiens
gcattctagttcgacccactccccttgggggctttgggctcactgtggcttgggtgtggagggtaaaatataaaaggacttactgtctagacttcttgtttggatttaataatataacagggaggaggtccctcgcgctgtgtctttcctgatgtgcggctcctacccaccgcttgtcaccaatctatggtcattggaagccccaatcagatgccagctccaccagccaccaaaatggtcctggtgaagtcctgggctatgtcttctgtgacttccttwtggtgggcaattgtgagagtgcatgcaaagccccccattcactcatccatctgtccatctactattcttctatctatccattcatcatccatccatccatccatccatccatccatccatccatccagtcatccatccacctgtcctatctatctatccatccatccatccatccatccatccaatcatccactcacccatcctatctattcatccatccatccatccatccatccatccatccatccaatcatccacccacccatcctatctatccatccatccatccatccatccatccatccatccatcctatccatccatttatccacccgtctaccttctattcatccatcaatgcacccatctatctatttttccttccatccatccatccatccatccatccatacatacatacatacatccacccatccacacatccatccatccacacattcaatctccacgtagtggtgcccactctaagc

SEQ ID NO: 944242 - DNA, 683 bp, Homo sapiens
taatgcttgcttgcccacaactcacgtcctgctgtgcggcccggctcctaacaggccacggactggagcttagggatatatgatatatagagagcttcctagaatgagatgagtgataagaaattgactcacagactcatggaggctaagaaattccatgatctgccatcggcaagctggagacccaggaaagctggtggtatagtttgaaggcctgagatccggagggctgatggtgtggattccagtctaaatctgaaggcctgagaaccagaagcactgagggcaagaggacatggatgtyccagctcagtcaggcagagagaattcaacccttttctacctttttgtcctatttaagttctcagtggattggccttcgcccacacacattggagagggccacctgctttactcagtcccccaatgccagtgcaaatcttgtccaggaacactctcaaacacccagaaatcatgtctaactgccatccgggcaccctgtggcccagtcaagttggcacacaaagtcaaccatcacatagccaaaagaatgaaaaacagtctcaagaaatatttgcacatcatgttcatagcagcattattcactataacccaaagatggaagcaagccaggtgtccattgacaagatgaacagataaccaagatctggtccatccatcca

SEQ ID NO: 944243 - DNA, 771 bp, Homo sapiens
gacacccctcttctctgcccaagctgagaacctacctcagacacatggtatattactgaccacgaatccctatgttctgcagcaatctcaatccttacctcctcagaagaaagagttcgactggccgggctcggcgactcacgcctgtaatcccagcactttgggaggccaaggcgggtggattacctgaggtcaggagttcgagaccagcctggccaacatgatgaaaccctgtgtctactaaaaatacaaaaattagccaggtggggggcagggggacrgggggcggcgggggtgggcacctgtagtcccagctacttgggaggcggaggcaggagaatcacttgaacctgggaggcggaggttgcagtgagacgagattgcgccactgtactccagcttgagtgacaagtgagactgtctcaagaaaaaaaaaggttttatgtgttggcaggcatctgaggtctgtgtgccttctcccgattcctcccttggggtgggctgtccgcatgcacagaggcccgccagcactttggaggggagcacgcacagtgtttaccggagctgtgtgcgtgctcgcctgggtgttttccccttacccgtcgagcgctcctgtagcaggacgagccgcagacaaaactcctcagacaccagactaaagaaggacgaggttttttatccagcctggaacgccgacagactcgcgtcttaagagccgacctcgccgaagacaccgttcctggcccttttaagggcttacaactctaaggg

SEQ ID NO: 944244 - DNA, 684 bp, Homo sapiens
caagtttcaggcaacccaaggaaagctgtctatgatgggtttgtcttagtcagtttctgctgctataacaaaataccacagactaaggctgggcacagtggctcacgcctgtaatcccagcactttgggagactgaggtgggcagatcacctgaggtcgggagttcaagaccagcctggccaacaaggcaaaaccccatctctactaaaaatacaaaaattagcccagcatgatggcaagcgcctgtcatcccagctactcaggcggctgaggcaggagaatcgcttgaacccgggaggcagaggttgcagtgagctgagatcgtgccactgcactccaccctgggcaacagagtgagactctgtctaaaaaacmaacaaacaaaaaacaaaaacaacacagactgggcaatttacacaggatagaaactgattttctcacagttctggaggctgggaagtccaagacgaaggcaccataggttggctgtgcggtgagggctgctctctgcttccaacagctcctccagaggggaagagcattgcgtcctcctcacccggctggaggcggaagggcagagagggatgaaatacctcgctcaagcccctcttgcaagggcaccaatcccattcatgaggaaggagccctcagggtctaatcacctcttcaaggccctgccaccta

SEQ ID NO: 944245 - DNA, 596 bp, Homo sapiens
taagaggaaccccattagttttcaatcactaattcaacatttgttttttactttttttttttttttttgagacggaatcttgctctgttgcccaggctggagtgcggtggtgcaatctcagctcactgcaacctctgcctcgcgggttcaagcrattctcctgcctcagcttcccgagtagctgggattacaggcatctgccaccacacccagctaatttttgtattttgagtagagacagggtttcatcatgctggctaagctggtctcgagctcctgacctcaggcgatctgcctgcctcagcctcccaaagtgctgggattacaggcatgagccactgcacccagtctttctttttctctctctcttctttttgttgagacatgggctcattctgtcacccaggctggagtgcagtggtacaatcatagctcactgcagccttgaactcctgggttcaagcaatcttcccgcctcagcctcccgagtatctgggactacaggtgtgcactaccatgactggctaaaaaaatttcttttcgttgagacagggacttaccatattgactaggctggtctcaaacggctattctca

SEQ ID NO: 944246 - DNA, 803 bp, Homo sapiens
taatcaatttagccttgacaagggaaagtccgtgttgttgagcccagcgcatagcctccagctctgccaccatagccaacttgtacatggatccattgaataagcacttgatggtgagggaaacaggtggattagcattcacaaaatgtgccattttgactacctggttactgagaatctcttctttaatagatgttctttagggagcattcacacaagagacaagtgtcttcccactttatgctccctctgaaaggtccatcttcttctccaggcctcattgtcaccagtatttctttttttttctttttttttgagacaatctcactctgttgcccaggctggagtgcagtggcgcgatctcggctcactgcaagctcygcctcctgggttcacgccattctcctgcctcagcctcccgagtagctgggactataggcgcccgccattgcgcccggctaatttttttgtatttttagtagagacgatttcaccgtgttagccaggatggtctcgatttcttgacctcatgatccgttctgaccccccgggggattttccttcatcattttccttctaggccacccttgagtggggctacaatcctgcagccatccacttctggttggtatcagcatggcttgcagaaccatcagacctcaggaacttcacctaggtggaaagcactagaggaagactaagggtgaggggtgaaggacttgctccttcctcatggttcctgtttgctttcttcctgcttcttgtttctgtgcgtgttcgcctagaatgcttcttgaacctcc

SEQ ID NO: 944247 - DNA, 661 bp, Homo sapiens
taacagcccatttctggaacattcctggaagacagtggtaaaaaacaaaccttcccagtgggcagaaacttagacacagcactgtactttgttgttaattttgcttgaaaggagaaatggccagacgtgtgattacataacaattcatgggctatagtcaatggtttggtgagataatcagggacttgaaagacatatgattgagaaattggtgacaaagaaatgtggggaataattacatagataaatctctcggaatgggcaaagaatgtgaagatgtggcccatgtgaatgctcaycaaagtgtgatctcactagaggataatttcaataatcaagtagatagaatgactcattttgtaaatatccatcagcatctttcaccagccacccctataattgcccattgggctcataaacaaagttggtgttggtgaaaaggatgaagattatgcatcaggtgagcaacatgaactgcaactcaccaagcccaacttggctaaggccaccactgagtccccaatctgccagcaacaaaaacaaatacaaacctctgatatgacaacattcccagagtaatcaggcatctacttggtggcaagttgatacacttgactgcttctatcatggaaggagcagtatttcatccttactggaatag

SEQ ID NO: 944248 - DNA, 594 bp, Homo sapiens
tgcggccacatcaaccctcgggaacaggtggccccgaggagacgctgttgcttcagcatcggacaagccaggtctctgttggggtttcagaatcttcttgagtccctcactcttttctctcagttctacatgggggaaaaaaggaaggcgagttctcaggaggaatgctcatcaagcaagctggagttcgtatggaaaatgcatccatccggaagagaacacacaagtgccttgcttccctgcaccgggtgtttccactattgtcctcctggtcctccccattagggaggaacagcccactgggtcacgtctgggctcttgcttcatcgaagctcctataccccagttcgggggaaaattcactctaaggccttcagctctcacagagtaaggaaacgcactcacctccaattagattacaaattggctgggtgcagtggctcaygcttgtaatgccaagactttgggaggtcaaggcaggtggattacctgaggtcaggagttcaaaatgagaccagcctggccaacatggtgaaaccccgtctctactaaaaatataaaaattagctgggcatggtggtggacacctgtaat

SEQ ID NO: 944249 - DNA, 537 bp, Homo sapiens
tgggaggccaaggcaggcagatcacgaggtcaggagatcgagaccatcctggctaacccgttgaaaccccgtctctactaaaaatacaaaaaattagccgggtgtggtggcgggcgcctgtagtcccagctacttgggaggctgaggcaggagaatggtgtgaacccgggaggcggagcttgcagtgagccgagattgtaccactgcactccagcctgggcaacagagtgactccgtctcaagaaaaaaaaaaaaaaaaaagagatcaagaccatcctggccaacttggtgaaaccctrtctctactaaaaatacaaaaaatttgctgggcattgtggtgcacacgtgtcttcccacctactcgggaggctgagtcagaagaatcgcttgaacccgggaggcggaggttgcagtgagccaagatcacaccattgcaccccagcgtggtgacagagtgagactccgtctcaaaaaaaaaaaaaaaaaaaaaaggcagagaaattgcaagcatttcagagggctgccagtggatgggac

SEQ ID NO: 944250 - DNA, 717 bp, Homo sapiens
ctgtgcttttggagacacttggacaatgtccaagaaataattgcccagaccaatgtcatggaattttccccctttgttttcttttagtagttttatagtttcaggtcttatatttaagtctttaatctattttgaggtgtttttttgtatgatgtgagataagggtccaacttcmctcctctgcctacggatatccaattttcccaacatcacttatgaagagactgtcttgtctccattgtgtgttcttgtcacctttgtcaaatttcaattgattgtaagtgtgtgggtttatttctgggatctctttgctgttctatcggtcattgtgtatttgtcagtaccatgttttgattactatagctttgtaatagatttcaagtgcctctagctttcttcttttgtctcaaaattgctttgactattcagattcttttgtggttctatacaaattttaggatttttttatttccatgaaaaataacattggaatgttgatagggattgcattgaatctgcagatcattttggttagtacggacatatcattcttccaatccgtgaacacgggatacctttccatttatttgtgtcacttacaatttctttcaccaatgttttatagtttccagtaagaaggtctttcacctccttggttaaatttactcctaagcatttcattttttggtgctattgtgaatgaaattgatttcttaa

SEQ ID NO: 944251 - DNA, 717 bp, Homo sapiens
ctgtgcttttggagacacttggacaatgtccaagaaataattgcccagaccaatgtcatggaattttccccctttgttttcttttagtagttttatagtttcaggtcttatatttaagtctttaatctattttgaggtgtttttttgtatgatgtgagataagggtccaacttcactcctctgcctacggatatccaattttcccaacatcacttatgaagagactgtcttgtctccattgtgtgttcttgtcacctttgtcaaatttcaattgattgtaagtgtgtgggtttatttctgggatctctttgctgttctatcggtcattgtgtatttgtcagtaccatgttttgattactatagctttgtaatagatttcaagtgcctcyagctttcttcttttgtctcaaaattgctttgactattcagattcttttgtggttctatacaaattttaggatttttttatttccatgaaaaataacattggaatgttgatagggattgcattgaatctgcagatcattttggttagtacggacatatcattcttccaatccgtgaacacgggatacctttccatttatttgtgtcacttacaatttctttcaccaatgttttatagtttccagtaagaaggtctttcacctccttggttaaatttactcctaagcatttcattttttggtgctattgtgaatgaaattgatttcttaa

SEQ ID NO: 944252 - DNA, 619 bp, Homo sapiens
cacaatggcattgtctaggttgtcttccagggttttaatcactttaccttttacattgaagtctttgatccatcttgagtttatttttgtatgtggtgaaaggaagaggtccagtttcaatcttctgcatatggccagcctgttatcctaacatgatttgttgaacagggagtcctttcaccattacttgtttttgtcagctatgttgcagatcagatgtctgtagatgcacagctttaattctgggctttctatttggttccattcatcggtgtgtttgtttttttctccagttccatgctgctgtgattactgtagctgacagagcaggagcaccatcatcttggacaaacactgacactttaagttccagctccctttctagcctcatacatttcaaggaaatcacttctcctctaactacaagcagacagaaagagcagacagtaaaacacagataakacagctcgggcacagagagaagtaaggggaaagtctcttgccaaacttcactctcatacaatgggccccagtaaaacagtgggccgggccttaataagcacattcatttcccttcacgtgcagatagggaagctcaagcagactcaggggatatgcc

SEQ ID NO: 944253 - DNA, 839 bp, Homo sapiens
caggatgcttctcaaatgccaagaattctaccatgcccctggccagctccatcagacaagatgggcagaaggcagcactgccccaaggtggcactgccagggacttccatccccctccaggtgagtagtcactgcatcttgttttattcaycttcacctccccagcccccagcctggcccagagtaagcactcagtgattagtcactgactgaatgaatagatggtgagcaggcaagggaagatacctgggttccccacaggccaggcagtccatactggtttacccactggggtggtctgtcttccttgtcaattttctatcacctttcgcctggggcctatgatttccccacaaaggattatcagtggtagagatgcaaagatggtctccctctctctcttcccaggatctgagctttcagtataaagaggcttcctcctgactgggtctcccttaactttggagggtcctgagttttggagggcttccctctccttggaggagagagcaggaggctgggtgtagaatcttttcagataaagaagtcctcttggattttcccattgacttttaagacctgggagggtccaacctatagatcatgaaggtccctgcaggaatgggaagatgtcaggggggaccttggtccctaccatgagaaatgaggacagtagagcactacactagccttggagcccagataactagcctggccccatctcttgcatgtactggctctgtagcttggaagaaaccacttcaccttattgagtctcagcttcctctaaggaccacttccttgggccaccaacatcagaatcatttgggagagcttgt

SEQ ID NO: 944254 - DNA, 685 bp, Homo sapiens
tacaggatgcttctcaaatgccaagaattctaccatgcccctggccagctccatcagacaagatgggcagaaggcagcactgccccaaggtggcactgccagggacttccatccccctccaggtgagtagtcactgcatcttgttttattcaccttcacctccccagcccccagcctggcccagagtaagcactcagtgattagtcactgactgaatgaatagatggtgagcaggcaagggaagatacctgggttccccacaggccaggcagtccatactggtttacccactggggtggtctstcttccttgtcaattttctatcacctttcgcctggggcctatgatttccccacaaaggattatcagtggtagagatgcaaagatggtctccctctctctcttcccaggatctgagctttcagtataaagaggcttcctcctgactgggtctcccttaactttggagggtcctgagttttggagggcttccctctccttggaggagagagcaggaggctgggtgtagaatcttttcagataaagaagtcctcttggattttcccattgacttttaagacctgggagggtccaacctatagatcatgaaggtccctgcaggaatgggaagatgtcaggggggaccttggtccctaccatgagaaatgaggacagtagagcacta

SEQ ID NO: 944255 - DNA, 794 bp, Homo sapiens
ttgctgtcccttgctacaggatgcttctcaaatgccaagaattctaccatgcccctggccagctccatcagacaagatgggcagaaggcagcactgccccaaggtggcactgccagggacttccatccccctccaggtgagtagtcactgcatcttgttttattcaccttcacctccccagcccccagcctggcccagagtaagcactcagtgattagtcactgactgaatgaatagatggtgagcaggcaagggaagatacctgggttccccacaggccaggcagtccatactggtttacccactggggtggtctgtcttccttgtcaattttctatcacctttcrcctggggcctatgatttccccacaaaggattatcagtggtagagatgcaaagatggtctccctctctctcttcccaggatctgagctttcagtataaagaggcttcctcctgactgggtctcccttaactttggagggtcctgagttttggagggcttccctctccttggaggagagagcaggaggctgggtgtagaatcttttcagataaagaagtcctcttggattttcccattgacttttaagacctgggagggtccaacctatagatcatgaaggtccctgcaggaatgggaagatgtcaggggggaccttggtccctaccatgagaaatgaggacagtagagcactacactagccttggagcccagataactagcctggccccatctcttgcatgtactggctctgtagcttggaagaaaccacttcaccttattgagtctc

SEQ ID NO: 944256 - DNA, 685 bp, Homo sapiens
tacaggatgcttctcaaatgccaagaattctaccatgcccctggccagctccatcagacaagatgggcagaaggcagcactgccccaaggtggcactgccagggacttccatccccctccaggtgagtagtcactgcatcttgttttattcaccttcacctccccagcccccagcctggcccagagtaagcactcagtgattagtcactgactgaatgaatagatggtgagcaggcaagggaagatacctgggttccccacaggccaggcagtccatactggtttacccactggggtggtctgtcttccttgtcaattttctatcacctttcgcctggggcctatgatttccccacaaaggattatcagtggtagagatgcaaagatgrtctccctctctctcttcccaggatctgagctttcagtataaagaggcttcctcctgactgggtctcccttaactttggagggtcctgagttttggagggcttccctctccttggaggagagagcaggaggctgggtgtagaatcttttcagataaagaagtcctcttggattttcccattgacttttaagacctgggagggtccaacctatagatcatgaaggtccctgcaggaatgggaagatgtcaggggggaccttggtccctaccatgagaaatgaggacagtagagcacta

SEQ ID NO: 944257 - DNA, 632 bp, Homo sapiens
tacagagctcagtccagtgatttatttatttcatatattgtatttttctgccctaaattttacacttgtttcttttttatattttctgtgtctctgctaagatttactatcttttgatttatttcaaatatatttttctttacttttaagtgtagatataatagtaggtttcaagttattttctgataattcagacatctcgtttatctcagggcattagactgttgattttactgtcccttgataatttgtcacatttttctattttgttttgcatatatgtcaatttgttttggatttcattctgtacactttgttcattctgcattctgatatattcctctgaagagtgttgatttttttaagctattaatccagtaagattcagactcttagccctgaaccaccttttgaagatggaggtttacatttcagttgaattttctaaaattttagtgtgctgctttaatcctgtcctctgcctgcctggtctaakggtctacctgagacatgtgtgggactcatacatggaaatagaggctctccctctctgactctctttcctccagttttacctgcttactgttcaccagtggaaatctcccagaactccttccctccatttcaggcca

SEQ ID NO: 944258 - DNA, 742 bp, Homo sapiens
tactattgagtttgaacatcttttcatatgtttattggccatttatgtaaatacagtcttcacagttatgcagccatttaaaatgccaggcactgagaacagagggcaggggtgggaggaagagagaggctccagcccagggctgtggccaggatgcctccggcctctgggttccccacttcctctgcgctctcagacaggcctccctctggggtacacagtcctcaggatgcaggatggcggctcggcaagatctcagctccaggaaatttgcatttcaaaagggaactctgctccagatcaaataattaaagactgcaacctgaacagctgggagctcagcgccggagcctttaaagctaagccaaccatcaacaaatacggtggccaacagcttggtcgactctttcgaatatgtctccacccmctctcttccactagagggcacacttttggggtggaagcacggagactctgcccatccctggaattccctcctgggtgggacagctgtgcacatttgacaacgggatggacccataagtgaaacccccaaggtgcctatggcctgtcacctcctgccccactcttggaggctgcagggctgcgggtactggccagctcccggccagcaggaccacgccttccaggtgtccacctctggacatgccccactgctcctggccggccaccttttgccctccccaaagcttccctcgccccaaaccatctccaaggtcaa

SEQ ID NO: 944259 - DNA, 814 bp, Homo sapiens
tgaaagtagagatcatgttatttttaatttatcatttttctataatatgcagttaataacattaccaacttccatgggttattgtgatgattaaacaaaataacgcacttgagacactgatatagtgattaaaatttctaactcagggactgaaatgcctcagttttaatcccagtgctgtcactagctgtggaagcttgaacaaattatctttttaaaaaaatgacttcattgaagtataattcacaccacacatttcactcatttaaagtgtgcaatgcaattatttttagcatattcacatatatgtgcaaaccttaccacagaacattttcattgccacaaaaagaaagctctataccctttagctatcatcctgtcatccaccctcccctacttccccagccctaagcaaccactaatttactttctatctctgtaaatttccctgttctggacattttataccaattgaattatacaataagtacttttttgtgactggtttcttwcatttagcataatgttttcaagactcatccatattttagcatgaataaaactttatttatttttatggctaaataatagtccattacatggatatactacattttatttatctatttgttagctgataagtatttgggtgtccatcttttgactattataaataatgctgttataaacatttgtgtacaagtttttgtgtggccttaggttttcatttctcttgggtatataaccataagtggaattgctgggctatagggtaaccgtatgtttaatcatttgagaaactaataggctgttt

SEQ ID NO: 944260 - DNA, 601 bp, Homo sapiens
cctcccaggttcatgccattctcctgcctctcgagtagctgggactacaggcgcccaccaccatactcggctaattttttttttttttggtatttttagtagagacagggtttcaccttgttagccaggatggtctcgatctcctgacctcgtgatctgcccaccttggcctcccaaattgctgggattacaggcgtaagccaccatgcccggcctttttttttttttttttgagacagtcttgctctatcccccagcctggggtgcartggcatgatctcagctccctgcaacttccgcctcctgggttcaaacgattcttgtgcctcagcctcccaagtaactgggaccacagggcatgcgccaccacagctggctaaattttgtatatttagtagagatggaaaccatgttggccaggctcgtcttgaactcctgacctcgtgatctgcccaccttggcctcccaaagtgctagtattacaggcgtcagccaccatgactgtcccatttcctgtgttttgacccccccaaaaatatccaaggggcaaagacaccccgtaaacatcctccaaccccaccacagacctctgaaggattct

SEQ ID NO: 944261 - DNA, 819 bp, Homo sapiens
aggaggcaagtgtggacccttctccacagcagaagagccatgtgaggtccgctgtgactggtgactccttgggaggggctctctggtggtccccgggagcccacacaaggagggctcacagtgcacaggctgcagccacacagccacagtgacagagcacagcagagggagcactggaggacgcttcctgccgggaggacagtcagagctgaacggccatcgcagggcgtggggccagcactgccttcccrcaggagcccgtgctctcaatcagttttccacagggctcccaactcccaccaggggctcagaggctattcatttgatctcacacctctgttaccaacagcggccacacccacacttgccatgggaaagcgcggggcagcaggtgggtcctgggccagccaggggagcgggcggggcagaggtgcggctctcctggagaagggtctttggggaggcgagagaaggcagcacttgtcacagagtttccttagcccccgtctcccctcctgcacctgcttccatcactgctgcagaccacgagaagggtgggtgccagaaccctgccccccttaggaccccatgcacatcgtcacaggcccctcaagaaaacacttgcgacagaccccaacaggtctatatttagagctgaactttaagccaaatatcaaggagttctggagcggaattcttgatgggctgggccccttagtgtgtgcctggaaaaccagcgagccgccatcacctggtcccatcctgctcatgcagctcctccagttcttgcaagcttttcatggacagtggccttgccca

SEQ ID NO: 944262 - DNA, 794 bp, Homo sapiens
cagtccctcatagctagatgtgaccttgtgactaagttctggcctatgagaagtaagacgtatctcatggtgttttgagaaatctacttaaaaatgtaacatgacaggaaacagtggctcatgcctgcaatcccaacacttttggaggccaaggtgggataattactttgaggctaggagttcaagaccagcctgggcaacatggtaagaccctgcctctacaaaaaagaaaaatgaaaaaaaaaaaaaaaaaaaaacgaagaaaaaaaggtaatgtgatgcgacttatctccttcttcttggttggcattctaccagctattgtggactatatgaggaccataccttagggatggtagaacagtgaatgggaagaaacctgagtctctgaggatcactggagttaccacactagccacagactacctacctgcacatttcttacttttttttttcttttgagagggagtcaggctctgtcgcccaggctagagtgcagtggcatgatctcagctcactgcaacctccgccacaagagtttgagcaattstcctgcctcaacctcccaagtagctgggattacaggcatgcaccaccacgcccagctaatttttgtatttttagtagaaatggggtttcaccatgttggtcaggctggtctcgaactcctgacctcaggtgatccacctgacttggcctcccaaaatgctgggattacaggtgtgagccaccgcacccaacctgcacatttcttttattatgtttaagccttaagccaataaaattttgggttt

SEQ ID NO: 944263 - DNA, 563 bp, Homo sapiens
tttgcgggtcatcaaaatccgctgttctacagccaccactgttctgcagccaccgctgctgacacccaggcaaaaagggtctggagtggacctctggcaaactccaacagacctgcagctgagggtactgtctgttagaaggaaaactaacaaacagaaaggacatacacaccaaaaacccatctgtacatcaccaccatcaaagaccaaaagtagataaaaccacaaagatggggaaaaaacagagcagaaaaactggaaactccaaaaascagagtgcctctcctcctccaaaggaacgcagctcctcaccagcaatggaacaaagctggatggagaatgactttgacgagttgagagaagaaggcttcagacaatcaaacaactctgagctacaagaggaaattcaaaccaatggcaaagaagttagaaaccttgaaaaaaattagacgaatggataactagaataagcaatgcagagaagtccttaaaggagctgatggagctgaaagccaaggcttgagaacttcatgaagaatgcagaagcctcaggagctgatgca

SEQ ID NO: 944264 - DNA, 742 bp, Homo sapiens
tggctacctcatcagagagattccaccctgatgacccaatataaagtaataaccatcactcttcatcttccatattctgattcattccactttatggcatgtttcataccatgtgtttattgcttggtttgcttatcatccaactttccctctagaaagtaattccatgaccccagcaaccttgtctgttttgttccacacagtgtcctggaatctagaagactggcacatagttgacactcaacaaacatttgttgaataaattaatgagtaaataaatctcagacacctttccctattagattatttcttctttttcttcttctccttcttcttcctcttcttcttcttcttcttcctccttcttcttcttcttcttcctcctcctccwcctcctcttcctcttcttcttcctcctcctccttcttctttgtttttgtttttggaaactgcatagcatttcattgtacacctgcataatattttcattaacttatcccctgttggagcatattgacgttggtcccagtattttacaaatccaaacaatgctgtaatggcaatccttgtataatcaaacatctctgtccagatgggagagaagcagagtagaaggttctacgagtgagtgcatttaaatttttttagtgattgtcaaattgttttcttttacttttttttttttttaatcgagatggagttttgctcttgtcacccaggatggagtgcaatggcgtgacct

SEQ ID NO: 944265 - DNA, 761 bp, Homo sapiens
acacacaaatgttcacagaagctttatttatggtagccaaaagctgaaaacaacccaaatgttctttaatggttaaatgcataaacaatggtacatccatacaatggaatacaactctgcacatcctcgtcagctcttggtattgtcagtatttttaatttaaccattctaataagtgtgtagtggtatctcattttgttgtagtttttattgccctaataatggctaatgatgttggacgttttttcatatgtttaatttgccatgcttgagtcttttttttttttttttttcttgagatggagtcttgctctgttgcccaggctggagtgcaatgatgtgatcttggctcactacaacctctgcctcccgggttgaagtgattttcctgcctcagcctcccgagtagctgggattacaggcacgcaccaccacacccagcaaagttttgtatttttagtagagacaagatttcaccatgttggcccggctggtctcgaactcctgacctcaagtgatccacccacctcgasctcccaaagtgttgggattacaggggtgagccactgtgcccggcctgagtctttggtgacgtatctgttccagtcttttccttattttgaaattgggttgttttctttctgtcttaatttttatttttttaaaagagaaggggcctctgctgtgttgtccagactgacctcaaattccttgggctcaagccatcctcctgctttggcctcctgaggagctgagcctac

SEQ ID NO: 944266 - DNA, 602 bp, Homo sapiens
cttgaaaaagaactgggtaacagcgattttcaaggaacaagggagataaccataaggcctgactgcctgcagggccgggcagaacagagtcatatttctcttctttcagaaagtgactaggagaaatatcgctgaattcttttctcagcaaggaataaccctgggaaacgaatgcattcccagggggagktctctaaaatggccgctcagggagtgtctgtcttatgcagttgtagataagggatgaaatactccctggtctcctgcagcgccctcaggcttgctaggattaggaaattccagcctggcgaattctagtcagaccggttgactgctctcgaaccctatttcctgttaagatgtttatcaatgacagtgtgtgcccagcaggacatggaccttcatcagtaattctagtttcgccctggccttgtgatctcactctgcctctctgcccttgtgatatttcattgcctttgaagcatgtgatctctgtgacccacaccctgtttgtacacccctccccttttgaaacccctaataaaaagttactgcttttgtggctcaaggggcatcacggaacctgccaacatgtgatatcg

SEQ ID NO: 944267 - DNA, 692 bp, Homo sapiens
tccatcctgcgccctcctcctttccatcctccctgctgagacttgcctgcacgtgaggcccgcccgcgtcagtgcccctttgtgagattcgcccatgccagtgctcccgcatgagaaggtacgcgcacatcacccctgcattctcacgggacrtagggtgtgatggttcattttatgtgtcaacttgaccaggccatagggtgcccagatatttgttcaggtattattttgggctcatgagggtgtctctagatgagattaacatttgaattgaatttgaattggtagaccccataaagcagagggccctccccaacgggggcgggccccatccaatacattgaaggcctgaacatcactaaaggcagaccatccctccagcaaaccagaatcgaggtcaggattccatccggtggtttccagagggtaccttgctcttagaagatgctgagcagggaggggggaggaatagcatcgggagatatacctaatgctagatgacgagttagtgggtgcagcgcagcagcatggcacatgtatacatatgtaactaaccagcacaatgtgcacatgtaccctaaaacttaaagtataataaaaaaaaataaaaaaaacaagaccatttcataatattgtttaaaacaaaacaaaacaaacaaaaaaaagaagatgctgagcaaatggcagccgcc

SEQ ID NO: 944268 - DNA, 572 bp, Homo sapiens
cactcagctcttaacttctgtaatatgtgttctaactcctcaagttttggaatgcactgcgctggctggggtgttgggaaggcagtgaggtgcactcctgacacagcaatggcaaagcaaggtgcatgcacacagacctgctggcagggcaaagaaggcaaaacctgcctacacacatacatgctggcaagcagttaagggtgttgacatgtgcctgagggaagctgcagtgttgggagggagtgcttgggatggtgtgtggccataggagccaccctgctagagttctctgccggtcaggcatagtcagctagtttagaagctataatgtgggcccccasgggtacctgaggctaccctacaagcaagtgctgccaggctggggacccaggagaaggcagcaaataaaggggttctcaagtcagaccagccctgtctgataggcaagaccgacctgcagattcaagtgcaacagtttccctgggctaaagtctcctatgggagcaggttgagcctagggaaatgggattctctggccatgctcccctacaaatgatattgcaccaaactct

SEQ ID NO: 944269 - DNA, 588 bp, Homo sapiens
ttcagtattggttgtaatgtctcttttttcatctctgactttacttgggccttctctattttttcatagttgggctaaaagtttttatttttattatcatttcaaaaataactatttattgatcttttgtatttttaatgtcagtttatttattctttgaattttgattattttcttctaatytaagcttgttttgctcttgtttttctatctctttaagatgcattgttatgttgataatttgaagtttttctacgttgttgatgtaggcattactattataaacatttctcttaacactgctgtggccatatcacttaggttttggtatgatgtatttgtattttattttgttgcaagaaattcataaatttctgtattgatttattgattgacccactggccatttaagaacatattgtttaatttccatgtctctgtatggttcacaatgtttctctgtttattgatttatattgttattccattgtggtgtgagaggatactatatactttaaaacttgttttgtggcctaatatatggtctatccttgagaaatatccacgtgctgagaagaagaatgtgta

SEQ ID NO: 944270 - DNA, 608 bp, Homo sapiens
agaaaagtatgtaatgataatatcaaggtttcatgttaatgtggtttatgcaaagatttatgtcatcatccttccccttcaaccacaaccctattctaataaccacatcctgtgaccaaatagctcttcttttcctacaagcatcacacttattattagttactctgaggttctcaatgtgaattttagatagtgacatatcctttggccaayacttgaacaatcttcacacaagatgtgaagaacatgacaacaaactgtaactaagggtatcgaagaacatagttaaggactcctggctgtgatggccgttttcagtaagacattattctacaggacactttctggagtatgaattcaacatattagaaactacattgtggaggtttcccctgaagaaaaaaaagtagttgggaaacccgtgacaataaggatctgaaattaatgtggtatgaaagtgagggtaggtgcacagctctgggccagccacacagagttagggccactgtctcaacatctgaaagagactgggcttgaacagtgatgactacattaaccaggggcctggatctgcattgctcacacttgagcagagattggaatccagc

SEQ ID NO: 944271 - DNA, 608 bp, Homo sapiens
agaaaagtatgtaatgataatatcaaggtttcatgttaatgtggtttatgcaaagatttatgtcatcatccttccccttcaaccacaaccctattctaataaccacatcctgtgaccaaatagctcttcttttcctacaagcatcacacttattattagttactctgaggttctcaatgtgaattttagatagtgacatatcctttggccaacacttgaacaatcttcacacaagatgtgaagaacatgacaacaaactgtaactaagggtatcraagaacatagttaaggactcctggctgtgatggccgttttcagtaagacattattctacaggacactttctggagtatgaattcaacatattagaaactacattgtggaggtttcccctgaagaaaaaaaagtagttgggaaacccgtgacaataaggatctgaaattaatgtggtatgaaagtgagggtaggtgcacagctctgggccagccacacagagttagggccactgtctcaacatctgaaagagactgggcttgaacagtgatgactacattaaccaggggcctggatctgcattgctcacacttgagcagagattggaatccagc

SEQ ID NO: 944272 - DNA, 843 bp, Homo sapiens
aagcaatcctcctccattggcctccaaagtgttaagatcacaggcacgagcctctgtgacccactaattttgtaaattttaaatagtgtgatattaaatattaatgaagtcacactttatgtatacaatctgaaataattcaaataactgaaataatttttaagtatcccatgatttaaaatcatgcaggttgatctgtaaccctatgtatagtaatgtcaataatgaccctacatttttagctgacaaaaaaatttactcttattttttagaattagttttaattctgctattttaacattacataaatactttttgaatacaaccttttaataaaatgcaatatcattaaatttgctttccacagtatttcttgaggactgagtctgagttgggcagcatttgtagatttctgtatgactctagtcattttgccattcagtataatccttatattacacacacacacacacacacacacacacacacgcacacaaatgcmcacaactccaaaatgctggattcttgcctcatgaatcattgaaatttatatgaaatttatttgaaatcttattgctaaaaatttcttagcgcatttgtgcatttgaatgtgactttttcatactaaaagttttattttatatatttgggatcataattggttaccttttcttctcctttttatttttatttttatttattttttattttattattattatactttaagttttagggtacatgtgcacaatgtgcaggtttgttacatatgtacatatgtgccacgttggtgtgctgcacccattaactcgtcatttagcattaggtatatctcctaatgct

SEQ ID NO: 944273 - DNA, 768 bp, Homo sapiens
ctgccttcaagcaatcctcctccattggcctccaaagtgttaagatcacaggcacgagcctctgtgacccactaattttgtaaattttaaatagtgtgatattaaatattaatgaagtcacactttatgtatacaatctgaaataattcaaataactgaaataatttttaagtatcccatgatttaaaatcatgcaggttgatctgtaaccctatgtatagtaatgtcaataatgaccctacatttttagctgacaaaaaaatttactcttattttttagaattagttttaattctgctattttaacattacataaatactttttgaatacaaccttttaataaaatgcaatatcattaaatttgctttccacagtatttcttgaggactgagtctgagttgggcagcatttgtagatttctgtatgactctagtcattttgccattcagtataatccttatattacacacacacacacacacacacacacacacacgcacacaaatgcacacaactccaaaatgctggattcttgcctcatgaatcattgaaatttatatgaaatttatttgaaatcttattgctaaaaatttcttagcrcatttgtgcatttgaatgtgactttttcatactaaaagttttattttatatatttgggatcataattggttaccttttcttctcctttttatttttatttttatttattttttattttattattattatactttaagttttagggtacatgtgcacaatgtgcaggt

SEQ ID NO: 944274 - DNA, 709 bp, Homo sapiens
acacacacacacacacacacacacacgcacacaaatgcacacaactccaaaatgctggattcttgcctcatgaatcattgaaatttatatgaaatttatttgaaatcttattgctaaaaatttcttagcgcatttgtgcatttgaatgtgactttttcatactaaaagttttattttatatatttgggatcataattggttaccttttcttctcctttttatttttatttttatttattttttattttattattattatactttaagttttagggtacatgtgcacaatgtgcaggtttgttacatatgtayatatgtgccacgttggtgtgctgcacccattaactcgtcatttagcattaggtatatctcctaatgctatctctcccccctcccccaaccccacaacagtccccggtgtgtgatgttccccttcctgtgtccatgtgttctcattgttcaattcccacctacgagtgagaacatgcggtgtttggttttttgtccttgccatagtttgctgagaatgatggtttctagcttcatccatgtccctacaaaggacatgaactcatcattttttatggctgcatagtattccatggtgtatatgtgccacattttcttaatccagtctatcaatagactttattttaaagcagttgttggttcacagaaaaactgagcagaaggtgcagagatatcccag

SEQ ID NO: 944275 - DNA, 524 bp, Homo sapiens
gtcacacaactcactcacattgacacacatacacaccaaccccacacacaattcacatacatacacacacatatacacccacatacacaaccacaccattcactgacattaatacaaagtcatcacacagttcactcccacacacacacatacacctcacacacacaggcacacaattcacaccaacaaaatcacacagttcactcattcacacacatacacccacatacacaaattcacactgctcagtcacatttacacrccattcaaattcacacacatatacacctacatacacacagttcactcacatcacacacatatacacccacatacacacagttcactcacatcacacacatatacacccacacataaacacagtcacacaattcactcacgttcacacacacagttcactgacattcgcacacatacacacacaccacacacaggcaattcagtcacatggccgaaagccagtccttaccttcctacagttcctttcccagtgtcacctcagc

SEQ ID NO: 944276 - DNA, 669 bp, Homo sapiens
gcaacagtggaaaaatgttcccttgtcttctcttctaatacccttcagtctgggagtggagaggccctgcggctcagaaaaggctgaagatgagagctggggggacatgttctgtcagcccctgctcatcccggacacaccccaagctgtaccttctccccagatacctctcctttctttctttccttttttttttgagacggagtctccctctgtcgcccaggctggagtgggctccctctgtcacccaggctggagtgcagtggcgcgatctctgctcattgcaagctccgcctcctgggttcacgccattctcctgcctcagcctccccagtagctgggactacaggcggccgccaccacgccctgctaatgttttgtatttttagtagagacagggtttcaccgtgttasccaggatggtctcgatctcctgacctcgtgatccgcccacctcggcctcccaaagtgctgggattacaggcgtaaaccaccgcgcccggcctttttgagacggagtctagctctgtcgcccaggctggagtgcagtggcgcgatctcagcacactgcaagctccgcctcctgggttcacaccattctcctgcctcagcctccagagtagctgggactacaggcgcccgccaccacgcccggttaactttttttcc

SEQ ID NO: 944277 - DNA, 588 bp, Homo sapiens
tctaccacatcggcttgctctctcttgcccccacttgctctttctctcggagcccttggagaggggtatgcaaatatccgtactctaaatatcctccatatactgtgtatttcctaaaatcaacaaggacattaggctgcacagccagagaacaaccatcaaaatcaggttaatattgatccaaatccatctatcaacagaagcaacatcaagttcaagacccttttgaaagcaatgataccagccatttactccatccctaaaggactgagggtgctgcgaatttaaccgtatcaatgcagtctttttgatgttatttactgaaggaaatggatgttctttaaaatatgtatttatttatttttcttttttgagacggaatcttgttctgtcgcccaggctggagggcagtggsacaatcttggttcactgcaacctctgcctcctgggttcaagaggttctcctgcctcagcctcccgagtagctgggattacaggcgcgaaccaccacgcccggttaattttggtatttttagtagaggcggggttttaccatgttggccaggctggtctcaaactcctgacatg

SEQ ID NO: 944278 - DNA, 635 bp, Homo sapiens
gacagcaattttccactgccttctaatcgcaagtgagtgccttcctaagaaagggactctggaagaagtggtgtccaggcttcaaccccaagtgatatggaaaaaagcacaaaacagggggaaattgatttagtaccaacagacaatatctccaacttaaaatatcttgaatatttattcctgaatatattacccctttctaatatctctctttgcattttccttatttgtacttacatatatatttgatgaatttttagcatttttagtaatttactaaatctatatttaatagaaatattaaacctaatataatgtatagcattatccgatatagaagatcttaaatgtcattaattaaatgttagcctcttggattttaatttatataaagcttaataatgtgaaaatacatgaagatcaacmaaatgaaaagagcaaaaattattcacaaattgctataacaaaggagtcagccaccatcttttgcattttggcagagactcaaagacaggcaaagaagtaggaaactttatagtggttaaaaaggacctgattggaggctgttggcatggggaatgcttaaggggtaactagaagtggagtatcctatgtaattgggtaggatgcatatt

SEQ ID NO: 944279 - DNA, 628 bp, Homo sapiens
tgttgggtcttagaaagactaaggtgtagatgcctgtccagatattggggaggcagatataggttgacattccacataagaagaatataccttggctggatagacagaactggttgtgtatgtggaaatgtgtgtgagtttgttgttttcattttcccatactcctagagtacttgccaatgtagctccggtgagtggctggaaaggggtgctgggagcaaactgagtggctccctgtgttctattttctcattggagaaaaaaagttttgtatctactaggaaccatttgagagagtgattgaaagaggggatgagaaggcattcattagtgttgggggcttttagcctgatttggactaggcgggcattttttgcccttctgaattgttcttccagtgcccagacttcagggttgattccctcctcaagcaggaggctacaaatgcrtaacttgttccccatattcatgtagataatggctccagctttggctaatatgtccctccctaaaatggtatgggactttcaggcataacaagaaaggcatgtgaaaagagcaaagtctcccaattacaaccaaggaggtgggagaaataccttattataggccatcccaggattcctcg

SEQ ID NO: 944280 - DNA, 474 bp, Homo sapiens
cctggggagggtaacccctctcctcagcaactcatccctcatgtccctggcctctctctctgctctctccatcctctgttcaactctgcctgagcccagggcttttacaggcctcagaggggagaaagtgggcaccatggwtggccatggggcaggcccagaaaatgcacaagttcccactcgtgtcagcaggactggcagcccagcccacagccttcagaccctccctggccagaaggaggggcttcactggggacttgcccccttctgcccaggagactgtctgcctcccagcgccatccatggcacctaggctgctcatggcaaggggcctgtaggccagcaccagttgccctcagcccatcttccctcagcttccccgtggctgaggtggcaggaggctggtgtgtcaactttgccctgagcatgcacacgcccagctaggctgtaacagcactggggcttggccccaac

SEQ ID NO: 944281 - DNA, 474 bp, Homo sapiens
cctggggagggtaacccctctcctcagcaactcatccctcatgtccctggcctctctctctgctctctccatcctctgttcaactctgcctgagcccagggcttttacaggcctcagaggggagaaagtgggcaccatggttggccatggggcaggcccagaaaakgcacaagttcccactcgtgtcagcaggactggcagcccagcccacagccttcagaccctccctggccagaaggaggggcttcactggggacttgcccccttctgcccaggagactgtctgcctcccagcgccatccatggcacctaggctgctcatggcaaggggcctgtaggccagcaccagttgccctcagcccatcttccctcagcttccccgtggctgaggtggcaggaggctggtgtgtcaactttgccctgagcatgcacacgcccagctaggctgtaacagcactggggcttggccccaac

SEQ ID NO: 944282 - DNA, 474 bp, Homo sapiens
cctggggagggtaacccctctcctcagcaactcatccctcatgtccctggcctctctctctgctctctccatcctctgttcaactctgcctgagcccagggcttttacaggcctcagaggggagaaagtgggcaccatggttggccatggggcaggcccagaaaatgcacaagttcccactcgtgtcagcaggactggcagcccagcccacagccttcagaccctccctggccagaaggaggggcttcactggggacttgcccccttctgcccaggagactgtctgcctcccagcrccatccatggcacctaggctgctcatggcaaggggcctgtaggccagcaccagttgccctcagcccatcttccctcagcttccccgtggctgaggtggcaggaggctggtgtgtcaactttgccctgagcatgcacacgcccagctaggctgtaacagcactggggcttggccccaac

SEQ ID NO: 944283 - DNA, 727 bp, Homo sapiens
ccaggctttttttggttggtaggctttttattactgactcaatttcagaactcattattggtctgtttaggaattcagtttcttcctggttcagtcttgagagggtgtatgtgtccaggaatttatccatttcttaaatatatattcatttatattagtccattatcatgctgctaataaaggcatacttgagattgggcaatttacaaaagaaggaggtttaatggactcgcagttccacatggctggggaggcctcacaatcatggtggaaggtgaaaagcacatctcacatggcagcagacaagagaagaggacttgkgcagggaaactccccttcataaaaccatcaaatctcatgagacttattcactatcacaagaatagtatgggaaagacctaccccatgattaaattacctcccaccaggtccctcccacaacatgtgggtattatgggacctacaattcaaggtgagatttgggtggggacagggccaaaccatatcattccaccaccggcccctcccaaatctcatgccctcatatttcaaaccaatcatgccttctcaagagtaccccaaagtcttatttctacattaactcaaaatccacagtccaaattctcatctgagacaaggcaagtcccttctgcctatgagcctgtaaaatcaaaagcaagctagttacttcttagacacaatgagggtacaggcattgaataaatgt

SEQ ID NO: 944284 - DNA, 727 bp, Homo sapiens
ccaggctttttttggttggtaggctttttattactgactcaatttcagaactcattattggtctgtttaggaattcagtttcttcctggttcagtcttgagagggtgtatgtgtccaggaatttatccatttcttaaatatatattcatttatattagtccattatcatgctgctaataaaggcatacttgagattgggcaatttacaaaagaaggaggtttaatggactcgcagttccacatggctggggaggcctcacaatcatggtggaaggtgaaaagcacatctcacatggcagcagacaagagaagaggacttgtgcagggaaactccccttcataaaaccatcaaatctcatgagacttattcactatcacaagaatagtaygggaaagacctaccccatgattaaattacctcccaccaggtccctcccacaacatgtgggtattatgggacctacaattcaaggtgagatttgggtggggacagggccaaaccatatcattccaccaccggcccctcccaaatctcatgccctcatatttcaaaccaatcatgccttctcaagagtaccccaaagtcttatttctacattaactcaaaatccacagtccaaattctcatctgagacaaggcaagtcccttctgcctatgagcctgtaaaatcaaaagcaagctagttacttcttagacacaatgagggtacaggcattgaataaatgt

SEQ ID NO: 944285 - DNA, 647 bp, Homo sapiens
agtcagctccctcctcctcaccacaggccttcgaatttgggaggcacagtcccacccagcagtgtgctgggaaatgttcaacttagagttccagtttagttatttttctggtaaatattccagtatatgaatgtattgaaatgttatttatccaattcatgcagataatgacattaaatacatatcacacaaaaactaaaaacagtcaatatatcgccacaccctaaattctgtccaaagtgtgtaaagacctactcatatttatttcgtttttccttttttgagacagggtctcactctgttgcccaggctggagtgcaatcatggctcactgcagcctacatctcccgggccaggatttgtaagtggcttgcaatgtttgcactacaaacgattctgctgtgaacatccatgtgctcctgggctggtgtgtgaggtttagcatacacacacatatcttgcacttcaackgacagtgctacgcccatctccaggggcctcctcgtctactcccagcccatgcttggcctgtaagacttcatacttttgccagctagatgggtgtgaattggcatctcactgaggttttaatttatattaactgattcccagtggtattaagcatcattgtaagtgattactggacc

SEQ ID NO: 944286 - DNA, 647 bp, Homo sapiens
agtcagctccctcctcctcaccacaggccttcgaatttgggaggcacagtcccacccagcagtgtgctgggaaatgttcaacttagagttccagtttagttatttttctggtaaatattccagtatatgaatgtattgaaatgttatttatccaattcatgcagataatgacattaaatacatatcacacaaaaactaaaaacagtcaatatatcgccacaccctaaattctgtccaaagtgtgtaaagacctactcatatttatttcgtttttccttttttgagacagggtctcactctgttgcccaggctggagtgcaatcatggctcactgcagcctacatctcccgggccaggatttgtaagtggcttgcaatgtttgcactacaaacgattctgctgtgaacatccatgtgctcctgggctggtgtgtgaggtttagcatacacacacatatcttgcacttcaacggacagtgctacgcccakctccaggggcctcctcgtctactcccagcccatgcttggcctgtaagacttcatacttttgccagctagatgggtgtgaattggcatctcactgaggttttaatttatattaactgattcccagtggtattaagcatcattgtaagtgattactggacc

SEQ ID NO: 944287 - DNA, 660 bp, Homo sapiens
aggaaaggacagtctcttcagtaagtggaccaggaaaattggatatcagcatgcagaagaaggaacctagacccctgtctcccaccacacacaaaaatcagctcaaaatggattaaagacataaatgtaagactcgaaactaggaaagtactagaagaaagcatagagaaaatgcctcaggacattggtctggacaaagtgttttttttttttataagacctcgaaagcacaggcaacaaaagcaaaaatagacaaatggggaatgcaacaagccaaaaacatctgcatggcaaaggaaacaatccacagagagaagaggcaacctatagaatgggagggaatatttgcaaactatccacccaacaaagaattaatgtccagaacacagaaggagctcaaataactcaacaggaagaaaaaaaaatacaatttttaaatgggcaaaagacttgaataracatttctcaaaagaagacatgcagatagccaacagataacatgaaaaacaaatgttcaacgttgccagtcgtcagggaaatacaataaaaccacaataagatattatctcaccccagttaaaattgctataatcaaaaagacagaacatggcaaatgctggcaagaatgcagagaaaggggaactcggccactgttggtgg

SEQ ID NO: 944288 - DNA, 721 bp, Homo sapiens
tctcccattgccctgtgtctcctccagcccctctcttttctacaaggtttgtgacatttctccagtcataatcacctccagagaagagcagctcttagcctgaccctgtgttggctgtggtgcttggagctggggggatgaggaggggcaaggcagactgttcccaagatactcacgagcctgcacagggatgagagagaccgaaacaacgacagyccatccaatgtgaaatggagtcaggaagtcattctagagaaagagtgttttcttctttgggaggtgttggggaagctgacaaaggctttctggaggagccagcctcaaagttttgagggatgaataggagtctgttgggtggccaaggtccatgggaggcagtgggtattggttaggatcttggccaggagccagaagcttctgggccttcaggaaagaaccagaatccaaggtccaagaccctagcccagttaccctcagcccacatgacgatgcatatcagctcctctggcctcacctcccagctctccctgccctcccaaacccctccagggcgctctgaggaaatctgtctgataccaatgaagagggaacacctgagacaggagtttctcttcttttttttttttttttttttttgagacagggtcttgctctgtagcccaggctggagtgcagtagcacaatcttggctcactgcaacctctgtctcctgggttcaagc

SEQ ID NO: 944289 - DNA, 676 bp, Homo sapiens
caggtggagggagggggagagattagaagccggagaaagactcgacctccattgctggtgtcaaagaaatgtcaagaccctctaggtttattaagccaagggggaagttaagccccagagactgattcctatagtragtttgtaactcctgattcttcttctttttatttttattttttattgagacagggtctcactctgtcaccaggctggagtgcagtggtgcaatcttggctcactgcaacctccacctcccaggttcaagtcattctccttccttagcctcccgagtagctaggactacaggcgtgcaccaccatgcccagccaatttttgtatttttaccagagacagggtttcaccatgttggccaggatggtcttgatctactgacctcgtgattcgcctgccttggcctcccaaagtgctggcattacaggtatgaaccaccgtgtctggcctcctgcttcttagattagagaatagccctcttcctcattgttcctgttcagtagaagaaaacagaggccagacctccccgacttccaatcactaatctttgttttagaagaactgcctctttgattgtctgcagtcaggacaatactgtcccagctcagcccagatggcataaaagaccccaggactgttacatcttcagtgtggaaggttaaat

SEQ ID NO: 944290 - DNA, 681 bp, Homo sapiens
ctgctgtccaggtgtccgttggctggcgcccctgacctgcggactccagagcaggtttccagcggtcggggtggcctctctcaggctccattcgctggacccctatcctataacatcctcctgaaacccagcagcctcggtggaatggaagcacagtcagtgtaatgagggcgagttcctgcatttgggtcttaccttcaaaccctcccacagtgaccaggagtaagggttcttccactcagcaaggacacagagggtgaaggctgcattccaggagttgctctaggtcactcacttggagaggcggaggcagagagagcggctgggaggtatttttctgggttamgtttgtaacttgacccttcctcttcacttgttcatctatgggctgccaagtccccaatctccctcttgagcatgaaacccatgtcaccaactgtccaggccctgaggctgcaggcaggtctgagctggaactctgcaccctatgcccagatctccaccctcaccctccagtcagatgcttccccttggctggcaccaggctctgtggttccaccttgtgaattcgtccacttccgtccactaccacactgttggcaccacagtcgctgtctaggcatcatcctgctgtctgctcccaggcccccgcctgagtaccatcagcctggctctgcccag

SEQ ID NO: 944291 - DNA, 682 bp, Homo sapiens
ccactgtcacgggtgcttttctggaaatctgtgcaggtccagttgggaagagggaggaggtccaaatggcttcatggagggggtgatgtttgaattggacatagatatttaccaagaagatgggtgccctcagaactaagggaacgacaagagtcaaggcttggaaccagtatagggcatgaggctggcagtggcagagggatggtggagggtaacgagggacaaagacgtcaaagtggcatttaggagacaggcaaggagggggctgaagggaagggtgttcctggcagagggaacagcatgtgcgaagatctcagagtgggaaatagtctggtgtgcttggggtgcctggggggactaaggtgcccacatctgcctgtgtgtccacagggcctgggrcagtgggcgtgagtggcgaggagcagcgctggccacctctgatgccagctgtcatgttatcaccctgtttacagcccacacataagtggtttggccaagactgcagtcaggggtctgatgggggcctctgcctggatctgcctgcgtctcaggcctgcaggatctcacacttctgggcagcctccaatcctcaaagcacctggagagtcctgggctctgagagctctgttcatcccttcagcacactgcaaggccggctgcatgagctcaccttgctctggtg

SEQ ID NO: 944292 - DNA, 604 bp, Homo sapiens
aacaataacctcccgtgaatttttttttttttttttttttttgagacagagtctcactctgttgcccaggctggagagcaatggtgaaatctcggctcactgcaacctccgcctcttcggttcaagcgattctcctgccttagcctcccaastagctgggattacaggtgtccgccaccacgcccagctaatttttgtatctttagtagagatggggtttcgccatgttagccaggctggtctcgaactcctagcctcaagtgatccacccgcctcgaccttccaaagtgctaggattacaggtgtaaaccaccttgcctggctctagcctcccatgaattttatgaacagccaggaacctgaaaatgtgacattatttggaaatagggtctttgcaagttaatcaagtgatcaagtcaaaatgaggtcatattgacatagggtggtctctaatccaaagactagcgacctcataagaaaagggaaatttagagagagacacaagaaggaggaagaccatgtgagggcaaagtagagactggagtgatgtggccacaagccacggaatgccctgggccaccagaaactggaagaggcagggaag

SEQ ID NO: 944293 - DNA, 661 bp, Homo sapiens
aagaagggaggagaagtgggcacggtggtctccggcaggcctggctttgctgagtcacgttcttgccctcatccccaccaggggcagccggggcttgtgggagcaggagtaggatcaccgcaggactggaccaccccccacccacacatgtgtgcggccgctgtctctggcagtcagtgtcagagctggtattcaagggcgggcgtgtgggccctgggctcaggggttcccgctttacttcctgaagtttctagtccttggccaggcctttgggcagccccggattgttcagtagatccccgtctggccagggagaaagctcagcctctgagtcagggatggggctgtgagcttctcggggaccagggkacaccaaggcctccccagcaggccttccaccctcctggagtgcctgggcagggcctctgcgaggttacccaggcagtgcttgatgagtcaggagaatctggaagggaggaacacctctgagcaatctgagagctgggctattggcccattttgcagcagagagggcagaggctcagggaggtgggtccctggctggggtcacatggcgtgggagaggcacagccacggcccagcgcccggtatgtctgcccagtgcctggcctctcaggacagcagcagaggaaggagccat

SEQ ID NO: 944294 - DNA, 749 bp, Homo sapiens
ccctagttcaaacaacaaccatctccagcttgaataggaataaaagcttcccactggtctccttgcttccagccttgcctccctctttccccaccctctattcttcacatggtagccacagggatccttttcaaacaagcctaatcgcagcactcccctgcttgaaaccctccatcaacactgtatcactctgagaacaaaatccacaatcctcaccacagcttacaacaccccccacgattgggcacyctgctactctctgagctatctcctgccactctctcaggtgttccagctacactggcccctgtgctgtttcctgccaggcacactctggtctaaggcctctggctgctgttctcttcagagtgcccttggcctggatggtctcatggatcaccacttcatttcattcagaactatggtcaaatgctctcagagaggtttccctaatcacactctccaaaccagcacttccctcaccctctagcctagtggttctcaacggggagtgattttgacccctggcgacagtgggcaatgtctggagacaatttgggttgtcacactgagtggttctatcagtatcaagcagttagaagccatcacgaagctaaccatccttcaatgcacaggacagcaccccctccaacaaagaatcatccagctctaaatgtcaatagtgcctaggttgagaaatcctgttccatcccagcagtacattcttttttccatatcatctgccatcc

SEQ ID NO: 944295 - DNA, 595 bp, Homo sapiens
tggcattgggtaaatacagccattccaaatggggagaaattagccaaacaaaggggctcaggccccatgaaagtctgaaatccagtggggcagtcaaatcttaaagctccaaaatgatctcctttgactccatgtctcacatgcaggtcatgctgatgcaagaggtgagttcccatgcttgggcagctccacccctgtggctttgcagggtacagcctccctccccactgcttccacaggctggtgttgagwgtctgtcgctttttcaggtgcaatggatctaccattctggggtctggtggcccccttctcacagctacactggatggtaccccagtaggtactctgtgtgggggctctgaccccacatttcccttctgcactacccaagcagaggttctctatgagggcctctgcagcaaacatctgcctgggcatccagacatttccatacgtcttctgaaatctaggtggaggttcccaaaccccaattcttgacttccatgcacctgcaggctcaacaccacatggaagctgccaaagcttggggcttgcaccctctgaagtcctggcccgagttctacgttgtcccctt

SEQ ID NO: 944296 - DNA, 481 bp, Homo sapiens
tatttcattacttaagaggttgaaatgtgaacaaattgaacacagtgagccaggttcctttgatttctgagttctttctctattttcccaattctaaatttctcaattcccaagaaacactcacatgatgggcttggcattactttatttaataagaggataacataagcatgaaagtgaagaggactctataaacgtttagaatatatgttgaaaaggaacaaaaaacacattactaatcaatagaggggagggagaatatttttcaatccagagaattcatgggcagttcacattcaaaatgcaargcaattggttctgattagttgagtcttcaacagtgtgacttaaatggtagagatttaaagaagataatggcaatgaacatttaataagagaaatagcatcaacagaactatcattcatgatatgtgataatcttccattagatatccaaaactagaagagaagggaaactgat

SEQ ID NO: 944297 - DNA, 575 bp, Homo sapiens
actagccacgtgtgctattgaatgcttgaaatgtggctagtatgaattgagatggccgtaagtgcacaatacatatcatatcttgaagaattaataccaaaaagaatataaactatctcattaatgttgtttatgttgattacatgtgaaatgagaatgtcttggacatattgcattaaataatatatgcttttaaaatttgcttcccctgtttttttccactttttagaatgtggctactggaaaattgtaaattgcattatatgtgcaattattgtaaattgtaaattgcattataatgtggcktgcattatatttccattggccagcactgttcaatggtatctctctgtcccaaccatattattctgtaatattctgattgtcttgcattggtgatattttccaaagtctgagatgtctatcagtgagaagagacacagacagcaaaatttctagtgacattcttgaatgatttccctcctttactgcagcctgggcaggtaagactgacctagttcctgaaggtgaattactaaaaacaacgcagtaaaatcgctgttatgttgcccatt

SEQ ID NO: 944298 - DNA, 575 bp, Homo sapiens
actagccacgtgtgctattgaatgcttgaaatgtggctagtatgaattgagatggccgtaagtgcacaatacatatcatatcttgaagaattaataccaaaaagaatataaactatctcattaatgttgtttatgttgattacatgtgaaatgagaatgtcttggacatattgcattaaataatatatgcttttaaaatttgcttcccctgtttttttccactttttagaatgtggctactggaaaattgtaaattgcattatatgtgcaattattgtaaattgtaaattgcattataatgtggcttgcattatatttccattggccagcactgttcaatggtatctctctgtcccarccatattattctgtaatattctgattgtcttgcattggtgatattttccaaagtctgagatgtctatcagtgagaagagacacagacagcaaaatttctagtgacattcttgaatgatttccctcctttactgcagcctgggcaggtaagactgacctagttcctgaaggtgaattactaaaaacaacgcagtaaaatcgctgttatgttgcccatt

SEQ ID NO: 944299 - DNA, 589 bp, Homo sapiens
ccaccaagcccacaagatcctcataacacacactggtctatttattcagtagctaccatgtgtcaggcaccctacaaggggtaggaaaggaaacagaaaaattcctgtcttcatggaatatacattcacgtggggaagcccatcactaaacaagataagttgatttgtggcatgtaggtattgataagtgcaayggataaaaataaggcaggaaagagcaacagaaagtgttggagtgagaggttgcaattttaggttgggagtgctgctcctactcccccgagaaggttaggaacagattgcctgattgcctgagggcaagcgcagagcgggaagaccagtgaggagggacagcactgcagtgaccaggagagagggcatggtggcttggaccagggtattggcaggggaggtggtgataagtgcttggattctggatattttttgaatgtagagtcaaaaagatttcatgagtgattgcatatgtggtctgagaagtaaaaaggcagggacgactgggagacttttggcctgagctactggaaggaaggagctgctactgtctgggttggggataaaatgggttgtg

SEQ ID NO: 944300 - DNA, 589 bp, Homo sapiens
ccaccaagcccacaagatcctcataacacacactggtctatttattcagtagctaccatgtgtcaggcaccctacaaggggtaggaaaggaaacagaaaaattcctgtcttcatggaatatacattcacgtggggaagcccatcactaaacaagataagttgatttgtggcatgtaggtattgataagtgcaacggataaaaataaggcaggaaagagcaacagaaagtgttggagtgagaggttgcaattttaggttgggartgctgctcctactcccccgagaaggttaggaacagattgcctgattgcctgagggcaagcgcagagcgggaagaccagtgaggagggacagcactgcagtgaccaggagagagggcatggtggcttggaccagggtattggcaggggaggtggtgataagtgcttggattctggatattttttgaatgtagagtcaaaaagatttcatgagtgattgcatatgtggtctgagaagtaaaaaggcagggacgactgggagacttttggcctgagctactggaaggaaggagctgctactgtctgggttggggataaaatgggttgtg

SEQ ID NO: 944301 - DNA, 597 bp, Homo sapiens
attattattttatgggagtctaagtctctttgtaagtgtctaagaactggctttatgaaactgggtgctcctgtgttaagtgcatatatatttaggatatttagatcttcttgttgaattgaaccctttaccattatgtgatgctcttcgtcatctttttggatgtttttggtttaaagcttgttttgtcagaagctaggattgcaatccctactttttcctgttttccatttgcttggtaaatttacctccatctctttattctgagcctatgtgtgtcttcacatgtgagatgggtctcttgaagagagcataccagtagatcttggctctttatccagcttgctattttgtgccttttaattggggcatttacatttaaggttagtatttacatttaaggttaatattgttatgtgtggacttgatcctgtcattatgatgctaactkgtttttttgcaggcttgtttatgtggttgcttcatagtgtcactggtctgtgtacttcagtgtgtttttatagtggctagtaatagtttttcctttaacagtttttccttccaggagctcttgcaagccaggcctagtggtgacaa

SEQ ID NO: 944302 - DNA, 608 bp, Homo sapiens
ggtgcatgcctgcagtccctgctactcagcaggctgaagcacaaggatcgattgagcccaggaggtccaggctactgtgagccatgattgccccactgtactccaccctgggtgacagagcaagacccagtgtctctctctctctctccctctctctctctccttctttctctctctctctctatatatatagctcaattcacctatttctaacagtttctcgagtatctacagataatgactataacagttaaagaaagaggaaggaaacatgaaaagtggctcaacagttaaagacaggtttattctagagaataaacctgagaggggcttctggctgatttcagttgggcgctctttcttacaaacagccatatatatatatatatatatatakagagagagagagagagagagagagagagagaaagaaagcacaaaggagcaggtaggggaagagtaaattacgtattcctcttgcattaccagaaagaggtcccaatccagaccccaaagaaggttcttggatctccagcaagaaagaattcagggcaagtccatagtaagttgattaagacagtaaaggaataaaagaatggctactccat

SEQ ID NO: 944303 - DNA, 803 bp, Homo sapiens
gatctgagcatcagagtgccagggctgagcaccaggtcccccaagcccacctcctcggccctcttgtactccgcttcccctcatcccatcagtccacaggcagtctgggtcctggctcagaacacctaaatcctggctcaggtgcaaacttgctgtgtgcctgtctcgttttcttaatttgcgaggcagggacaatggcactacctacatctcatgaattatgagaattcaacaagccattgtatgtagaagtgccaaacacagcactttggagccctgaggaatggtgggttgacagtgctcctgctgcctctgccccagccccagccccagcccagcccctccagtgcattcagggcagctagtgcaacacctggaagacgctcctcaattcagtccccctttctttgtgagaaagaccaaactgcacctggcccaggaaaacagggtccagtggtggccagctggccaccmaccactgcgtatagcatgcaactctgcgaggccctccctgatgtgcatgtggcactgtctgtgccccacactgtgcctcatgctgcatcttctgctcagaagcctggccctgttctgtccttcacaggcatgtcctctaacgtcactctcctgtcattctcacactgtctgctcacttaggtgatggggcctgtgctccaggaggggcaggcctgtctccaaaagcacatgtgcaaaagtgactcccataggggctcaggcaggatccaacactagcctgggcagggctggagataagcttggggaaggctgggctgtgcagtcacatt

SEQ ID NO: 944304 - DNA, 803 bp, Homo sapiens
gatctgagcatcagagtgccagggctgagcaccaggtcccccaagcccacctcctcggccctcttgtactccgcttcccctcatcccatcagtccacaggcagtctgggtcctggctcagaacacctaaatcctggctcaggtgcaaacttgctgtgtgcctgtctcgttttcttaatttgcgaggcagggacaatggcactacctacatctcatgaattatgagaattcaacaagccattgtatgtagaagtgccaaacacagcactttggagccctgaggaatggtgggttgacagtgctcctgctgcctctgccccagccccagccccagcccagcccctccagtgcattcagggcagctagtgcaacacctggaagacgctcctcaattcagtccccctttctttgtgagaaagaccaaactgcacctggcccaggaaaacagggtccagtggtggccagctggccacccmccactgcgtatagcatgcaactctgcgaggccctccctgatgtgcatgtggcactgtctgtgccccacactgtgcctcatgctgcatcttctgctcagaagcctggccctgttctgtccttcacaggcatgtcctctaacgtcactctcctgtcattctcacactgtctgctcacttaggtgatggggcctgtgctccaggaggggcaggcctgtctccaaaagcacatgtgcaaaagtgactcccataggggctcaggcaggatccaacactagcctgggcagggctggagataagcttggggaaggctgggctgtgcagtcacatt

SEQ ID NO: 944305 - DNA, 624 bp, Homo sapiens
gataaaaaaagacaggatctaaaaataacttgaaagtcattacctgtggagagaactttagttttagctgtctttacacagagagagaatatattactatatcaatatattacttgcttaacttaaaagaaataaatagagcaagatacatttttaaactttcaattgagattttttttctggttttagtctaaataaagttaaccaggttatatatatacagattaagagaaccacaatacttttcagtcagttatcagctttgcaagtattgttgattattagctttcagtatccttagcttttagagtaaatttcctatttattcaaatgaagttgctttcagatttcttatgacttcttctataaaaagagttgatagtaactggccctcacatattaattcaatctatatttattgaggttctctgtgkgtactatgtgtgaatagataagactgcgagatcttttacagccttcactttatcttacccgtctttgtattcataacacctagcaattgcccagcttagagttagcacaccatttcaaattaaactcagacatagtctctgaattcattcattattttattcaactactagttgaattaaactcaaatat

SEQ ID NO: 944306 - DNA, 654 bp, Homo sapiens
cacaagcattcctatacactaataacagagagcctaatcatgagtgaactccgattcacaattgctacaaagggaataaaatacttaggaatgcaacttataagggatgtgaaggacctcttcaaggagaactacaaaccactgctgaaatcaataaaagagttcacaaacaaatggaagaatgctcatggataggaagaatcaatatcatgaaaatggccatactgcccaaagtaatttgtagaatcaatactatccccatcaagctaccactgactttcttgtcagaactggaaataactactttaaatttcatatggaaccaaaaaagagcctgcatagtcaagacaatcctaagcaagaagaacaaagctggaggcatcacactacctgacttcaaactacactacaaggctgcagtaatcaaaatatcatggtagtggtacaaaaacagatacaaagaccaatggaacagaacagaggtctcagaaataacaccacacatytacaactatctgatcttagacaaacctgacaaaaacaagcaatggggaaaggattccctatttaataaattgttctggaaaaactggctagccatatgcagaaagctgaaactgggttccttccttacaccttatacaaaaatgaact

SEQ ID NO: 944307 - DNA, 617 bp, Homo sapiens
tacaaccaatgaacctatgtattgacacattattatcactaaagaccatagtttacattaggtgaattcttggtgtttacattctatgggttttgacaaatgtataatgaaatgtatccaccattatagtaccatacagaatagtttcactgccctaaaaatcatctgtactccacttactcatcccttccgccttcctcccaatccccaggcaaccagtgatctatttactacctcctcagttttgccttttccagaatgtcgtataatggtttgaatcatataatgtgtagccttttcggattggtttatttcatccattaatgtgctgcgaagkttcttccatgccttttcatggcttgctagctcattgatttatagtgcttagtaatatttcattttatgaatataccacagtttatttacctattttactgagggacatcttggctactttcaagtttcggcaattatgaataaagctactctaaaactccatatgcaggtttttgtgtagacataagtcattcaaatcatttggataaataccaaagagaacaattgctggatcgtgtggtaagacaatgtttaggctttaagaaactgtcttctaaagc

SEQ ID NO: 944308 - DNA, 647 bp, Homo sapiens
gtggtgagttcttgcccctccctagctgcctagcctctggcagccttcctcccaagcagtgtggagaagacagggcaggctgagcccacgtacaccatggtggtctggaagtgaattcacagatcctgtctctctgaacctcagaatggaatgccacaggtcttaatcctagcatgaaaagatcttagaatttcagccttcagttgcagaatcttagaattgaaacactccagaggagcatcgcgtaaacttgtraccttttggactacaggatggcacagggtgcccgtgtgcaccaccaattaggtaaactcagatttgtcatcattaaaaaatctaaattgggctgggcgcagtggctcacgcctgtaatctcagcgctttgggaggccgagacaggcagatcacaaggtcaggagatcgagaccatcctgactaacaccgtgaaaccccatctctactaaaaaatacaaaaaaatagccaggcgtggtggcaggcgtctgtagtcccagctactcgggaggctaaggcaggagaatggcgtgaacccgggaggtggagcttgtagtgagccgagatcgtgccagtgcactccagcctgggcgacagagtgagattccgtctcaaaaaaaaaaaaaaaaaaaaa

SEQ ID NO: 944309 - DNA, 647 bp, Homo sapiens
gtggtgagttcttgcccctccctagctgcctagcctctggcagccttcctcccaagcagtgtggagaagacagggcaggctgagcccacgtacaccatggtggtctggaagtgaattcacagatcctgtctctctgaacctcagaatggaatgccacaggtcttaatcctagcatgaaaagatcttagaatttcagccttcagttgcagaatcttagaattgaaacactccagaggagcatcgcgtaaacttgtgaccttttggactacaggatgrcacagggtgcccgtgtgcaccaccaattaggtaaactcagatttgtcatcattaaaaaatctaaattgggctgggcgcagtggctcacgcctgtaatctcagcgctttgggaggccgagacaggcagatcacaaggtcaggagatcgagaccatcctgactaacaccgtgaaaccccatctctactaaaaaatacaaaaaaatagccaggcgtggtggcaggcgtctgtagtcccagctactcgggaggctaaggcaggagaatggcgtgaacccgggaggtggagcttgtagtgagccgagatcgtgccagtgcactccagcctgggcgacagagtgagattccgtctcaaaaaaaaaaaaaaaaaaaaa

SEQ ID NO: 944310 - DNA, 590 bp, Homo sapiens
aggttcctgggagcacgtggtgttttatggtcacctacccgggaacactgaccctggggcctctgcaggtttcttggcattgtcacaaagggaagaagcccacctgtggctggccggctgccaggtcagagccaaggcaggcaaggccttcctgtctggcttttttttttttttttttgagatggagtgtcgctctgttgcccaggctggagggcagtggcccgatctcggctcactccaagttccacctcccgggttcatgccattctcctgcctcagcctcccgagtagctgggactacaggcgcccgccaccaygcccggctaattttttgtatttttagtagagacggggtttcactgtcttaaccaggatgctcttgatctcctgacctcgtgatccgcccaccttggcctcccgcctgccttggcctcccaaagtgctgggaatacaggcgtgagccactgcgcccggccctgtctggcttcttgaaggcagacacaagtctgcaggctgttcacgcccccatctcattatcttttctcacgggtacctcttctgatacaatcacagcaaccctggcctcggcc

SEQ ID NO: 944311 - DNA, 561 bp, Homo sapiens
ctcttgatcagttgttttggccaggacctccagtactatgttgaataggaatggtgagagtgggcatccttttcttgttccagttctcaggggaaatgcttccagttttggcttgtttagtaggattttggctttggatttgtcatagggtgctcttaatattttgaggtatgttccttcagtgtctagtttgttaaaaggtttttaacataaagcagcaccgaattttatcaaaagccttttctgcatctactgagatgatcatgtgatttttgtttttccttctgcttatataatcaatcacatttattgatttgcrtatgttgaaccaaccttgcatcccagggataaagcttagttgattgtggtggattagctttttgatgtgctgctaaactcagttggctagtgttttattgaggatttttgtgtctaggttcatcaaagttgttggtctgaaggtttttgttgttgtatgtctgccaggttttggtatcagaatgtcgctgacctcataaaatgagttagggaggagtctctctcttcaattttttagaatag

SEQ ID NO: 944312 - DNA, 644 bp, Homo sapiens
ctgataaacaactacagcaaagtttcaggatacaaaatcaatgtacaaaaatcagtagcatttctacacacctataacatccaagacgagaggcaaatcaagaatgcaatcccattcacaatagcaacaaaaaataacacagctaggagtacagctaaccaagaaattaaaagaccgctacaacaagaattacaaaacactactgaaagaaatcagagataacacaaaaaaatrttaaaccattccacactcatggataggaaaaaccaatattgttttaatggccatactgcccaaagcaatttacagattcgatgctattcctatcaagctaccaatgacattctgcacagaattaggaaaaactattttaaaattcatatgggaccaaaaaagagcccagaaagccaaggcaatcctaagcaaaaagaacaaagctggaggtatcacactacccaacttcaaactatactgcaaggctacagtaaccaaaacagcatggtactggtacaaaaacagacacatagactagaggaacagaatggagagcccagaaataataccacacacctacaaccatctgacctttgataaatttgaccaaaataagcaatagggaaaggactccctattcaacaaatagt

SEQ ID NO: 944313 - DNA, 644 bp, Homo sapiens
ctgataaacaactacagcaaagtttcaggatacaaaatcaatgtacaaaaatcagtagcatttctacacacctataacatccaagacgagaggcaaatcaagaatgcaatcccattcacaatagcaacaaaaaataacacagctaggagtacagctaaccaagaaattaaaagaccgctacaacaagaattacaaaacactactgaaagaaatcagagataacacaaaaaaatgttaaaccattccacactcatggataggaaaaaccaatattgttttaatggccatactgcccaaagcaatttacagattcgrtgctattcctatcaagctaccaatgacattctgcacagaattaggaaaaactattttaaaattcatatgggaccaaaaaagagcccagaaagccaaggcaatcctaagcaaaaagaacaaagctggaggtatcacactacccaacttcaaactatactgcaaggctacagtaaccaaaacagcatggtactggtacaaaaacagacacatagactagaggaacagaatggagagcccagaaataataccacacacctacaaccatctgacctttgataaatttgaccaaaataagcaatagggaaaggactccctattcaacaaatagt

SEQ ID NO: 944314 - DNA, 613 bp, Homo sapiens
tatgtctataaaaatttttgctgggattttgataggaataactttcaatctatagatcaaattgaaaagaaatgacacctttagtatgttgagtcttctaattcattaacttagaatgtatcaccatttattaaggtcttctttaacgtcatcagcacattgtcatttttcagttaaattcagacctaagtgttcactttctttgcagtgattgtaagtggtattgtgttttaaatttctgcttccatatgctctttgttagtatatagaaataagacggattttttgkgctcatcttatattctgtgaccttcctaaactcaattattgcaattattaattctagaatatctttttatattttagaaattcctcggaattttctacataagcaatcatgtcatctgcaaataggaacagttttgtttctttctttccaatctgtatgcctttatttctttttcttgctttactgcagtggccagaacttccagtattatgttgagtatgagtggcaagaatagacatctttaccttgtttctgatcttagggagaaaatattcagtctttcaccattaagtataatgttttctataggtttgctgtagatac

SEQ ID NO: 944315 - DNA, 613 bp, Homo sapiens
tatgtctataaaaatttttgctgggattttgataggaataactttcaatctatagatcaaattgaaaagaaatgacacctttagtatgttgagtcttctaattcattaacttagaatgtatcaccatttattaaggtcttctttaacgtcatcagcacattgtcatttttcagttaaattcagacctaagtgttcactttctttgcagtgattgtaagtggtattgtgttttaaatttctgcttccatatgctctttgttagtatatagaaataagacggattttttgtgctcatcttatattctgtgaccttcctaaactcaattattgcaattattaattctagaatatctttttatattttagaaattcctcggaattttytacataagcaatcatgtcatctgcaaataggaacagttttgtttctttctttccaatctgtatgcctttatttctttttcttgctttactgcagtggccagaacttccagtattatgttgagtatgagtggcaagaatagacatctttaccttgtttctgatcttagggagaaaatattcagtctttcaccattaagtataatgttttctataggtttgctgtagatac

SEQ ID NO: 944316 - DNA, 586 bp, Homo sapiens
tttactcttcttttcctagtttattgaggtagcaacttagattactgattcaagaccttgcatcttttctaaagtaagtttttgatgccataaatttccctctcagtgctgctttagctgcatcccagatatttagttatgttgtattttccttttaattaatttccatttttttattttcttggagacaacctctttgacacatggattatttagcagtgtgttgcttaatttccaggtgtttagagatttttcttsttcattctttctgttattgatttctactttgattccattaaggtcagagaacatgccatatatacttttaactctttcaagtgtattgagatttgttttatggctcaagatattgtctatttcagagaccgttatatggattattgaaaaagatgtgtattcttctgttaccgagtgggatgttttatatatgtcaataggatcctgatggttgattgtgttgttcagatcacctatatcctctctgattttctttctagtaattttatcggttgctgagatagaagcattgaagtcactaactgtaattgtgaatttgtctatttct

SEQ ID NO: 944317 - DNA, 557 bp, Homo sapiens
gaacatgactgggtccaagttgtccagaatgcccaacaggatatcagactgtaagaggcaaaaattaaatgaagtacaactgtcagaatacaatggaaaatctaactggaacactttgtactgggttccataatgtaaattagtcattatgtgataagatgacctcgggacccaccagacccatttatctacacttcactccatgtyctatattacctggaactaggaaggtagttgatgttcacctccaaccccaccaaaaactaacttcaaccctcatctgtctagttagggatgtcaagcatcaaacagatggaattaactggttatatagctctttaataagtcagaatgatccctacctctgaatctgaagagtcaataccgccagaatccatggggagatgttctggaggggtgacaactgggcctgcacctgctgcagaggtgcacgtagtctgagtgctgcggactcagcagacccggccactggcctcacttcattcccctgggaggaaagaccaaagtgaataaacagcttcaagtgcccaaggaaa

SEQ ID NO: 944318 - DNA, 559 bp, Homo sapiens
gctggaagctggaatgatctgcagcctgtcttactcacttgtctggtggttggggatggccatcagccatctgctggggctgggccagcactcccacacatggcctgtccatgtggctgcctggtttcctcatacatggttgtgttccaagggtgcacatsccaagagagacagaaccagggtgaagctgtattacctttcccagtctagcctcaggagtcccacagcgtcacttttgcttctttctacttactagaagtaagtcaattactaagcctggcccctattcaaagggaggggaatcagactccacctttggtaagaggtgtgtcaaaacatttatggacttgttttaaaactattacagcttaaaaaaacagatttggaaatcactggcatattgctgacatttatacccattagaagagatgaaattgcttagggagagagtaaagccagaagagacagaaggccaaggactataccctggaagatcactgacatgtagtttctcagagttagaggaaccagaaaagaagactcagaaggggaagccatt

SEQ ID NO: 944319 - DNA, 574 bp, Homo sapiens
gacctggcttcttatttctttgagaaaaggaagcaatcaaaagagaaattctatcacccccaccttttcatctaccaatcagcttgcctttatggccatatacagtaccttccctctcatggctaggcttttatctaaaaccagcccccttcatttgcttattggatcttatcccctctctcctacttaaggacaccagtccaccaaatatcctytctattctgtagcatatattttctctgttcttaaatcatttatgacttccacattttcaaatccagtggtcagctctcagtcctcagactgaggatctaataggactaacagatcttactgaatctattctcaactcttaacagaactgaatcctcccccgacactgaaacatggtcttcacttggtatcaatgaatcctctcttttggttcccctctcacttcaatagtccctcctactcattctcctttgctgggctctcgtcatcaatgagctctctttctcttttttcacttttttttcctttattttattttattttattattattatactttaagttttagggtacatgtgca

SEQ ID NO: 944320 - DNA, 574 bp, Homo sapiens
gacctggcttcttatttctttgagaaaaggaagcaatcaaaagagaaattctatcacccccaccttttcatctaccaatcagcttgcctttatggccatatacagtaccttccctctcatggctaggcttttatctaaaaccagcccccttcatttgcttattggatcttatcccctctctcctacttaaggacaccagtccaccaaatatcctctctattctgtagcatatattttctctgttcttaaatcatttatgacttccacattttcaaatccagtggtcagctctcagtcctcagactgaggatctaataggactaacagatcttactgaatctattctcaactcttaacagaactgaatcctcccccgacmctgaaacatggtcttcacttggtatcaatgaatcctctcttttggttcccctctcacttcaatagtccctcctactcattctcctttgctgggctctcgtcatcaatgagctctctttctcttttttcacttttttttcctttattttattttattttattattattatactttaagttttagggtacatgtgca

SEQ ID NO: 944321 - DNA, 633 bp, Homo sapiens
gatgtcaacttggatcctgtgtccaacaatcctcagaatgtttggatattgctctttccccagtgtacagttgttggagtgaatggccacaggtgttttaatgtggaaccagggagtcattgccatatatacttgccacaatgttgcaggactcttcccttggaacccagcctctccttcagtcccgacgttctgtatctgaaaactggggtaggtcctgaaaccaggcaaggggtcttgggtttttttgtttgttttgttttgttttgttttggagacagagtctcactctgttgcccaggctggagtgcagtggcatgatctgggctccctgcaagctccgcctcccaggttcacgccattctcctgcctcagcctcctccggtgtacctgggactacaggtgcccaccaccatgcctggctaattttttgtatttttagtagagatggggtttcmctgtgttatccaggatggtctcgatctcctgacctcgtgacccgcccgcctcggcctcccaaagtgctgggattagaggcgtgagccaccttgcctgaccgggacttggctttttattgcagtggctgcccttggtcaggggaactcctgggcgtggcacctccctttggctgag

SEQ ID NO: 944322 - DNA, 721 bp, Homo sapiens
ggtcaagtgttttgcccatttttaaattgtgttgtttgttttcttactgttgagcttccagctttttttatgtattctggacacaagtatttgtcagatatgtggtttgcaaatatcttctcccggtctgtaacttgtcttttcacccacttaactgcatctttgaaaaagcaatagctattaatattgataattttccattttttcttatttttatttgtatttattatacatatatatttgagacagagtctcgctctgtcaccatkttggagtgcagtggcatgatcttggctcactgtaacttctgcatcccgggttcaagtgattctcctgcctcagccttacgagtagctgggattacagttgagtgccaccacgcccggctaattcttgtatttttagtagagacggggtttcaccatgttgtccaggatggtctcaatctcttgaccttgggatctgcccgtctcagcctcccaaagtcctgggattacaggcgtgagccacaacacctggcctccattgttcatttattgacttttaggaatcacgcttttggtgccgagtctaagtactttttgtttaacctggtcacaaaacttttctcccatattttattttaaaaatgttagttttacttttcacatttaggtctacggtgtatttggggttaacttaggcagaaggtgtgaagcttagatcagagtttactttttgg

SEQ ID NO: 944323 - DNA, 691 bp, Homo sapiens
acatcatgagccataaggaccaggagccagcacagagcagaggagcaggagggcagagagagctggggcctcagaccacacctgacacctctgatgagctacacccagggtctcgtcctccttaggcgttgttggcctggctcggaatcttgtctggggcatccgctgagggttgaagctggatactgcccctcgagctgaactaggacacagcatgtcctcyctgggcaagcctgcagtttggtcaattcccggaaagggactttagttcctggaggaggcccagacagggagccctccctcctgcctcagctctgagccaagctctccagatgcagaggacagagactctcagcaaagcagctccctgcaagtggctgtggggcctcctccttaggcagagagagagggagagaggggtgaagacaccgtgctcctcctgaggaatctttatttttattttcaatattttttttttttgctctgttacccaggctggaacgcagtggcaccaccataactcactgtagtgttgacgttctaggatcaatcgatcctcctgcctcatccttctgagtagtgggaactacaagtgcatcactatgtcagtcaatctttttattttcatttttgcagagatggggtcgtgctatgctgcccaggcttgtcctgaactcctgggttcgaggga

SEQ ID NO: 944324 - DNA, 661 bp, Homo sapiens
atcactgtgaagctaattagcattaaccttttatgttaaagaccgagagccaggatttctccacattaaaatgtcccaactaaacacatctacattatttactatggttttatgtataatcatatcactctttatcttatttcaattaaaattctcaaaatttatctccccaataagctcaacactaaaattctttgaatcacagaaacttgaaattccttgagaaatraaatgaatggaaatgtatttgcctttcattgccctaacagtaatacgaagacccgtagttataatctcctatttccaagtattttatttctatcatctagtcacctgattaacaactggctaatctccattcaacagcgactaattcaactcatattaaaacaaatgataataatacataataccaatggatgaagctgatcccttatactaatttcatgtattctgtttattggctcaactaatttactaggaggcttcccactcacaccaactactcaactctcaataaatttaggtatagctattccagtatgagcaggagcagtaattactggtttttgtcacaaaacaaaagcatcccttgcttatttcctaccacaaggaatgcctatttaacttctctcttttctagtcatcgtcaaaaccatta

SEQ ID NO: 944325 - DNA, 636 bp, Homo sapiens
taatgctcaggctcagccctgctgtaaatggtgccaacataacgccaatgacagacaggatgccagtggagccagacaccacattggcgatgacgcagcctctgtggaccttttcaatctcatttgcaatgacacgaagcctttctatggactcctgaatcttccatctgatttgaggaaactttcaaaaaccactccctaaactgctgttctttttgctgcatgtctttgtcctcaatagccacatatggtgtaagattcttcagagcttcatagagagcatctgcctcttccctgtaccaataaaggacagatgattaagaaaggcagcttacttacctgtaaaatgagctcaataagatctattctgcataaatcacagagctgtttctataagtcaaatggaagtaaagttctaaaagataaataattcttttcaaggccgggygcggtggctcatgcttgtaatcccagcactttgggaggccgagatgggtggatcacaaggtcaggagatcgagaccatcctagctaacacggtgaaaccccgtctctactaaaaatacaaaaaattagccaggcgtggtggtgagtgcctgtagtcccagctacttgggaggctgaggcaggagaatg

SEQ ID NO: 944326 - DNA, 636 bp, Homo sapiens
taatgctcaggctcagccctgctgtaaatggtgccaacataacgccaatgacagacaggatgccagtggagccagacaccacattggcgatgacgcagcctctgtggaccttttcaatctcatttgcaatgacacgaagcctttctatggactcctgaatcttccatctgatttgaggaaactttcaaaaaccactccctaaactgctgttctttttgctgcatgtctttgtcctcaatagccacatatggtgtaagattcttcagagcttcatagagagcatctgcctcttccctgtaccaataaaggacagatgattaagaaaggcagcttacttacctgtaaaatgagctcaataagatctattctgcataaatcacagagctgtttctataagtcaaatggaagtaaagttctaaaagataaataattcttttcaaggccgggcgcggtggctcatgcytgtaatcccagcactttgggaggccgagatgggtggatcacaaggtcaggagatcgagaccatcctagctaacacggtgaaaccccgtctctactaaaaatacaaaaaattagccaggcgtggtggtgagtgcctgtagtcccagctacttgggaggctgaggcaggagaatg

SEQ ID NO: 944327 - DNA, 588 bp, Homo sapiens
aatatcctttcagattggctggtgttttatagtcccctttcaagacctaaggaagagaaaaagaaatatcactattatgaaaatggccaaaaaataaaatttagtcattcccaacacatccagtcatccacccatccacctcgccacccacccatccctccatccaacaaacatkgcttaagctcctcttcttctaggcattattctaagcattgtgtctggttgacatgatgttaaccagataatggaaattcctgttcccctggagctaccattctagagggggcaccagataacatacaagaaaaataaacacagataaacaaggacatagcaaaccatgggaactgttgtgaaaaaagtacagtaaagaggtgggattaggagtaaccagggggcttcttttgagtgggtggtcaagaggggactcttgggccaggcgcagtgactcatgcctgtaatctcagcacttctggaggccaaggcaggaggatcacttgagtccagcagtttgagatcagcctgggaaacacactgaaaccccatttctaaaaaattaaaaattagctgggcatggtggcatgcact

SEQ ID NO: 944328 - DNA, 588 bp, Homo sapiens
aatatcctttcagattggctggtgttttatagtcccctttcaagacctaaggaagagaaaaagaaatatcactattatgaaaatggccaaaaaataaaatttagtcattcccaacacatccagtcatccacccatccacctcgccacccacccatccctccatccaacaaacattgctkaagctcctcttcttctaggcattattctaagcattgtgtctggttgacatgatgttaaccagataatggaaattcctgttcccctggagctaccattctagagggggcaccagataacatacaagaaaaataaacacagataaacaaggacatagcaaaccatgggaactgttgtgaaaaaagtacagtaaagaggtgggattaggagtaaccagggggcttcttttgagtgggtggtcaagaggggactcttgggccaggcgcagtgactcatgcctgtaatctcagcacttctggaggccaaggcaggaggatcacttgagtccagcagtttgagatcagcctgggaaacacactgaaaccccatttctaaaaaattaaaaattagctgggcatggtggcatgcact

SEQ ID NO: 944329 - DNA, 588 bp, Homo sapiens
aatatcctttcagattggctggtgttttatagtcccctttcaagacctaaggaagagaaaaagaaatatcactattatgaaaatggccaaaaaataaaatttagtcattcccaacacatccagtcatccacccatccacctcgccacccacccatccctccatccaacaaacattgcttaagctcctcttcttctaggcattattctaagcattgtgtctkgttgacatgatgttaaccagataatggaaattcctgttcccctggagctaccattctagagggggcaccagataacatacaagaaaaataaacacagataaacaaggacatagcaaaccatgggaactgttgtgaaaaaagtacagtaaagaggtgggattaggagtaaccagggggcttcttttgagtgggtggtcaagaggggactcttgggccaggcgcagtgactcatgcctgtaatctcagcacttctggaggccaaggcaggaggatcacttgagtccagcagtttgagatcagcctgggaaacacactgaaaccccatttctaaaaaattaaaaattagctgggcatggtggcatgcact

SEQ ID NO: 944330 - DNA, 588 bp, Homo sapiens
aatatcctttcagattggctggtgttttatagtcccctttcaagacctaaggaagagaaaaagaaatatcactattatgaaaatggccaaaaaataaaatttagtcattcccaacacatccagtcatccacccatccacctcgccacccacccatccctccatccaacaaacattgcttaagctcctcttcttctaggcattattctaagcattgtgtctggttgacatkatgttaaccagataatggaaattcctgttcccctggagctaccattctagagggggcaccagataacatacaagaaaaataaacacagataaacaaggacatagcaaaccatgggaactgttgtgaaaaaagtacagtaaagaggtgggattaggagtaaccagggggcttcttttgagtgggtggtcaagaggggactcttgggccaggcgcagtgactcatgcctgtaatctcagcacttctggaggccaaggcaggaggatcacttgagtccagcagtttgagatcagcctgggaaacacactgaaaccccatttctaaaaaattaaaaattagctgggcatggtggcatgcact

SEQ ID NO: 944331 - DNA, 611 bp, Homo sapiens
gtcaagagatcctggccaacatggtgaaaccccgtctctactaaaaatacaaaaattagctgggtgtgatggcacatgcctgtagtcccagctactcgggaggctgaggcaggagaatcacttgaatccaggaggcagaggttgcagtgagccaagattgcaccactgtactccagcctggcgacagagcaagacttcatctcaaaaaaaaaaaaaagaaaaagaaaaaggcacactctcaataggatagagcctagaggccacaggtgaggccatggaggaaaaaacccccaacctggcacaccctggttgagtgaggttcagccagggcacacataaccttgtgctggggagaagaygtgcagcctgaatcctcattgcccaccactatcctagaccagtcctccactacctgtgcagggaccactggcttggcctcctcacagtcttccactgtggctccatgcctattgagcacaccagcaaaagggtcttctcaaaacataacccagccccacatcacaccctctctatcacacacactatgctacccttccccctctctgctccagcccccaagcctttcatatccttgtggataccgtgatgct

SEQ ID NO: 944332 - DNA, 668 bp, Homo sapiens
aaacggaccttgagtctctgtgaggctggtgggctctagtgaaggacttcacggcactgggccctggttttctgcagaatggggatgttcactttgtgacgaatgaggattgtctcatttggtgtccatggcaacctgtggagaaggggctagaatgggctgcattttacagatggagaaactgaggctcagagaggtgatgggactggcctgaggtcactcggcaggtgagagccaggattgggacctgtctgagcaagcttctgtgcccccaggcctcaggaggtggggaaggggtcacctggctgcctctcatcagaaacaatagggcttatcagaaacaatgggtgaggaagaaccaaggccagaatgcaccaagtgggccagggaggggtgggcgcaatgccagggccatgtcaggagggcrggccgagccccacaatcaccttttctgggcctgggcctgacccctgagtgcctgggccagtgggctctgctgacattggggctgctgcagtaaaccccatgtcactctgcctcttgaggcttcctgcagacagatcagccccactgtccggatgatgaaagtgaagctcagagagggcgtgggtctcacataaggtcacacagcaagcaagtattgtcgccaggtttctccccagggtgcc

SEQ ID NO: 944333 - DNA, 570 bp, Homo sapiens
ggaagcaacaaaattgtatgtaaaattttttaaaaaagaacagaaaacctaaaatccaatgttactcatgaacatagaaaaattctcaacaaaattttggcaaattaaattcaatagtatataataaattttctcagtatttgcacatctggaaatgtctttatttcaccttcagttttatttatttatttatttttttgagacggagtgtcactctgtcgcccaggctggagtgcagtggtgccatcttggctcactgcaagctctgcctcccgkgttcacgcctcagcctccggagtagctgggaccacaggcacctgccactacacccggctaattttttgtatttttagtagagacagggtttcaccgcattagccaggatggtctcgatctcctgaccttgtgatccacacaccttggcctcccaaagtgctgggattacaggcgtgagccacctcgcccagcctcaccttcagttttaaaagacagctttgctggatatacaattcttggttgatacttatttttcccgtcagcactttggcttctatccttcactgtttctga

SEQ ID NO: 944334 - DNA, 570 bp, Homo sapiens
ggaagcaacaaaattgtatgtaaaattttttaaaaaagaacagaaaacctaaaatccaatgttactcatgaacatagaaaaattctcaacaaaattttggcaaattaaattcaatagtatataataaattttctcagtatttgcacatctggaaatgtctttatttcaccttcagttttatttatttatttatttttttgagacggagtgtcactctgtcgcccaggctggagtgcagtggtgccatcttggctcactgcaagctctgcctcccgtgttcacgcctcagcctccggagtagctgggaccacaggcacctgccactacrcccggctaattttttgtatttttagtagagacagggtttcaccgcattagccaggatggtctcgatctcctgaccttgtgatccacacaccttggcctcccaaagtgctgggattacaggcgtgagccacctcgcccagcctcaccttcagttttaaaagacagctttgctggatatacaattcttggttgatacttatttttcccgtcagcactttggcttctatccttcactgtttctga

SEQ ID NO: 944335 - DNA, 607 bp, Homo sapiens
cagcacaccgatgggtcttgactctttatccaatttgccagccttttaactggggcatttagcctgtttacatttaaggttaatattgttatgtgtgaatttgatccgtcattatgatgctcgcttgttattttgcccattagttgatgcagaaaaacagcaaattttacctcaattaacaaatcttctggtgatgaggttcatttatacagtaattagtggacattaaaataaaggaagtggcttccttgctgggctyggaggtggtgtattaatctgttttcatgttactgataaagacatacccgagaccgggcaatttacaaaagaagaggtttaatcagactcacagttctacatggctggggaggcctcacaatcatggcagaaggcaagaaggagcaaataacatcttacatggatggcagcaggcaaagagagcttgtgtggagaaacgcctgttttaaaaaccatcagatctcatgagactcattcactattgcaacaacagcgcagtaaaggcctgcccccataattcaatcacctcccactgggttcctcccacgacatgtgggaattgtgggagttacaattcaagacgagattt

SEQ ID NO: 944336 - DNA, 607 bp, Homo sapiens
cagcacaccgatgggtcttgactctttatccaatttgccagccttttaactggggcatttagcctgtttacatttaaggttaatattgttatgtgtgaatttgatccgtcattatgatgctcgcttgttattttgcccattagttgatgcagaaaaacagcaaattttacctcaattaacaaatcttctggtgatgaggttcatttatacagtaattagtggacattaaaataaaggaagtggcttccttgctgggctcggaggtggtgtattaatctgttttcatgttactgataaagacatacccgagaccgggcaatttacaaaagaagaggtttaatcagactcacagttctacatggctggggaggcctcacaatcatggcagaaggcaagaaggagcaartaacatcttacatggatggcagcaggcaaagagagcttgtgtggagaaacgcctgttttaaaaaccatcagatctcatgagactcattcactattgcaacaacagcgcagtaaaggcctgcccccataattcaatcacctcccactgggttcctcccacgacatgtgggaattgtgggagttacaattcaagacgagattt

SEQ ID NO: 944337 - DNA, 678 bp, Homo sapiens
tctggaggagtagccacctggataggagagctggggaggactgacgaagcaggcctgccctaggtgcctcacctgtgggctggccattgtgaaatcagccctgttcatgtgccacctgaaaaggctaccctaccctccccccccacccccacccccracgctgggaaagggtgtggctctctgctcattaaggaagcattcccactgtggatgggtaacaaaaggcaaccctcaaggagtgaccttactaaatccaaaggaatccggcctcctctcattagtgggagggtagctgagggtgactcttggccagccggccctgagtcattgagggaagaaaggccaagcctgcatgacccatctcagaggccttgccctggacagaaagggacctggagccacccgagagataacatctgggcgggcctggggctggatccacctgtccactctgcgcacctaaggccgtgcctgccacacctccagatccaggaagttagcaggcaggcagcagtactcagggaggcctccagatcagcccccaaaggtctacactgtggaacctgcttctcctctcaggaaagacttctggcctcaccccctcttctagagcatgcgattctaatgaaatggagcttctcactggagcccaggtttccattctacccatgtcacctg

SEQ ID NO: 944338 - DNA, 643 bp, Homo sapiens
tttctaggacatccctgaaggaccgtggtgaagggaaatcttcccagtgggcagaactttgagcagtgcacctggttgtgcactttgcatggaaggagaaatggccagatatgcgattatatactgattcatgaggtgtagccaatggtttggctggatggtcagggacttgcaaaaagtatgattggaaaattggtgacaaagaaatttaggaaaggagtttgtgtatggacctctctcagtggtcaaaaactgtgaagatatttgtatcccatgtgaatgctcaccaacaggtgacctcagtggaggaggagtttaataatcaagtggataggawgacccattctctggacaccactcagcctctttctccagccaccgctgtcattgcccaatgagccaatgaacaaagaggccatggtggcagggatggaggttatgcatgggctcagcaacatgaacttccactcaccagggctgaccttgctatggccactgctgggtgctcagttttccagcagcagagatcaacaccaagcccttgatatagcaccattcctttgggtaatcagccagctacctggtggcagattaattatattggacctcttccatcatggaaagaacaaaggtttgcccccac

SEQ ID NO: 944339 - DNA, 613 bp, Homo sapiens
tgctgcaatctcattttaaaacttgaatggctagggagttccttcctatggatgaccaaagacagtggtttcttgagatggagtctatccctggtgaagatgctgtgaacattgctgaaatgacaataaagtatttagaatattatataaacttagttgataaagcagtggtagagtttgagaggattgactccaayttttaaagttctactctgggtaaaattctatcaaacagcatcacatactacagagaaatattttgtgaaagaagtcaattgatgtggcaaactcactgttgtctttttttttttttttttttttttttgagatggcgtctcactctgtggcccaggctggagtgcagtggcgtgatctcggctcactgcaagctccgcctcccgggttcacaccattctcctgcctcagcctcccaagtagctgggactacaggcgcccgcaccttgcctggctaattttttgtatttttagtagaaatggggtttcactgtgttagccaggatggtctcaatctcctgacctcgtgagccactgttgtcttattttaagaaattgtcacagccactcaagccttcagcagatcccaccgtgatca

SEQ ID NO: 944340 - DNA, 613 bp, Homo sapiens
tgctgcaatctcattttaaaacttgaatggctagggagttccttcctatggatgaccaaagacagtggtttcttgagatggagtctatccctggtgaagatgctgtgaacattgctgaaatgacaataaagtatttagaatattatataaacttagttgataaagcagtggtagagtttgagaggattgactccaatttttaaagttctactctgggtaaaattctatcaaacagcatcacatactacagagaaatattttgtgaaagaagtcaattgatgtggcaaactcactgttgtctttttttttttttttttttttttttgagatggmgtctcactctgtggcccaggctggagtgcagtggcgtgatctcggctcactgcaagctccgcctcccgggttcacaccattctcctgcctcagcctcccaagtagctgggactacaggcgcccgcaccttgcctggctaattttttgtatttttagtagaaatggggtttcactgtgttagccaggatggtctcaatctcctgacctcgtgagccactgttgtcttattttaagaaattgtcacagccactcaagccttcagcagatcccaccgtgatca

SEQ ID NO: 944341 - DNA, 595 bp, Homo sapiens
aagatttcatggacatttaacagttcccaaataatactttcataatttcttacgcctgtcttactttaatctcttaatcctgttatctttgtaagctgagaatgtatggcacctcaggaccactattgtgttaactgtacaaattgattgcaaaacatgtgtgtttgaacaagatgaaatcagtgcaccttgaaaaagaacagagtaacagaaattttagggaacaagggaaggcaaccataggtctgactgcctgcggggtcaggcagaatagagccatatttttcttcttgcagagagcctataaacggatgtgcaagtggggaagatattgctaaatactttttctagcaaggaatattaataattaagaacctgggaaaggaatgcattcytgggggaaggtctataaagggctgctctgggagtgcctgtcttatgcagttgagataaggactgaaatacgccctggtctcctgcagtaccctcaggcttactaggattgggaactccaccctggtgaatttgaggtcagactggttctttgctctcaaaccctgttttctgttctttaagatgtttatcaagacaatat

SEQ ID NO: 944342 - DNA, 595 bp, Homo sapiens
aagatttcatggacatttaacagttcccaaataatactttcataatttcttacgcctgtcttactttaatctcttaatcctgttatctttgtaagctgagaatgtatggcacctcaggaccactattgtgttaactgtacaaattgattgcaaaacatgtgtgtttgaacaagatgaaatcagtgcaccttgaaaaagaacagagtaacagaaattttagggaacaagggaaggcaaccataggtctgactgcctgcggggtcaggcagaatagagccatatttttcttcttgcagagagcctataaacggatgtgcaagtggggaagatattgctaaatactttttctagcaaggaatattaataattaagaacctgggaaaggaatgcattcttgggggaaggtctataaagggctgctctgggagtgcctgtcttatgcrgttgagataaggactgaaatacgccctggtctcctgcagtaccctcaggcttactaggattgggaactccaccctggtgaatttgaggtcagactggttctttgctctcaaaccctgttttctgttctttaagatgtttatcaagacaatat

SEQ ID NO: 944343 - DNA, 770 bp, Homo sapiens
ttcttctttagcatatatcttggacagtctgatgactatatgccttagtgatgttcattttatatagtaccatgcaggtgttctctgtatttcttgaatctggatgtctacctctctagcaagattatggaaattttcttgaatgactctaatatgttttccaggttgtttgcttgttttcctctctcaggaaggccaataattcctaaatttagtcatattacataatcccatatttcttggaaactttgttcatttgtaacaattattttttctttatttttctgactgggttagttcaaaagaccagtcttcaagttctgaaagtcttttttctgtttggtgcagcctacwgataaagcttcccattgtattttgaaattccttatgtgaaggtttcaattttagaatttcttattggtttgtttttaagatgtttatcccttccttcatttcctggtttgctttagatttttctttgtgcttattttcaaccttgttttcgatcacattgaacttccttgcaaattgtgctatgaattctttaagcgtcacttttgagtttctattttggttagacaccattgctggagggctagtgcgatcctttggtggcttcactatcttcagatttctcatggtgccagattttttatgctggttccttctcatttggagatgctgacacttcttatttttgtaactattttcgtgtgggtgaatttttttctttttctttcctttcctataattttatttttttctttcct

SEQ ID NO: 944344 - DNA, 642 bp, Homo sapiens
ctcctcaaaaccaccaaggtcatcggaaacaagaaaaatttgagaaactgacatggccaagaggagtttaaggacacaccatgactaaatgaatatggcatcctagatgggatcctggaacagaaaaagaacattaggtaaaactttaggaaataagttttactgtagaactttggtaaaaacaaaggaaactgaataaagtatgaactttacttaataataatgtatcaggccaggcgcagtggctcacgccttaatcccagcactttgggaggccaaagtgkgtggatcacctgaggtcaggagttcgagaccagcctgaccaatacgctgaaaccccgtctctgctaaaaatacaaaaattagccaggcgtgctggtgtgggcctgtaatcccagctactcgggaggctgaggcaggagaatcacttgaacccgggaggcagaggttgcaatgagctgagatcacgccactgcaccccagcctgggtggcagagtgagactctgtctcaagaaaaataaataaataataatatatcaatattggttcattagttgtgaaaaaagtgctgtactaagatattaataagaaggaagctgggtgcagcatatatggaaattctctgtgctcttcttgcacct

SEQ ID NO: 944345 - DNA, 720 bp, Homo sapiens
ccaactatatgtgttgggcccaatacaaaataaaaacacagggcccttagttcaaaaattattcagaatttcaagacagtgacagcaaagcattaaacgaagtgcaaagtccttctaagcccaggactctgtcttgactgcatagattacaaacctttgaagccacctctggcaggtaatgacctgaatgagagagcaaccaagatggaaaccaaagtctttttgcaacctaatctcagaagtgacatcctgtcatttttgttatagtctactccttagaaacaarttggttaagtctattccacacttaatggggaggaaattgtacaagggcaagaagacaattggcctggctgggcgcggtggctcacgcctgtaatcccagcactttgggaggccgaggcgggtggatcacgaggtcaggagatcgagaccatcctggctaacacggtgaaaccccatctctactaaaaatataaaaaattagccgggcatggtggtgggcgcctgtagttccagctactcgggaggctgaggcaggagaatggcatgaacccagaaggtggagctcgcggggagccgagatcgcgccactgcactccagcctgggcaacagagcaagactccgtctcaaaaaaaaaagaaaaagaataccaactggccattgtggatcatattagagaccctctaccacaacaatcatttgtaagataatcaggg

SEQ ID NO: 944346 - DNA, 720 bp, Homo sapiens
ccaactatatgtgttgggcccaatacaaaataaaaacacagggcccttagttcaaaaattattcagaatttcaagacagtgacagcaaagcattaaacgaagtgcaaagtccttctaagcccaggactctgtcttgactgcatagattacaaacctttgaagccacctctggcaggtaatgacctgaatgagagagcaaccaagatggaaaccaaagtctttttgcaacctaatctcagaagtgacatcctgtcatttttgttatagtctactccttagaaacaaattggttaagtctattccacacttaatggggaggaaattgtacaagggcaagaaracaattggcctggctgggcgcggtggctcacgcctgtaatcccagcactttgggaggccgaggcgggtggatcacgaggtcaggagatcgagaccatcctggctaacacggtgaaaccccatctctactaaaaatataaaaaattagccgggcatggtggtgggcgcctgtagttccagctactcgggaggctgaggcaggagaatggcatgaacccagaaggtggagctcgcggggagccgagatcgcgccactgcactccagcctgggcaacagagcaagactccgtctcaaaaaaaaaagaaaaagaataccaactggccattgtggatcatattagagaccctctaccacaacaatcatttgtaagataatcaggg

SEQ ID NO: 944347 - DNA, 720 bp, Homo sapiens
ccaactatatgtgttgggcccaatacaaaataaaaacacagggcccttagttcaaaaattattcagaatttcaagacagtgacagcaaagcattaaacgaagtgcaaagtccttctaagcccaggactctgtcttgactgcatagattacaaacctttgaagccacctctggcaggtaatgacctgaatgagagagcaaccaagatggaaaccaaagtctttttgcaacctaatctcagaagtgacatcctgtcatttttgttatagtctactccttagaaacaaattggttaagtctattccacacttaatggggaggaaattgtacaagggcaagaagacaattggcctggctgggcgcggtggctcacgcctgtaatcccagcactttgggaggccgaggcgggtggatcacraggtcaggagatcgagaccatcctggctaacacggtgaaaccccatctctactaaaaatataaaaaattagccgggcatggtggtgggcgcctgtagttccagctactcgggaggctgaggcaggagaatggcatgaacccagaaggtggagctcgcggggagccgagatcgcgccactgcactccagcctgggcaacagagcaagactccgtctcaaaaaaaaaagaaaaagaataccaactggccattgtggatcatattagagaccctctaccacaacaatcatttgtaagataatcaggg

SEQ ID NO: 944348 - DNA, 575 bp, Homo sapiens
cagtattttattaagaatttttgcatcaatgttcatcaagtatattgacttgagtattatattttattgtatttctgccaggttttggtatcaagatgattctggcctgatagaatgagttagggaggagtccttcgttttcaattttttggaatagtttcagtagaaatggtgctagctcttctttgtacctctggtagwatttggctgtgaatctttctggttctgggccttttttggttggtaggctagttattactgcctcaatttcagaactcgttatttgtctatgcagtgattcattttcttcctggtacatttttaggagggtgtatgtgttcagaaatttattcatttcatctacattttctagtttatgtgcatagagatgtttatagtattctgtgatggttgtttgcatttctatggagtcagtggtgatcccctttatcatttctgattgtgtttgcttcttctctcttttttctttattagtctagctagtggtatatctattttattaattttttaaaaaatcagcttctagattcattgatttttttgaagggcttttt

SEQ ID NO: 944349 - DNA, 819 bp, Homo sapiens
gaggtataaaggcattagtttcaatacaatgagatagaagtaacaaagagatgcattccagggaagagaagacggaacacttctcaaagggagtgacatagaagccaaatcttgaaagatacataagaatcagactggcaaaggcgcaatgaactttttggaaataataacttatacaagggaatgcagacacagaagaccatatctcactgctgaagtgcaagtagctctgtaaggctgaaagtgcttcatggaggagtaataagggaaacagagggtcaggttccagaggtagtgggaatggagggagagcgtttaggacatgatttcagttatttgttggtcatgtaacaaaccactgtacatctacatgccctaaaacagcctcatgtattatttcttacagttcttcaattaggcagcaatctttcggggtggttcatctctgctccatggtggcatatgttggcatggtttgactggggcaggagaatccagaagcctcactcacttgtcaggacaatgatgcctggctggatttctcttttttccacatggtctctcaaacctgaagtacakggaagctatcttttatgagggcagaaaatggaagctgtagagctttgtaaggcttaggcccagaagtcacatgacatcccctcccccacattctgttggtcagagcaagtcacaagaccagcccagcttccagaaaaggagaaagagacccctgcctccctttggcagagcagcaggaatgtaaaggctatgtcagcaggcatctttgcagatgttctaccacagaccttgtagatctct

SEQ ID NO: 944350 - DNA, 443 bp, Homo sapiens
aaatttaaaggagtttaagcaataaatgtttcacaaatcgggcagcccccagaatcacagaagattcagagagaatccagggggcctcgtggtcagatcaaatttatagacaaaaaaagtaaagtgatatacagaaatccaaagtgaggtacagaaacagccagattagtcacaggttggcatttgccttatttgaacacagtttgaacacttggcagtgtatgagtggttgaagtatgtctgctgggattggccaagactcagctattgwtataggcacatactgctaagttaagttttcaatcttgtctacttgttaaattaggttgcagttagttcacaaggactcagatatagaagtatggagtccttctcaggccatatttagtttgctttaacaattccccccttttagtcgttttcttcattttgagagactgacc

SEQ ID NO: 944351 - DNA, 627 bp, Homo sapiens
agtcagccaattggtgctgccgtctatttctttggatcaggatagtaactaagataaaaggttagcagatttaattttggggagccctcatttttaaatacacttcaatgtgttgtttatccagaacattccactgtaagttatctttagtaagattttgccatttctgtaagactttgctcctccctgggtctaatgtataagtcaaagggaactcagtttttcagcaattcaggatcccatttttacctaaagtattggctttgctctcaggttcccttggttaacttagccaatgatttttttttcctacctaagtgcacaagaaaagtgaaatgaaggggtagracacaaaaatccctgtgaattttcaaaagccaaattttacaacccctgcaatattatcatttactaccagtttcttctgacccagtcagatgtaagaggcctctaactggatccaagacagttaattactggatcaaatctgatcctggacctagtccagtttctgttgtgacttccaaacccagtttggaacagaaatttgttcaaagaaactcagagagctcaaaacacaaatccatggaactctaaaatttaagagagaacttacccatgattccc

SEQ ID NO: 944352 - DNA, 624 bp, Homo sapiens
tttctgggagatgagtctgaacaattctcagacctaccaagatggctagagaaagcaataccctcattttatagatgagtaaagtgtagtttagggagatcaatgtgagcataaacttgtttgggatattcagctactgctgtagcagctgacacatcctgaccactttcagccaggttctcatttaatcctcacaaccaccctacgaggtgggtgtttcattttccatttttaggcttaggaatatgaccatgtctcccccagccagtagaggctgtgctctctcatgccagtaccctgctcctcgccccaggagggggcctctgtcctcacacagcattttyttacctgtaaaatcttacctgaaggtattttatacagttgtacatttttagtctgttagtcaaaattgtttaaattatcaagttaatatacatagatatcacatggttaaaaaaccttacagtgaaaaaaaaagaactgacccccctccaagctaattttagtcctgctcccaaggaacagtcactttgaaacagttgttaaccacagtgccaaatgatgtgccgttatttattgctttatacacttaatctttttttttttttttttttgagaaagggt

SEQ ID NO: 944353 - DNA, 730 bp, Homo sapiens
gttcactactcaatgctcccaagttatgtgaggcagcgaggcacaaaattggcatctgctgtggtgtgtgtgtgtgtgtgtgtgtgtgtgtgtgtgtgtgtgtgtatgtggtgagcttggtgcacaggtaggatgaggtttggggcaaaagggcatgaacgatacagccaatagtaattgggttacagttgttgattgctttcaaaggacttaacatagaatattcatcccaaagatatattacatctggtgaattctagagcatctcacagatagaatgggggtaaaaggagaaacaacacacttgcaaatttgatgaaatttcccacatggtcctgaaatcgctggtggaatgggggattgcagtccgggtatgaggcattcgagagaatctgaatgtgtctcccaaagtgctccccagggactagcactgatcaggccgtggaaagcccaaggtcccacatgacaggttctgggctctgccttccttgaacacaggggtggaggggctggggagagaggcagagkctgagaatggctggagaaaatggtcggattcggttcttttatctgtagcagggactcaaacccagggtgtcctggctgctggaaggttgaacaatgctgagccgtatttccacacatggcttcactggctgaagcagggctgtcctgtggctgagaacccctcttccagccctgcatgggtcccctgacccccaggcctgca

SEQ ID NO: 944354 - DNA, 804 bp, Homo sapiens
gaactgacaccagtctccctgcaccacccatcctccttttgactgccctggggacgccactgctgctctgatcctctgtcactccagccacctcttgcttccctgttatcacaaacactgaacagtgagctcaggtgtcagcctccacagaggcatgcacagcaaggggtccggaggcatgccccatggagaactgggggtgctctgcttgcaggaggatccagggcccaytgcagtcctcagatgttctgggggagaggatacgcctgcttcatttcttctcaggggtcagaactgggcacagggggttggaaggagggagaaagatgtctatcaggtacccactgcatgccaggccctcttctaggctcccttaaaacctttcaggtaggccagtcacggtcgctcatgcctgtaatcccagcactttgggaggccaaagcgggtggatcacctgaggtcaggagtttgagactagcctgatcaacatggagaaaccccgtctctactaaaaatataaaatgagccaggcatggtggcacatgcctgtaatcccagctactcgggaggctgaggcaggagaatggcttgaacccgggaggtggacgttgcaatgagccgagatcacgccattgcactccagcctgggcaacaagagtgaaactccgtcgcaaaaacaaaagacaaacaaaaaacacctgtcaggtaaatggtggtagagcagaaaacctgggctcagaagctggcattgatcccagagccatccagtttcaaagcccacacccacaactttcctccaggttg

SEQ ID NO: 944355 - DNA, 804 bp, Homo sapiens
gaactgacaccagtctccctgcaccacccatcctccttttgactgccctggggacgccactgctgctctgatcctctgtcactccagccacctcttgcttccctgttatcacaaacactgaacagtgagctcaggtgtcagcctccacagaggcatgcacagcaaggggtccggaggcatgccccatggagaactgggggtgctctgcttgcaggaggatccagggcccattgcagtcctcagatgttctgggggagaggatacgcctgcttcatttcttctcaggggtcagaactgggcacagggggttggaaggagggagaaagatgtctatcaggtacccactgcatgccaggccctcttctaggctcccttaaaacctttcaggtaggccagtcacggtcgctcatgcctgtaatcccagcactttgggaggccaaagcgggtggatcacctgaggtcaggagtttgagactagcctgatcaacatggagaaacccygtctctactaaaaatataaaatgagccaggcatggtggcacatgcctgtaatcccagctactcgggaggctgaggcaggagaatggcttgaacccgggaggtggacgttgcaatgagccgagatcacgccattgcactccagcctgggcaacaagagtgaaactccgtcgcaaaaacaaaagacaaacaaaaaacacctgtcaggtaaatggtggtagagcagaaaacctgggctcagaagctggcattgatcccagagccatccagtttcaaagcccacacccacaactttcctccaggttg

SEQ ID NO: 944356 - DNA, 642 bp, Homo sapiens
gcctgcatatcgtgcagaatgatctgtgaaccaggccctagtcttctcttcctctgtcagatgatcgtagggaactctgcatgaggccatcggtgcaggctggagaagagaaggcaagttggcaggagtggagaccacrggcatttgagccacttcctcatgtaacttaacttgtgccttcaggacctgctcaagcccgatcacgtatataccacttccatttgatgatggaatgctgctgttcatgaccaactttatggctagatgggtcagaaagcacccagttcatgataggcagttcaggtcatatggtgacttgatgacccagagtcaaacattcagtttccaccaaagcccagtaacaggccaagagctgtctctcaaaaggagagtagttatctgcagaagatggcagggccttgctccgaaagcctagagaccgccactgtgattcacctatgggggcctgccaaaggctgcagccagcatccttatctgccactgacacctcaagcaacattggatctgctgggtcatatggcccaagtggcagagcaacttgcacaacagcctggacctgtcatagagctttctcctgttctggaccccactcaaaactggcagcctttcaggtcactcgat

SEQ ID NO: 944357 - DNA, 727 bp, Homo sapiens
accaaagcccagtaacaggccaagagctgtctctcaaaaggagagtagttatctgcagaagatggcagggccttgctccgaaagcctagagaccgccactgtgattcacctatgggggcctgccaaaggctgcagccagcatccttatctgccactgacacctcaagcaacattggatctgctgggtcatatggcccaagtggcagagcaacttgcacaacagcctggacctgtcatagagctttctcctgttctggaccccactcaaaactggcagcctttcaggtcactcrataaatgtgctggagtaacactcaaacgaggaatgtgttgcctccaaaatccaataggcccactaggcgttgtgtctctttcttggttgtaggtggggccaaatgcaggcaacttatccttcaccttggaatatctcgacaggccccaaaccactggacccctagaaattttactgaggtagaaggtccctgaattttattatcagatttattttccatcctctggcatgcaaatgtctcactaataagtccagtgtgtttgctacttctcacttactggatccaatcagcataatgtcaccaatttaatggaccagcgtgatatcttgcagaagcgaaatgcgatcaaggtctctccgaataagattatgacatgaataagattatgacacaaagccggagagttgatacacccctgaggtatgacagtgaag

SEQ ID NO: 944358 - DNA, 746 bp, Homo sapiens
gacccagagtcaaacattcagtttccaccaaagcccagtaacaggccaagagctgtctctcaaaaggagagtagttatctgcagaagatggcagggccttgctccgaaagcctagagaccgccactgtgattcacctatgggggcctgccaaaggctgcagccagcatccttatctgccactgacacctcaagcaacattggatctgctgggtcatatggcccaagtggcagagcaacttgcacaacagcctggacctgtcatagagctttctcctgttctggaccccactcaaaactggcagcctttcaggtcactcgataaatgtgctggagtaacactcaaacgaggaatgtgttgcctccaaaatccaataggcccactaggcgttgtgtctctttcttggttgtaggtggggccaaatgcaggcaacttatccttcaccttggaatatctcgacaggccccaaaccactggacccctagaaattttactgaggtagaaggtccctgaattttattatcagatttattttccatcctctggcatgcaaatgtctcactaataagtccagtgtgtttgctacttctcactyactggatccaatcagcataatgtcaccaatttaatggaccagcgtgatatcttgcagaagcgaaatgcgatcaaggtctctccgaataagattatgacatgaataagattatgacacaaagccggagagttgatacacccctgaggtatgac

SEQ ID NO: 944359 - DNA, 607 bp, Homo sapiens
gaggccgagacaggagaattgcctgaacctgggaggcacaggttgcagtgagctgagattgcaccactgcactccggcctgggtgatagagcgagattccgtctcaaaaacaaacaaaaaaaccaaaaaaacctcagaactctcaagcaggacttctcaacctcagcactgttgacttttgggtgggacaattctttgttgtgcgtgtggcgggatggaggtgctacgccatgtaccktaggatgcttagcagcacgggggcctctccccaccagacgccaggagtggtctccctcctccgggtagatcaccaaaagttctccagacattgccaaatgtcccctgcagggcaaaatcgtcctcggttgaaattgtccactgctctaaagaatgcaggaagttgggcacacttagctcggaatgaatatttacagggaacattaaagctgtttgtaggcatcgtacgaaaaaagttattctgattgtttcagaaggctgagcaagaacaaacggggcaaacctgtattttgactaaggaacaaggagacctttctagaagaaccgctcagctcccagtccccaaagtgtgtatgtttagaccgggcga

SEQ ID NO: 944360 - DNA, 637 bp, Homo sapiens
ggctattttggctgtcagctcatgcactgttctatcatacctcttagcttctttgcattgagttacaacatgcttctttagctcagtgaagttcatttttacccacattctgaagcctagttctgtcatttcagccatctcagccttatcccagttctgaacccttcctgcagaggtgttgcagttatttggaggaaaaggggcactctggctttttgagttttcagcatttttgtgctgwttctttctcatctttgtgggctcatctaccttctgtttttgagattgcttacctttggatggagtttttctggttttttttgttgtttgttcctttgtttttcttttaaccatctggccactcttccatagggctgctgcagtccgcagtgggtctgctctatattttagtcacctatgtttgtccagtacctggaggtatcactagtgaatgctgtgaaacagcaaatatggccttttgccactgtctctggaagctctgtcccaggggggtactgacctgttaccagactgaacgcacctgtaggaggtgggtggagaccctggttgggacgtctcacacagtcagaggaatgggatcaagaaaccccttaaagatgcattctgattgcttttg

SEQ ID NO: 944361 - DNA, 637 bp, Homo sapiens
ggctattttggctgtcagctcatgcactgttctatcatacctcttagcttctttgcattgagttacaacatgcttctttagctcagtgaagttcatttttacccacattctgaagcctagttctgtcatttcagccatctcagccttatcccagttctgaacccttcctgcagaggtgttgcagttatttggaggaaaaggggcactctggctttttgagttttcagcatttttgtgctgattctttctcatctttgtgggctcatctaccttctgtttttgagattgcttacctttggatggagtttttctggktttttttgttgtttgttcctttgtttttcttttaaccatctggccactcttccatagggctgctgcagtccgcagtgggtctgctctatattttagtcacctatgtttgtccagtacctggaggtatcactagtgaatgctgtgaaacagcaaatatggccttttgccactgtctctggaagctctgtcccaggggggtactgacctgttaccagactgaacgcacctgtaggaggtgggtggagaccctggttgggacgtctcacacagtcagaggaatgggatcaagaaaccccttaaagatgcattctgattgcttttg

SEQ ID NO: 944362 - DNA, 552 bp, Homo sapiens
acacagacaccaaggaaggtgctgtaaagagttgcatctatggccctgatcaaccagcaaagctcgcatttgttcacaccactagagggcaattgacctgtttgccgacccccccaagtagagagcaattatgcatctgcagttgawcaaatgttggtcttacgaccacatgagtaaacaagctatttagataaatgttcctttgtatctgtgccccaagcaattaactcaaggtaaggattacgctgctttcagccataaccctatcttgagacttttgcaaataccttccggccttccaagaaggtttgtgtctatatcctataattttacaatttctcccaccatcctgactgaacccccacactagactaaccaagaaaagaaaagagaatacccaagtaaaccatatcataaatgaaaaagaagctattacaacagatcccacataaatacaaaagataatcagaaaccattatgaacaaacatatggtaacaaactggagaaacaagaggaaatggataaatttctggaaacatacaacttaccaa

SEQ ID NO: 944363 - DNA, 576 bp, Homo sapiens
cctcatcctctctctgtcaccgcccactgccccacactgccctatggctgcccgcctaggatagccaaggatgtcctgcagtttatttttttttccgtcttcttttaaacacatcagtatctttctgacagaatcattctgtacctgggttcataaggtgggtcgtaaggaggtattgtagtttttgctccttgcggacacttctttgctgaaaagtttgataatggtggtaccgtggtgccctttcccgacacaaatctgcattgcagctagaacaggaagktgggaaggagagattgtggcccaagcccaccctataaagctttctggaaatcttggtggaaaagtgagcattcccagtgtataggggtactgaaggactccagacaaaaattgctgccttttactatgccgagaagagagctctatgtgagaggaagacaaaatattttaatttttattctttgacccctggataaatagagacctatataagaaaaaagggatccaggctacttgttatctttgtaaccctctttacatctttattactatcttttcatggaaatacatttc

SEQ ID NO: 944364 - DNA, 599 bp, Homo sapiens
ggagtttttctgtcaagagaaaaagaaaatgggacatttgttgcaggttaaaatgaggtacagttggagcttttttgtgaacacagtgagagcaatattgaaatgtctgtatgctaaaggcaatgatctagcagagaggtgttgtttttkgtctgttttatgttgccataataaatttccatagattggaaaatgtataataaaaatttatttgtgttacagttctgcaagctacgaagaccaagaccatggccctggcatctaggcagggagcttcatgctgtgtcatctcctggtgaaaggcagaaaggcaagataaggtgaggttaagccactctcatgataactaactgactccagtaataatgacattaatttattcataaaagcagagccctcctgactcaatcacctcttattacaccccaccgcccaacactattgcactgggaaccaagttttccacgtatgaactttgggaacacattcaaatgatagcagggaagaatttgatgatgcagacgagaaaggggatattgcttgaataggcaataagggacagaacctagtgtgtaaatggcagtgagctctgtagttag

SEQ ID NO: 944365 - DNA, 555 bp, Homo sapiens
tctctacccccatgttcttagcttcaggtcatcccagaaaaaaataacaaactgttacaaaatgggagccactgtactcagttcttcttcctcagattgtgtaagaacaagctaactgaactcaattatttatcattaatacaaaaggcagtacgtgaacctactttccttctactttatrcagcacagaaatgatttctcctcctgcagtgatgacaagaaatatatttttggtctctgtagttgacatgcaaatgtactcactgtatctcaagtgaaaactcattaaaagccagtggaatgcaattgtgttatctcccaggaacacagacaataacattcgtcatcactcccagtgcatttccatttgctaacacagtgaaatcaccaacctcaccttcgttcccctgaggtttccatagaaagttttcacattttattccagttgatcagacaaaagctctaggtgtctgtttatcaccaagacattttttaaatttaaattgcaaaatgcagccacacgatcacctataaaaccatggaaacttctgtttc

SEQ ID NO: 944366 - DNA, 609 bp, Homo sapiens
aaatttgatagtatgttcttagcttggcttttagctgaataaggcctttaaaagtcaaatctgagattctatatgaaaacttccagcaaagaaacttgaaagcacctatgtggtcatcgcctgttcttgctgcagttacataaataatcaagcaaaatctaataaaacaagacttatttttaaaacaagaatagtcttactttgattatgataaaaaatgatggttactaccaagagaaattttatatttcaaaggaaaactataacatrgccggcatggtgcacatgcctataattccagcactttgggaggccaggagttcaagaccagcctgggcaacatggtaaaaccctgtttctaccaaaaatacaaaaattagttgggtatcatggcatgtgcctgtagtcccagctaatcaggaagctgaggagggaagatcgtttgcacccaggaggtagaggttgcagtgagctgagattgcacctttgcactccagcctgggtgacagagccagaccctgtctcaaaaaaaatgtttttaaaggaaaactacagcctttgtgggttatcagattctagtcttgtttcttgtttctgggctgtttttac

SEQ ID NO: 944367 - DNA, 637 bp, Homo sapiens
acccagatatattagtttgtatttacactgctacaaagaaatacctgagaatgggtaatttataaaggaaagaggtagctgggcatggtggttcacgcctgtaatcccagtattttgggaggccgaggtgggtgggtcacaaagtcaggagtttgagaccagcctggccaaygtggtgaagcaccatctctactaaaagtacaaaaattagccaggtatggtggctggtgcctgtgatcccagctattcaagaggctgaggcaggagaatcacttggatctgggagatggaggttgcagtgagccaagatctcgccagaacagcatgggggaaccacccccatgatctaataagcacccgtgagttccctccccaaacgtggggattacaattcatattacaattcaagatgaaatttgtgtggatacacaaagccagaccatattattccacctttggtcactcccaaatcacgtgtttctcacattccaaaacataattaggccttcccaacagatccccaaagtcttaactcatttcagcattaacccaaaaagtctaagtccatagtctcatctgagacaaggcaagtcccttcctcctatgagcctgtgaaatcaaaagcaagttagctact

SEQ ID NO: 944368 - DNA, 610 bp, Homo sapiens
aagactcagtttccctttcttttatctatccaatcatatatctatcaattatctatcatttattattatctatcacctctgtttattcacttatccacctaggataaactaggccgggcgtggtggctcacacctgtaatcccagtactttgggatgcgaggcgggtggatcacctgaggtcaggaattctagactaccctgaccaacatggtgaaactccatctctactaaaaatacaaaaattagctgggcgtggtggcrggtgctggtaatcccagctacttgggaggctgaggcaggagaattgctttaacccaggaggcggaagttgcagtgagccgagatcatgccattgcactccagccttggcaacagagcgagactccatctcaaaaataaataaataaaattaaattaaaaagatagacattaagctattcatcaatatctattttttttttccatttaggcattgaggatgatcacacctatgtcctgctctagccaataaaatgtgagcagaggtgaagacttttgtcccttccaagagaagcatttaagagctgatgccaattttccagctttccttctctctgctgcagtgattgg

SEQ ID NO: 944369 - DNA, 610 bp, Homo sapiens
aagactcagtttccctttcttttatctatccaatcatatatctatcaattatctatcatttattattatctatcacctctgtttattcacttatccacctaggataaactaggccgggcgtggtggctcacacctgtaatcccagtactttgggatgcgaggcgggtggatcacctgaggtcaggaattctagactaccctgaccaacatggtgaaactccatctctactaaaaatacaaaaattagctgggcgtggtggcgggtgctggtaatcccagctacttgggaggctgaggcaggagaattgcttkaacccaggaggcggaagttgcagtgagccgagatcatgccattgcactccagccttggcaacagagcgagactccatctcaaaaataaataaataaaattaaattaaaaagatagacattaagctattcatcaatatctattttttttttccatttaggcattgaggatgatcacacctatgtcctgctctagccaataaaatgtgagcagaggtgaagacttttgtcccttccaagagaagcatttaagagctgatgccaattttccagctttccttctctctgctgcagtgattgg

SEQ ID NO: 944370 - DNA, 610 bp, Homo sapiens
aagactcagtttccctttcttttatctatccaatcatatatctatcaattatctatcatttattattatctatcacctctgtttattcacttatccacctaggataaactaggccgggcgtggtggctcacacctgtaatcccagtactttgggatgcgaggcgggtggatcacctgaggtcaggaattctagactaccctgaccaacatggtgaaactccatctctactaaaaatacaaaaattagctgggcgtggtggcgggtgctggtaatcccagctacttgggaggctgaggcaggagaattgctttaacccaggaggcggaagttgcagtgagccgagatcatgccattgcactccagccttggcaacagagcgagactccatctcaaaaataaataaataaaatwaaattaaaaagatagacattaagctattcatcaatatctattttttttttccatttaggcattgaggatgatcacacctatgtcctgctctagccaataaaatgtgagcagaggtgaagacttttgtcccttccaagagaagcatttaagagctgatgccaattttccagctttccttctctctgctgcagtgattgg

SEQ ID NO: 944371 - DNA, 575 bp, Homo sapiens
ttggtcctggacttttttctgttagtaatttttaaattaccatttcaatcttgctgcttgttattggtctgttcaaagattttatatcttcctctttaaactaggagggttgtatttttccaggaatttatccatctcctctacgttttctggtttatgcgtgtaagggtattcatagtagccttgaatactcttttttatttctgtggtatcagttgtaatatctcctgttttgtttctaattgagtttatttggatcttctctcttctttcatttgttaatcctgctaatggtctatcaattgtatttatcttttcaaagaaccggctttttgtttcatttacctttcatatytttttgtttcaatttcatttagttctgctctgatcttcgttatttcctttcttctgctgggtttggttttggattgttcttgtttctccagtccatgaagtgtgatttcagattgtctatttgtgctctttcagactttttgatgtaagcatttcatgctatgaactttcctctttccttttgctgtatctcagaagttttgataggttgtgtcactgtt

SEQ ID NO: 944372 - DNA, 452 bp, Homo sapiens
ttttgttatggggtgatgagtccttacagtatggatattttaaagtggttttattgagataaaattgaaatacaataaactacacatatttaaggtatacaatttgataatgtttgacctatacagtcatatgccatataaaaacgttcaattagtgattgaacacatataygatggtggccccataagatttcaatggacctaaaatgtccttatagcctagtgacatcgtagacattgtaacatcacaatacaatgaaaaactcacatttttgtggtgatgttagtgaaatcaagcttattgtattgccagttgtacaaaagtgatgtcacattcaattacatacagtacagaatacttgataatgattgcattagtctgttttcacactgctataaagaactatctgagaatgggtaatttataacgaaaatatatttaattgactcac

SEQ ID NO: 944373 - DNA, 604 bp, Homo sapiens
tcataggcggaagggacttgccttgtctcagatgagactttgcacttggacttttgggttaatactggaatgaattaagactttggaggactgttgggaaggcatgattgtgttttgaaatgtgagcacatgagatttgggaggggccaggggtggaatgatatggtttggctgtgtccgcacccaaatctcagcttgaattgtagttcccataatccacgcatgtcatgggaggtacctggtgggaggtaattgaatcacgggagtggttacctccatgctgtctcatgatagtgagtgagttctcatgagatctaatggttttgagaggggcttttcccccttttgctcagcacttctccttcctgaagctgtgtgaagaaggacatgtttgcttccccttcccccayaatcgtaataactttcctgaggcctccccagccctgcagaactgtgagtcaactaaacctctttcccttttttttattttgttttttgtttttttgagactgagaattgctctgtcacccagactggagtggtgcagtgaagcgatctcggctcactgcaacctctgcctcccaggttcaagcaagtctcctgc

SEQ ID NO: 944374 - DNA, 695 bp, Homo sapiens
gcttcttggatgctggaaatgcttcgtaggtcgctctgattacatggttgtttacccgcaaaaaacttccccatgtgaatgtgattgcattcacaatccacgtacttgaccatgtgaatgtcataaagcttaaaaaataagccttgggctgggcagggtggctcacatctattctccccgccctttgggaggccgaggcgggcggatcacctgaggtcgggagttcaagaccagccagccaacatggcgaaaccccgtctctactaaaaatacaaaaattggccaggtgtggtggtgtgcgcctgtaatcccagctactcgggaggctgaggcaggcaaatcacttgagccaggaagcagagtttgcagtgagctgagatctcaccactgcactctagcctgggtgacagagtgagactctgtccccccaacaaaaaaaaaaagaaaaagaaaaattcaacgaatccctcmcaaactcttatgaaaaatagaggaagaaggaacatttcccaacatatcctatgaggccagtattacccagataccaaaccagacaaagacattagaaaaaaataaggttaaaaaccaatatttcttatgactatagggaaaattctcaagaataggagttccagacgagcctggacgataaagcgagaccccatctctacaaaaataaaaattagccaggctca

SEQ ID NO: 944375 - DNA, 627 bp, Homo sapiens
tttagaggggatggtcaaggaagtctgctccaaagtgggtttgtgagctgaaacccggaaggataaaaatgagccagccagtcaagaagctgaagtaagaatgtcttcaacagggaaaccatagcaaccagtgaagaacccctgagcaagaaggagcttgatacgtccatgaaagaaaaaggctggagtggacggtgtggcacatagcaggtaggatggagaacagtgagaggtcaggccaggggaggaraaggccagtccacacaggcttcaggcacctgcagaaaggatggcattttcttcaaagtgcaatggaaaggctcaggagagtttagggagggaagcaatgttatctaatacagcctctgtgtggggttttaaaaatgtgttctggctgctatgtaaagaatggattatagggggcaaaaaatgaggaagagagacaagagaggaggctgcttcaaggtctaggaggtaactgtggcttaaaccaggtggtagccctgaaggtagacaaaaagtagacagataggagacatgatctatcggatctgtagctgacaaggttttgctgatggattggctgaggaggcgtgtgaggggtgttaaagaaaatagagaaatcaa

SEQ ID NO: 944376 - DNA, 650 bp, Homo sapiens
tgagccaaatttggcatcctagggggagaggcatgaaaagtggagatgtggaggagcagagaggagcctggggtggtgcaggaggagccccctgccctacagccccgaggtgcctcccctccctcccctcagggcccccatctcttccccagctagcctggccctggggcctcccctcctcactctgaggggccagcctggcttctccccggaccccttgagcccggcactgccaggcctacccgccacccccaccccacactgctccagctctgtttcccaccgccgctagtttcctggttaccatgttgccggttgtcatgtcgcttacatgtcctcgtgactcagtggtccccgcagakgggccccctcctcctcacaccccccttagcactcgcccccgcctcccccagatccacattaagaaccagcccgccctgtaagcctacactgttcctcctccccttccttcttatcctaagctaagacatcttctcacagcatctcccagagctacttcattctctctttcgcaaatgtctacgaacctactatgctccaggctggcgcacgcggctttcacagacctgacacagtctggaaactgctcaacaccctgatgaagtcagtatcatcatacctattctcca

SEQ ID NO: 944377 - DNA, 732 bp, Homo sapiens
caaaattatgaaaggagttgtggtggaatgtgtgacagggagccacaagattaaaactctgaggaatgaggagaaatgactcagaagtagttgacacaatagggaggggtaatgaatggcagagtctaaaggtggaattcagtgctgggatctattaggaagcagaagggaaaaatggtattctmcacctgcaggcttagtgggatgagacatgtaagagagggaaacaaccataacatgagagtcctgtaggggaagcagtgtcctcagagaacagccaggttacagttcgaacaaaaaggagaaggaagctttcagagaaaaggtcaagggtataggatatgttatggataactgactatgagttccacaggggaagggaataatttcaggatttgagctgaggtgagaggtaagggcagaaaaagatgtatagagccatttggggaatcaagtttaggtgacaaaaactgtgtatttgtcagtttatataaatatatataaaggggagtttattaagtattaactcacatgatcacaaggtcccacaataggctgtctgcaggctaaggagcaaggagagccagtctgagtcccaaaactgaaggatttggagtccgatgcttgaaggcaggaagcatctggcacgggggaaagatgtaggctgggaggctaggtcagtctcttttcacatttctctgcctgcttatatgctagcctctctggcagctg

SEQ ID NO: 944378 - DNA, 803 bp, Homo sapiens
tttctcttattttccagtatttctctataattttatttcttcttcatgtctcattgcaactttgattattgtctccttaaggattcttaaaatccgaacacgagaaacttcacatctgaggaagtgtgagaatgagatccaagccatccccaaagcaggcaaggaactccatttttctggaagatctgttgtttagctctgtaggaaatggggcctgatgtatctcatcaggtgattagagtaatttttcagtatttgttcaaatatatcttctaatgttttgaattaatcttgattaatcttgatttgaattaatcttgattctgatataattaactaataaagatctataggttgggcatggtggctcaagcctgtaatcccagcactttggaaggctgggacaggaggatcacttgagtccagcagttcaagatcagcttgggtaacatgggaaatcctatctctacaaaaaataaaaaagctagccaggcacggtggcatgcacctgaagtccccggtacccagttgggtgaggggagggaagggtgggctgaggtgagaagatcacctgagcttgggaggccgaggctgyggtaagctgtgattgtgccactatacttccagcctgggcaatagagtgagaccttgtctcagaaaaaaaaaaaaaaaagctatatttttccattgtctgtcttgtgaactattcctccctgacctctactaagaggtcatctcccttgtgcaatattccttgaaaacaggtttgccttttttctttttttttttttgaggtggagtct

SEQ ID NO: 944379 - DNA, 553 bp, Homo sapiens
agtttttctattaacacacacaaaaagtattcctggtgtatcacaaataagcatttcagtacaatgattagaaataaccttctttgatctaatctccactattacaaagatcttaaattggtaactgtgacttgagcacattcaaacctggatttgagtttttcccttgttcaggagaacctcagccctgttggagagggtttatgcatgctaaggtttctttytcctttgcttagaggaagaggtgcagcatgcagaggaagggtctacatgtacttcttcaatttttcatactaggttagaggcagaaaattatttcagcccttggtagttcccacaggacatcacctatatgcttttctaagcatgaagctttattacactgtcaaatttctgttcccaagccaactctgagtatccctacttccctttgagggctaaatgcattgaaaccactcagtactgacttgcttttgaatacagagagccaagctctggtgtgctggagttgattcctactggttatgaaagtgatgaaagtgattgttaactt

SEQ ID NO: 944380 - DNA, 585 bp, Homo sapiens
ttaaaccactttgtccacccaccttggcctcccaaagtgctgggattacaggtgtaagctaccacatctagcctattcctttattcttaataagctgaattcatgagggatttcatggagccatctctggcccctgtcctgaagaaagagctgaaataactttcacagaaaacttgtgacttagaaacagraggacattttccaccttaacgtagagaagaacctttaagaaaataaaatgagagacagttaccatgttccattttcataaacagatctttataatcatgtaaattaaacaattttgtctttaggagacgtgagaaagaacatagaggtaagagctagaataccagcaatcttaggaaggcaaaattaaatcatcttttgggagaagagagaaaattgtgaggagaaggtgccagtgtcaaagattggcttggcgaggttattttctctctgggagtctgggaggtgatgagctcctaccgctcactgcctcgttgtcttgcctattggttcctttctgggcaaggaagaacgttgtctctcttttagagttttgtaggcctctgtcagtaatcc

SEQ ID NO: 944381 - DNA, 750 bp, Homo sapiens
accttcactgtcctgcctcaggggtatatcaactctctggctttgtgtcattatttggttggcagagatcttgatcgtttttcccttccacaagatatcatactggtccattacattgatgacattatgctgattggatccagtgagcgagaaatagcaaacacacacaacttgatgagacatttgcatgccaagggatgggaaataaatccaactaaaattcagggaccttctacctcagtaaaatttctaggggtccagtggtgtggggcccattgagatatctcttctaaggtgaaggataagttgctgcatttggaccctcttacaaccaagaaagaggcacaacgccccrtggctatttggattttggagacaatacattcttcactcgggtttgttattctggcccatttattgagtgagccgaaaggctgccagttttgagtggggttcagtacaggagaaggctctgcaacaggtccaggcttctgtgcaagctgctctgccacttgggccatatgacccagcagatcccgtggcacttgaggtgtcagtggcagacacggatgctgtttggagcctttggcaggctcccatagaagaatcacagtggaggcctctaggattttggagcaaggtcctgacatgttctgcaggtaactactttccttttgagagacagctcttgacctgttactgggctgtggtagaaactgaacatttgacgatgggttatcaagtcaccaa

SEQ ID NO: 944382 - DNA, 691 bp, Homo sapiens
caggtgcacgcaaccacgcccagctaatttttgtatttttagtagagacggggtttcaccatgttagccaggatggttttgatctcctgaccttgtgatccacccgccttggcctcccaaagtgctgggattacaggcatgagccaccgtgcccagcccattttttttttaagaggtggggcctcactctgtcgcccaggctggagtgctgtggtgtgatcatagctcactgcagccttgaattcctggggtcaagagatctcccacctcagccttccaagtagctgggactacaggcgtgtgccagtgtttgactatgtcatcaattttttttttgggacggagtctcgctctgttgcccaggctggagtgcagtggcgtgatcttggctcactgcaacctccgcctccctggttcaagcgattctcctgcctcagcctcctgagtagctgggactacaggcccaggccaccacgcctsgctaaatttttgtattttttagtagagacagggtttcaccgtgttagccaggatggtctcgatctcctaacctcgtgatccgcccgcctcggcctcccagagtgctgggtttacaggcgtgagccaccgggtcgggcttacatgatcattttacagatgatgaaactcaggctcagtaatgatatgacttggcccaaggtcacacagccag

SEQ ID NO: 944383 - DNA, 648 bp, Homo sapiens
agtgccccatgtccagtagacagtccatggatgtttattgctgctgctgctattctggctgctgatgaacaaaataggcccaggtcgcttatgcttcaagcagattatgaggccctgtgccacgtgtagcagagtctttataaatagactgtttcacttagttcagagaaatgaccaccacaaaatggtccaaaaccttcccccattctgtcattcarcatcagctttgctgaggaatggggtgaagatatttgcatgttgtttattagcagaaaacctgaaagtgtaatgttttctgaaattaataacaaaaaatttaggtgcattctagtgggaagactcttttcttccccacccatatttctctgagcccatatgaaaaggaagtcccatttatccttccatcctttctagggagttcctgagagggggtttctgtgtttcttttgatcacttgcatggtattctctaagggaggaggagtagttaacctgatgggtaacactctgttatcccctaggttgagtccagtgtcctagaaggtatggtttgctttaaaagcaggaacagacttcacactctctttcctgcactgaccatagcatggagaggtaaggacagtgtactctcagctcttcttccttttgt

SEQ ID NO: 944384 - DNA, 792 bp, Homo sapiens
gaaatttatagtactaaatgcccacatcagaaagctagaaagatctcaaattgacaccctaacatcacaattaaaagagctagagagtcaagagcacactaacacaaaagctagcagaagataagaaataactaagatcagagacgaattgaaggagatagagaaacgaaaaaccctccaaataatcaactaatccaggaggtggtttcctgaaaaaattaacaaatagattgaccgctagctagactaataaagaagaagagagagaagaatcaaatagacacaataaaaaataataaaggggatatcgctactgaccccacagaaacacaaactagcatcagagaatactataaacacctctgcacaaataaactagaaaatctagaagaaatggataaattcctggatgcatacattctaccaagactaaaccaggaagaaattgaatccctgaatagaacaataataagctctgaaattgagggagtaattaatagcytcccaaacaaacaaacaaacaaacaaacaggaccagacagattcacaggtgaatactaccaaaaatacaaagatgagctggtaccattccttctgaaactattccaaacaattgaaaaggagggactactctctaactcattttatgaagccagcatcatcctgatacaaaactgggaagagacacaacgacaacaacaacaaacttcaggccaatatccctgatgaacattgatgcgaaaatcctcaataaaatactggcaaactaaatccagcagcacattaaaaaac

SEQ ID NO: 944385 - DNA, 792 bp, Homo sapiens
gaaatttatagtactaaatgcccacatcagaaagctagaaagatctcaaattgacaccctaacatcacaattaaaagagctagagagtcaagagcacactaacacaaaagctagcagaagataagaaataactaagatcagagacgaattgaaggagatagagaaacgaaaaaccctccaaataatcaactaatccaggaggtggtttcctgaaaaaattaacaaatagattgaccgctagctagactaataaagaagaagagagagaagaatcaaatagacacaataaaaaataataaaggggatatcgctactgaccccacagaaacacaaactagcatcagagaatactataaacacctctgcacaaataaactagaaaatctagaagaaatggataaattcctggatgcatacattctaccaagactaaaccaggaagaaattgaatccctgaatagaacaataataagctctgaaattgagggagtaattaatagcctcccaaacaaacaaacaaacaaacaaacaggaccagacagattcacaggtgaatactaccaaaaatacaaagatgagctggtaccattccttctgaaacwattccaaacaattgaaaaggagggactactctctaactcattttatgaagccagcatcatcctgatacaaaactgggaagagacacaacgacaacaacaacaaacttcaggccaatatccctgatgaacattgatgcgaaaatcctcaataaaatactggcaaactaaatccagcagcacattaaaaaac

SEQ ID NO: 944386 - DNA, 623 bp, Homo sapiens
cctcactaggaaaaaattggatatattggcataagtaggaagatcaggccattctcatagcaaatataagaagaggacattcttaaccctattctccaagtgaacaagaagtttaagtgacatgctcaaagtcacactgctagtaaataggtaagccaggattcaaacccaagtttacttgagttcaaaccctcttctctttaaacagtgtgaactgcacttcaataatcagcatgagattaatacagggctgaaggaggggaactctatatcactttttccactctataaattaagcaaaataaatgtggagaaaaaattcataaacaaggctgacaaaattctttaacttttattttaagttcactgtacatgtgcaggtttgttacataggtaatcgtgtgtcatgmgggtttgttttatggactatttcatcacccagatattaagcctagtgcccattagctatttttccttatcttctccttcctcccaccctacaccctctgaaaggccccaatgtgtgttgttcccctgtaagtgtccatgtgttctcatcatttagcttccacttataagagagaacatacagtttttggttttctgttcctgtgttagtttgc

SEQ ID NO: 944387 - DNA, 612 bp, Homo sapiens
ttaatcaactcaatgtatgtgatttaaattcaatgtatgtgttgactaaaactcatatttgaagtttccttcttgattctaagttctgaaattctgaacagggcctatgtgctgtatctgctgttatgaaaagttgccattgtgccatggtgtgacctgagcccagcatccagcagggcctggcacccgtgggggtagatagtgcacttttgtgcattttttacataggtataataacgaagagaaaaaaaggacttgtgcagggctacaggctttctaacaatgatacattcaygaggattttgaatatatcacagggaaacatttggaaaaacaattcctgaatcctataaaaaatgagttaattggccagtgcaagtttatgtgttagtggcctctagtttgctaaattgtaacaaacaacactgtcctgtgtatatttttttattattttcatttctgaaactagtcaaactttgttgaaatggaaaggtttgtaaaattccttaagcacttccatgaaacagcttggtatgaaagtcattgatttcgttcccacctgcaaatttacagataaggaagttttggcccatgaaagttaagaaacacacc

SEQ ID NO: 944388 - DNA, 612 bp, Homo sapiens
ttaatcaactcaatgtatgtgatttaaattcaatgtatgtgttgactaaaactcatatttgaagtttccttcttgattctaagttctgaaattctgaacagggcctatgtgctgtatctgctgttatgaaaagttgccattgtgccatggtgtgacctgagcccagcatccagcagggcctggcacccgtgggggtagatagtgcacttttgtgcattttttacataggtataataacgaagagaaaaaaaggacttgtgcagggctacaggctttctaacaatgatacattcacgaggattttgaatatatcacagggaaacatttggaaaaacaattcctgaatcctataaaaaatgagttaattggccagtgcaagtttatgtgttagtggcctctagtttgctaaattgtaacaaacaacactgtcctgtgtatayttttttattattttcatttctgaaactagtcaaactttgttgaaatggaaaggtttgtaaaattccttaagcacttccatgaaacagcttggtatgaaagtcattgatttcgttcccacctgcaaatttacagataaggaagttttggcccatgaaagttaagaaacacacc

SEQ ID NO: 944389 - DNA, 584 bp, Homo sapiens
ttgggtaggcatcttggtatagtacctagtacagtgatacatgaaaatagacgtttaataaatgcttgctaaagggatgatcaccatcaaatgccccttatgcagatacgggagctcatgctgaaaagttaagcaacctggccaatatctcgtgatgtgccaatagggatataaaccaagtcagagggcttaccctgaatatgctctctccaaactgagattttgctaagcagggcaggaatttgaagaagggttcattttcttcctgtactttgacccaatgttaacaacagttgagatagacagggcatgrtttttcaactgatttgtttactagattgtcaaagaaatatatgcccattactttttcttaatcattagacatgaaatgtcatcaacaggaacaaaaagttgagctatacacgtataggaattgaactgaactgtgatggttttttatttccgggatgagtaaaaggaaaaataaagtggggatttaaacctaagatttacctggaaatcagttacagacagctttttcttatcaatggaaataaaggacaggaaggagctgaaaaagtaaa

SEQ ID NO: 944390 - DNA, 424 bp, Homo sapiens
agatttttccagttaatctttttgaacaggccatagtacaaccccaggcagcttatgatctggcttgttctggatctttttagaaaagcagggtctgtgggtagtgagattcctggacaaaggatgtggcatctttgctaagatatttaggacatgacacatttatctgtttcctcatttatgaaatcatatcgtgtaatgatgcccttcctgcttcrcaaagttaatcatgaagatcaaatgtgtaacgtttgagaatgttaaaaaattatgcagatgaacattattactaaatccttttctgtacagtatcttaaaatttccccagacatttcacttcatttcacttaaccagagttgtcatagtaaacttttgagtttaatttgaattttacttttttattatatactcagatgtaagttc

SEQ ID NO: 944391 - DNA, 580 bp, Homo sapiens
ttcttcccttgactttcttattagaagaggagtgttttgggggaagaaagcctgagtaaaaatgctgttctgctatgtgacattgttatttctgttccctgaacctcggttttcccatctgcacaatggacgcctttctctgagctgtrgggaggatcatttgaggtgtcatgtgaaggcaccagcacagcagggagtgcccttctggttcccatcccacatcttccccactgagctatataaggacagaaacattctttccactttggtttctctacatgagcgactccatcctgcatggagtaggaggcatgcccttggtttcccgggaatttggcaggtgttgggaatccattcctagaccctgcctgcctcacacacatgcttccgcttctacctggcagagaagctacaaatcaaagtcctcggtgtggcgcggtggctcacgcctgtaatcccagcactttgggaggctgagacaggcagatcacctgaggtcaggagttggagaccagcctggccaacatggcaaaaccccgtctttactaaaactacaaaaattagctgggcatggtggcag

SEQ ID NO: 944392 - DNA, 580 bp, Homo sapiens
ttcttcccttgactttcttattagaagaggagtgttttgggggaagaaagcctgagtaaaaatgctgttctgctatgtgacattgttatttctgttccctgaacctcggttttcccatctgcacaatggacgcctttctctgagctgtggggaggatcatttgaggtgtcatgtgaaggcaccagcacagcagggagtgcccttctggttcccatcccacatcttccccactgagctatataaggacagaaacattytttccactttggtttctctacatgagcgactccatcctgcatggagtaggaggcatgcccttggtttcccgggaatttggcaggtgttgggaatccattcctagaccctgcctgcctcacacacatgcttccgcttctacctggcagagaagctacaaatcaaagtcctcggtgtggcgcggtggctcacgcctgtaatcccagcactttgggaggctgagacaggcagatcacctgaggtcaggagttggagaccagcctggccaacatggcaaaaccccgtctttactaaaactacaaaaattagctgggcatggtggcag

SEQ ID NO: 944393 - DNA, 580 bp, Homo sapiens
ttcttcccttgactttcttattagaagaggagtgttttgggggaagaaagcctgagtaaaaatgctgttctgctatgtgacattgttatttctgttccctgaacctcggttttcccatctgcacaatggacgcctttctctgagctgtggggaggatcatttgaggtgtcatgtgaaggcaccagcacagcagggagtgcccttctggttcccatcccacatcttccccactgagctatataaggacagaaacattctttccactttggtttctctacatgagcgactccrtcctgcatggagtaggaggcatgcccttggtttcccgggaatttggcaggtgttgggaatccattcctagaccctgcctgcctcacacacatgcttccgcttctacctggcagagaagctacaaatcaaagtcctcggtgtggcgcggtggctcacgcctgtaatcccagcactttgggaggctgagacaggcagatcacctgaggtcaggagttggagaccagcctggccaacatggcaaaaccccgtctttactaaaactacaaaaattagctgggcatggtggcag

SEQ ID NO: 944394 - DNA, 748 bp, Homo sapiens
tctcattttcctatgagtacacaacagagttttccaacaaatgctattatttgctatgtgccaattactttctagaggctatgtgacatggaatgatgtcatcgcttcgacaattaatggaagatgggcttgtatatcttgtatattttcatgttttaaatatttcttaattttaatttcgaatatggtaaatatctagagctataccccacttacacaaatgctttgaggagtgcttaacaattcttaagaggataagagggtcctgagaccagaaagttaaaccgtatgaagttgatgatatttgacaacgtttaacctataaagatggcagcttcatgtcagcctgatatttacacaaggttgttaaaaaacccacacatgccttttccttggcttgagcagtctctcttcccctcctaagtaagctccttcttgtgtttcagagttcatcacaactttcgcctcctccaggaagtggtctctgagccctctggccatgtgcctctccttcgatgcactcattgtggttgaaagttkacatttgtctatctggtactttcactaatgatgtctgactcccacccacactacgagcttcctgtgtaccaggaccataagtgattttgttcatcagtggaccctcaaacccacagagcaagtattaacagagggcattgtttgttaatccatccatccacccatccattcatccatccatcagtccatctgtccgtctatccactaa

SEQ ID NO: 944395 - DNA, 531 bp, Homo sapiens
tgaaataaagaaaattatgcatgcccatgggggccaacatgaggacttgaggagggtttaagattctagtttctagctcatatgaaacccttaatgaatgctaattcatttacctccatagttcatcttcttttgaagttggsatgctggtgattgactaggggtgcagtatctctgtgaactggcctcagtgaccagccagaggcacaaacaggcattcagggaaagggtgattctgacctatgtctttgcttttttaaagaatgggcttgaggcttgcaccatatccagtttggccactccagtgctgtgccggtggctcaccacccagaatttgtggttctttgagggctggagtcatgccctgttcctttctctgttactccataatggctagcattgtagataaagcaaagactgtctaattgttcagcacactaattttccattgcatctagacctataggaaggccgcatttccagcctctcttgctgtgggttggggccatcttactgcgttctggccatggt

SEQ ID NO: 944396 - DNA, 454 bp, Homo sapiens
gtgcacacctataatcccagctactcgggaggctgaggtgagaggatcacttaagtccagaaggcagagttgcagtgagccaaaactgcaccactgcacccagtcttggcgacagagagagactctgtctcaaaaaaaaaaaaaaaaaaaaaaaagctgcccttaaaaccagagtggcggcacttttctgtcctgwtgccctgtactctctgctcaactgccatcacacttcctgtaagtgatggaaagaagtcagtcagaggaaaaagacagattgagtgcctccgtggccctggcatttccctgcagatctctggatttccatatatttgaaaacctaatataaacaacagagaagaaatttgcatttcgggcagcaaggaatgaaaaattgaggcggtgtaacgtattgctgagccagaaagagggatgaccgtggtgagtccaacctctt

SEQ ID NO: 944397 - DNA, 681 bp, Homo sapiens
cagagatttttatctaaggaaaaatgggatccatgcatttttaaaagggctggatgcagcaggaattttgcccccttcagggtcttatagggaattgagtggataagatagattgtacttctttccccagaaagtacagctagctgggactcttgagcgctgaggctcagtttaagtcctgccacttccaggtagccttctgtgatcactccttctccggatgtttggctggtgagagcactggggcgtcatctgcacatggatttgaactctaracccatgttaaacaagctctgctctcttaagaaggcatctcatccctaggactctcacgttcctcttctcagaaaggaacctgataatgactagaatattatcctggcaggaccgttctgaaaatcaaatgagatcatggatggggaggtgcctggtgctgggtctcactccctggcaagtggggccaggaagtgagtctgcagagtctttccctgatcactcaaattggatgctctgaaagtttctgtcctattccccctccctctcagagatactcgctctgacactaacagttttatttctggaatggaggatcagggacaaagcggaccctcttagttccaggagtgcccataaattatgggaagatgagaatattttaatacaaaccaaagaatctcacgt

SEQ ID NO: 944398 - DNA, 614 bp, Homo sapiens
cgttagttagatacaggcaaagccactcctttagtgctttctctagagttgatggcactagatcttttttagccaagtagaaagcaattttcaagggcataaaaataagtgttttcctatttatagcacacaaactattgttaccttgtaktccagtttatcatttccaatgtatttaattaatcaattccagaatctattgccaggcaaatagacacataatagacccaagtcattctcaagttcttataaatgcatgggctacagtctagagagctacatttgatccctaagaggaagttccccttccgtaacactgcctttggtgctcccagcagtagtctcttggtcttgatggactgtgtggttgacgggggtggtaatcatggtggaggggaaggggtgatcatatttttgtgctatgttttgagtgcttccagtagaagattatgtacattgatagctaatgataggtaaggcttttaaccacaggcccttccacagaactaatatttcatgttgagaaataatatgtcactgattgtggaaactcggcaaacatgaataaaagttgcactgaaggtaaaatatgctattcacctggttccctgaaa

SEQ ID NO: 944399 - DNA, 673 bp, Homo sapiens
caggggaatagcttgaacccaggagatggaggttgcagtgagctgaaattgtgccattgcactccagcctgggcaacaagagcaaaactccgtctcaaaaaaaaaaaaaaaattccttgtgattccactgggcccaccaggataatccaggatcatctcccatctccaggccgggtgattagcaacctttgttctcccttgccgttaaaggaacatttttgaaagtttcagagattaggatgtggtcatatttacaggccatttttctgcctccccacacagttacccacacagttacccatcgcataatagggctggggctgggggatgtgagcagaatccctccatacccaacatataaccacgcgaggcccccarctgagggcccggtgtgttgggcagagagctgaaggcaggggaacactgtccagtcgctgcacagcagtgtgaggaaaggaagaggagtcgtctgtaaaaacccattgactgtgctcatttcacactgcgtgcctctatcaaaacatctctagccaggcgcggtggctcatgcctgtaatcccagcattttgcaagggtgaggcaagcagaccacctgaggtcaggagttcgagaccagtctggccaacatggcaaaaccccgtctctactaaaaatcctaaaattagccagggcc

SEQ ID NO: 944400 - DNA, 587 bp, Homo sapiens
atatatatcttgtcaccataaaaaaaaaaattgtagccaagcatggtggcatgtgtgtctgtagtcccagctactccacagcctgaggcaggaagatcccttgagcccaggaggtcaaggctgcagtgagccaagatcgcaccactgcactccagcctgggtgactgagcgagaccccatctcaaaaataaataaattaactaattaaatcattcaagggctggggacggtggctcacacctgtaatcccaacactttgggaggcagaggcgggtggatcacaaggtcaggagttcaagaccagcctggctaatatggtgaaaactgtctctactaaaaatacaaaaaactggcacgcacctgtagtcccagctacttgggaggctgaggcaggagaatcgcttgaaccckagaggtggaggttgcagtgagccaagatcacatcactgcactccagcctgggtgacagagcaagactccgtctaaaaaaaaaaaaaaaaaaaaaaaggaaaggtcatttcccaatccaaaaaagtaggaagtatgtaccctttttgaaggggatctgctcctccacacctgtgggt

SEQ ID NO: 944401 - DNA, 578 bp, Homo sapiens
ttaattcaacttgccaacttacttcccctttaccacataatctaacatagccacaggtttcggggattaggacatggacatctggggagaggggtacatgattctgccctcccatacctaccattgccctggcttcatcatccctggttttatagaaatttctattgagaagaaaacctctgagaaccttcctgagcacgctgtctaatccaatattaagagcatgggctctggggacagacaggcttgcacccatcttaactctgccatctgtgagttcagagaatggtgttggacacatgacggctgatgaacagtggacaggttgcttcacctctcggagctcctgtaaaatgggtttatggctggttggggtggttcacacstgtaatcccagcactttgggaggatgaggtgggcagatcacgaggtcaggagatcaagaccatcctggctaacacggtgaaaccacatctctactaaaaatacaaaaaattagccaggcgtggtggcacatgcctgtagtcccagctactcaggaggctgaagcaggagaatcacttgaacccgggaggtgc

SEQ ID NO: 944402 - DNA, 820 bp, Homo sapiens
gctggagtgcagtggtgcgatctcggctcactgcaacctccactacctgggttcaagcaattcagttctcctgcctcagtctcccaagtagctaggactacaggcgtgcaccaccacacctggctaattttttcttttttagacgcagtcttgctctgtagccaggctggagtgcagtggcgcgatctcggctcactgcaaccactgcctcccaggttcaaacgattctcctgcctcagcccctcccgagtagctgggactacaggcgtgtgccaccatgcccagctaatattttttgtgtttttagtagagacggggtttcacmatgttggccaggttggtctcgatctcttgacctcgtgatctgcccacctcagcctcccacagtgctgggatgacaggcgtgagccactgcacctggccacgcctggctaatttttatatttttagtggagatgggatttcatcatgttgcgcatgctggtctcgaacttttggcctcaagtgatccacccgcctcagcctcccaaagtgctgggattacaggagtgagccaccacgcctagccagtttttgatttttaaagcatttttgtttcagagtttgaaggtttcccagctttttatggtcctgcagttccataaaaagagaaccctggttatcacagggatatgctgacagttcccgctccctctgcgaggaggaactgaaatgggtgggaggaatgtgttaggccatgaaaagtttttatctgtggtcttttgactcctgccacatctctgcctccggtctcggaggagcctggccagggttctcggtc

SEQ ID NO: 944403 - DNA, 648 bp, Homo sapiens
tgagacctttcaaaggactgtaaagtgcctcattcagataaagataagtgttcatatagagtatcatccaagcctggacacttttgtgcatgaaaggaggcactattagtaatgattctgggatggaggttggcaaatttttcctaaaaatggccagatagtaaatattttaggttttagaagacacatacggtctctgtcatatattctttttctttttaaccctttaagaatgtaaaaaccattctaagcccagacaccrtaagaaaacaggccaggaggccgggcacggtggctcacgcctgtaatctcagcactttgggaggccgacgggggcggtcaccagaggtcaggagttcaagaccagcctggtcaacatggcaaaaccccatttctactaaaaatacagaaaaattagccaggtgtggtggcacaagcctgtaatcccagctactcagaaggctgaagcaggagaatcgcttgaacccgggaggtggaggttgcagtgagccgagatcgcaccattgcacttcagcctgggcgacaagagcaaaacttggtcttaaaaaaaaaagaaagaaagaaagaaagaaaacaggctaggatacaagtttggctatgggcttgggggaaaacacacatcaagtc

SEQ ID NO: 944404 - DNA, 670 bp, Homo sapiens
ttttttttttgaaaaagacttttttgataaagaatgtggtactctggcactctgggaggccgaggcgggcagatcacttgaggtcagtagttcaagaccagcctggctaacatggtgaaaccccatctctactaaaaatacaaaaaaaaattagccaggcatgatggcgcatgcctataatcccagctaagcgggaggccgaggcacgagaattgcttgagcccaggaggcagaggttgtagtgagccaagattgtgccactgcactccagcctgggtgacagagcaagattcccactcaaaaaaaaaaaaaaaaaaaaaaaagaaagagagaaaagaaaaaaagaaaaagaatgtgggccaggtgcggtggctcacacctgtaatctcagcactctgggaggccgaggygggtggatcacctgaggtcaggagttcaagaccagcctggccaacatggtgaaaccccgtctctactaaaaatacaaaaatcagccgggtgtggtagcacacacctgtaatcccagcctctcaggaggctgaggcgagagaaacgacttgaacccaggaggcggagaggcggaagttgcagtgagccgagatcgcgctgctgcactccagcctgggtgacagagtgagactccatgtcaaaaagaaaaagaaaaagaaaa

SEQ ID NO: 944405 - DNA, 606 bp, Homo sapiens
acctgtttgaggtcttttgagcttcatggatctagatgtccatatctctatcaagacttggacaattttcaactattattttgttaaataagatttctgtgccttttaccaactgttagtcctctgaaaacctcataatgaagatatttgtcagcttaattgtgtcccacaagtcctataagctttgtttactctttttgattctgttttctcttttgtactgtgggttatttcaaaagacatgtctttaagtttagaaattcttatttctacttgatctagtctgctgctgatgttctcaattacatttttaattttattcattgaattcttcagctgtaagactttgtttggttctttttttatatacatctatctctttgttgaatttctcattcagatcatratttgttttcctgatttcattgaattctttacccatgttctcttttacctcactgagttcccttaagataattatattgagctttttccaggcaatttgtaaatttctatttctttggggtcagttagtggagaggtattgtttctctgatggtgtcatatttctttgttgtttttttttcatgtttgttgtgttcctgc

SEQ ID NO: 944406 - DNA, 708 bp, Homo sapiens
ccggcccgctggcttcagcaggggcaggaccccctccaattctgctctaggctctctgcaccaggtgcagctcacttctctgaagatgaagcaggcataggcccagcacacgtgcctgctgggagatcaggcacagacaggcacggggggcaacccacggccagcgccctggctgaggactgggagggaaatttggaagggctggaggacgattccctgagacccatgaaggctcactgcagggggtagggcctcttttctgctgtgggttctgaagtagagaaacccagtgccttctcgaacccagcaatgtccttcaaggcctggcttgggaagtcctgcctggcctcccgcccaccccccacattgtccccccaccacgctgcctgcctgcaacacccatcacccattttgttttctttttcagagacggaggctcactatgctccccaggctggtgtccaactactgagctcaaatgatcctcccgcctctgcccccgagtagctgggactaygggtgtaccactgcgcccagctccattttggagtttgtcccaccagccagtgtgatgagatcatcaccccccacagcacccgtgaatctgggcagtattagggagccatatctgagaggctgagttttgtacctcactgtggcacctcggccccgcagagagcttctggcactaaatacacattcagagag

SEQ ID NO: 944407 - DNA, 630 bp, Homo sapiens
ctgagccctcccagatcccattgctgcggctgtgggcattggatgtcctgatcggctagcactgggtcacacgccccatgcctgccatcggaactccccagaacacatgtatgggagggtccccaaacgggggctggacaccaggtgaccctccagtgcagccctcacagacgctggctgggtcccacagtcctgccccgccatgtttctgtgaggactgtggaaccagcagccatcaccacagagaagcagggaggggacgccctgggctaccccccgggaagcagcagatcccccgcgcgcctcccatctgagggacaggcagggacggtcactgcagctctggtttctggccttcgtgacatcttcccttgcaggctctgggcatgtctcacccgtctctgtcccctctgccatggggtccctgcccagagctcacctatttcsaatgtgtgcgctgctccttttgccaccttgtgatgtcaccaagcctgtgtgggtcctgcatgctgttggtgacaacctgcaaatctctaacttctgtacctcaagtggtcctgaaatcctatttgacttccccaaaacacttacattcctgggagtgtgacacagcttggaggtaggactcag

SEQ ID NO: 944408 - DNA, 688 bp, Homo sapiens
agctcaggagttccagaccagcctggccaacacagtgaaaccccgtctctacaaaaatagaaaagttagccaggtgtggtggcgcatgcctgtagtcccagctactggggaggctgaggcaggagaatcgcttgaacccgagacgcagaggctgcagtgagctgagatcacactactacactccagcctaactccatctcaaagaaagaaagaaagagagaaagagagaaagggaaagagagagagagaragaaagaaaaacagagagaaagaaagaaagaggaagagaaggaaagagagaaagggagaaagagagagagagagagaaagagagaaagaaagaaagagagaaaaagaaaagaaaagaaagaaagagggtcttaccatgttgcccagactggtctcgaattcctgggctcaactggtcttcccacctcatcctctcaatgtgctggcattactggtgtgaaccactgtgcccggccaagcctttctaactaaatgctaattgagctccttctgtatgccactggggcactgtgtatttctctctctgtgtctgtgggagcagggaaggggaggctcaaaggtgagagcacccccacccccgaggatctcgtgccctgggccccctgcgcacagagccttggcccagcccacccctcacccacaggatggtgcaggagca

SEQ ID NO: 944409 - DNA, 688 bp, Homo sapiens
agctcaggagttccagaccagcctggccaacacagtgaaaccccgtctctacaaaaatagaaaagttagccaggtgtggtggcgcatgcctgtagtcccagctactggggaggctgaggcaggagaatcgcttgaacccgagacgcagaggctgcagtgagctgagatcacactactacactccagcctaactccatctcaaagaaagaaagaaagagagaaagagagaaagggaaagagagagagagagagaaagaraaacagagagaaagaaagaaagaggaagagaaggaaagagagaaagggagaaagagagagagagagagaaagagagaaagaaagaaagagagaaaaagaaaagaaaagaaagaaagagggtcttaccatgttgcccagactggtctcgaattcctgggctcaactggtcttcccacctcatcctctcaatgtgctggcattactggtgtgaaccactgtgcccggccaagcctttctaactaaatgctaattgagctccttctgtatgccactggggcactgtgtatttctctctctgtgtctgtgggagcagggaaggggaggctcaaaggtgagagcacccccacccccgaggatctcgtgccctgggccccctgcgcacagagccttggcccagcccacccctcacccacaggatggtgcaggagca

SEQ ID NO: 944410 - DNA, 650 bp, Homo sapiens
caccacctgattttccagacggggaggttgggacctgaagcagcagcccctggggggtgtccagagccagagcctgggggtctcccagtagggcagcaggtgggctccagccaggtcagcctgccttcctgggttcrtctgcccagagggcgttttctatgacccagcctgaacggagctagaaaccaggcggtgcctgggtgcgtccatccctggctcatgcacgctgtgcttccaggaggcgggccctgcaagcagcagtgccgagacacgggtgacgaggtggtctgctcctgcttcgtgggctaccagctgctgtctgatggtgtctcctgtgaaggtaatgtccctatcccaggtgccagcaggactggccggtcactgtgcttgggagctctgtgctggaggactgaccagggcctgccttctacaacccagaccccattcaggggtggagagcagcccaggacgcgctttctcgtgttcgctggagtttgcagcgcagaggcccctgccgagacttccctccaagacaatataagcactggggttgggaaagaggatggagttggggtctaaccaggttccggatccaggatctgctgagtggccttgggcacatccttcagcctctcctggcccccgcgtct

SEQ ID NO: 944411 - DNA, 777 bp, Homo sapiens
tgcagtcattggaattttgagtgcagttctgcaggaattttaaaaattccttgtcacaatttgtcacattcaaacatcatttaaacagtttatacctctagtttttctttcttacgttacaaaatgtttggaattgttgcttatggagctagcacctgatcaccgtcccagctcctcctcccaaagctctcaagttagctttaaaaatactgtttacagtagctgtgctggaaaccacatgctcctgccatggatgcagccgattcaggaacagacttgatcttcctaaggcattgcatgcaaatcctcatcaagctctagataaaattacctgcttcataaaacagaaaaggcacatatttcaaaatgaaatgtgagtaacattttcatgctagttgccccttagggtggttgtcatgaagggatccagaaaccagggctgtccagagagggtcgttatcagcagtgcccgggagtatggtgctggggcttcatctggctgtttcctattcacacagaccccagagtgcgcgccgagtccatggaacaccagatctttgttygttttgttttgttttcgttttggggaaagtgaaaaagaaagttaagcatcctccagcaagttcaagctaaaatgtcactgtgaaggcagaactctgaagtctgaaaggtgatgctcttggggatttttttccattgacgcctcagatgctttgcggttaaaaaccttactgatttgaaatgagaagtgaactctatcgcaatattattagggaa

SEQ ID NO: 944412 - DNA, 762 bp, Homo sapiens
gtttgcaaactcctgggctcaagcgatcctcctgcctcagcctcccggatagctgggcctacaggcacgcaccaccaaccaccacactcaactaatttttgttttttctttctttttttttttttttttttttttttgagacagagtctcgctgtttcgcccaggccggactgcagtggctgaatctcggctcactgcaagctccgcctcccgggttcacaccattctcctgcctcagcctctcgagtagctgagactacaggcgcctgccrcagcgcctggctaattttttgtatttttagtagagacggagtttcaccatgttaaccagaatggtctcaatctcctgacctcgtgatccgcccgcctcggcctcccaaagtgctgggattacaggcgtgagccaccgcacccagccctaatttttatttttatttttactagacctggggttttgctatgctgcccaggctggttgcaaattcttggcctcaagagatccttctgtctcagcctcccaatgtgctggattacaggtgtgagccactgaacctggccctttgttttctgattataagaatgccttattttgggagctaacatgtcagcttcgccgcaatggaatggatagattcatctgtcaccctaccaaagtccaccatgggctggagcaaccacccaaggcttccatcctccacacagtgactcagtgaccaggctgcccggtttgtcctgcaccaggtgtcctcagttgccacagca

SEQ ID NO: 944413 - DNA, 652 bp, Homo sapiens
ctttatgttgaagccaatgcctatttaccattccaaaaatcctagggcctttaagaattatgctaaaagctgctcttcttgtgccacataaatggaacaacaaagcctggatgacagtacatctatttacagcattatttactgaatattttaagctcaccgtttagacctattttttttaaawggctttcaaaatactactactcattgacaatgtacctggttacccaagagttctgatgaggatgtacaaagagattaatgttttcctacctgctaacacaacatccattctgtagcccatggatcaaggagtaattttgactttcaagccttataatttaagaaactcattttataatgccatagcttccatagacagcgattcctctgatggatctgggcaaagtgaatggaaagccttctggaaaggattaaccattctagatgcagaataatcccatttaactactttttcttttgttgcatatgcttttgaggtctgaaaaatccttgcccagacaaatatcacaaaatgttttccctatgttttcttctagtagatttatctttttaggtcttacatttaagtatttaatccattttgagttaatatttgtaatgatgagagatagaggtctagttttacttt

SEQ ID NO: 944414 - DNA, 567 bp, Homo sapiens
taaatttgtaaaatgcaaaactgaatgaaactgttactaccataaatcaggatatgtttcatgaatatgagtctacctcacctatattgcactctggcagaagtatttcccacatttaattattgcctccccaaactcttcccacccctgctgccccttcctccatcccccatactaaatcctagcctcgtagaagtctggtctaatgtgtcagcagtagatataatattttcatggtaatctactagctctgatccataagaaaaaaaagatcattaaatcaggagattccctgtccttgatttttggagacacaatggtatagggttgtttatgaaatatattgaaaagtaagtgtttgttaygctttaaagcagtaaaattattttcctttatataaccggctaatgaaagaggttggattgaattttgatgtacttatttttttatagatatttatattcaaacaatttattccttatatttaccatgttaaatatctgtttgggcaggccatattggtctatgtatttttaaaatatgtatttctaaatgaaattgagaaca

SEQ ID NO: 944415 - DNA, 629 bp, Homo sapiens
cttcactatctccccatccacactccccaccgccagccctctgcaaacattaatccacttagagtctctatagctttctctgttctggacctttgtaagaatgaaatcgtataatatgtggcctttggtaactgtcttctttcatttagcatcatgtttttaaggttcatccacattgtagcatgcagcagtgcttcattcttttttatggctgaataatatttcattatatggatataactcatttggcttcattatatggatataactcatttggctattattaaccatgatgctataaacatttgtgcacatgtttttgtgtagacatattttttttcatttcttttttgggtatccacctgagtaaaattgctgggtcacatggtaactctgtgtttmattacttgaggaactgttagacctagaccattttccacagtggccacaccaatttacattcttaccagcagggtatgagggttccagtttctctgtcaacacttgttattatctgactttcagattctcatcttcctcctgggtattaaagtgtcatctctttatggttttgatgtgaatctccctgatagctaataatatcaagtgtctttgtgtgtatatttgta

SEQ ID NO: 944416 - DNA, 542 bp, Homo sapiens
ctactttgtgcaaggctttatggttggggcaagaggcggttctcctcctccagcctcagtctcatgcaagccatgggggtgtgagcttcagggctgggtcccctttctccgtggcactcagaccttgttttgtaattgtggggtcttaggtgagagtgagtttcctgtccctctctcattggcggcaaacctctgctttgtatcagtgcaggatcatggtcacaagtgtgagtttccttgccccgtccaacggcagatggtttttgcttcaactcctccctgcctacagycaactttgttggctgacaccaggggataggaggttttgtatcactcccctggtggcagatggctttttctttatgtaagagaaggacctgggtttcatgtctctctcacagtggtagctggttgtcacctgcatgcctgtgtcaccaaaaggagtctctttcagttctcctgctctgtccccagtttttcttacgaatacccagtggaggctatgaaaaagagccagtaatttgggctaaactctccttgta

SEQ ID NO: 944417 - DNA, 620 bp, Homo sapiens
tgggaacccaactcttgcattagtgtgacctgaatatgagacctggagtcaaaaaagatcattttggggctttaaaatttgactgcctttctgaatttcaaacttgcatggtccttgtaactcctttgttttggccaatttatcccatttggaatggctgtatttacccaatatctgtacccccttgtatctaggaagtaactagcttgcttttgattttataggctcataagtgagagggacttgctttgtgtcagatgaaagtttgccctgtggacttttgggttaatgctgaataagaatttgtgggactgttgcaaaggcatgattggttttgaaatgtgaggatatgagatttggatgggatgaatgatatggtttggctccttgtcgccacccaaatctcatcttgaattgtactcctataattcccatgtgttgttggagggacctggtgtgagataatttgtyatgtgggtggtttccaccatattgttcttatagtagtgaataagtctcatgagatccgatggttttatcaggggtttccacttttgcatctccctcattttctcttgctcccaccatgtaagaaatcccttgcacctcctgccatgatt

SEQ ID NO: 944418 - DNA, 571 bp, Homo sapiens
caatagaaaatggctacttgaggaccagatatgttcaccatggaagctccatctttctatttttcttagcatgtgtacagttagaaagaagtaggcaacatggagaagctcagggacagaaccgacctgcataataaaacatytggatgggggttccagagatttgcaccctatgaagatggcacaactggtcctaaccagtttcttataccctatgtagatcagacactagctcttgtataaaaatgcctgaattcattattgattggcaacagatttttctgggatccccctctgtagcagagagctactatcttttttttttttttttttgcctatcaaatttctgctcttatcctcactctttgtatgtccacattcttgattttcatggtcatgagataatgaacttcaggtgtcatgccagacaacgaggctgcttcatcagtaccatccaggaaacataagttcaccaatgaactaaataaggcaccagggatcaatcctggagacagacctatatgaactttcagacatagaattcaaaacagcagtattgaggaaactcaaa

SEQ ID NO: 944419 - DNA, 575 bp, Homo sapiens
ctagtttgtgaccagaggtttttgtaatattttctgatggttgttattatttctgtgggttcagtagtaacatttcctgtcatttctaattgtgtttatttggactttctctcttttcttctctattagtctagccagtggcctatccattttattartttattttaaaagacgaacttctagagtcattgactttttggatggttttttgtgtctctctttttgtcagtgtagctcaaatttttatttctcatcttctgctacctttggggatgatttgttcttgcttctctaattcttttggttgtgaagttaggttgttaatttgagatctttctaactttctaatgtgggtatttggtgctaagaatttccctcttaacactgcctcagcagtgtcccaaagattctagtatgttgtatctttgttctcattatttccaaagaacttctttatttctgccttaatttcattatttatccaagtcattcaggagcatgatgtttaatttccatgtaattgcatgtttttgagcaattttgatagtctttacttctatttttattgcactgtg

SEQ ID NO: 944420 - DNA, 575 bp, Homo sapiens
ctagtttgtgaccagaggtttttgtaatattttctgatggttgttattatttctgtgggttcagtagtaacatttcctgtcatttctaattgtgtttatttggactttctctcttttcttctctattagtctagccagtggcctatccattttattaatttattttaaaagacgaacttctrgagtcattgactttttggatggttttttgtgtctctctttttgtcagtgtagctcaaatttttatttctcatcttctgctacctttggggatgatttgttcttgcttctctaattcttttggttgtgaagttaggttgttaatttgagatctttctaactttctaatgtgggtatttggtgctaagaatttccctcttaacactgcctcagcagtgtcccaaagattctagtatgttgtatctttgttctcattatttccaaagaacttctttatttctgccttaatttcattatttatccaagtcattcaggagcatgatgtttaatttccatgtaattgcatgtttttgagcaattttgatagtctttacttctatttttattgcactgtg

SEQ ID NO: 944421 - DNA, 512 bp, Homo sapiens
actctaccaggaagaattctacccttttttcactggagaacatgggcgagtgtggctggaagccttgcttgggacatccgtccagtgaggaggagcaggatctggtacccacttaaagcagcagtctggtcacatgttgatagagcagctgtgttgtactgggggatccctaacatccccagtaggctcggactctccaaagcctgaaggctgaaagggctagggtgcccaaacggtaaagatggaggcctgtgcctagcttcaagagctccttcttagggrgatgcaatatcgccattggtggctggctggaatttcaagtcaatgggtcttatcttgtgagatgccatggaagtggggccttcaggctgtcactgctcaggcccaaggagtaagcctcttttataggagtatgtatgggtgtctaacctcccactttgctggaactttatttgttggaaaggccaagtatcttaggctagctgtgcatgcatgagtggctgctctgctga

SEQ ID NO: 944422 - DNA, 704 bp, Homo sapiens
aaggctacatactgaataattccaacaacatgacatctagcaaaggcaaaactagacgaagtttgtgaaaagatcagtggttgccaaggtttgggtggaaggagtgataaacaggtggaatgcgggatgtttaggggagagaaawtattctatacgataccgcaatggtagatacatgtcacacatttgccaaagcccatagactaaataacactaagaatgagccccagtgtcaactagggactttggacgacgatggtgtgtagatgaggttcgattataaaaactatacccctctggtacaggatagtgagggagggaagctttgcacgtgtaggggcagaggcctatgcaaactgtactttctgtacaattttgccatgaactgaaaactgctctaagatgtaaactctattaatttttttttttttttgagatggagtctcgctctgtcgcccaggctggactgcagtggcacaatctcagctcactgcaagctccagctcccaggttcacaccattcattcccactcctccagagtagctgggactacaggcacccaccaccatacccagctaattttttgtatttttagtagagatggggtttcaccatgttagctaggatggtctcgatctcctgacctcgtgatccgcccacctcggcctcccaaagtgctgggattacaggcatgagccacccc

SEQ ID NO: 944423 - DNA, 607 bp, Homo sapiens
gtctaggcagtaaagcaccaagaacttcttgcttaagaagaacatggaaaaataattggaaaatatttcacaaacaggagcaaagggagaaagcaaaattaatgcttttggctgacagtctgtcttctagaatgactttctttggcctyaggaaacccttggactctaggtaaccaagaagtgtcttggaaagacctctcaaatctaaaattcagggaaacccagcaccatttcttgcaacgccacaaagaggcaagtgcagatcctaacccgcactccgcttcaaaggtgcttcacttttgagatgtcggttctgaggtggtggtggttgtttgacagccgtatattattaataccttcaaccgccaatactaggagctccgatcatgttttgatgaccaacacgagtctaacatataagtaagcttgggaattttattcttcaaaaccacaggtaacaaatttcaaatgctaaatttttttttttcaatcaagtacagaagaaaggaaacaccttcatttattttctaaagtctattcttcaaaataatttctccttctttttctgtctttgcagtgatcataaaagggcattttattagtccat

SEQ ID NO: 944424 - DNA, 607 bp, Homo sapiens
ctaggcaacatagcaagacctcatctacaactctttttttttttttttgagacagagtcttgctgtgtcccccaggctagagtacagtggtgtgatctcggctcactgcaacctctgtctcctgggttcaagcgattctcctgccttagcctcccacgtagctgggactacaggtgtgygccaccacacctggctaatttttgtatttttagtagagatgtggtttcaccatgttggccaggctggttgcaaactcctgacctccggtgatccacctgcatcggcctcccaaagtgctggtattacagtcgtgaaccaccgttcccggcctccaattctaaaaaaaaaaaaatcccatcatgtctgtctctgatacctgcctctttagggtgatggggtaggtggaaaacccaagtaatgtgattttgtaacatccactgctgcatttgtttgcggtgaagtaggagccttgatctgatcatacaccttgtggcaaatccaaatgctgtaaaagctgatgtgctaacactgcaataacgtaaatagaggctgctaccttgcatgggtaagccaatagatgactgtgtaggcatccaccgctgttcag

SEQ ID NO: 944425 - DNA, 558 bp, Homo sapiens
caaacttagaggcttaaaacaacacaaattttggccaggcatggtggctcacacctgtaatcccagtactttgggaggccgaggcgggtggatcacttgaggtcaggagtttgagaccagcctggccaacatagggaaaccccatttctactaaaaatacaaaaattagcygggcgtggtaatcccagctactcaggaggctgaggcaggagaattgcttgaacctgggaggcagaggttgcagtgagctgagatcacactattgcactccagcctgggcaacacagcaagactccatctcaaaaaaaaaaaaaaaaaaaaaaaaaagaaagaaaagaaagaaaaaaaagaaaagaaaagaaacccataaatttcttctcttacagttctggaggctgtggtgtgggtggggctgtgctccttcaggggctctaggagagaatctggtcactcattgcccttctggcttccagaggcacctgcattccttggcttgtggccatttcctgcagcttcaaagccacagaggtggcatcttccaatctctctctgttccca

SEQ ID NO: 944426 - DNA, 763 bp, Homo sapiens
ggctgtgcctgctgggcaaagccctgggcagggaaggaactgcagcctccacagagggtggatgtggtggagaggtgggaggccagctcctgtcatccgaggtccaggcaagccaggaaggggtacggggagagctctaggaggtagaaatgggctagacttcccgacctcaggtgattcgcccacctcagcctcccacagtgctgggattacaggcgtgagccaccccgctcggcctaatttttgtatttttrgtagaggcagggttttgccatgttggccaggctggtcttgaactcctgacctcaggtgatccacccatcttggcctcccaaagtgctgggattacaggagtgagccagcgcacctggcctggttttggtttttgtagaggcagggtctcactatgttgccctggctggtcttgacctcccagcctcaagcaatcctcctgccttggcctcccagagtgctgggattacaggcgtgaaccgccatgcccggctgccacagctaccttcccatcacaccagtcacgttgagcagttgtaacagagactggtgacccaggaagcctaaaagatttgctttctatcccttcacagaaaacgtttgccagctcctgcctcagagagttttgtttcgttttcttttgtttttttgagacggactgttgctctgtcgcccaggctggagtgcagtggcgcgatctcggctcatcgcaagctctgcctcccgggttcacgccactctcctgcctcag

SEQ ID NO: 944427 - DNA, 705 bp, Homo sapiens
ccacagagggtggatgtggtggagaggtgggaggccagctcctgtcatccgaggtccaggcaagccaggaaggggtacggggagagctctaggaggtagaaatgggctagacttcccgacctcaggtgattcgcccacctcagcctcccacagtgctgggattacaggcgtgagccaccccgctcggcctaatttttgtatttttggtagaggcagggttttgccatgttggccaggctggtcttgaactcctgacctcaggtgatccacccatcttggcctcccaaagtgctgggattacaggagtgagccagcgcacctggcctggttttggtttttgtagaggcagggtctcactatgttgccctggctggtcttgacctcccagcctcaagcaatcctcctgccttggcctcccagagtgctgggattacaggcgtgaaccgccatgcccggctgccacagctaccttcccatcacaccagtcacgttgagcagttgtaacagagactggtgacccaggaagcctaaaagatttgctttctatcccttcacagaaaacgtttgccagctcctgcytcagagagttttgtttcgttttcttttgtttttttgagacggactgttgctctgtcgcccaggctggagtgcagtggcgcgatctcggctcatcgcaagctctgcctcccgggttcacgccactct

SEQ ID NO: 944428 - DNA, 602 bp, Homo sapiens; identical to SEQ ID NO: 929615

SEQ ID NO: 944429 - DNA, 622 bp, Homo sapiens
acagacaatctcaggacaggaacatgcaaataaccgaatgtttccctaacttcgtattgactttggcttctaaaatcaattttctttattagcagatgaatctctgcaaaagactggctgtgcggaatctggataaattatttaagcagtaaattgtttccattctaactggtaagagcaggatgctttaatggtatatagcagaagctaagggcctggggcaaggtcaccctggaggggaaaatgagagcttaagcaatccacaaaactatatctttgaggtcagaaccagacaggacatccacactgcacaacccccacaaagtgctgttcaaattgtagcctaagtgtgattaggcagcctacgcactgtrcagccttacacagtggctttggtaacctctctctctctctctcattgtctctctctccccacctccccatgatagagagagagagagagagagagagagagagagagagatgatagatagatgatagatagatagatagatagatagatagatagatagatagatagatgatagttatattagatagatgatagatagatagataatagatgaaattagcatttagatagattagatagatagataga

SEQ ID NO: 944430 - DNA, 558 bp, Homo sapiens
gcacagcacggggtcttgcccaagacctgctgtaaccactccttagctattgcatgagtttgctgaaggccctggggctctacagtcatcacatggtaaaaacagccaggcctgtgtccttcccttcaggatggcaagttctcctagcctccaggtggatccaaaggtgctgtctgggaatcagggcctagatcaaaaactgtaaaagtctacgtagtgttttattgtgctatggctgagctgtcactcaaaccacaagatgcagtccctcccactatttccacccctgtccaaagacagaggagcatcaatccagggccacctcaaacacaggccatggggaggtactgccagactaccaccaatgttctcataaggcccaaaggctcttaagtcagtttgyagtgaatgctcctgttaattatttttaaatgcttttttttttttttcttttgagacggagtctcaccctgtcacccaggctagagtgcaatggcatgatctcggctcaatgcaacttctgcctcccaggttcaaatgattctcctgcctcagcct

SEQ ID NO: 944431 - DNA, 571 bp, Homo sapiens
gtaagcgtttgtgtataagtctttgtatagtcatatattttcatttctcttgggtaaatacataggaatagaattgctggatcatatggtaattgtatgtttaactttataagaaactgccaaactgttttccaggatggctgtactatttcatattcctaccagcagtgtataaaagttcctgttgctctacatctttgtcaacatttggtattgtcaggttttaaaaattgtagtcattctgacaagtgggtggtagtatctccctgaggctttaatttcacatccctgaagactaatgatgttatttatcatctgtatattttcactgacaaagtgaaactttcaacraagtgatactgtacacatcttttgcccattttaaaaattagattactttctttttactgagtcatgagactcactacatatatatgtcttatatatattgtatattctggatacgagtcctttggcaaacatgtgatttgtaaatattttcactcagtctgtagcttgtcttttcatttccttttttttttcctttctaagaaaaatagagaatcttttc

SEQ ID NO: 944432 - DNA, 577 bp, Homo sapiens
tttgttgacatacaattgttcatagtagtctcttaaaatgctttgtatttctgtgatatcagttgtaatgtctccctttgcatttgtgattttatttacttgaaacttttttatttcttagcttagttaaagttttgtcaattttttatcttttcaagaaaactgttcattttatttcttgtatagtttttctaacctctatttcatttatttctgctatgaccattattattttcttcctcctgctatctttgaaatttgtttgttctgtttttagtttcttgaggtgtaacattaggtttttaaatatatttcttcttttttgatgtagtgtttattgctataaaattttattatttatttatttttgaggtacrgtctcactttgtcacccaggctgaagtgagtggcacgatcatgactcatggaagcctcgacttcccaggatcaaatgattctcctacctcaggcccccaagtagctcagactacagacctaagccacaacatcaagctaatttattattattattactattattattattgtagagacagggtctcactcttttgcccca

SEQ ID NO: 944433 - DNA, 593 bp, Homo sapiens
attgccctgaccagaacttccaatactatgttgaataggagtggtgagagtggacacccttgtcttgtactggttttcaaagggaattcttccaggttttgctcattcaatatgatattggctgtaggtttgtcataaatagttcttattatttagagatatgttccataaaaacctagtttattgagagtttttaacataaagggatgttgatgttgaattttatcaaaggccttttctgcatctattcagataatcgtgtgatttttgtctttggttctgtttatgtgatggattacatttattgatttgcatatgttgaatcagccttgcatcccagggatgaagccgacttgttcgtggtggatatgttttttgatgtgctgctggattcagtttgccagtattttattgaggatttttacatcaatgttcatcaggtatattggcccraagtttgttgttgtgtctcttcccagttttggtatcaggatgatgctggcttcataaaatgagttaggaaggaattcctccttttccattgtttggaacagtttcagaaggaatggtaccagctcctctttgtatttctg

SEQ ID NO: 944434 - DNA, 602 bp, Homo sapiens
ggcacacagctaggcagactctcccaccaggtgcccctgcccaggcctcctaatcgggggcagacaggcagggagggtgtggctgggctgggctgggcggggcggcctggggcaggggtgtggcccctaaatgtccccaacctcagagggacctagagtcctgagcctccaktagcttctctgggcctggcagaggtaagggggaggcaaccctggagtgtctggaggcccatggctggctgaaccctggatgccttttcttccgcgtccccatgaatgaaagctgtctgggccttcattctgcagacagggacaaacagctccatgctgtttgtcctcccagtgcagccgtgctgggagggtctgggggagcttcctacaaggagagactcctgctgctttggaaaactgagaaaaaataggggtctaaccctctcctcccattttacaagtggggaaatgaggcgtgaaaggagaggcgtctgggttactccgtgggtctggggtccagggaagggcctgtatgggggagggagctgggaggggacggtgtctggctctacccctgtggggtggggaggtggggctcccctgtatcacag

SEQ ID NO: 944435 - DNA, 578 bp, Homo sapiens
cctggcacccgtggctagcctggcgcccgtgtgtgtgtgtgtgtgtgtctggctagcctgtgtgtgtctggttagcctgtgtgtgtgtgtgtgtgtctggctagcctgtgtgtgtgtgtgtggctagcctggcgcccgtgtgtgtgtgtgtgtctggctagcctggcamccatggctagcctggtgcccgtgtgtgtgtgtgtgtctggctagcctgggacccgtggctagcctggtgcccgtgtgtgtgtgtctggctagcctgtgtgtgtctggttagcctgtgtgtgtgtgtgtgtgtttgtgtctggctagcctgtgtgtgtctggttagcctgtgtgtgtgtgtgtgtgtgtgtgtgtgtgtgtctggctagcctggcgcctgtgtgtgtgtgtgtctggctagcctggtgcccgtgtgtgtgtgtgtgtgtgtgtgtggctagcctggcgcccgtgtgtgtgtgtgtgtgtgtgtgtttcctcagtctttaaagatgctcacgttgctttctcccgtcccatacctcctctgctatcgatcgcttctctttcatcttcctctggctgtgtga

SEQ ID NO: 944436 - DNA, 778 bp, Homo sapiens
ccaaagtcttagctcattccagcattagaccaaaagtccaagtccaaagtctcatatgtgacaaagcaagtccctttcacctatgagcctgtaaaatccaaagcaagttagttatctcctaggtacaatagacgtacaagcattgggtaaatacacccatttcaaatgggagaaattggccaaaacaaaggggctacaggccccttgcaagtctgaaatccactgaagcaataattaaatattaaagctccaaaataatctcctttgactccatgtctcacatccaggtcatgctggtgcaagaggtgggctcctacagccttgggcagctctgcccttgtggctttgcagggtacagcctcccttatggctggtttcatgggctggcattgagtgtctgtggcttttctgggctyacagtgcaagcttttggtggatctaccattcttaggtctggaggatggtggccctcttctcacagctccactaggcagtgccccagtgaagactgtgtgggctccgaacccaaatttcccttacacatctctcttagcagaggttctctatgagggctccgcccctgtagcaaacttctgcctggacatccaggcatttccgtacatcctctgaaatctaggcagaggtttccaaacctcagttcttgtcttctgcacacctgcaggaccaacaccatatggaagctgccaaggaatagggcttgcaccctctgaagctatggcctgagctgtaccttggtcccttttagccatggctggag

SEQ ID NO: 944437 - DNA, 617 bp, Homo sapiens
attttccccctaaaaatcctgactttgtcagtcaacgggaaacaacacatctgcccaaggccccccgatgaggtcccccatgggagtcacaacggggggatgatgttcctgctgggggccctctgggtgtcagagctaaaggggtgtgtgattttttttttcttttttgaggcggagtctcactctgtcgcccaggctggagtgcagtggcacgatcttggctcactgcaagctccacctcccgggttcacgccattctcctgcctcagcctcccgagtagctgggactacaggcrcccgccaccatgcctggctaattttttgtatttttagtagagacggagtttcaccgtgttagccaggatggtctcaatctcctgacctcgtgatccgcctgcctcggcctcccaaagtgctgggattacaggcatgagccatgacacccggccatgtgaatttttttatccaaaaagaaccccgttttcctgcctacctacctcatccttaaaaaatttttaaatctatttccaaaggaaattatgtaaatttgtaaatagagcatttctgtagaatttttttggaaacgatgtctcactctgtcaccaaggatggagtgc

SEQ ID NO: 944438 - DNA, 782 bp, Homo sapiens
tggattatcccagtagcctgacccacctctctgcttcacccttgtacccctctgcctcttcctctctacagcagcccaagtgacagcatctcctgcgtttaacaccttccactggcttcccatctccctgggaataaaagccacagtcctcaactccacaacaaaaaacacagaacctgatttttttttttttttgagacggagtctcactctgtcgcccaggctggagtgctgcggcgcgatcttggctcactgcaamctctgcctcctggcttcaagtgtttctcctgcctcagcctcccaagtagctgggattacaggcgcacaccatcacgcctggctaatttctgtatttttagtagagacggggtttcgccatgttggccaggctgatctcgaacctctgacctcagatgatccgcccgtctcggcctcccaaagtgctagtattacaggtgtgagccactgcgctcagctagaacctgattttaaaatggacaaaggacttgaatagacaactacaaatagccaataagcacatcgaaagatgatcatcattagctctcagggaactgccaatcaaaaccacaatgacatcctactgcacacccacctggagagctagacccaaaaagtcaggtagtgagtgttgacgaggatgtggagacactggaactctctcatgctgctggtgggaccgtcaaatggtgcacctgctttagaaaacggtcgggcaatgcttcaaaatgctgaacacagagcgtccataggtcccagcaagt

SEQ ID NO: 944439 - DNA, 705 bp, Homo sapiens
ggcacgtgagctgagtcagctttgactgttgtgagttgtgagtgtggccctgggcctcccagtgcaggttttcatgtggacagatgtctgtgcctaagagaggggcagcagggtccctggaactctgtctttagggttccaaggaattgccaaactgttttgcccagaggcattctggttttcattcccaccaacagcatactaggtctctcatctcctcgtgtcctcgccagcacttcatgttctctgtctttctgcttgtagctctctctgtgggtgtgatgtgggcggtaygttttttttttgttttttttttttgagacgcagtctcactccatctccagcctggagtgcagtggcatgatctcggctcactgcaacctccgcctcctgggttcaagcgattctcctgcctcagcctcccgagtagctgggactacaggtgtacgccaccacacctggctaatttttgtatttttagtagagacagggtttcaccatgttgtgcaggatggtctcgatcccttgacctcgtgatcctcccacctcggcctcccaaagtgctgggattacaggcgtgagccaccatgtctggccgggcggtatgttcttaaggggcctgtggatgcttgagtttcaggggagctggtgccacttctgcctgccccacagcctcgcctcctgatggttggtgctgtggtcggc

SEQ ID NO: 944440 - DNA, 569 bp, Homo sapiens
tatttattgaaaatacatttcttggccgggcgtggtggctcatgcctgtaatcccagcactttgggagactgaggcgggcagatcacctgaggtcgggatttcgagaccagcccgaccaacatggagaaaccccatctctactaaaaatacaaaattagctgggcgtggtggcacatgccagtaatcccagctactcgggaggctgaggcaggagaatcgcttgaacctgggaggcggaggttgcggtgagccaagatcgcgccattgcactccagcctggkcaacaggtgcaaaactccgtctcaaaaaaaaaaaaaaactacatttcttaatgagatggcccatattgttcctgttcccctctcatttactcccattcattcttgtagacatagataactattactaattgctagaataagagagggtccattattaattctattttgatttttttctttgtcaaaaatagactttgtttccatgaatatgtatataggaatggaagaaggatttttttttacagcaatttcactcaattctttgaattcttcatgaattacatacc

SEQ ID NO: 944441 - DNA, 569 bp, Homo sapiens
tatttattgaaaatacatttcttggccgggcgtggtggctcatgcctgtaatcccagcactttgggagactgaggcgggcagatcacctgaggtcgggatttcgagaccagcccgaccaacatggagaaaccccatctctactaaaaatacaaaattagctgggcgtggtggcacatgccagtaatcccagctactcgggaggctgaggcaggagaatcgcttgaacctgggaggcggaggttgcggtgagccaagatcgcgccattgcactccagcctgggcaacaggwgcaaaactccgtctcaaaaaaaaaaaaaaactacatttcttaatgagatggcccatattgttcctgttcccctctcatttactcccattcattcttgtagacatagataactattactaattgctagaataagagagggtccattattaattctattttgatttttttctttgtcaaaaatagactttgtttccatgaatatgtatataggaatggaagaaggatttttttttacagcaatttcactcaattctttgaattcttcatgaattacatacc

SEQ ID NO: 944442 - DNA, 590 bp, Homo sapiens
caggctgctggacaggagttgatgcttacggcgccgctgaccagggctgctttactgaagctcactgggtgtccatcaatcacaaagtggcgtatgcagcctgtgaagggtttgctgggggccaagcgtggtgtcagtagagattctgaaaagagcaagaamtaaaaacaaagattgcaattgaggtattccaagcccaaatattacttcctggtaaaagtatacatatttgctcatatcatcaatatgatttacatttcaaaaatagaacatagttataattgactcatttctcagtaacattatttgcttgtgaagtcctatggacatgtggtaattttaacgttttgccatgttttccatgatcacatttctgtgtattgtagctgtctttcaaggctgaaatttaccacttacatgtaaagcctcagcagtgaattttcatgatctacctatgttttttaaagttaatttcacctgggcctcacttataatgtgtactttgctaagaaggaggaaagaaattttagcttccacactatttttggacttggttaatatttctgtttaattcattacccttcaccctt

SEQ ID NO: 944443 - DNA, 595 bp, Homo sapiens
tttattgatattatattaaaacttggcaagtgacagtgccttaaaaattagctgcatcatggaatctgaaaccatatcaatgaactttcgactctgtgacattaaaatgcattggtctatccaagacccatttggaatagatcttttactcatgtataattttgccattctatgcattgttcatttggaaaatatgtttactgtgttgtagagatgttcaaaatattgatacacttaattatgtaatatctaaaaaaaatcacattaatatcatcctcaccagaaaagtctacatattggataaatataaagttttcagtgatggatacaagttttccaaaattctaatttttccttgaaatcttgaattctcgcaytggcaaaaaatgctgtcacagttgttttccttgaagtgacaggctcagtttgctcatcttcaaaaaaaatttccaaaatacacaagtctgaataaccagtttatcatcagtcatttcttcaagtaaaattcccactaaaaaaagtggttagctcagctcacaactttaccaatgacatagttccttaagtttccctgagagagcagtttgctgaagtt

SEQ ID NO: 944444 - DNA, 658 bp, Homo sapiens
tggtggataggctttttgatgtgctgccagatttggtttgccagtattttattgaagattttagcagtgatgttcatcagagatattggaatgaaattttctttttttattatgtctcttactaggttttggtatcataatgatgctggcctcacaaaatgagttagggagaagttcctctatttctgctgcttggaatagtttcagaaggaagggtaccagatcctctttgtacctgtggtagaattccgctgtaaatgtcttgtcctgggcttttcttggttggtaggctattaattacakcctcaatttcagaacttgttattggtctcttcagagattcagcttcttcctggtttagtcttgggagggtgtatgtgtccaggaatttgtccatttcttctagattttctagtttatttgtgtagagatgtttatagtattttctgatggcagtttgtatttctgtgagatcagtgatgatattccctttccatcacataaacagaaccaatgccaaaaccacatgattatcccaatggatgcagaaaaggccttcaacaaaatttaacaaccctcatgctaaaaattctcaataaactacgtattgatggaacgtatctcaaaatagtaagagctatttatgatacacccacag

SEQ ID NO: 944445 - DNA, 658 bp, Homo sapiens
tggtggataggctttttgatgtgctgccagatttggtttgccagtattttattgaagattttagcagtgatgttcatcagagatattggaatgaaattttctttttttattatgtctcttactaggttttggtatcataatgatgctggcctcacaaaatgagttagggagaagttcctctatttctgctgcttggaatagtttcagaaggaagggtaccagatcctctttgtacctgtggtagaattccgctgtaaatgtcttgtcctgggcttttcttggttggtaggctattaattacatcctcaatttcagaacttgttattggtctcttcagagattcagcttcttcctggtttagtcttgggagggtgtatgtgtccaggaatttgtccatttcttctagattttctagtttatttgtgtrgagatgtttatagtattttctgatggcagtttgtatttctgtgagatcagtgatgatattccctttccatcacataaacagaaccaatgccaaaaccacatgattatcccaatggatgcagaaaaggccttcaacaaaatttaacaaccctcatgctaaaaattctcaataaactacgtattgatggaacgtatctcaaaatagtaagagctatttatgatacacccacag

SEQ ID NO: 944446 - DNA, 588 bp, Homo sapiens
gagagtgaactgtgcacctaaaagaaggagattaattgaaaggttgtggccaggcatggtggctcacgcctgtaatcccagcactttgggaggccgaggcaggtggatcacgaggtcaggagatcgagaccatcctggctaatgctatgaaacctcatctctaccaaaaaaaaaaatacaaaaaattagctgggcgtggtggcacacgcctgtagtcccagctacttgggaggctgaggcaggagaatcacttraacccaggaggcggaggttgcaaggagccaagatcatgccactgcactccagcctgggcaacagagcaagactctgtcaaaaaaaaaaaaaaaaaggaaagaaagaaaggaaggaaggaaggaaggaaggaaggaaggcaggaaggcaggcaggcaggcaggcaggctgtatgtggaagcactggctccgatctccaccttcaactacagaattcaactacagaacaccctacagctagtctttacccgacaagaccaaaatataaaagccaaaacaaaatccaatcaagcaaaaagtggagtgttctttgtcaaacacatacaatgaactctc

SEQ ID NO: 944447 - DNA, 615 bp, Homo sapiens
ctcaaaaagaccatcatcttgagcaccgaggcagcaggaaaagagagcgctgctggggctctcctggagctcggctgatgcaggaggtctggaatccacaaaggccaggtagctccggaggtcctcatctattcaggtagcaggcaagggctctcttgggccttccagaggactgcagagtgaccatgtctgcttggctttcagcccgctgttgaagatgttggtgaacatcaccttattgacatcatccaaagtttgctgggtgttggtcctgggcagggcagcatccttgatgttagaaacacagaggtcgggcttcacctctggcctctggacttggctttcttaytagagggacaagacatatgctttacaactgtgttttattgacttttatttatttatttttttgagacagagtctcactctgtcgcccaggctggagtgcagtggcgcaatctcggctcactgcaacctctgcctcctgggttcaagcgattctcctgcctcagcctctccagtagccgggactacaggtgtgtgccacaacacccggctaaatttttttttgtatttttagtagagacagagtttcaccatgttggccaagctggt

SEQ ID NO: 944448 - DNA, 608 bp, Homo sapiens
tggctttctagcagactggctatattgctttcttggctttgctgaatcacactgccatattggagaggcccacatggctaggatttgaaagtggcctctggccaacatccattgagggactggagctctttgtaacagcctgtgagaaaccaaatgctgccaacaactattgagtgagcgtggaagcgcttccttccccagtcaattgtttagctgagatgatagtatttgagctgacaccttgactgcagccygtgagaaacttacgaagcttaagatccagttaaatcatgctccgattccattaggaaccaaattaggataactaaaagtctatgtaaatattgtttactctatcttgttgtatactgtgattatatttcttcttgtataacttttctttctgtaattaataattttatttttccatttgcttagttttcttttttaatttcaataatttttggagaacaggtggtttttagttacgtggatgagttctttagtagtgaattctgagattttagtgcacccatcacctgagcagtgtactctttagccaatatgtagtcttttttttttttttgagacggagtctcgctctgttc

SEQ ID NO: 944449 - DNA, 608 bp, Homo sapiens
tggctttctagcagactggctatattgctttcttggctttgctgaatcacactgccatattggagaggcccacatggctaggatttgaaagtggcctctggccaacatccattgagggactggagctctttgtaacagcctgtgagaaaccaaatgctgccaacaactattgagtgagcgtggaagcgcttccttccccagtcaattgtttagctgagatgatagtatttgagctgacaccttgactgcagcccgtgagaaacttacgaagcttaagatccagttaaatcatgctccgattccattaggaaccaaattaggrtaactaaaagtctatgtaaatattgtttactctatcttgttgtatactgtgattatatttcttcttgtataacttttctttctgtaattaataattttatttttccatttgcttagttttcttttttaatttcaataatttttggagaacaggtggtttttagttacgtggatgagttctttagtagtgaattctgagattttagtgcacccatcacctgagcagtgtactctttagccaatatgtagtcttttttttttttttgagacggagtctcgctctgttc

SEQ ID NO: 944450 - DNA, 535 bp, Homo sapiens
cacttaaagtacaatgagatgatttttaatacattcaaacggttgtgaaactgtcaccactattaaatttggaatattttcatggccacaaaaagaaagcccatacctattagcactaagttcttattttcccaattcctacccccaccacaacctccagccctaagagcctactaatctaccttctgtttctgtggatttgtcttttctggccatttcatataaatgggatcatacgatctgtaaccttttgtgastggcttcttttacaagcatgacactttctagatttatccatgtcgtagtatgtaccagtactttattcctttttattgccttaccacattttgcttatccattcatcagttgatggacagtgggtttccatattttcagtattgtgaataatgtattatttgtgtacaagttttgtgtggacatatactttcagttttcttggatatatacctaggagtggaactgctgggtcataaaataactatgtttaacttttgatgaactgccagactgtttt

SEQ ID NO: 944451 - DNA, 552 bp, Homo sapiens
attggattctgtttctttctgtagctctaacaatgtttgctttacatacctggttgctccagtgttaggtgtatatatctatacaatcattatattatcttgctgaattgacctttttattatcatataatgaatttctttatcccttcttatagtttttgtcttacaacctattttgtctgatgtaagtatagctaatcctgtttttttttttggttttcatttgcatataatagctttctttatttatttatatttatttttagtctgtgtgtgtccttataggtaaaatgtatttcttgtaggcaatagatcattgggtcttaattattttttaaattcatttggccactctatgtattctctatgtattttgattggagagtttagtccattgtcattcaacattattatkattgataagtaaagacttactcttgctatctattttgcttgttttctggtttagttgtggacttccttccctccttccttccttccttcctccctccctccctctcttccttccttccttccttcctcctgtcttcc

SEQ ID NO: 944452 - DNA, 762 bp, Homo sapiens
tgccattacccctcccctaactgcaggctgcacaatgtttctacaaaacatttatacacttgcataacaagtaaatatacaaggatgtttcttactgttacgggaagtcaggggctccgaatggagggaccggctggagccgcggcagaggaaacataaattgtgaagatttcatggatgtttatcatttccctaataatactcttataatttcttatgcctgtcttaatctcttaatcctgttatcttcgtaagctgaggatgtacatcacctcaggtccactgtgatgattgcgttaactgtacaaattgattataaaatgtgtgtttgaacaatatgaaatcagtgcaccttgaaaaagaacagaataacagtgattttagggaacaagggaagacaacgatgaggtctgactgcctgtggggttgggcaaaaagagccatatttttcttgttgcagagagcctataaacagacgtgcaagtaggagagatatcgctaaatttttttcctagcaaggaatataatattaagaccctaggaaaagaattgcattcctgggggtaggtcgataaatggcygctctgggagtgtctgtcttctgtggttgagataaggactgaaatactccctggtctcctgcagtaccctcaggcttattagggtggggaaaaaactgctccccggtaaatttgaggtcagacaggttctctgctctctgaccctgttttctgttgtttaagatgtttatcaagacaatac

SEQ ID NO: 944453 - DNA, 441 bp, Homo sapiens
attatttcaatctctttgttaaatttatctgatagaattctgaattctttttttgtgttatcttgattttttgagtttccccaaaacagctattttgaattatctgtctgaaaggccacatatttctgtctgtccaraattagctcatcatgccttatttactttatatggtaagatcatatttttacagattatcttgatacttttagacgttcatctgtgtccaggcactgaagaatttggtattcattgtagtctttacactctgggcttgtttgtaccagttcttcttgggaaggcattccagatatttgaaaatacttgagtgttgtgatctaagctgtatctgatttaggggagaccccaaccccataatgctgtggttcttgcagattcatagaggtaccaccttggtggttttgggcaagtttttaaagaatt

SEQ ID NO: 944454 - DNA, 661 bp, Homo sapiens
cttgttgcccaggctggtgtgcaatggtgcgatctcggctcactgcaacctctgcctcccgggttcaagcgattctcctgcctcagcctccagagtagctgggattacaggcgcccaccaccacaccccgctaatttttgtattttcagagacggggkttcgccatgttggccaggctggtttttaactcctgacctcaggcgatccacccgcctcggcctcccaaagttctgaaattacaggtgtgagccactgcattcagcccccttcctcattcttgaaacactctcttcattgggcttctataagaccgtacctcctgttttttgtcttacttctctggctcctctagctctgtctcctcatatctgccaatccttaaggtgttcactggggtgttcactgggtctgtgtcctagtccccattctcttctcacctgacacatcctcctgaacactgtcacctacttccacagcttctaatgccatctatagactgataactccccaaatctgtatttatggcatggtcttttctctttttcagatccctatacccaacttcctaactcaacatctagacttgaatgtctcatgggtacaaacatgcctgaagctgaactcatcctccttctttgatctcagaagatagcaccgccat

SEQ ID NO: 944455 - DNA, 620 bp, Homo sapiens
gggaaaattctgggagtcaacctctattccttctttctcccacttcacattcagtcagtcatcaagtcctgccaattaaatctcctaaaaatttttgaaatccattcacttctctccatcctcattgcaactgccattcttacttcaggcccccaagttcagaccaacttactgaactcactgcctctgatcttgccaccctgtctcatctccagttcagttggtcacattgcaaaagaatgccattgatttttttccatacagatctgatcttatcacctttgtttaaaacacttcaaagaccttcaagaaaaaaattaaactctttaacatgattttcaaggcccttcataatcagatcttgctttgacagtgctgtgtaatgattagacttgagcargactggctgggttcaaatctcagctttaacacttttagtagctgtgtaactttgagcaagttaacctccctgtacttgagttttctcagctataaaacggagtaattacaatgcctaccttccagggttattgttttttttttgtttgtttttttctttacagcgtctcactctgtcacccaggctggagtgcagcgactcactctcggctcactgcaac

SEQ ID NO: 944456 - DNA, 750 bp, Homo sapiens
cattctttgtgtttcctgaatttgaatgttggcctgccttgctaggttggggaagttctcctggataatatcctgaagagtgttttccagcttagttccattctcctcgtcactttcaggtacaccaatcaaatgtagatttggtcttttcaatagtcccatattttttggaggctttgttcatttctttttactctttttttttctaaacttctcttatygcttcatttcattaatttgatcttcaatcaccggtaccctttcttcctcttgattgaattggctattgaagcttgtgcatgtgtcacatatttctcatgctgtgattttcagctccatcaggtcatttaaggtcttttctacactgtttattctagttagccattcatctaatcttttttcaaggtttttagcttgcttgcaatggtttcaaacgtcctcctttagctcagagaagtttgttattactgaccttctgaagcctacttctgtcaacttgtcaaagtcattctccatccagctttgttctgttgctggcatggagctgctatcctttggaggagaaggggcactctcgtttttagagttttcagcttttctgctctggtttctcctcatctttgtggttttatctatgtttgcgctttgatgatggtgacctacagatggagttttggtgtggatgtcctttttgttgatgttgatgctattcctttctgtttgttagttttccttctaacagtcgggtcc

SEQ ID NO: 944457 - DNA, 652 bp, Homo sapiens
aggggcacacgccaaaggaaaacgtagcctctgagtccctccatctgggcgtctttacagccctgactcccccagctgctgttaaccatagtgggaaatcatggcttctgtcaggatgagcagtctcagctgatttaatgaaatgtactattgagagttgaaacatattagggtcctcttagagggacagaactaataggatatatatatacacacagatatatacacacatacatatatatacatatatatacacacacayatatatatacatatatatagatacacacatacatatatatacatacatatatatacatacatatatacacatacatatatacacatacatatatacacatacatatatatacatacatatatatacacacatatatacatatatatatacacacatatatatacatatatatatacacatacatatatatatatacacatacatacatacacacacacacacacatatatatataaaggggagtttattaagtattaacccacatgatcacaaggtcccacaataggctgtctgcaaactgaggagcaaggaaagccagtcagtttccaaagctgaagaacctggagtccgatgtttgagggcaggaagcttcgagcactggagaaagat

SEQ ID NO: 944458 - DNA, 652 bp, Homo sapiens
aggggcacacgccaaaggaaaacgtagcctctgagtccctccatctgggcgtctttacagccctgactcccccagctgctgttaaccatagtgggaaatcatggcttctgtcaggatgagcagtctcagctgatttaatgaaatgtactattgagagttgaaacatattagggtcctcttagagggacagaactaataggatatatatatacacacagatatatacacacatacatatatatacatatatatacacacacacatatatatacatatatatagatacacacatacatatatatacatacatatatayacatacatatatacacatacatatatacacatacatatatacacatacatatatatacatacatatatatacacacatatatacatatatatatacacacatatatatacatatatatatacacatacatatatatatatacacatacatacatacacacacacacacacatatatatataaaggggagtttattaagtattaacccacatgatcacaaggtcccacaataggctgtctgcaaactgaggagcaaggaaagccagtcagtttccaaagctgaagaacctggagtccgatgtttgagggcaggaagcttcgagcactggagaaagat

SEQ ID NO: 944459 - DNA, 824 bp, Homo sapiens
gactttcccctgagccagagagggcagcggggcaatagctgcactggcgtgatgcatccaacccacacgtgggctcggaaaggggtgctgtgagtgcattcctcagccaggacacaggttgccaaactgcacctcgaactcctgggcccagtaaggaaagagtccctgcaggcaacatgactcccagctttggagaaggaagatgttcgggagagaaaggttgaaaagcacttttacaagaagaagatataagctaagaaagggatctgctccaactcaggcttcagaataaatcgaaataactctcctgaggacgcctccacatcctgcaaaaggtctttctggcagtcgctgtttgccttaccctctcccaatcacaatctcctggcacttgaccgagcagtctcacaatakgaagttaaggagggtctgaaagcagggatttgacagcatgcctaaaatcatagctttaccattagggttctggtgggtaactcgattcttgaagctccataacatccattttcctattatgagcagaggaaataaacatgcagatggcttggtttccttcgcataacttgtacaggggtaggtagcataaaagaccgccgttctcaagaggcaaccatgcgcctcactacttaccatgttcctgcggggcatcctctcccgtagggagtctctgaaaacaaacacacacagaagttggcgctgggcaccacattctcctcttgacctaaccatcaggaatttgctgtgccatctgttcataaaacttagccaggcccagaaagcttgtcccaaccacatgctaagagcca

SEQ ID NO: 944460 - DNA, 824 bp, Homo sapiens
gactttcccctgagccagagagggcagcggggcaatagctgcactggcgtgatgcatccaacccacacgtgggctcggaaaggggtgctgtgagtgcattcctcagccaggacacaggttgccaaactgcacctcgaactcctgggcccagtaaggaaagagtccctgcaggcaacatgactcccagctttggagaaggaagatgttcgggagagaaaggttgaaaagcacttttacaagaagaagatataagctaagaaagggatctgctccaactcaggcttcagaataaatcgaaataactctcctgaggacgcctccacatcctgcaaaaggtctttctggcagtcgctgtttgccttaccctctcccaatcacaatctcctggcacttgaccgagcagtctcacaatatgaagttaaggagggtctgaaagcagggatttgacagcatgcctaaaatcakagctttaccattagggttctggtgggtaactcgattcttgaagctccataacatccattttcctattatgagcagaggaaataaacatgcagatggcttggtttccttcgcataacttgtacaggggtaggtagcataaaagaccgccgttctcaagaggcaaccatgcgcctcactacttaccatgttcctgcggggcatcctctcccgtagggagtctctgaaaacaaacacacacagaagttggcgctgggcaccacattctcctcttgacctaaccatcaggaatttgctgtgccatctgttcataaaacttagccaggcccagaaagcttgtcccaaccacatgctaagagcca

SEQ ID NO: 944461 - DNA, 699 bp, Homo sapiens
cagggctccagccacccaggtgaatacttgctcctttctatcacacagcgtctattcggtcaaacctatacaaaatagcttgccacaaaacaggtttttaatcagtggttttaagaattttatattggttttacattatttcctatagctgagagacacaatgattaaaaacacaggctttggaaagagttttaagacattcatgggcccaggcgcagtggctcatgcctgyaatcccagcactttgggaggccatggtaggcggatcacgaggtcaggagattgagaccatcctggctaacacggtgaaaccccgtctctactaaaaatacaaaaacaaaattagccgggcatggtggcgggcgcttgtaatcccagctacttgggaggctgaggcaggagaatggcatgaacccgggaggcggagcttgcagtgagccgagatagcgccactgcactccagcctgggcgacagggcaagactgtctcaaaaaaaaaaaaaaaagaaaaaaaaggcattcatgggactgctcccactgggtccattactatagttttgtcagacatgcttgaaccagagaaactccatcttgaataggaactgggtcaaataagggtgaaacctactgggctgcattcccagatggttaaggcattctaagtcacaggataagataggaggtcagcacaagatacagg

SEQ ID NO: 944462 - DNA, 699 bp, Homo sapiens
cagggctccagccacccaggtgaatacttgctcctttctatcacacagcgtctattcggtcaaacctatacaaaatagcttgccacaaaacaggtttttaatcagtggttttaagaattttatattggttttacattatttcctatagctgagagacacaatgattaaaaacacaggctttggaaagagttttaagacattcatgggcccaggcgcagtggctcatgcctgtaatcccagcactttgggaggccatggtaggcggatcacgaggtcaggagattgagaccatcctggctaacacggtgaaaccccgtctctactaaaaatacaaaaacaaaattagccgggcatggtggcgggcgcttgtaatcccagctacttgggaggctgaggcaggagaatggcatgaacccgggaggcrgagcttgcagtgagccgagatagcgccactgcactccagcctgggcgacagggcaagactgtctcaaaaaaaaaaaaaaaagaaaaaaaaggcattcatgggactgctcccactgggtccattactatagttttgtcagacatgcttgaaccagagaaactccatcttgaataggaactgggtcaaataagggtgaaacctactgggctgcattcccagatggttaaggcattctaagtcacaggataagataggaggtcagcacaagatacagg

SEQ ID NO: 944463 - DNA, 690 bp, Homo sapiens
ggtgctcctgttctcagagtataagctaccaaagcaccggaagctcaggttaaaagccttgtccaaagcacataacttgttagtggtgaaacttgatttcagactcagattttttttttttttgagacggagtctcactctgtcatccaggctggagtgcagtggcgcaatctcagctcactgcaacctctgcctcccaggttcaagyaattcttctgccttagtctcccaagtatctgggactacaggtgcggaccccgatttttgtattttttatttatccccaaaaattagcccagctaatttttgtatttttcgtagagatggagttttgtcatgttggtcaggctggtcttgaactcctgacctcaggtgatccatttgccttggcctcccaaagtgctgggattacagatgtgaaccaccatgcctggtgattttatttttatttttaatagaggtgggggtctcactgtgttacccaggctgatctcaaactcctgggctccagtaatcctcctaccttggcctcccaaagtgctgggattacaggcatgagccacagcgcctggccccatgtcttaatcctcattctgttccaacagtgcttggccaatgatttgcaaatactaggtattcaatatatgttgaattggatttgtcatgtagtgcatgacctttttaaaatgg

SEQ ID NO: 944464 - DNA, 690 bp, Homo sapiens
ggtgctcctgttctcagagtataagctaccaaagcaccggaagctcaggttaaaagccttgtccaaagcacataacttgttagtggtgaaacttgatttcagactcagattttttttttttttgagacggagtctcactctgtcatccaggctggagtgcagtggcgcaatctcagctcactgcaacctctgcctcccaggttcaagtaattcttctgccttagtctcccaagtatctgggactacaggtgcggaccccgatttttgtattttttayttatccccaaaaattagcccagctaatttttgtatttttcgtagagatggagttttgtcatgttggtcaggctggtcttgaactcctgacctcaggtgatccatttgccttggcctcccaaagtgctgggattacagatgtgaaccaccatgcctggtgattttatttttatttttaatagaggtgggggtctcactgtgttacccaggctgatctcaaactcctgggctccagtaatcctcctaccttggcctcccaaagtgctgggattacaggcatgagccacagcgcctggccccatgtcttaatcctcattctgttccaacagtgcttggccaatgatttgcaaatactaggtattcaatatatgttgaattggatttgtcatgtagtgcatgacctttttaaaatgg

SEQ ID NO: 944465 - DNA, 416 bp, Homo sapiens
gcaagagcagaacttgcagtggaaaatttaaatatgtgggatcaagatcctgaagcatttcttcaaagaattgtaacaggaaatgaaacatggctttaccagtatgatcctgaagataaagcacaatcaaaacggtggctacaaagatgtggaagtggtccactcaaagcaaaagtgaacagacaggtcaagagcaaatgtcatggcaacagttttttgagatgctcaaggcattttctttattgactttctggarggtcaaagaatggtaacatctgctttgttttaagaaaattaggcaaagctttagcagaaaaacacccaagaaagctttactagagagttcttctccaccatgacaatgctcctgttcatcgttctcatcaaacaaaggcaattttgcaagggttttgatg

SEQ ID NO: 944466 - DNA, 791 bp, Homo sapiens
aggaagaagaaaaagagacttgccccagaggtgtgagtactccccaagctgacatctgttctgatctgaaagttaattatgatatttggacgttttatttttgatcctacttaataattacaacagaacccaaagtgtgagataacactgaatcattaaatgggatttaattattctcccaactctcargaattaagggacttcggaggaaatgcatgttttcacataacaaagcacgtgttcccctcctaattcctccaatctctcaaggcagaaggcaaagggccaagatggcagcacatgtagcacagtggctacaggtatcctatctgtgcaaagggtctaggtgttccactgggtttggagtattcccagcagtcagggtggtagatgtgttcattcagccattcattcactcaacagaaattcatggagtgcctactgctatgtgccaggcattgctcgttctaggccttagggagacaaggtgggcaaggcagacaaaatcccccctcaaatgctgattacactctagtcgtggagactagactaataaacaagtggaatattggacaatgagaagtgctatgcagaggatttcaataaggtgttgtgtcgagaggggctggctagatggccacttcagaccacatggcccaagacaggctcatttgggaggtgacaggtaaatggaggtctgaatgaaaagaaagagccagcgctcctaaagcaagctcaggggcagcaaatgcaatgatcctaaggtgggaatgagggacagagagtaagag

SEQ ID NO: 944467 - DNA, 606 bp, Homo sapiens
agctgggcgcagtggctcacacctgtaatcccagcactttgggaggctgaggcaggtgggtcacgaggtcaggagttcgagagcagcctggccaatatggtgaaaccccgtctctactaaggatacaaaaattagctgggcgtggtggtgcacacctgtagtcccagctactcgggaggctgaagcaggagaatcactttcccccgggaggtggaggttggagtgagccgagattgcgtcattgcactccagcctgggcgacagggcgagactgtctcaaaaaaaaaaaacctatattctgtagcagactggctaaccrattctgtaacagaacaattcttcctccttccaagtatccatatcctttgccaggtaactgccccacacccttgactctgggctctgtgacggggctttgtccagaagcatgagaacgcacctgctcattttgttctcacgcttccatttgctgtcatgagaaggacatgcctgagacagcccgccattcatgacagcatagatttttctatttattacaaccacttcctggcagatggcaacaaagtttctaattttctcaaaggtgggttagcagatgtcctaata

SEQ ID NO: 944468 - DNA, 480 bp, Homo sapiens
aggaagcactaaacatggaaaggaacaactggtaccagccactgcaaaaacatgccaaattgtaaagaccatcgaggctaggaagaaattgcatcaactaatgagcaaaataaccaactaacatcataatgacargatcaaattcacacataacaatattaaccttaaatgtaaatgggctaaatgctccaattaaaagacacagactggaaaattggataaagtgtcaaggcccatcagtatgctgtattcaggagacccatttcaagtgcagagacacacataggttcaaaataaagggatggaggaagatctaccaagcaaatggaaaacaaaaaaaggtaggggttgcaatcctagtctctgataaaacagactttaaaccatcaaagatcagaagagacaaagaaggtcattacataatggtaaagggatcaatttaacaagaagaactaactatcctaaatatatatgcaccca

SEQ ID NO: 944469 - DNA, 480 bp, Homo sapiens
aggaagcactaaacatggaaaggaacaactggtaccagccactgcaaaaacatgccaaattgtaaagaccatcgaggctaggaagaaattgcatcaactaatgagcaaaataaccaactaacatcataatgacaggatcaaattcacacataacaatattaaccttaaatgtaaatgggctaaatgctccaattaaaagacacagactggmaaattggataaagtgtcaaggcccatcagtatgctgtattcaggagacccatttcaagtgcagagacacacataggttcaaaataaagggatggaggaagatctaccaagcaaatggaaaacaaaaaaaggtaggggttgcaatcctagtctctgataaaacagactttaaaccatcaaagatcagaagagacaaagaaggtcattacataatggtaaagggatcaatttaacaagaagaactaactatcctaaatatatatgcaccca

SEQ ID NO: 944470 - DNA, 480 bp, Homo sapiens
aggaagcactaaacatggaaaggaacaactggtaccagccactgcaaaaacatgccaaattgtaaagaccatcgaggctaggaagaaattgcatcaactaatgagcaaaataaccaactaacatcataatgacaggatcaaattcacacataacaatattaaccttaaatgtaaatgggctaaatgctccaattaaaagacacagactggaaaattggataaagtgtcaaggcccatcagtatgctgtattcaggagacccatytcaagtgcagagacacacataggttcaaaataaagggatggaggaagatctaccaagcaaatggaaaacaaaaaaaggtaggggttgcaatcctagtctctgataaaacagactttaaaccatcaaagatcagaagagacaaagaaggtcattacataatggtaaagggatcaatttaacaagaagaactaactatcctaaatatatatgcaccca

SEQ ID NO: 944471 - DNA, 810 bp, Homo sapiens
aaaagaagtctattgactgtactcaatctacactgcagttaaaggaacacccacacgcagaggtgaaaatgaaccaatgcaagaactccagtaattcaaatgaccagagtgttgtatgtcctccgaatggctgcaccagttctccaacaagagttcttaaccagaccgaactgactagaattacagaagaattcagaatatggataggaacaaagatcatcaagattcaggatggcaaaactcaatccaagataagaatcacaataaagtgaaacaggagctgaaggacgaaataatcaatataaaaaagaacctaacaggtctgacagagctcaataacataatacaagaatttcacaatgcaatcacaagtattaacagcagaataaaccaagctgaggaaagaatctcagaacttgaaggctggttctctgaaataagacagtcagacaaaaataaagtatacggaataaaaagaaatgaacaaaatctctgagaagtatgggattaygtaaagaggccaaatccatgaatcgtaagcaatgctgaaagggtggaggagaaagcaaacaacttggaaaacatatttcaggatatcttccatgaaaactttcccaaccttgctagaggggctaacagtcaaattcaggaaatatagagagctactgcaagattctacacaagaaaatcatccccaagacacataattgtcagatttgtcaaggccagaatgaaagaaagaatgttaaaggcagctagagagaaagggggcaggtcacctgcaaagggaatgccatcaggctaacagca

SEQ ID NO: 944472 - DNA, 810 bp, Homo sapiens
aaaagaagtctattgactgtactcaatctacactgcagttaaaggaacacccacacgcagaggtgaaaatgaaccaatgcaagaactccagtaattcaaatgaccagagtgttgtatgtcctccgaatggctgcaccagttctccaacaagagttcttaaccagaccgaactgactagaattacagaagaattcagaatatggataggaacaaagatcatcaagattcaggatggcaaaactcaatccaagataagaatcacaataaagtgaaacaggagctgaaggacgaaataatcaatataaaaaagaacctaacaggtctgacagagctcaataacataatacaagaatttcacaatgcaatcacaagtattaacagcagaataaaccaagctgaggaaagaatctcagaacttgaaggctggttctctgaaataagacagtcagacaaaaataaagtatacggaataaaaagaaatgaacaaaatctctgagaagtatgggattatrtaaagaggccaaatccatgaatcgtaagcaatgctgaaagggtggaggagaaagcaaacaacttggaaaacatatttcaggatatcttccatgaaaactttcccaaccttgctagaggggctaacagtcaaattcaggaaatatagagagctactgcaagattctacacaagaaaatcatccccaagacacataattgtcagatttgtcaaggccagaatgaaagaaagaatgttaaaggcagctagagagaaagggggcaggtcacctgcaaagggaatgccatcaggctaacagca

SEQ ID NO: 944473 - DNA, 616 bp, Homo sapiens
atgctctaggaatccgctgcggctgctctctgaacacagcccacccattcacctctgcccgagtgtgcatgccaccctcctcctggaactgcctcccctccttgtccagaccgaagtttttcttgccttctgaatccacctgaaacgcctctgttcattcactcactccgtgaacaccaagcacctactctgtgccacactacccctgagctgccagggacaccaagctccagggcactgggccagagcacagagatgggaggcttcctggaagaggcgaagtacaagctgctttgaggacagcagagaggtgtgacctgagcctggggatcctggaggaggcggaggtgttctgaaagcaaaggctcrtggaaggggcagggcagggcccagacagggaagggcctgcagcctctctaacaggaggagagttctggaagcaaccagggaaaggtggctgacagggtcctggatgctgggctaagaggaacagcagagccaggccgtgggcatgtagagtgagcgaggctgctctgtggcctgcaccctaccctggcgaccccacacagcgctcaaaaaccccagctctgttcgggtccccacatcagtccaacta

SEQ ID NO: 944474 - DNA, 616 bp, Homo sapiens
ccatattattgccaaggacataattttatttttttatggctgtgtagaattctgtgttatatatatataccacattttctttatccaatctgccactgatgggcacttgagttatttccatgtatttgctattgtgaatagcacagcaatgagtgtatgagggcatgtgtctttttggcagaatttcttttcttttgggtatatacccagtaatggaattgctaggttaaatggtagctctgttttaagttctttgagaaatatccmcactgctttccacaatggctggagtaattaatattcccaccaaccgtgtataagcattctctttcctctatagtcttgccagcatgttattttttgactttttaataataaccattctgactggtgtgaaatggtatctcattgtggttttgatttgcatttctccgatgattagtgatattgagcgttttttcgtatgcttattggctgcttgtatgttcttttgagaagtgtgtatttatgtcttttgctctttttttagtggggttgtttcatgcttgtttgattatttaaggtcgttacagattctgcatattagtcctttgttgaatgcatagtttgtgaatat

SEQ ID NO: 944475 - DNA, 616 bp, Homo sapiens
ccatattattgccaaggacataattttatttttttatggctgtgtagaattctgtgttatatatatataccacattttctttatccaatctgccactgatgggcacttgagttatttccatgtatttgctattgtgaatagcacagcaatgagtgtatgagggcatgtgtctttttggcagaatttcttttcttttgggtatatacccagtaatggaattgctaggttaaatggtagctctgttttaagttctttgagaaatatccacmctgctttccacaatggctggagtaattaatattcccaccaaccgtgtataagcattctctttcctctatagtcttgccagcatgttattttttgactttttaataataaccattctgactggtgtgaaatggtatctcattgtggttttgatttgcatttctccgatgattagtgatattgagcgttttttcgtatgcttattggctgcttgtatgttcttttgagaagtgtgtatttatgtcttttgctctttttttagtggggttgtttcatgcttgtttgattatttaaggtcgttacagattctgcatattagtcctttgttgaatgcatagtttgtgaatat

SEQ ID NO: 944476 - DNA, 616 bp, Homo sapiens
ccatattattgccaaggacataattttatttttttatggctgtgtagaattctgtgttatatatatataccacattttctttatccaatctgccactgatgggcacttgagttatttccatgtatttgctattgtgaatagcacagcaatgagtgtatgagggcatgtgtctttttggcagaatttcttttcttttgggtatatacccagtaatggaattgctaggttaaatggtagctctgttttaagttctttgagaaatatccacactgctttccacaatggctggagtaattaatattcccmccaaccgtgtataagcattctctttcctctatagtcttgccagcatgttattttttgactttttaataataaccattctgactggtgtgaaatggtatctcattgtggttttgatttgcatttctccgatgattagtgatattgagcgttttttcgtatgcttattggctgcttgtatgttcttttgagaagtgtgtatttatgtcttttgctctttttttagtggggttgtttcatgcttgtttgattatttaaggtcgttacagattctgcatattagtcctttgttgaatgcatagtttgtgaatat

SEQ ID NO: 944477 - DNA, 669 bp, Homo sapiens
atgaccctgtccccctacttctctaaaactgctgttgttaaagttacctgtggccaccatgttgccacatccaaaggctacatctttgtctgcacttgattacctctcagcagcatttaatacaagtgaccactctcccttttcactgattcttttagcacacattgttttgtgtgttataagggaattggttgcctacttaattggctactattcgtctaccaacattctaaatgktggtaaacctcagtttggtcctgggctccgttctcctttcacaatttctccctaggcagtttcatctgcccatgacttttaattacattcatatgctaatggatttccattttatatatctaagcctcgacatctactttaactacagacccatatattcaaataccaccttggcaactgccatttgaatgtgtaataggcatttcaaaattaacatgattcaaacagaaactctcgaatctctcctccagaaacttatacccacttacaacttttcctaacatagtaagcatcactgtcatatatccattttctcaagacaaaaacctgcgcaagatccttgattattttctttttcttacccccttccctattcagtccatcagaaagtcccgttgaccatacccaaaaacatatctgaattcatcgtct

SEQ ID NO: 944478 - DNA, 612 bp, Homo sapiens
agaggagagaaattggacacagtgtgtacagacagttctttcaagattgataaaataaaggaggacaaaggggccagagctgcagggagatgcagggtcaaggttttttttctctaaacctgggatataaatataaatatgtatgtttatattgctgctggtggtaattcagtagtgagtgaaaaattcagaagagggagaattgctggatcaataaatgtccttaggtaggcaagagatgagatgcaatgtgcagtggagaggttcatcctggagagggatgcagacagacactttctacataggagtgcagggaaagcagaatgggcacagatgcagggaggtgggtagctatggtgtctggacatagggaggttctcttctcattgcttctgttttctcrgtgaaataagcagctcagtcattagctgggagtgagaaaccagaggaagtggaaatttgaggttagagaggaaggtttaaactagtcctctagggaaatggaaagcagatggattagggcaatgtgggtggattgctagacagcattaagagtccctttaaggttagtgaccatacatttaaggcgaaaatagtcagtgggattgtgtg

SEQ ID NO: 944479 - DNA, 533 bp, Homo sapiens
tgcagctgaacagcctcctgaagccccaggaaaaatcttcaaaactaatagcttctactgggtttgttgttgtaatagcatggtttgcaatgcaggaggacctactaatcttgraagggacatgttacccgatgaagtaactgaggaggagcttccagaaggaactgtgaggctgggggtatcaaaactgttgctgagttttgcctctatcatagtcagcaatatattgccatgaggaccccaccttggagggtctgaccatcttcacctgttccgcagagaaatgttgctctccattattcccttctaagccagagacccttatccactgctcctctaggtggcccatttatggtttgttgtaagagaaaaattaaaaaaatattgtttagtggagatgttcatgagcatttgtttgcctgcatgtacttgagcactcatagtggagtctctattcatatctgttcttccctcccttgctctgtattcagggattactttgtggttttattataatcagttgctgtagctat

SEQ ID NO: 944480 - DNA, 612 bp, Homo sapiens
tgtgctgtggaattatctgtatttctagctatgatcttagcttcctcaagtccatttcattgcaagaatatgaaaaattaaattgagatccaggttctttttttatttttyaatttttattttttgagatggcgtttcaccctgtcacccaggctggagtgcagtcgcacaatcctggctcactgcaacctccgcctcccgggttgacgccattctcctgcctccgcctcctgagtagctgggactacaggcccgtgcctctgcgcccagctaattttttgtattttttagtagagacggggtttcaccgtgttagccaggatggtttcgatctcctgacctcgtgatctgccctcctcggcctccctaagtgctgggattacaggcatgagctgccgcactctgcccaggttcttatttttaatagaaaagagaacagggaaggaacacaggtcagtgtgaggaagggggtcatggtagacacagaggtggactgtttctctacctcctcacattgtgctaacagggacacagacagattcagaggcccttgcaaaaagagaagccagagtcccctaagacacataggggaggcgtgaggaaatcctgcat

SEQ ID NO: 944481 - DNA, 487 bp, Homo sapiens
ttggggctaattataggttacattttcattaatccactgtcatctgttatcatccatccaatttttgctagaactggagtggtaaattcaatagttgatgatgaaaccacaacccctgcatcttttatgtctttgagtgacagtttatttcattgcccctcaaatactacattgttttaaaatttctatcttggtcgatattagaagctctcttaggggcatccacttggcctttcttactacaaatcctttattccacaggtgaaatgactaaagtgtgagtgaaataactaatgtacaaaataaatccatcaattacatatttggaaaccagaaaaataaccaccaagcagatgtgtggacacagagaatccackgagatacgggtggacctgagacaggaaattattttcagttccctgtgtggctctcctctaatagaagtccatgagggtgctttggttccccaggtatcagtgtgaaattg

SEQ ID NO: 944482 - DNA, 603 bp, Homo sapiens
ctgtgaactagcctggcatcacccatcacaccycacagcctgtgaaccagcctggcatcacccatcacacctcacagcctgtgaaccaacctggcatcacccatcacactccacagcctggcatcacccatcacaccccacagcctatgaaccagcctggcatcacccatcacacctcacagcctgtgaaccaacctggcatcacccatcacaccccacagcctgtgaaccagcctggcatcacccatcacagcccgcagcctatgagccagcctggcatcacccatcacaccccacagcctgtgaaccagcctggcatcacccatcacaccccacagcctggcatcacccatcacaccccacagcctatgaaccagcctggcatcacccatcacacctcacagcctgtgaaccaacctggcatcacccatcacactccacagcctatgaaccagcctggcatcacccatcacaccccacagcctggcatcacccatcacaccccacagcctgtgaaccagcctggcagttgccggacagcacaactcagacgccagggttgccagtccccattcatgtggagagatggctctaatgggaacg

SEQ ID NO: 944483 - DNA, 603 bp, Homo sapiens
ctgtgaactagcctggcatcacccatcacaccccrcagcctgtgaaccagcctggcatcacccatcacacctcacagcctgtgaaccaacctggcatcacccatcacactccacagcctggcatcacccatcacaccccacagcctatgaaccagcctggcatcacccatcacacctcacagcctgtgaaccaacctggcatcacccatcacaccccacagcctgtgaaccagcctggcatcacccatcacagcccgcagcctatgagccagcctggcatcacccatcacaccccacagcctgtgaaccagcctggcatcacccatcacaccccacagcctggcatcacccatcacaccccacagcctatgaaccagcctggcatcacccatcacacctcacagcctgtgaaccaacctggcatcacccatcacactccacagcctatgaaccagcctggcatcacccatcacaccccacagcctggcatcacccatcacaccccacagcctgtgaaccagcctggcagttgccggacagcacaactcagacgccagggttgccagtccccattcatgtggagagatggctctaatgggaacg

SEQ ID NO: 944484 - DNA, 642 bp, Homo sapiens
ccaccacagaagagagttctcagggcggcagctccctgtttcaaccctccctagccctacaaaattataaaaacagatgatggctgcacaggtctctgaagcagggctagatccmtaaattaactaatggaatttaatccttgcaataagatacattctttataggtgagaaccctgagcatcagagaaggcaactaactcagccaaggttaaacagccatgaaggggaggagctgggatgtgggggtctgactccagcatctgcacttgcagtgactgggctatagtagtgcccctcacatcttatatgaaagcacgtgggctgggcctgacaatctgtgtcttaaacaacctcccaggtaaaacccatgctgatggttgacgaaccttactaggagccacaaagcccttttccactcttggtacttctctgatctgtcctctagaacatcttctacaactttcctgattacacgaatgaatctaccttttcatttttgtgattcagttttgtatgagtcaggattctccagagaagcagagccaacaggagatatatagatacagagatagagagagagagtgggaggaatcggggctcatgtgattcggggaactggcaagtctggagtccacagggca

SEQ ID NO: 944485 - DNA, 642 bp, Homo sapiens
ttaggtgatcttgttgtgcaatatgttttgaaattactgatgtgacatacattaatctcaaaataattatgctgtgtgaaataagccggataaaaagagtgtaataattgatatggttcggctgtgtccacacccaaatctcatcttgaatcgtagctcccgtaattcccacatgttgtgggagggacctggtttggtgggaggtaattgaatcatgggggcaggtctatcctgtgctgttctcgtgatagtgaataagtctcacaagatctgatggttttaataaagaggagtttccctgcacaagttctgttcttctctcttgtctgttgccatgtaaaacatgcctttcaccttccgccatgattgtaaggcctcctcagccacgtgaggcctttttctttataattacccagtctccagtatgtctttatcagcagcgtgaaaatgggctaatacaatactttatgaatctttttctatacaattattttaaagattcaaaataaatgacaatgagtgagagaaggaggatcaatgactgcttgagaggtggtggatggtgckgctataggaaggatgacagatgggtaccaggaatttttagaagtgatgagtatgtttcttctcttgattgtggtg

SEQ ID NO: 944486 - DNA, 569 bp, Homo sapiens
atgacaaagattattagattgaagactttcttagaaaatagcattaagtcatttacgaaaaggaacaatataaatgtgtatttgagaaattgtaattatttgagagatttcttatgcaacatttattctgtaagcaaattctagggattggagaattaatcaaattaataaagctgacatagaaattcctctgaaggtatctttgtaaacatcaatttctgaatcagtgttgtaaatgttttggaacacagacacaagatcacattttaactctacttttgtctctataaaaaatgccaaaaagagtctcattttgaccatgtacctctttgaattcccaccatcaatgaatgattgttcttgggtttccacattatattaccatttatcattatgagaattgtgtgttttaaccattataataggtgagtaatggtatctaatttttgcttaaatgcacrtgcccctaataaaattcatatttaacaattttcatataatttttggtgagatgcctctcctgatatttggttcattttcaatagcactgttttcttttgattagttgt

SEQ ID NO: 944487 - DNA, 570 bp, Homo sapiens
aggggagcttcctgcacttgctcctgcccctaatgccttttcttaacccttygtgtacctgattgccttgctgatcttgcattactgggcagtctaagagctccccttttaatgctgcttgtcgaagacagggacatatagctgtagtgtatttcctctattttttctatctattgaaagagggggctcaggcaaaacctccgtttcctctttgttattttgggaagagcaggtggtaaggcaagtgacgtttcttcctccttcccctttttgggttcttctttgtataatgggactaaagccatccctactaaagcccatagtgttaaagatgatgctgggacccgttgcgcttgtgtgtaatgctgttcaagatttctccctacttgttcccagagctttacttctagctttccttcttctgggaccacagattatgtgagacaacagttttcattaggtgccttaattgagcctgcgaaactgatgctcccctagccttaagcaactgttacaatactttcatatgctgtttgtgttgagctgataactgctgtcccatgatgaaat

SEQ ID NO: 944488 - DNA, 599 bp, Homo sapiens
ccattcattaagtatttttaaatgtattttggaaagttgatcctattactttatgtaatatttctcttgagtcccaaaggtcttctttttatgattattttgtcttaaattaacatagctatttaagttttcttttggtttatattttcatgatatatatttttccatctttattttttctatttctgaatatgtaaagaaattttcttggagataaataatagttgggtgtttttttttagtcaactatgaagaattattttttaatgatgttactcttttgtccaattattcttgttttaatttgtatttttacaataaagtttattgtttctattaacttattatttaatcattctgtgactaacattttatgggttaccataaggataacaataaaaagtttctataattgaattctaattcaaaaatttaattcccattcatatatactacagagatattataactctatatatctaattcctctttcctatcccatgttttttattttctgtttgtatctatacatgctataaaatgtratattggcatttttataattgctttccacacttacataatgaacaaaatacaaa

SEQ ID NO: 944489 - DNA, 623 bp, Homo sapiens
ttttaataattattgtaatcacatttacattttttatttgaattttcatatatattttattaggattttaatatcaatataaatattttcctaccattgtctattttctatttttatgatataaaattaacataaaaatgcttagattttcaatgtacagcttgagggcttctgacaaatgtgcgcacaaataagaattatttgcttactttttagtgtatactgaggagtgggattgctgggtaaaatgatatctctgttttaagttctttaagaaatctccagtctgctttccaaaggggcaagattaacttatattcttctcatcagggtataagtgttctcttttctccagagtcccaccagcattcattgttttttgactttttcgtgatagccattctgagtggtgtgttgctgcacacctacaatcatctcatatttgataaggctgatgaaaacaagcaataaggaagggactccctgttcaataaatggtgctgggacaactggctagccatgtgatgaagattgaagctggaygtctactttcaacatacataaaattaactcaaaattgatgaaagacttaaatgtaagacctcaaaccataaaaatccttg

SEQ ID NO: 944490 - DNA, 736 bp, Homo sapiens
acttgcacgtggcctgcagtttggaccaatttctcccatttgcaatggctgtatttacacaatgcctgaacccccattgtacctaggaagtaacttgcttgttttttattttacaggctcatagatggaagggasttgccttgtctcagaaaagaccatgggctgtggacttttgagttggggctcaaatgagttaagacttcaggggcctgttggaaagtcatgaatggttttgaaacgtaaggacattagatttaagaggcgccagtgttggaatcatatggtttggctgtgtccctgcacaaatctcatcttgaattgtatctcccacaattcccacgtgtcgtgggagaaacccagtgggaggtgattaaatcatggagggagttcttctttgtgcgttattgtgatagtggatgactctcatgagatctgatggttttaaaaaacgggagttccctgccctctctttgtctgctgccatctccatgtaagataaaacttgctcctccttgccttccaccatgatgtggaggcctcccaagccatgtgtaactgtaagtccattaaactttttcctctataaattactcagtctcatgtatgtctttattagcagtgtgaaaacagactaatacagcaaatatcaatctcttaaaatattttgttgttctgcatgtaatatagcacagtctaatatgggaggtaaaataaatcatccatggaccttcagata

SEQ ID NO: 944491 - DNA, 609 bp, Homo sapiens
caatgacatatcacctcacaccacttaaaatggctattatcagcaagacaaaagataagaaatgttggcaagaatgatccacagccataaagagagctttgattggccaagagactgatttcagtaactttctcctgtgaagagaccactgaccatggacttgtcctggccaatttccagaggctgtgcactgtgtgtctttctgcccctgcacaaagcccttttgatatgcaggacccaactgtaattcatttagttcttaagtcctcaccccaaagcaaagctgaaatgcatgtatcatgtgtgtttgcttattagacatgagagcctccactccatgtgaatatccatagctccttctatagcctgctgagtgtgtacactcgaccaatccatttgcacaaatttgtttctcatctttccctctcttaaagtgcctgctcacagtctctgtgggaggctttccttcccagcctgttaagatggccrtcctgcagcttcaaccctttctgagaaataaagtctcctttctaaatttataaactgggtgattcttccgttgaaagcacaagctgttgggaagagttatatggcaattccataaatgcc

SEQ ID NO: 944492 - DNA, 567 bp, Homo sapiens
acactatttcctgctttttttwaaaaaaaaaaaaaaaagggggccctgtattttcatttcacactgggcttcaaaaactatgtagcccatcttttcttgggatatggaaatttgggccagtatccaagtgtgtaagtatgtctaagtttggataaatacaggatggtaagaaacagacaagggaaagagtaatattttcttttcctttttttttttttttttttttttttttttgagacagagtctcactctgtcgccaggctggaatgcagtggcacaatctcggctcactgcaatctccgattcccagattcaagcagttctcctgcctcagcctcctgagtagctgggactacaggtgcgcaccaccacgcccagctaaattttgtatttttcgtagagacagggtttcaccatattggccgggatggtcttgatctcttgactttgtgatccgcctgcctcagccttccaaagtgctgggattacaggcatgaaccaccatgcccagccaagagtaatattttctattacatggaagtggattttgattttctcagaattata

SEQ ID NO: 944493 - DNA, 654 bp, Homo sapiens
taaccttcttctattaaatcatgggagatttttctagcttagaggtataagttttaatgtgtgttggaatttttaatacagacttaagtcctgatgcttatctagtatctttctttgttcttaaacattgatttccccgtattgcttacatttaataactattacattttcagttttaaggcagtaatagttcatgaatttgaaaagttaaaatctattggagatgaagttttacaattctgaagtctttcaaatatatttttggtaacatcttgatgaccttcaaattttctttcatcagcggagtgttagggggctgccgagagcctgggaactgctagcattctgtttctcactgcttctgggttatgcagcatggaagagagggcatggagtttggagccacacagaccttaggttcaaatccagctctgtgactttgaaaagttacttaacatctctgagccttagtttcatcatgcaaagataggacatttctcctgaggtggttgtgagggttaaataaagtawgtcaagagcccaagacataataggaaagcaatgaatcgtctctattattaatttttatttttatatatcaaagtctggggtacagtggccttgcttaaaaatggaatcccctttcctttgaat

SEQ ID NO: 944494 - DNA, 604 bp, Homo sapiens
cacagaacttacactctttgcaaaaactgactcaacatggatcacagatataaatgtaaaataaaaaactataaaacttctagaaggtaacattgaagaaaatctagattgcgttgggtttcgtgaygacttcttaaatgaaacaccagaggcatgatccatggaggagagaactgataagctgaacttcattaaaataaaaaactgctctgcagaagacattgtcaagagaacaaaagacaagctacagagtgggagaaaatatttgcaaaagatctgtcagataaaaaattgttattcaaaacatacaaagaactcataaactcaaaaataagaacacaaacaatgtaattttaaaaatgggccaaagactttaatatatatctcaccaaagaagatatacagatgacaaataggtatatgaataataatcagggaagtgtgaattaaagccacagggtgataccacagcacatccactggaaagggcaaaatccagaacactgacaacaacatatgttggcagaaatgtggagcaaaagaaactctcactcagtgcagacaggaatgcaaaatgccacatccacttttgaagacagtttgg

SEQ ID NO: 944495 - DNA, 627 bp, Homo sapiens
atttggaacaatagagtggcatgatctgattgacatttttaaaggatcattagactgtggtgtgaatcctagacttggtggaataagagtagaataatttagacttgctagggggctattagagaattctagggggattatgatgttggacctgcactgcttgtccaacacagaacccactggtcaaatatgcttactgacaattgaaatgtagctcctttaaacgaacatgctctgtaagtgtaagtatgcatcagacttcaagggcttaatagaaaataatgtaaaatgtctgcctaatatctattttgtattaactacatgttgaaatatttttctcaaataattgctcaaatggatgaaataaagcattaataaatatgttaataaaatgctattaaatatgttattcaatggtttcttcttactttttaaaatgtggctactgggaaattaaaaattgtatgtaggactcacattatatttctgttggacacccagtttagactcagatggggaaaagtgcttagatcctgcatatattttgaaagtagasaggacaggaattgttgatagatagtatatgaagtgtaaaagataatcattcaatgatagtaatattttctg

SEQ ID NO: 944496 - DNA, 518 bp, Homo sapiens
ctcatacatgccctgctcttgtttacactgcyggtttacactgtttctccaagccatcacagctgacatctaccttttatacctgtttttctccttctcttattccatttagtttttcaattcacacaaaaccgtatccaggccatcaccaatcattctatacggtcaaatgtttcttctaacaaccccacaatatcaccccttaccacaagacctcccttcagcttaatctctcccactctaggttcccacgccgcccctaatcccgcttaaagcaaaccctgagaaacatcacccattctctctccataccaccccccaaaaattttcgccaccccaacacttcaacactaattttgttttatttttctaactaatataaaaaggcaggaatgtcaggcctctgagcccaagccaagccatcacatcccctgtgacttgcacgcatacacccagatggcctgaagtaactgaattaatcacaaaagaagtgaatatgccctgccctaccttaactg

SEQ ID NO: 944497 - DNA, 479 bp, Homo sapiens
tttatacctgtttttctccttctcttattccatttagtttttcaattcacacaaaaccgtatccaggccatcaccaatcattctatacggtcaaatgtttcttctaacaaccccacaatatcaccccttaccacaagacctcccttcagcttaatctctcccactctaggttcccacgccgcccctaatcccgcttaaagcaaaccctgagaaacatcacccattctctctccataccaccccccaaaaattttcgccaccccaacacttcaacactaattttgttttatttttctaactaatataaaaaggcaggaatgtcaggcctctgagcccaagccaagccatcacatcccctgtgacttgcacgcatacacccagatggcctgaagtaactgaattaatcacaaaagaagtgaatatgccctgcccyaccttaactgatgacattccaccacaaaagaagtgtaaatggccgg

SEQ ID NO: 944498 - DNA, 639 bp, Homo sapiens
aagtatacatcctcatgagtaaaacaaggaggtgcactatattccaaaagaactactttgtgctttctaatttatacagacaaaaatccagggaacatgtgtgggaacagatactaatggtgtggrataatggtgaaaggaacataaagttggatcaagttaaattattcatataagctcactaagcagtgattcttaaccaatgttgcagctcagggagttaaaaggggttctaatagtttgttttgttggttggctgaaacagggaccaaaaggtgaccaataattagcaagtcagaaatacgtacttgctttggtttaatgtggagaaaggaatttaaaagcttagggggattagtatgtatattagccagggttctctagagggacagaagtaatgcaatatacatatgtattctatatatatatgggagtttattaagtattaactcgcacaatcacaaagttccacaataggccttctgcaggctgaggagagccagtctgagttccaaaactgaagaacctggagtccaatgttcaagggctggaagcatccagcatgggagaaagatgtagattaggaggctaggccagtctctcttttcacgtttctacctgctttataatctaaccatg

SEQ ID NO: 944499 - DNA, 595 bp, Homo sapiens
gacattattctaagcaaattaacacaggaacagaaaaccaaatataacrtgttctgacttataagtgggagttagacattgagtatccatgggtataaagatggccacaatggaaattggagactactaaagtgaggagagacaggaggcaagagctggaaaactacccactgggtactattcattcataccccaaacctcagcatcacacaatataccgaggtaaaaaacctgcacatgtacatgtacccccctgaatctaaagtaaaatttgtaaaaaaaaaaaaaaaaaaggaatttgtaatcaatttcagtcataaaagtaaatccaacatactaaatttttaaaaagtgtcagttttttcaaagcaagcaaatagaatatttaagttactttggaggaaatgtgtaataaaaccacatcagtacaacttcagtaggaagatagtgacatctatctgtgttctggtctctctctaggtgtaattagctcatatatttcagatgagaactaacctgatctcagttttctcagtaggcttttttttttttttttttgcaaagttgagattatatctattcgcctttttttttt

SEQ ID NO: 944500 - DNA, 568 bp, Homo sapiens
gccaacactctgcattgataaaagaaaaacttcagccaaattaaatttaaatgagtttaattgagcaatgaatgatcgtgaatyggggagccctcagaatcacagcagtttcagagatactccaggggtgccttgtgatcagaacgaatttatagacaaaaaaggtaaagtgaggtacaagaatcggaagtgcggtacagaaagagtgagattggttacagctcggcgtttgccttattttaacacaatttgaacattccgcagtctacgagtagttgaagtatggctgctgggactagccaacactcagccattgttacaggtgcataccattaagttaggttttcaattttgtctcacaaggttagggttcatccacaaggactcaaatatagaagtatggagtatggagttcttctaaggccgtgtttagtttgctttaacagtacagaatctttatttgtggctgaaatttttgccttaggtttcacaggcactgtatactggcaaaatatttttggtgttgtaatttgggtacaatatagtaagagtggtggtcagcagacag

SEQ ID NO: 944501 - DNA, 759 bp, Homo sapiens
gtctaagatgttataattgcctagttggaggctataggcttgttccccatgacagacctcccagctaaagtggaattcattactttcctggctttttwtgttttgttttgtttttattattatactttaagttttagggtacatgggcacaatgtgcaggttagttacatatgtatacatgtgccatgctggtgcgctgtacccactaactcgtcatctagcattaggtatatctcccaatgctctcccttccccctccccccaccccacaacagtccccagagtgtgatgttccccttcctgtgtccatgtgttctcattgttcaattcccacctatgagtgagaatatgcactgtttggttttttgttcttgcgatagtttactgagaatgatgatttccaatttcattcatgtccctacaaaggacatgaactcatcattttttatggctgcatagtattccatggtgtatatgtgccacattttcttaatccagtctatcactgttggacatttgggttggttccaagtctttgctattgtgagcacaggaaggaatgtttgggaaagcggcattaattgcattacccagtttgaggctgcctgcagctaagactgttaaggcatttcttttgccatgatgtagccacaattgggtttgggcaggtacacattaagggttagaacctttataacttacacacagtggaaggatagtggagtgatatgtagtgttatctggcaccttagtccaatg

SEQ ID NO: 944502 - DNA, 793 bp, Homo sapiens
gaaagcggcattaattgcattacccagtttgaggctgcctgcagctaagactgttaaggcatttcttttgccatgatgtagccacaattgggtttgggcaggtacacattaagggttagaacctttataacttacacacagtggaaggatagtggagtgatatgtagtgttatctggcaccttagtccaatgtgtgccattattgagagaccccattgggtgtaaatctaaccctcctagccaagcaatcacgttattaaaggctggaaagggagtgtctgcccaagtgacagggcgaaagagaggcagatctaagatatgagcccagtagagtttagcaggtacaggttgcagacaaagcgagagcataaaaaaggaacaataccctaagtgatttgcaatgtacaacagaaagcatagcaagaagcaaattatctggagtgaatggtgtctgtgtcaggagcaggattcattcagcctcctgagttgtcctcttcagcatcccccaggtaatgtccggggcttgtgtcatccgaggaagccacattgtccagggctgcgggtcctgcagggttagttccttcatttctggtaccaggttgggtcctagccacgctgtgatatggtttgatgtgtcatgctggaatccaaagaggacctgagrgtgtgtggacacaagcatactctcttccccacgttaataattcacttggaccacaccgtacattaccgttgacatctttccataaaactgaaggttttatgcctagagaggtttcagcaaagtgctttt

SEQ ID NO: 944503 - DNA, 626 bp, Homo sapiens
actcagaggcagagctctggggcatstccaccatggcctggacccctcccctgctcaccctcctcactctctgcacaggtgctgcctcctagggctcagcccccacaggaccaagaatcagcctggccctgacattcagctcagcacagggagtaatgcagggtgtggggctctggaaatgagacccttatcttcagactcacctcttctctcttctcttgcaggctccgtggtttcctctgagctgagtcaggagcctgcagtgtctgtggccttgggatagacagccaggatcacctgccagggagacagcatagaagactccgttgtaaactggtacaagcagaagccaagccaggcccctgggctggtcatctaacttaacagtgtccagtcttcagggattcctaagaaattctctggctccagctcagggaacatggccaccctgaccatcactgggattcaggttgaagacaaggctgactattactgtcagtcatgggacagcagtcgtactcattccgcggtgacacaggcagaaggggaagtgagacaaaaaccttttctccatctgtcacactctttcttcagctccaggaaaaaactgtggacaaattcatgag

SEQ ID NO: 944504 - DNA, 582 bp, Homo sapiens
agagttcaggaattcttacccagtccaaatgatttgatctgaaagttatcagaaacctgtattcgagagtgtttgtcagggtccttttcatcccttcatgaaactccttaaagacaccatattctaagactttgtgtgcttgtgaagttttcagaaactgcatcagaattaagcaattaactgtggaaataacttaaaatggtcatagttaaagagacaatttacaaggaaatttggttatttctgtggcttataataatttaacgtaataaccataattatgactgatagcatacacccaaacattagaattctataaacgccatataattttggaatatatattaataacatagtcactaaaatataacttgaagaaggttaaacattatttcttatttgacaatgcctcccatgtagtttaacatgtcaaataattctatttatctttcttttggatgcttcaggagccttttttatcatccaaaagttaaagataaaaaatacttaaytttgaaggtgaaatttgattttgggaagcctgtaaaatatgtcaaaggtttaaaacatgtaaccaaataa

SEQ ID NO: 944505 - DNA, 658 bp, Homo sapiens
aaggatttgtcgttgagggtggagaaggtggaaggatgttgaacagacttttccctaatgagctgtgatgccagctgcaaaggcggcaaatcctgttactcccttcagctactctctgaagctgcagaggggcagtggtaactggtctccctgccctatgctgattagctgccttttctgctgtttttccccccttcctcttctgtcccagagcatcttggcaaagttcagatttctgtgctcacagctcaatgctcacagtgaaaaggaaatacaaaagaggaggagagaaagtgagaagaaaagagagaaaaggttggggtggaggtttttagtagagtcccttattgccttagtctaagacttaagctctgggttgaaaccttaagtggtaaagctttgtaagtagtaacctggatttccaaatagttcttgcagatagttttattggcacatgaacacagcaggccatatattaaaagcatttgaatttctatcgtttagaaacctccgaattttgaaaaggacacttcgcwgtttttccacaaactatcattgtgaggaagatgaaataattgtaagataaatgttttcatgtggcatttactgtgtgccactgcttcatttaatcattacaacccttgaaaatagacacttt

SEQ ID NO: 944506 - DNA, 603 bp, Homo sapiens
taacagaaagagaactctgcaaatacgagagtgtaagtattatactgagtagtgatcagtgtatgcatatgaggaatgtacctgaggccaagaaaaagactacccaaaagcattgaacagaacaatccccakagaaaattcagggctgaaaataatgcctgacctcatcaacaagtacagaaaatctcataattcattaagcatcaggtagagtactcagaggagtcttcctgatctgtggacaaaattaaccatagacttaatgctgttgtggtctcatgtaaaaatgttaaaagaaagctggggatagattaaactgtttcaaaataatttaactgtgtaccagaacacaacttaagaatacaaaaatatctagcacctgcaaagataaaatgcacaatgtctagcattcaactacaaattaacatgcaggcaaagaagtggaagaatatgatccatagttaggaaaatatcagccagtcaaagctgatccaaaattgacataggtaataaatagataaggtcattaaagcagttattataatactattccatatgtataaggaactagaggaaggattaaacatttttggcgaatgcaca

SEQ ID NO: 944507 - DNA, 744 bp, Homo sapiens
aaacaaacgtggcatgtaaatggtttttggctcttaagggatatcrgtgtacagtatgtcaaagcaaaggttgtatagaagtcaatatataaaaattaaaaactcctacaagactgattttccagagtggcttataagctaattctttaattaacacaaaaacagaatttcaaaaatatttgggcaactgtgatatcattttgaaataaacacacagccatccaaagttgataatacttgaaaaataagtccttggaatatagaaatgtaatggaatatctgggtatatctgtctgaaaaccaaaccaatataacacacaaaaaatacgctcttgtcttacagaaaaagaagcattcgatggaccaacgatataagaagaaaagctagaaatactggttgtcaaatatttgcaatcaaatgtatctttaaaacaattacagatgcaaaacatatgtatttcgcagattggagcacaccatatttcattttcctttattttttatacctttaagtatagcacacacttggaataggacaacttatgtatgtagaaaatgcacctttcctctcaaactcactcatctgaaataaaactgcttatctcctgccccacaacaattatgaaatcaactccttcacagcactcccaaacctcacttatggtaattacatcctccaaattattcagactcaatgccttgataactctaatttgatatccaatctgttagcaaatacttctg

SEQ ID NO: 944508 - DNA, 686 bp, Homo sapiens
ctactaaaaatacaaaaaattagccgggcgtggtggcgggcacctgcagtcccagctacatgggaggctgaggcaggaaracggcgtgaactcgggaggtggagcttgcagtaagccgagatcgcaccactgcactccagcctgggcgacagagcaagactccgtctcaaaaataaataaataaataaataaataaaatggcacaattatatcctaacatatcaataattacattaaatgtaaatgtcttaactcaccaattaaaagagattggtaagatggattttaaaacatgtatcaactatatactatctacaagaaattcacttcaagatgtttcacacagatattaatcaaaggaaagcaggagtggctatattagtatcaaatgaggcagacttcagggcaaagaaacttaccagggataagactgacatgcaataataaaagggtcaatgcaacaagaatgcatagtaatcctaaacatttatctaacaaacaacagaactgcaaaatatatacaacaaaaagggatagaactgaaaggagaaatagacaaatccactattgtggttggatacgtcaacactcctctctcaacaattgatagatcaactagacagaaaatcagcaagaaaatagaagcacgcaatgatatcgtcaaccaacaggatctaattgacatt

SEQ ID NO: 944509 - DNA, 655 bp, Homo sapiens
agagcactcatatactgctagtgggaatgtaaaatggtacagcttctctaaaaagcagtttggcagtttcstttttttttgagtcagagtctcgctctgtcacccaggctggagtacaatggcgccatctcggctcactgcaacctctgcctcccgggttcaagcaattctcctgcctcagcctcccaagtagctgggactacagatgcatgccagcacacctggctaatttttgtatttttagtacagaactacttggcaataaaagagaaagctatcaacacacagtaacctggattaatctccagagaattatgccaagtgaaaaaagccaattctaaaacttcccacactgcatgattccatcaacgtgacattcaaaaaatgccaaaatcatggaagcggtgattgagagactcaggaggggaggagagtggaaaccgggcatggctgtcaaagggtgatgggaatgttctgtgcctcaccttgatcaacgacaacatctagcttgtagtattatgatattataatacagtgtttcaagatggcatcattggggaaaactgggtgaagggcacctggactctctttgcattgtttcttatgctgtatctcaaaataacaggtttcattttaaaaatatacaaacccttgt

SEQ ID NO: 944510 - DNA, 655 bp, Homo sapiens
agagcactcatatactgctagtgggaatgtaaaatggtacagcttctctaaaaagcagtttggcagtttcctttttttttgagtcagagtctcgctctgtcacccaggctggagtacaatggcgccatctcggctcactgcaacctctgcctcccgggttcaagcaattctcctgcctcagcctcccaagtagctgggactacagatgcatgccagcacacctggctaatttttgtatttttagtacagaactacttggcaataaaagagaaagctatcaacacacagtaacctggattaatctccagagaattatgccaagtgaaaaaagccaattctaaaacttcccacactgcatgattccatcaacgtgacattcaaaaaatgccaaaatcatggaagcggtgattgagagactcaggaggggaggagagtggaaaccgggcatggctgtcaaagggtgatgggaatgttctgtgcctcaccttgatcaacgacaacatctagcttgtagtattatgatattataatacagtgtttcaagatggcatcattggggaaaactgggtgaagggcacctggactctctttgcattgtttcttatgctgtatctcaaaataacrggtttcattttaaaaatatacaaacccttgt

SEQ ID NO: 944511 - DNA, 615 bp, Homo sapiens
tcttgtggcctcctcagaatcttgtgacatattataaccctttcttaactggaaatgacccagacacccaacaagcatctaaaataattttaggattttaagctgcatggaacgtttgcctagaagcattcatacaatttacatttcatgcatttttaagtttgcctagattacttatgaaaactgagagacaaaactagtcatcatttcaaattattttattgttaacctttttctttttttgaaatggggtcttgctctgtctcacaggctggagtgtgttggcatgaacgtaactcactgcagctttgacctcctgggatcaagcaatcctaccaccttagcctcccatgtagccgggactacaggcatgtgtcgccatgcctggctaatttttttgatttttttgtagagatggggtcttactttgttgcccaggctgctctcaaactcctaggctcaagcaatcctccctcctcagcttcccaaagtgctgggattacagatgtgagttgccacacctggccttcttaatcatttttatagcctgtgaccatcrgatgttcacctaagaaccttaaagttaaatgcatgtgtatttttgctgacaactca

SEQ ID NO: 944512 - DNA, 715 bp, Homo sapiens
cgtgtgtggggagctgaccaacagattttccctgtggtaaaataggcagaaccaccaaacagtctgtgcttgtgtggccactcaagtgggtgagctgggccgagggctgactgcccccttcacagacccagaaatgacagtcccaagcagtgcttggagggcaagatgcctaggggaagggctggaggagtttgggagagttctgtgctgagaagcagggcacccaggagggaacctaagtcagaacacctctgagtgcaagagcacgtctgaacgctgctgaccactggagggcccctgcctccgttcacaccagcaataagaacaaaccctatgggttcctaccctttggcttccctgcttcattcctctgcactgtggcccagaaggacctatggtaggaagggctgacgcctgctctctggtgccctgtgaggaccaacctgggctcagagcagtgtgtagccagtgggaagtgacccgcaagcagggtccaagaaggctgctcgaggacacgcacctgagctgaggtacaagggtatgcagagaggcagcagtgtgtgtgacggcaccatggcaggagaggcctagatactatgctgggccaagtgaccaggagggctctgggtataaaggattatttactccagaattgtgttttggataaccacatgcttacaagcttscattccaagagctcaaacaactctgatga

SEQ ID NO: 944513 - DNA, 679 bp, Homo sapiens
agtggaagcactcttttggcagggtcaggtctcctttccaaaagagcctatatccaggctgkggacacgggagtaaagggccctggtctcccaccccaatccacgacaattctgaagggcctccccagctacagaactcccagcagggctggctgcggctttctctgtgcttacatcatagcttgccttctccctctgtctggtgctgcttccttcactccttcaatggtgtggatcccgagagccctccccaataatcctgcatgcaaaaatctgcagctcagaatctgactcctgcaacaaggcctttgctcaaatgttaccttttcactcaggctttgccaaagcgtcccacttaaacccgtctatcccccgcctctgcctcagcattcctcatctctaagtctgctgtttctccaattcacaggatcttgtttgtgattccgctatgtgtctcaccaggaagctcccctcccacatctcctcttttccacttacacaggaaacccccagcagatcccatcccagtctcactggccaggatgcataacaggctgctcctcaagagcctggcatgctgcttggttcactgctgttttaagagctgaaaacatacacacactgactcacacacatgcatacacacacacacacacacacacacacacacacacacaca

SEQ ID NO: 944514 - DNA, 739 bp, Homo sapiens
cggctgggcgcagtggctcatgcctgtaatcccagcactttgggaggccaaggcaggtggatcatgaggtcaggagattgagaccatcctggctaatacagtgaaatcccgtctctactaaaaatacaaaaaaaattagccaggcgtggtggcagatgcctgtagtcccagctactcgggaggctgaggcaggagaatggcgtgaacccgggaggcggagcttgcagtgagctgagatcgcaccactgtactccagcttgggcgacagagcaagacactgtctcaaaaaaaaaaaaaaaaaaaaaaccccaaaaaaacaactcatatggtttagtaacagactgggcacgaaagggctatttaaaaaacagttgctcctctggcggaaaggaatgcctggagactacttattttatttcttactgggaggaccaggatcatcatcctattttgcatagaaggttcagtttgttctttcccttaaaataggaagataagggcattatccccctaagtctcgtatgatattccccattctgagtccagaatacctagaaatttggaatttggctattgccgtgtctggactgtgagtatgggaaggggaarcttttctgtctgttgtccccactaccgcccctcacatccgtgattctgaaccccatgataaatgccctttgaacctttttcctccttttgatgccgaatccccttttatgggactccgccagcacgggtg

SEQ ID NO: 944515 - DNA, 742 bp, Homo sapiens
tcagacgcccgcgcagcccgaagctttggcgcagccccgggggcggggcgccaggaggtggcagcctccgagcgacagcgcgcccagccaacgggacrccggcatgcggcgcgccgccccgcccctcgctgcgcggcccaatggtgaacgcgccggcttcgggctgggcggtactgggctggctgcggtggcgcgcgggcgcggcacccggaagtcggcggcggtggcggaggcggtgagtgcgcggctccggggctggccgactccgctagtggcccggccggcctgggctcgggggctccgggctctgggctctgggtgcgcggaccgggccaggctgcttgaaggtgggtgggctggccgcacttcctcaccctgcctcagtttcccctttctgaggtatggtatagaatcaggcggctgggtcaggggcaaccacgtcgatcccggccgacgaaaatgccccgcgcgttactggaaggtgtttttgataatccccgctggcacgggatgcgagggactctggcaggtgggaccagactcgctgcggggaggctgagatcggcagggttgggagctgcgtggtccctgcagggtgtgtgggctgctcggccttggccagcatcagggacagctctggcgcccggtcactctgccccctacccgcggcctgctgcgggccagcagggtgacagctaatgtgggtgtgagtagatagtaagtgctgggtcatccctgcgcc

SEQ ID NO: 944516 - DNA, 763 bp, Homo sapiens
acctgattaagagtgggtctgccttccccagcctgactcaaatgttaatctcctttggcaacaccctcacagacacatccaggatcaatattgcatccttcaatccaatcaagttgacacgcagtattaaccatgacaggggggaatgagatgacacaaaggatcccttctggctctcatgttctgtcaccatctacttcaggagagagatgcactgtgtggggaggatgaaagttagaaggaaaaggcaagagaaatcaggagggtttggtattcaatgcgtgttcatttattttacacttacaaaagaaatcgcccacccctttgccccattcccccaaaacagtctctttttacaaacatttaaaaattaaaaccaaatgaagatagacaagttaatttcagtacaattatttttcagtgtagctgtcataattagagtttaaatttcctacaagtgaccaatgtccaagtgacttatagggaaatcctgattatcggccaaaggaaattcaatattacaagttagcaaattctagtacaaaaatagtccgtgtgttggaacagctttccttttacataggtcttaggtcagtctgctgtaatacctaacgcttccggattctctctcacaaatggctcaatcgtcactgctgaagcagcatggygcctgcagcagcaggggctagtgtccaccttggggccgtgctggagacggcaggcctgggactgccttgctggccccagggcacctgggcagagc

SEQ ID NO: 944517 - DNA, 620 bp, Homo sapiens
ggaggtcttgtggcctcctcagaatcttgtgacatattataaccctttcttaactggaaatgacccagacacccaacaagcatctaaaataattttaggattttaagctgcatggaacgtttgcctagaagcattcatacaatttacatttcatgcatttttaagtttgcctagattacttatgaaaactgagagacaaaactagtcatcatttcaaattattttattgttaacctttttctttttttgaaatggggtcttgctctgtctcacaggctggagtgtgttggcatgaacgtaactcactgcagctttgacctcctgggatcaagcaatcctaccaccttagcctcccatgtagccgggactacaggcatgtgtcgccatgcctggctaatttttttgatttttttgtagagatggggtcttactttgttgcccaggctgctctcaaactcctaggctcaagcaatcctccctcctcagcttcccaaagtgctgggattacagatgtgagttgccacacctggccttcttaatcatttttatagcctgtgaccatcrgatgttcacctaagaaccttaaagttaaatgcatgtgtatttttgctgacaactca

SEQ ID NO: 944518 - DNA, 735 bp, Homo sapiens
tgggcgcagtggctcatgcctgtaatcccagcactttgggaggccaaggcaggtggatcatgaggtcaggagattgagaccatcctggctaatacagtgaaatcccgtctctactaaaaatacaaaaaaaattagccaggcgtggtggcagatgcctgtagtcccagctactcgggaggctgaggcaggagaatggcgtgaacccgggaggcggagcttgcagtgagctgagatcgcaccactgtactccagcttgggcgacagagcaagacactgtctcaaaaaaaaaaaaaaaaaaaaaaccccaaaaaaacaactcatatggtttagtaacagactgggcacgaaagggctatttaaaaaacagttgctcctctggcggaaaggaatgcctggagactacttattttatttcttactgggaggaccaggatcatcatcctattttgcatagaaggttcagtttgttctttcccttaaaataggaagataagggcattatccccctaagtctcgtatgatattccccattctgagtccagaatacctagaaatttggaatttggctattgccgtgtctggactgtgagtatgggaaggggaarcttttctgtctgttgtccccactaccgcccctcacatccgtgattctgaaccccatgataaatgccctttgaacctttttcctccttttgatgccgaatccccttttatgggactccgccagcacgggtg

SEQ ID NO: 944519 - DNA, 730 bp, Homo sapiens
ggcaccaaatgggctcagccacacgcgtgtgtggggagctgaccaacagattttccctgtggtaaaataggcagaaccaccaaacagtctgtgcttgtgtggccactcaagtgggtgagctgggccgagggctgactgcccccttcacagacccagaaatgacagtcccaagcagtgcttggagggcaagatgcctaggggaagggctggaggagtttgggagagttctgtgctgagaagcagggcacccaggagggaacctaagtcagaacacctctgagtgcaagagcacgtctgaacgctgctgaccactggagggcccctgcctccgttcacaccagcaataagaacaaaccctatgggttcctaccctttggcttccctgcttcattcctctgcactgtggcccagaaggacctatggtaggaagggctgacgcctgctctctggtgccctgtgaggaccaacctgggctcagagcagtgtgtagccagtgggaagtgacccgcaagcagggtccaagaaggctgctcgaggacacgcacctgagctgaggtacaagggtatgcagagaggcagcagtgtgtgtgacggcaccatggcaggagaggcctagatactatgctgggccaagtgaccaggagggctctgggtataaaggattatttactccagaattgtgttttggataaccacatgcttacaagcttscattccaagagctcaaaca

SEQ ID NO: 944520 - DNA, 532 bp, Homo sapiens
tcactgagaagcagaaagtgtgcttctgactttggttcatgcactgacggagtaaagtggaacatactaggatcacgtcattctcctcgtcttagacaaatcctgaaaaggcattttccagtggcaaattctacacaggcaggacattctcgcagcagcaggtacaccgctgccagttcccaaatcacgtgcaaacagcactcttggtctgcgctactatgacacctggggaggggccactggccacctgaccctagtcacacccagaaggcctcatgttccaatgtgtggcttctcctttcttaacctattcctgtaagtagaatccaccttaccaggaaatatccatgatggatttgtcaaacagttcatggatgaccaccagcggccgtttcagacatgtgagctggaaggaaagacacagtcaaggttaatgaaattactgaaatcccyttctgtattcagctcagttaacataaccaacctagaagcctgggtcaaagtggctgctgatatttaaggcatcttcaac

SEQ ID NO: 944521 - DNA, 544 bp, Homo sapiens
gggtgggctgggtgaagctgccactcctggcctggatatatggagccctgggcagtcctgcctgtcccatggctttgctggacacaacaagaactgccagatgtcatttgtgtgggaatcattttgctgtttgagcgaagttggatttgttagtgtgctcaccagtgtggatggatgaggtctgaccaggaggctgcctgttgtctgtctttcacagagggccctccacacccagggtagagctggggagaaggagtcctggggaaatactgagttaaacaaggctgatgtatcctctgcaggacttctcagtgcctttagcatggcgggtgtaggtgagtctaagagatggccaggtagcctaggtgtggatatcaccaggctagggctgctgtctgtctcctctgctcacgctcctgtgcagggagggacttgagggtgggcctggggaaactgtggaaagtaggagtctctgtccccagacactgtctctgaactggggccaagattcagtcattkcatgtccccactaggcagtgcttac

SEQ ID NO: 944522 - DNA, 680 bp, Homo sapiens
taactgtcatctcacgttccaggagttcccaaataggaccaagaaaaccagaccaggcacactggggccctcaactttgacgcagagagatttctcctagtcataccacgcaaaacgagtggcatcagaaagacccccccagacggtgtcactccagggaaatttttgtcccaagtgttgagatcaaacaaaaccatcatgcccaaaactctttaaattcttctcagcactgagaagaaaaaaactacttttaaatcctcacaattgaatgcatcaacgggccacttagttctcatgagtcaggctgctcgaagagcgagcaggaaaaacaaagctgcaagggtgcctcagcaccaaagttagtccacgtttcctccaaagacatgaccatggccatatacttctgagtaactatgcagattgtttttgagacatgcaggataaaaacaagacctggttctcttgtgggtatctttgaagtccccaactttccaaagatcttctatagcaatgggtcccaaatacgcctccgccaaggggtctccctgtttccctaaactatttcccaacacaccttgcatctcccaaaccaaataccagcataggtaagtcaaactgtagcccaagaaaccgagatagacaraaggagcaaaatcctaggagcaaacattttgggggag

SEQ ID NO: 944523 - DNA, 605 bp, Homo sapiens
ttctctattgcttgtttttgtcagctttgttgaaggtcaaatcattgtaggtgtgtggccttacttctggactctctattctgttccattggtctatgtgtctgtttttgtggcagtatcatacttttttggctatggtaaccccgtagtatagtttaaagttggctaatatgatgcctccagctttgttctttttgcttaggattgccttggctttccaaacgcttttttcagttccacaggaattttaaaatagtttttttctacttctatgaagaatgtcattggtagtttgatagaaatagcattgaacctgtaaattgcttaggacactatggccattttaatattgattatttctatccatgagttggaatgattttctgtttgtgtcatctctgatttctttgaggagtgttttgtaattcctgttgtagagatcttttactccctagttagctgtattcctaggtattttactctttttgttgtcattgtgaatgggattgcattccttatttaactctyagcctgtttgttgttgccgtataggaatcctcgtgatttttgattgtttattttacatcctaaaagtttgctgaagt

SEQ ID NO: 944524 - DNA, 588 bp, Homo sapiens
gaggatccagtttcattcttctacgtgtggcttgccagttttcccagcaccatttattagatagggtatcctgtccccactttatgtttttgtatgctttgtcaaagatcagttgactttaagtatttggctttatttctgggttctctattctgttccattgtctacttgcctatttgtgtaccagtaccaggctgttttagtaactatagccttgtagtataatttgaagtcgggtaatatgatgcctccagatttgttctttttgcttagtattcctttagctatgtgggctcttttttagttccctatgaattttaggatttttttctagttctgtgaagaattatgatgatattttgatgggaattgtattgaatttgtagattgcttttggcagtatggtcattttcatagtattgattctacccatccatgagcatgggatgtgtttccatttgtttgtgtcacctgtgatttctttgagcagcattttgtagttttccttgtagagatctttaacctccttggttaagtatattttcatgtattttagttttttttktttgtttgttttgttttgttttg

SEQ ID NO: 944525 - DNA, 576 bp, Homo sapiens
ttgaaatacactgagatcttttcaggggggaygtgtgggagccaagtcagcttcctttccaggccagcagaaaaatgatccacctctgagtcaccctcctgacccagtgttccagctcttcaactgagacaggcatctctttttatctgcaggaatgttgatgttagatgtaaagcagcactgtgactcaaccccttgtgcaactctgaacatggaggggagtcctgtgaagatgcactgaccctgaagtgtttcagaaaggctgtctatagctgtacctaagccttgatcatgtgagagaagtcctagctctgtctgcagtggtgggcaagggggacaagaagtcaccttctccaagacccttttcaagcaccagggttgcctgactgttgaattagggccatagactttccacactgagcccagcactgcacttgtgcctctgctgaaagatgctttccatagcagaaagttctgggactcaagtcctgctgtctgtatttttttgtcccttgatgtggtgtactcccccttcccctaggagtaggaatccctgaagaacagactactgtgaat

SEQ ID NO: 944526 - DNA, 576 bp, Homo sapiens
ttgaaatacactgagatcttttcaggggggatgtgtgggagccaastcagcttcctttccaggccagcagaaaaatgatccacctctgagtcaccctcctgacccagtgttccagctcttcaactgagacaggcatctctttttatctgcaggaatgttgatgttagatgtaaagcagcactgtgactcaaccccttgtgcaactctgaacatggaggggagtcctgtgaagatgcactgaccctgaagtgtttcagaaaggctgtctatagctgtacctaagccttgatcatgtgagagaagtcctagctctgtctgcagtggtgggcaagggggacaagaagtcaccttctccaagacccttttcaagcaccagggttgcctgactgttgaattagggccatagactttccacactgagcccagcactgcacttgtgcctctgctgaaagatgctttccatagcagaaagttctgggactcaagtcctgctgtctgtatttttttgtcccttgatgtggtgtactcccccttcccctaggagtaggaatccctgaagaacagactactgtgaat

SEQ ID NO: 944527 - DNA, 565 bp, Homo sapiens
ccccccgcttttgaggcccctcacatcgttgaacagaaagaaaccatccttgcttgtagttgtgccctaaatgaactactgactttcagaatccatgtggaggataaaataattgattttttargctactaagttttgggataggttattaatgattcaatagaatgtggaatatgtctgttactatcctttgactcaatatattctgcatactttctttgtttctattgccaaagataccagttacttcttcagcctttccctagttggcattaaatagactaattgaagtttgattattagtgattatatttttcatctttaaatgctttatttagtgattttccaaatcttccttgccagttctgatagtatattgctgcttaatatgtgattccttcttttgtttagatatttcatacacagcattttccgttataattttagtatctgaagcctttgaggttttatttatattggattgtttctactgactaccaaccattggtgacttgttttcttttgccattggtggtatgtttttcctcattggttaaaattaatc

SEQ ID NO: 944528 - DNA, 565 bp, Homo sapiens
ccccccgcttttgaggcccctcacatcgttgaacagaaagaaaccatccttgcttgtagttgtgccctaaatgaactactgactttcagaatccatgtggaggataaaataattgattttttaggctactaagttttgggataggttattaatgattcaatagaatgtggaatatgtctgttactatcctttgactcaatatattctgcatactttctttgtttctattgccaaagataccagttacttcttcagcctttccctagttggcattaaatagactaattgaagtttgattattagtgattatatttttcatctttaaatgctttatttagtgattttccaaatcttccttgccagttctgatagtatattgctgcttaatatgtgattccttcttttgtttagatatttcatacacagcattttccgttataattttagtatctgaagcctttgargttttatttatattggattgtttctactgactaccaaccattggtgacttgttttcttttgccattggtggtatgtttttcctcattggttaaaattaatc

SEQ ID NO: 944529 - DNA, 598 bp, Homo sapiens
cagccttattttggggctctctattctgttccattggtctatgtgtgtgtttttataccagtaaccatgttgttttcgttactgtagccctggagtgtagtttgaagtaaggtaacatgagcttccatctttgttcttgggctacttgggccctggagtatagtttgaagtcaggtaacatgatgcttccatctttgttcttggttatttgggctctttttttggttccatatcaattttaaaatacttttttctagttctgtgaagaatgtcattggtagtttaataggaatagcactgaatctctaaattgctttgggcagtatggccattttaataatattgattcttcctatccatgagcatggaatgttttttccatttgtttatgtcatctctgatttctttgaggagtgttttgtaattctccttgtagagatatttcacctacctagttagcagtattcctaggtattttattattttcatggcaattgtgaattcctgatttggctctcggcttagctgttggtggtatataagaatgctactgaattttgtacatygattgtatatcctgaaactgtgctgaagttgt

SEQ ID NO: 944530 - DNA, 615 bp, Homo sapiens
gagaatggcgtgaacccaggaggcggagcttgcagtgagctaagatcgcgccaccgcactccagcctgggggacagagcgagactctgtctcaaaaaaaaaawaaaaaaaataaaataaataaaataaaataattaaataacataaaaaaattagccaggtgtggtggcgggtgcctgtagtcccagctactcaggaggctgaggcaggagaatggcgtgaacttgggaagcggacttgcagtgagctgatcgcacaaccgcactccagtctgggggacagagtgagactccacctcaagaaaaaaaaaaaaaaaagatatcatgatagtttaccatgcctaacgttagctatattgcaaaagggattctctgtattcatgttataaagtgttaaaaagaaaagaaaaaccctgtctacacagtatggaacttttcaaattatttcacaggttgtgaaataaactggttaaattaaatgtaggaaaagttatgacaattattaattagaaatatttactatgcaatacaataattagatatgtataacaaaatatctgcagaaatattgttgcctactttacattaaatgactttggtgactaaggcctcaactc

SEQ ID NO: 944531 - DNA, 712 bp, Homo sapiens
ggagatatagtccggcgtccctactgccactgatgaatccacctgtgggtggtggtggtgaagccatgaggacagctttgggcttggctgggactgctggcccctcgcgatggccctgtcacccctactctgccaggctggcctgctgctgcccacctggggcctgggtctcacccaccttccccggggggcctgatgcctctgcactaggcctggggcctcccattttcctgagagcttggcccgccttgtatcccctgctcccactctggggcggggtccttaccatgccgttggtgttgagacgcaggcaggagccgaagtcagccaggcgaatgtgcccgttcacatccagcaggacgttgtctggcttgacatccctgggggatggcaggcagggagagtgaggcgtttgacctgtgtgtaagtggccatttaggcacacgcccaggtgcacatgcacggtgtgtgccagcaccagctcacacacattcctgtgtgtaggtgctcatgtgatgagcaacgtgtgtgtgtgtagatgatcccacaggccagaaggaggaagatggctagattgtagaaaggatgtgtggggacaaccsttggaggtggcagagtgtgctatgggggacgcaggagtcagacttccccagtgcagaccacagcttgccacccgagagccgagtcaccttgagacaggtgtttccctgtg

SEQ ID NO: 944532 - DNA, 598 bp, Homo sapiens
aaactgttagaactgataaacaaattcagtaaagatgcagaataaaaaatcaatataaatagtagcatttgtgtatgccaacatgaaacaatctgaaaaagaaaaaaagttcttccatttaatatagctacaaataaaacgaaatacaaaggaattaacttaaagaactgaaaaaaactctacaatgaaaattataaaacactgataaaagacattgaagatacaaaaaaaatgaagacattccatgttcaaggattgaaggaatcaatattgctaaaatgtccatactacccaaagcaatctacagattcaatgtaatccttgtcaaaataccaatgacattatttacaaaagtagaaaaagtaatcctatgatttatatggaactacaaaagaccccaactagccaaagatatcctgagcaaaaagaacaaaactggagaaaccacattacctgactttaaattatactacagggcaataacaaataaaacagcagggtrctggcataaaaacagatacctagaccaatggaacagaatagataacccagaaacaaatccttattttcaacaaagctgccaagaacatatattgga

SEQ ID NO: 944533 - DNA, 624 bp, Homo sapiens
ggccaggagacagtcctgggatagggaaagaaaagaggggcttccgggggtggggagcggggctgggcggctgctggctgagccaagtggactgggaggtgtggacagggaaccctggcggggccggccaatggtggcgtgatgcagcctggcttgggaaatgcccatggaggtgacaagtgacagccgggaacagacccactgccagggctgcctctctctttagatatgtcctggcatctgactttggtttcctggtgtttaaaggctaattgggatcggtcgtggtgcctcaggcctgtcaatccagtacactgggaggccaaagtgggaggattgcttgagcctaggagttcgagaccagcctgggcaacatagcaagaccccatctctaaaaaaaaaaattaaaatattaatactagctgggtgtgctggcacatacctgtggtcccaaactactcgggaggctgaggtaggagcatcacttgagcccaggagttcaaggttgcagcaagctatgatcttgccactgcrctccagcctgagtgacagaacgagaccctgtgtctaaaaaaaaaaaatttttaaataaataaataaaggtttgttggacatgttagctca

SEQ ID NO: 944534 - DNA, 703 bp, Homo sapiens
cgtcctctgatcacacatgatgggacttgtacacttgaaatcaaacacattyttaaaacttctgttgtttagaaatcccccctcatttttccatggacaaacttattttttatgtcatagtgtacttaaaatttggtattgcctgagagttaaaagcaatatgatagctgtgccaaactcacctctctacataggatcatcctgtgagaaaaccctctcccaattcccctgcaggtcttcaggaatccacatctccccagagacctttgtgcccacaggtggcacctccagagtggagaagaccctttgtcaagaagggaagcggaggggggatgagagggtcctgcaggcagagctggaatcggcttcctctctgcctcttgcaagctgtgtgacgctgggtgaattttctccttcctttgggagcctccattttcttaggtttggagcagggtggtcacactgaccttgcagagttctgagaatcagtgataggacatgaaaggcctggagaacattctcttaagaatagctgtgactcatgtgtgagcaatgggctttccattcctctctttctgtttatctgatgcaaggagcatgctccggtgatggtgatgagggaggaatgaggataggcacagacacccctgtgtcagaaacatgctgctttatcactgcggaatgactctgtcttccctgggac

SEQ ID NO: 944535 - DNA, 594 bp, Homo sapiens
aacccctcgcccctgccagcacactcggtctcctctctggttgaacagagctctgcctgtggtcctgggtcccagccctgaaacccacaggtccagcggtggccagggacacaggcccacccctgcaagccagcagacaaatcggcagacacctgaaacacgaagttcatggcagggtcaggctttgtgtcattcacagccctctagataggccgagaaccagagctcattttttaaggaacaccagtgagtctggagatttttttcttttgcttcggtcttttgcagctttctctactaagggttctcctttttcacccaagcaattgcctttccatctaatggcccaaatggtcaaatggcatctactagtctcatatgactgctgcctctctggcctcgccctgctgctgaggtcagcatgacctggaactgtccgctggtccctttcagtaacctgaagctttcaccgtagacgtgctgtattgcccagaatccatcgtgtcgctggtcgsggtcctgcggaggctggctgcctaccgggagcaccagcgggctcctcaagtctacgtggcccttatcgtccgcaaccca

SEQ ID NO: 944536 - DNA, 594 bp, Homo sapiens
aacccctcgcccctgccagcacactcggtctcctctctggttgaacagagctctgcctgtggtcctgggtcccagccctgaaacccacaggtccagcggtggccagggacacaggcccacccctgcaagccagcagacaaatcggcagacacctgaaacacgaagttcatggcagggtcaggctttgtgtcattcacagccctctagataggccgagaaccagagctcattttttaaggaacaccagtgagtctggagatttttttcttttgcttcggtcttttgcagctttctctactaagggttctcctttttcacccaagcaattgcctttccatctaatggcccaaatggtcaaatggcatctactagtctcatatgactgctgcctctctggcctcgccctgctgctgaggtcagcatgacctggaactgtccgctggtccctttcagtaacctgaagctttcaccgtagacgtgctgtattgcccagaatccatcgtgtcgctggtcgcggtcctgcggaggctggctgcctrccgggagcaccagcgggctcctcaagtctacgtggcccttatcgtccgcaaccca

SEQ ID NO: 944537 - DNA, 512 bp, Homo sapiens
caatagactattcagtcatggtccaatcaaacattctgcaatggtgggcttgctctactctgcactgtccaacatgggagctgctagccacccacatgggctgttgagcccttgaaatgtggctggtgagaatgaagagctgaattttcaattttctcttaactaattttttttttttcagacagagtctcactctatcctccaggctggagtgcagtggtgcaatctcatctcactgcaacctccatctcccgggttcaagcaattctcctgcctcagcctcctgagtagccaggattacaggaacccaccatcatgcccggctaatttttgtatttttgtagagaagagatttcaccatgttggccaggctgatcttgaacgcctgacctcaggtgatctgcccaacttggcctcccaaaatgctgggattgcaggcatgagccaccaygcccgcccttaattcatttctaaatcacaaaatctaaacaacaagtggataggaggtacca

SEQ ID NO: 944538 - DNA, 512 bp, Homo sapiens
caatagactattcagtcatggtccaatcaaacattctgcaatggtgggcttgctctactctgcactgtccaacatgggagctgctagccacccacatgggctgttgagcccttgaaatgtggctggtgagaatgaagagctgaattttcaattttctcttaactaattttttttttttcagacagagtctcactctatcctccaggctggagtgcagtggtgcaatctcatctcactgcaacctccatctcccgggttcaagcaattctcctgcctcagcctcctgagtagccaggattacaggaacccaccatcatgcccggctaatttttgtatttttgtagagaagagatttcaccatgttggccaggctgatcttgaacgcctgacctcaggtgatctgcccaacttggcctcccaaaatgctgggattgcaggcatgagccaccacgcccgcccttaattcatttctaaatcacaaaatctaaacarcaagtggataggaggtacca

SEQ ID NO: 944539 - DNA, 497 bp, Homo sapiens
gtactgctgaagtgtcttctttgtacttggaatgtgctaggatggatagacttcaaagtgcaaagcgcctgaaggatctcgcattcatcaattctatgcactgagcttctgtccccagaataccactctcagagtaggaatatggcaaggccagtttgataggtggggcatggattggaggctcaggccactgcactgcacatacaggtcttgatgtaaacggtctggtggaggtcaagttctgtttagcgtgggtagactatgtgacagagtgaagaaaggtaatggtctaaacgcagcaaaagtttcattcccactcacgtgccagtctgtggagcaggcagctcctctcctcatgaacctgggacccaggtatcytccatcttgtggttctgcttctccagagccttgtcatttttttcatctagctatggtgacaagatcttttggataagccatgaatattaaaccaaaggcaaactctgaaaattgatttg

SEQ ID NO: 944540 - DNA, 497 bp, Homo sapiens
gtactgctgaagtgtcttctttgtacttggaatgtgctaggatggatagacttcaaagtgcaaagcgcctgaaggatctcgcattcatcaattctatgcactgagcttctgtccccagaataccactctcagagtaggaatatggcaaggccagtttgataggtggggcatggattggaggctcaggccactgcactgcacatacaggtcttgatgtaaacggtctggtggaggtcaagttctgtttagcgtgggtagactatgtgacagagtgaagaaaggtaatggtctaaacgcagcaaaagtttcattcccactcacgtgccagtctgtggagcaggcagctcctctcctcatgaacctgggacccaggtatcctccatsttgtggttctgcttctccagagccttgtcatttttttcatctagctatggtgacaagatcttttggataagccatgaatattaaaccaaaggcaaactctgaaaattgatttg

SEQ ID NO: 944541 - DNA, 497 bp, Homo sapiens
gtactgctgaagtgtcttctttgtacttggaatgtgctaggatggatagacttcaaagtgcaaagcgcctgaaggatctcgcattcatcaattctatgcactgagcttctgtccccagaataccactctcagagtaggaatatggcaaggccagtttgataggtggggcatggattggaggctcaggccactgcactgcacatacaggtcttgatgtaaacggtctggtggaggtcaagttctgtttagcgtgggtagactatgtgacagagtgaagaaaggtaatggtctaaacgcagcaaaagtttcattcccactcacgtgccagtctgtggagcaggcagctcctctcctcatgaacctgggacccaggtatcctccatcttgtggttctgcttctccagagccttgtcatttttttcatctagctatrgtgacaagatcttttggataagccatgaatattaaaccaaaggcaaactctgaaaattgatttg

SEQ ID NO: 944542 - DNA, 594 bp, Homo sapiens
ctagccttctataatgtttatttattcttttaattgacataaaagtgtatatatcatgtaaaatatgatgttttgaggtatatacgtgtcaagtgctttattctagttaattatcatatgctttaccccatataattttttatgtggtaagaactaaacatttgactgtcttctcatttttaaaaacacaatacatccttgttaagtatagtcaacatgctgtacaataaatctctcaaatttagtcatcctatctcactgtaatcatgtcttaatttgacaatcaactccccaaaccctctgccctcctaaaaacccctgcctctggtaaccataattctactctctactttaacaggtgaacttgtttagatgtcacatatgagaacatatggtatatttccttctacacctggtttctgtaaattaacataatgtgtttcaggttcatccgtgtgattggaaatgaagggatttgtcacagaattcatgatttcggtacatttggggtgatttttatatcatgactatagtaaatmgtgctgcagtaaacatgggcatggaaatgtctcttcaacacactgatgtccttaa

SEQ ID NO: 944543 - DNA, 645 bp, Homo sapiens
tgtgtggtcttccatgtaaataaaaaaaaacccacaaagagataccatttcccacacacaaggatgaatacattaaaaaagctggacaataaaaaatattggtgaagacgtggagacactggcacctcatacattgctggtgagaatgcagaactgcagagccactttgaaaagcagtttcacagttcctctaaaagttaaacaaagagttgccatttgacccagcaagtccactcccaggtgtctacccaagagaactgaaaacatatgtccgtggaaaaacttgtacgtgaatgctcacaaagccattattcatagtagccaagaagtagaaacacatcggggatggtggctcacacctataatcgcaggaatttggtaggttgaggcaggattatcacttgagcccaggagttcaagaccaggctgggcaacacagggagacctcgtctatacaaaaaataaaaaaattagccaggcatagtggtgcgcctgtcgtcctagctacttgggaagtgggaggattgtttgaggtacggtctgcagtgagcagagatcatgccattgcactctagcctgaatgaaagagtaagaccctgtctcaaaaaaaaaaaaaaaaaaaraaagaaagaaacgaaacaagcc

SEQ ID NO: 944544 - DNA, 607 bp, Homo sapiens
attctcctgcctcagcctccccagtagctgggattacaggtatatgccacccacctggctaatttttgtatttttagtagaaacggattttcaccatgttggccaggctggtcttgaactcctgatcttaagtgatctgcccgcctcagccaaaaagctgggattacagccacatggtgccctttaatgatgagtcagcccacttggaatatgaatctatcgtattgtgtggccccaccatcccatggagatgccctgccagctggaagggctgtggaagcaacacactgcaccccctctgctgtgtaacaagggtgcaaatgtggacgcacttgaggcacatcgcccagagatgagcagcccccggccagaacgctgatcctccgcagcaccctggagggcgccgagttctgcgcagcaattccaggtgcagcgaggccctgcagggctcctctgtgggcaacatcctcgttagtgtcttccccacgccgtccatttttaatgtgttctttgccaaatgcattccttttcattccacctctctcttttatttatttccyggctcctttttgatatttacttttacttggacacatacccacacaca

SEQ ID NO: 944545 - DNA, 562 bp, Homo sapiens
cctctgttccttcccgtgggaaacgtgggaaccgcagtgcaggctccgcccgcactctcctcctgctcccagtgcctccagacaggctctggtgcttctgtgaggccccgcccctcctgtttctaggggcctaagtgtaataagcctccgtcccacagtcattcctatggctgtgtctcccccaccagcctaaagcaaaccctgggaacccttcaaacacctgcagtgcagagtcctttctccatgttatgtggggccgctctggtgtcccagcccctgtgaatgaggtcacgacgccagctcagccagtcctggaagccatcgtgagagctgctctaccgctcaagccaatgtgtgaaatacggcattttggatacatcatcaccagtgagccaagctggacgctagttaaagcggtgaggacaggttttattcagcagcttctcagagccaggracagactggttccatgccactttgtgcaggggagaaggggtgttgtgaagggagagtggttgggggtgcgggagggagtgggggctccagtgaagagttacagagt

SEQ ID NO: 944546 - DNA, 671 bp, Homo sapiens
tgtgatgtggccactgccaagaggacgacatgggccagggaagccacagaactgcccacggggacgctggcaccgagggcctcaacctgcagaacggccatctgagatgtccgcggtgctcaccaggcctggcagccccgaacgccctgggacgtggcgtcagttccgccgccgtgaagccagattgggcagggaatatgcagtctcctcgctggatgcccggcaagaccctcccatcccctgccccggggccgcgcctgcagaatggggctgatggtggggacttgcctggggtgctccacctgcagagccctctgtttgcgagcccactcagtcactgcacaggtgcttagccgagaggcggcacagtcggggttggcacctgcacccataccagccctgcctcctgttcgctgtgtggcctgagtggctggacctcactgtatctcctggtgggattgctcagaggtctcagcaaggcttggtgtggttaggatgagttattagagcagtgctgagctgtggcaagcacccgacatcagccactgctgtgatatactgagcacctcctctagagagaataaaggactgacaaagctgtcctgyctccaccctgagtttgtgatcaggaacctaggacacttgtcacctgaaatccaagggagacagga

SEQ ID NO: 944547 - DNA, 671 bp, Homo sapiens
tgtgatgtggccactgccaagaggacgacatgggccagggaagccacagaactgcccacggggacgctggcaccgagggcctcaacctgcagaacggccatctgagatgtccgcggtgctcaccaggcctggcagccccgaacgccctgggacgtggcgtcagttccgccgccgtgaagccagattgggcagggaatatgcagtctcctcgctggatgcccggcaagaccctcccatcccctgccccggggccgcgcctgcagaatggggctgatggtggggacttgcctggggtgctccacctgcagagccctctgtttgcgagcccactcagtcactgcacaggtgcttagccgagaggcggcacagtcggggttggcacctgcacccataccagccctgcctcctgttcgctgtgtggcctgagtggctggacctcactgtatctcctggtgggattgctcagaggtctcagcaaggcttggtgtggttaggatgagttattagagcagtgctgagctgtggcaagcacccgacatcagccactgctgtgatatactgagcacctcctctagagagaataaaggactgacaaagctgtcctgtcyccaccctgagtttgtgatcaggaacctaggacacttgtcacctgaaatccaagggagacagga

SEQ ID NO: 944548 - DNA, 769 bp, Homo sapiens
ctggccagtctgccatccacgaggccagggcctttggcggtcctaggcggggatcaaggccgggcaggttctgcaaaaatttcccttgaaagactctttttcaagattttcttttgaaaacaaattcataaccacatcaaacaggaatccccgttgccttgggtttgatcgccggccgcccggggctctctaactagctgttattctaattgcttttttctcttccgagggctgcataggtctcttatggttattaatttggtgagtgcaggccgggcacaaagcagcttttgtctgccttgccttttaatcactatcaaattgcaaataatggtggaggctgagatccccaaaattgatctgtcccagcagttcttggggaaccggccccagtgcatagagcatgcactgccttcccccagggcggcagctccccgatggcacctgcccggatgcacctccgcatgggtggggtctggcctcggccatgggaggtgcttctcaggctcctccatcgccaaaaaaaaccaaacgtgccagcgagatgaaggcgccctgcccgcagagtggtggggtgggactcttcagggacacgtgctgtgacaagtgcttgagtcagagctaagactctggggctgccgaggagccacctgtagcccaggcctgggcccttcycacaagggggcggcaccatgatgcatcaaactgtggaaccgccctgggcatccagcccacatcctggcccacccccggggcctctgtcaccagc

SEQ ID NO: 944549 - DNA, 594 bp, Homo sapiens
gatgttcaggtgctacaccttcttggagcaaagctcttattatctcctgctataagcagtttcttaatcaaaggagcagagggatctaaatatactccagctttttttggtaagcaggctgggactgctgtgtgtgcatgtgctggggtgtgtgcatgcccgtgtgtgctcgtgcatgcacatgtaccccggaggggcttctcacgtccaatcctacccaacctcacccaacaaaggaaggactgcctcccctgccaccccgaaagcttcttctccccacagaaagaaaatatcaaatttaggagggtgtgaaaaccttgatttaaactagaaacttccccctccctccacccccagcccccaaatccttcagatatgtctttctgctccctctgacatcctgggggattactctttcctaagacaccatctccagcatgggcaaccttcgtgaccacacaytcaaaccatcatataaactgacgccttttcctttcgcccatcttctcctccctttgcccccaggttgttgctgaaaaaggtagcagggctgtaccatccactcggcaagagagaaagagaggcagaggcaag

SEQ ID NO: 944550 - DNA, 637 bp, Homo sapiens
aacaggctttagaggtcacaaaagcagtccctgcagaaggaaattattctttaaaaacaaagatgttcatcatgttaattttttttttttttttttttttttgtatttttagtagagacaggatttctccatgttggtcaggctggtctcaaactcccaacctcaggtgatccgcctgcctcagcctctcaaagtgctgggattacaggcgtgagccattgcacctggccggccccatcatgttaattttaacagcaaaaatggtttgttggggttcagaccatgatccccacaagcagggtgcctggcatgaggattcagaactaaaggaaaccagaaggcctctggtgcatccgaagtcttcttccaaccttctcctcccctcctttctcccgccctctttctccccagcagcaagttgcagaagccagaattcctctttccctaggtgggccatggacactagagtccctctcccccaaagccagccatgagacctagaaacatgactcgaacgctacctgcctttctggggaagagctggccatgcccaccttgtctgactgtgggtsgtaaaagaccctccctccgggggttctaccccatccctggggggagaagcactgcacagagaggc

SEQ ID NO: 944551 - DNA, 470 bp, Homo sapiens
catgaagggttgataggatttcttctaagaggtgacctcccttgcccatgggatcttagcccaggcaactggggggccactccctatggcctggttcccaaggaggctccttccttgtgggattaactcctagaaggcgtggcaaggagatccctgttcccctgccctttttcttagaggacaggggattttagagtgaaagagtgggtgttggggtgggaaggggaggagaaatggagatttagagataaatagagccctgatttggtttttccaagtggcttctttctgtcccacagtgctttgagaccattttggagcctgagcgcatgagtcttggagtgtgtctagggtgtctgcaccctccctgggcaaagccactgttcaaagctagggatttctgttcccagtgagctcccactctgctgctgtgggtccctgarctccgcctggcagtgcccaccatcctt

SEQ ID NO: 944552 - DNA, 676 bp, Homo sapiens
tgtcgttccagctacctgggatgccgaggtgggaggatcactcaaacctgggagtttgaagctgcagtgagccatgattgcaccactgcactccaktctggttgagagagtgggaacctgtctcgaaaaaaaaaaaaaaagaatggaaggatcaaactgggcatggtgatgcatgcttgcctgtaggcccagcctacaagggacgctgaggcaggaggatcatttgagcctgggaatttgagcccagcttgagcaacatagtgaaatcctgtctaaaaaagaaaaaaaggaagaatcaaataattgttccaaagtctttcaaaaggagtattgagtcccaactcggcactttcctgagcagggatatgtctcctctccttctcactaaggagccagaaactcaccccttctcactaaaaaagtgagaaaaataaaaatagctcagagaactttgagctatgtgaggcacgcagaatttatcaggtccggagacatgaatatgggacttcaggcagggcatgatggctcacgcctgtagactcaggaggccaaggtgagcccaaggtgggaggatcactttagtccaggagttttgagaccagcctgggcaacatcaggagatccttgcctcctcaaaaacttaaaaaaaaaaaagctgggcatggtggcacacacc

SEQ ID NO: 944553 - DNA, 676 bp, Homo sapiens
tgtcgttccagctacctgggatgccgaggtgggaggatcactcaaacctgggagtttgaagctgcagtgagccatgattgcaccactgcactccagtctggttgagagagtgggaacctgtctygaaaaaaaaaaaaaaagaatggaaggatcaaactgggcatggtgatgcatgcttgcctgtaggcccagcctacaagggacgctgaggcaggaggatcatttgagcctgggaatttgagcccagcttgagcaacatagtgaaatcctgtctaaaaaagaaaaaaaggaagaatcaaataattgttccaaagtctttcaaaaggagtattgagtcccaactcggcactttcctgagcagggatatgtctcctctccttctcactaaggagccagaaactcaccccttctcactaaaaaagtgagaaaaataaaaatagctcagagaactttgagctatgtgaggcacgcagaatttatcaggtccggagacatgaatatgggacttcaggcagggcatgatggctcacgcctgtagactcaggaggccaaggtgagcccaaggtgggaggatcactttagtccaggagttttgagaccagcctgggcaacatcaggagatccttgcctcctcaaaaacttaaaaaaaaaaaagctgggcatggtggcacacacc

SEQ ID NO: 944554 - DNA, 312 bp, Homo sapiens
aaatgttgttcttatataacagttttattttacgtgacacctcattcgctacaaccataaattcaaagtttccctaagaaagtaatcactaaaaaattgtcatattcttagtatgtaaattttaggaaatttccttaatgatttgagttactgtgtgtgtgttacttttgaaaacatgagttgggatgtcacagaatggacttagcctacagaggtttayatccaattttcaaccagacggttccatttcaatgtgacacttaaagagttcaaaactgtctcattccccacacctctttctcgtcctacatt

SEQ ID NO: 944555 - DNA, 578 bp, Homo sapiens
taacagaaagagaactctgcaaatacgagagtgtaagtattatactgagtagtgatcagtgtatgcatatgaggaatgtacctgaggccaagaaaaagactacccaaaagcattgaacagaacaatccccakagaaaattcagggctgaaaataatgcctgacctcatcaacaagtacagaaaatctcataattcattaagcatcaggtagagtactcagaggagtcttcctgatctgtggacaaaattaaccatagacttaatgctgttgtggtctcatgtaaaaatgttaaaagaaagctggggatagattaaactgtttcaaaataatttaactgtgtaccagaacacaacttaagaatacaaaaatatctagcacctgcaaagataaaatgcacaatgtctagcattcaactacaaattaacatgcaggcaaagaagtggaagaatatgatccatagttaggaaaatatcagccagtcaaagctgatccaaaattgacataggtaataaatagataaggtcattaaagcagttattataatactattccatatgtataaggaactagaggaagg

SEQ ID NO: 944556 - DNA, 793 bp, Homo sapiens
ggcaaaccctaactgtggctgaaaaacaggtaactctgcaggtggcagagaattttggagatgagcaatatgtctcctataacaggcaaaaatgaaaaagagaaaatagggaaagtgaagaaatagggaaaacaccattgtcaataggaaggaaagcaatacttcttgacaagtctaattggaaccccagaattttctgtggtatttgaccttctttcacagtttaaaatggcttctatcttcttttataatgttcttccaacctgggaaaagtcaattttccaaaccttaaaatgattggcttagagttgagctaaggggaagagaacccagaagcctgacatgctagcagagtaaaaatttcttaccagtcagacttttggctcctctctccctgtgcaaaccagtaaaagggataataaggatcattgtttatattctctgtaaagttttaactaatgaaaaaggatttgtgagtttggtcttaagctgtagccaatctggtgtgctttgtgtgtttttctgtatggttctgtcaaaagaaagggtactttaggttaggttacagacacaggaaaccaaaagcctgctgttcaagcaagccaaacaaaataatcagtaacaaacttggttacaggccaccatcttgtttcatgtccttgggaacatgacctgtaaccacrtggcagtactttgttttagtctctgccattttacaatggtggctgtcttcttgtgctaagtcaattcctgggtgagggccacaaaatcagataagccagtttgtcaatct

SEQ ID NO: 944557 - DNA, 787 bp, Homo sapiens
tctattgttgtatatcacacagcagagtgaacatagttaacataatttattgtacatttcaaaatacatagaagatttgaaatattcccaacatatagaaatgacaaatgctcaaggtgatggatatcctaaacactaattcgatccttacatactgtattcatgcatcaaaatagcacgtgtaccccataaacatatacaattataatgtatcagtaaaacatgttctttaaattaaaaaaaactgtcaattctgaattctttactcagtgaaaatatctttcagaagggaaggcaaaataaaatggttttaaccataaatatacttgcactattcatgacctgcagacacacactatagaaaataataaagaacacttctcagatagaaaatcatactaaagatgtgactctgaataaagaaaacaaaaacatcaaatatagtaactacataaaaacatatagaaatggtaaataaacatagatataaacgacttaaattacattacaaaacaactagacttaatagacaactatagaacagtccatccaacacagcagaatacataataatctcaagtgcatatggaacactctccagggtagaacctgcaaaaaaaaaatgagtaccttaaaaaaatagaaaatctataaagtatattctttgtgttacttcactcttgtattgctataaagaagtacctgagcttgggtaatccataaagaaaaraggtttaattggctcatggttatgcaggctctacaggaaatctggtgccagtatctg

SEQ ID NO: 944558 - DNA, 617 bp, Homo sapiens
ggagtgtgcttcatgctctaggaaggagccactttgcacacagawgatccagggcccagccatccttccagggtgaataattaatgtcttctctcatggtgaactctaggattcaagccatctaatgtttttgaagccactgtcattatatttaattgatgatgacaggtggccaccaatgatgaatattttcccagggggagtctccccaagtggctttagacttcctcacatggccccaggggattaaatggctcctgattactcagaggataagaggttctgtcttatcttgttcttttcttatttgtcttatgtgtctttcctgccccaggcctgggatcccccactgatctcccttcccttagtgagaggtggtatttggagaccacattctggaggctcccttatgtcccgcatttgaaaaagacaacggcagccaccaccccagctgtcccacccaacatgaggccagattcaggggtgcagggatgctcccaaggttaccctaacagatgtgactggcacttcatattgggaccagccaggcctcactgaccaggcctatccaactagaactactccagaaggtggggctgaaacccaccaaggttccc

SEQ ID NO: 944559 - DNA, 617 bp, Homo sapiens
ggagtgtgcttcatgctctaggaaggagccactttgcacacagatgatccrgggcccagccatccttccagggtgaataattaatgtcttctctcatggtgaactctaggattcaagccatctaatgtttttgaagccactgtcattatatttaattgatgatgacaggtggccaccaatgatgaatattttcccagggggagtctccccaagtggctttagacttcctcacatggccccaggggattaaatggctcctgattactcagaggataagaggttctgtcttatcttgttcttttcttatttgtcttatgtgtctttcctgccccaggcctgggatcccccactgatctcccttcccttagtgagaggtggtatttggagaccacattctggaggctcccttatgtcccgcatttgaaaaagacaacggcagccaccaccccagctgtcccacccaacatgaggccagattcaggggtgcagggatgctcccaaggttaccctaacagatgtgactggcacttcatattgggaccagccaggcctcactgaccaggcctatccaactagaactactccagaaggtggggctgaaacccaccaaggttccc

SEQ ID NO: 944560 - DNA, 617 bp, Homo sapiens
ggagtgtgcttcatgctctaggaaggagccactttgcacacagatgatccagggcccagccatccttccagggtgaataattaatgtcttctctcatggtgaactctaggattcaagccatctaatgtttttgaagccactgtcattatatttaattgatgatgacaggtggccaccaatgatgaatattttcccagggggagtctccccaagtggctttagacttcctcacatggccccaggggattaaatggctcctgattactcagaggataagaggttctgtcttatcttgttcttttcttatttgtcttatgtgtctttcctgccccaggcctgggatcccccactgatctcccttcccttagtgagaggtggtatttggagaccacattctggaggctcccttatgtcccgcatttgaaaaagacaacggcagccaccaccccagctgtcccacccaacatgaggccagattcaggggtgcagggatgctcccaaggttaccctaacagatgtgactggcayttcatattgggaccagccaggcctcactgaccaggcctatccaactagaactactccagaaggtggggctgaaacccaccaaggttccc

SEQ ID NO: 944561 - DNA, 697 bp, Homo sapiens
gcctctgtgggaaagtggggcagagactgcaatgatggtgctgggggatatgtgaggaagaaattcacttgtcaaaagggaggagaacctaaaaacaggacacagatgccctcgtgaacagacccagaggagggacctggcaggggatgttcagacagagacgtcccccaaggaaagacgagggcccagggctgaacccagccagcgtcggggagcataggtgaggtgagagctggctgataaggaggggagaatctggagaggaggctggagcagaagaggcctgattctcctcagtcctcagatgctgaggagtttcccatcaggaggtaagcgtccccgccaccgccaagttgacctcagtacagcaagggcccagcctgaggtccctatcctgggccttagtccttcacccacctgaaaactgaggccaggggctccccaggtggacaccaggactctgaccccctgcccctcatccaccccgcaggtcagcccaaggctgccccctcggtcactctgttcccgccctcctctgaggagcttcaagccaacaaggccacactggtgtgcctgatcagtgacttctacccgggagctgtaaaagtggcctggaaggcagatggcagccccgtcaacrcgggagtggagaccaccacaccctccaaacagagcaacaacaagtacgcggccagca

SEQ ID NO: 944562 - DNA, 622 bp, Homo sapiens
gctttaagaacattcttatcttctgtttgaatttgtcattagactctacctactaccatcccattttgctacaatcttctccagaactcctgggagcatatgccctcattttttgaatartttagcttgtggccccctgtcacttcatccaatactactcatgtcataatgactggtaacttcagaattcatgaagcgttttcttctaatatcccagcctttcattttttttaacttccactcctccaataaatctgtcttccattattttgtgggggctgttgttattttttttttacacgttcacaacaatgtaagcctcctaatcttaatctcaatcctttctctttccaactgccccctagctttctgggtgacctcttccttactccaactctaataattcttcaacaccttgagactctacaatacattgatcctaccaccatttcattgatatatactcttttgtcttctcacatccttccttgccaaatttaaatctcattatctctcattataataatttccctgtagcactcagaacttaattgctccatctctcttcttcacacttacctgaatagctccccacttggttaaacccaactttccatttaca

SEQ ID NO: 944563 - DNA, 604 bp, Homo sapiens
tacgacagtggtcccataagattagagtgaagctgaaaaattcctattgcctaatatatcttagccatcatgatatcatagcacactatgttactcacaggtctgtaatgatgctggtgtcaataaacctactgcattttatactgcatataaaagtataacacaattatatacagtacacagtactgtacttgataacgatcaaatgactatggtactggtttatataagtactacactttattttctattgtaattttagagtgtattccttctatttataaaaagaaagtgaattgtgaaacagccctaggtagatccttcaggagatatgccagaagaaggcattgttatcatgggagatgacagctccatgtgtgttacttgttactgcctctgaagaccttacaggggacaagatgtagaggtgaaagacagcaatattgataatcctgaccctgtgtaggcctaggctaatgcgtgtgtttgtggcttagtttccttttcttttttctttttttttttcctgagacaaagtttcgctcatgttgcccaggctggagtgcagkggcgcagtctcggtttactgcaacctccacctccc

SEQ ID NO: 944564 - DNA, 879 bp, Homo sapiens
ataaagcaggcagaaaaacatgaaaagactagactggcttagcctcccagcctacatctttctcccatgctggatgcttcctgtcctcaaatatcrgactccaagttcttcagctttgggactcagactggcttccttgcttctcagcttgcagagagcctgttgagggacattgtgattgtgtgagttaatactctttaataaactgtcttttatatatatatctatcctattagttctgtccctccagagaaccttgactaatacagattttggtacctggagtggagtcagtagagacattccttctaaggtgaaggataagttgctgcatttggcccctcctacaaccaagaaagaggcacagcgcctaatgggcctatttgatttggaggcaatacattcctcagttggatgtgttactttggcccatttatcgagtgacccaaaaggctgccagttttgagtggtgtccagaacaggagaaggctctgcaacaggtacaggctgctgtgcaagctgctctgccacttgggccatatgacccaggagatccaatggtgcctgaggtatcaggagaagatacggattgtatttggagcctttggcaggctcccacaggtgaatcacagcagaggcctctaggattttggaacaaggctctgccatctcctgcagataactactctccttttgagagatagctcttgtcccgttactgggctttggtggaaactgaatatttgactatgggtcatcaagtcaccacgtctgcctatcacttgaactgcctatcatgaactgggtgctttctgacccacctactcacaaagtgggtcatgtccacagcattccatcatcaaatggaagtagtatata

SEQ ID NO: 944565 - DNA, 626 bp, Homo sapiens
atattcctgcaaaaatcatgatttcattctttttttatttctgtgtagcatttcatggtgtatatgtaccatattttctttatttgattcactgctaatggggggcccctaggttgatccacgtctttgttattgtaaatactaatgtgatgaatagaggagtgcatgtgtctttttggtagaacaatttattttcttttggatatataccccataatgggattgtgaggttgaatggtagttctgttctaagttctttaagaaattcacccccggctggacacagtggctcacacctgtaattccagcactttgggagactaaggtgagtggatcacctgaggttgagagttcgagaccagcctgaccaacatggagaaatcctgtctctactgaaaatacaaaattagctaggcgtggtggtgcatgcctgcaatcctggctacttgggaggctgaggcaggagaatcgcttgaacccgggaggcagaggttgcagtgagcygagatcatgccattgcactccagcctgggcaacaagagcgaaactccgtctcggaaaaaaaaaaaaaagaaatctccaaattgctttccaagtggcagaactaatttacattcccaccaata

SEQ ID NO: 944566 - DNA, 241 bp, Homo sapiens
caaccagtcctgcatccgggagggggagtgtcctcattgctggcatctggtgaacagcaagtcagtgccagccagagaagaaaagacacacgatgccatccagagtttgcaccacccgaacgcgcccactcagatgagcccagaggactcgagaggacagggcagggtggtgtccatytgcaccccaagccacagaggcagggcccacagcctcgggatactccctcaccaacccctgcac

SEQ ID NO: 944567 - DNA, 536 bp, Homo sapiens
gtgctgggtggacactccacttccagataagaggggatcttgtggatggtggtggaggcgctcctggccctactgggctccggcactcagcctgccytgccacagaggcagcccatactagaggctactgcacgtcaggagaggggcaggctcaaaaccagaaaagttatactctgggctctgccagccccaccctcccaatccaggaaacccaattcatccaaatatgagtatcaatatccacccaaagataccagagggaaaaaagaaacctaaaaggagcgggtggccagtgcagtgctcactcctgaatcccagcactttgggaggctgaggcgggaggatcgcttaagcccaggaggtcaagactgcagtgagttgtgactatgtcactgcactccagcccaggcaacaaagcaagaccctgtctcaaaaacaaacaaacaaaaagggaacagcaagacttccctgcagatgaagaaaacacagagaaaaccactgccacaaagccaagtgaaagtggcaagccagcgggc

SEQ ID NO: 944568 - DNA, 666 bp, Homo sapiens
tggctggccaggaaggcagcaaacagagatgatgactcggaatgatgggctattcggaaatggctagggaaacaactgtttccctactgtcctggcgggacccaccctgggctaacgggcttcccaaggaagtcctagtggctctggggtcctgaagtccccaaatgggaacctaggctgagagaagcaaggctgtgagggcatccaaagggctgcctcaggttttgttcctgagaacgaagcgtggccccggaggctcaggcgtgctcagtggggccagggccaccagcatgggagtgggcaggggctgccacctgtagggggccagcactgggctccggggacgccagcagaggggccgagaggccatcagcagagtctgtgtcgaggtccagcctcccgtaagcttcgcacagaggcaggtcattagcttcgcaaaggcttgagcttttccaccaccagaaaccccagggagagacaggagcaggcagagaggaaagccaggggaggggagagcaagacagaagcagagttaagaaaacacgaccacaccccagaccwgcctttccctttctccactcctgctccatctgtcccctgagttggcaggcctggcaaggagaggcggccagtggtgagagccaccctagcattctgaaaggagga

SEQ ID NO: 944569 - DNA, 676 bp, Homo sapiens
accattgaccgcagttatttctgggggctggaacagagggttaaatttcactctcagtgccacctttaaaagagacttgtgactgggcrtggtggctcatgcctgtaatcccagtgctttgggaggccaaggtaggtggatcacttgaggtcaggagtttgagaccagcctggccaacatggtgaaacctcatctctactaaaaatacaaaaatttggccgggtgcggcagctcacgcctgtattcccagcacttagggaggacgaggcgggcggatcacgaggtcaggagattgagaccatcctggctaacacagtgaaaccccgtctctactaaaaatacaaaaatttagccgggcatggtggcgggcgcctgtagtcccagctactcgggaggctgaggcaggagaatggtgtgaacccgggaggtggagcttgcagtgagccgagattgtgccactgcactccagcctgggcaacagagcaagactctgtctcaaaaaaaaaaaaaaatttggtgggctcctgtaatcccagctactcgggaggctgaggcatgagaatcacttgaaccccagaggtagaggttgcagtgagtagagattgcgccactgcactccagcctgggcaacagagcaagactccatctcaaacttttttttaaagagacttggcgt

SEQ ID NO: 944570 - DNA, 646 bp, Homo sapiens
attaccttccactgggtccctcccttgacctgtggggattacaattcaagatgagacttgggcggggacacaaaaccaaaccatatcactcatccaccttgcaccagacaccaaggatccaggctaagtccctgacctcttggagcttacatcctagtggggatgtattagtcaggataggttaagttatgctatgtaacaaaggattctaaaatcttagtggcttaataaaattttttttcatgcgacatgtccaaatttggctggggagagctatactccacaaagtcccttcagatactgtggctaacagaggtggtaccatctgcaacatcattagttgctatggcaggataagggagtatagcaaatcatgaactggcaattgaatgctttggtcagtgatatggtttggctgtgtccccacccaaacctcatctcatattgtagctctcataatccccacgtgtcatgggaaggacccgatgggaggtaattgaatcatgagagcaggtttttcccatgctattctcatgatagtgaataagtctcacaagatctgatggtttttttctttctttctttctttctttyttttttttttttttttttgagggagagtctcactctgctgctgcccaggctg

SEQ ID NO: 944571 - DNA, 644 bp, Homo sapiens
ggattctctacttagggtctcacaaggctgaaatcaacgtgtcagccaggmtaggctcccatctggaggctctgaggaagaatttacttccaagttcatcccttaaaaaactttttttctaggagacccagtcttgatctcttgcccgggctggagtgcagtggcatgatcagagctcactgcagccttgaacttcagggttcaagcaatcctcccacctcagccttccaagtatctgggactagaggcatgcaccaccatgcctcgctaattttaaaaattttttgtaaagatggggcctcactatgatgcccaagctggtcagggactcctggactcaagcaatccttctgtctcagcctcctgagtagatgggattatagtgtgagccatcatgcccagccaagctcattcttattactggcagaactcggtaacttgtgactgtagggctgaggtcccagttaccttgctggctgtgagctggagtcacccttatctcacagatggcattccctggtccttacacatgccccctctatataccaagccagcaatggtacctccaatctttctcatccttcaaatctctctgatttacccttctgctgccagcttgagaaaactctcagctcttaacgggc

SEQ ID NO: 944572 - DNA, 445 bp, Homo sapiens
ctaattcggtgccaacgctctctacccagagattgtgttaaatcccacaagttgagtgctcagtgcccacgactgccctcccttaacaccagtggcaagttcaggcctccggaacttcttacatgccggctttaagttggggctcctatgcccccctctttgggttgaattaattttctggagcagctcccagaactcaggtaaacacttatatttactggcttattataaaagatattgcaaaagacacagatgatgatgtacgtaggatggggtataggggaagggacgcagaacttccatgcccctgctgagcacgtcaccctccaggaacttccrcatgttgggctatccaggagctcttcgaacccagttatgttggtttttttaaggaggcttcatgatctgagcattccttctccctgagtatagggtgggaccctct

SEQ ID NO: 944573 - DNA, 621 bp, Homo sapiens
cataatcctgaacgaattaacacagaaacagaaaaccaaatacctcatgctctcacaagtgggagctaaagattgagtacactggaygtaaagacgggaacaacagatactggggactactagaggaggggcgggagagatgggggcaagggctgaaaaactacctattgggtactatgtttactacctgggtgatgggacaatttataccccaaacctcagtgtcatgccatgtacccatgtaacaaacctgcatgtgtaccccaaaatctaaaataaaagttaaaattttaaataaataaaattctaaactgaaggattattgataaggaaccatcaaatggtttcaggctgcaagtggtgaaaagaaattgatggcattagagagagaagccttgggaacctagagggtgtctctcgagagcctgtcaaagtctccccaaggcagtgccgggagaggctcagcatgagttccatgtgaatctggtcaactgggcaaagattgtgttcggcctttgggaatagcctgggcaacgtagcgagatgctgtctctaaaaataaaaataaaatagccaggcatggtggctcatacctatagtccaagctacttgggaggccga

SEQ ID NO: 944574 - DNA, 459 bp, Homo sapiens
catttattatttctttgtgttgggaacatttcaaayctattcttctatctattttgaaatatacaagaatgttagctataatcaacctattgtgctactgagcactagatcttttatctaactgttttttgtacccattaaaagacctcactttattccttctcccctctagccttcccagactctggtaaccaccattctattcattaatccatgagatgaattttttcagttcccacatttgagtgagaaccagtaatatttgtctatgtgtgcctggcttatttcatttaacataatatcctctagttccatccatgttgtagcaaatgacagaattttgttacttttcatgcctgaataatattccattgtgtgtgtgtgtgtgtgtgtgtgtgtgtgtgtgtgtgtgtatctcacatattctgtacccattcatctgttgaacattttgatgcc

SEQ ID NO: 944575 - DNA, 459 bp, Homo sapiens
catttattatttctttgtgttgggaacatttcaaatctattcttctatctattttgaaatatacaagaatgttagctataatcaacctattgtgctactgagcactagatcttttatctaactgttttttgtacccattaaaagacctcactttattccttctcccctctagccttcccagactctggtaaccaccattctattcattaatccatgagatgaattttttcagttcccacatttgagtgagaaccagtaatatttgtctatgtgtgcctggcttatttcatttaacataatatcctctagttccatccatgttgtagcaaatgacagaattttgttacttttcatgcctgaataatattccattgtgtgtgtgtgtgtgtgtgtgtgtgtgtgtgtgtgtgtgtatctcacatattctgtacccrttcatctgttgaacattttgatgcc

SEQ ID NO: 944576 - DNA, 618 bp, Homo sapiens
acactgtgtttttagaatctgcaaagggatatttgggagggcaatgaggcctatggtgaaaaagaaaatatcttcagataaaaactagaaagaagcattctgctytgtgttgtgtgcattaatctcacagagttaaacttttccttgattcaccagtttggaaacactctttcagtccattccgtgaagggacgctggggagctgattgaggccaatggcaaaaaggcgagtatcccaggacaaaaacaagaaagaaactatctgacaaacggctttgtgatgtgtgcttcatctcacagagataaaccatcctctcattcagcagtctgaaaactctatttttctagaatctgcaaagggatatttgggagtacattttgtcctattgtgaaaaagaaaatatcttcaggtaaaagccagaaagaagctttttgtgaaactgctttctgatgtgtgcattgatctcatggagtgaaaactttcttttgattcaggagtttggaaacactgtttctgtccattctgtgaatggacttttgaaaagtcattgaggtcaatcatgaaaaagtgaatatcccaggataaaaacaaaaggaagctatctgagaaaccgcttt

SEQ ID NO: 944577 - DNA, 559 bp, Homo sapiens
gcacccccagctcactcggggtctcagagctgatccatgagcggaggctgagatcctgggatcttgtcccccagcctccctgcaaccttaatccctttctgctgaaagagatggggccggacctcgaccagcagccctggcctggacatgactgtgctcatgcaggtattgaggccgagatgccccggcatcatatgtttttctattttcttttttttttttttgagacggtgtctcactctgtcacccaagctggagtgcagtggcatgatattggctcactgcaacctctgcctcccggttaaagtgattctcctgcctcagccttccaagtagctgggcctacaggcttgtaccaccacacctgactaatttgtgcatttttactagagacggggtttccccatgttggccaggctcgtgtcgaactcctgacctcaagtgatccacctgccttggcctcccaaagtgccaggattwcaggcatgagccatcgcctcgcttaaatgtagtgagaggccgggcacagtggctcatgcctgtaatcccagtactttga

SEQ ID NO: 944578 - DNA, 559 bp, Homo sapiens
gcacccccagctcactcggggtctcagagctgatccatgagcggaggctgagatcctgggatcttgtcccccagcctccctgcaaccttaatccctttctgctgaaagagatggggccggacctcgaccagcagccctggcctggacatgactgtgctcatgcaggtattgaggccgagatgccccggcatcatatgtttttctattttcttttttttttttttgagacggtgtctcactctgtcacccaagctggagtgcagtggcatgatattggctcactgcaacctctgcctcccggttaaagtgattctcctgcctcagccttccaagtagctgggcctacaggcttgtaccaccacacctgactaatttgtgcatttttactagagacggggtttccccatgttggccaggctcgtgtcgaactcctgacctcaagtgatccacctgccttggcctcccaaagtgccaggatttcaggcatgagccatsgcctcgcttaaatgtagtgagaggccgggcacagtggctcatgcctgtaatcccagtactttga

SEQ ID NO: 944579 - DNA, 644 bp, Homo sapiens
gtgtggtcttccatgtaaataaaaaaaaacccacaaagagataccatttcccacacacaaggatgaatacattaaaaaagctggacaataaaaaatattggtgaagacgtggagacactggcacctcatacattgctggtgagaatgcagaactgcagagccactttgaaaagcagtttcacagttcctctaaaagttaaacaaagagttgccatttgacccagcaagtccactcccaggtgtctacccaagagaactgaaaacatatgtccgtggaaaaacttgtacgtgaatgctcacaaagccattattcatagtagccaagaagtagaaacacatcggggatggtggctcacacctataatcgcaggaatttggtaggttgaggcaggattatcacttgagcccaggagttcaagaccaggctgggcaacacagggagacctcgtctatacaaaaaataaaaaaattagccaggcatagtggtgcgcctgtcgtcctagctacttgggaagtgggaggattgtttgaggtacggtctgcagtgagcagagatcatgccattgcactctagcctgaatgaaagagtaagaccctgtctcaaaaaaaaaaaaaaaaaaaraaagaaagaaacgaaacaagcc

SEQ ID NO: 944580 - DNA, 550 bp, Homo sapiens
ctctgaagaaaaaaacagataacaaattcatgaatcatagttatacttaaatttcctccgtcacagagaaacatgttatttttagaaagtggatcccaaacctaactgatcagaatcccttgggggaaatgtttttaaaaaataccattacctgtgcactggcccagaaaatccagggccattagagactgcaaatgtctgagaatctgtgtttcctaaaaggcacaatggtgattctgatgggcagccatgtttgagaacctctgattgaattgtgcacaattttgatggtgctgctgttgcattataggtaattcaaagaagagcttctttttttttaaaaaaaatagtaatctataaatataatagttttcatctgaatagtgttttcttgttttcagaagaccttcataactttttttttttttttttttttttgagatrgagtcttgctgtgtcacccaggctggagtgcagtgacgcaatctcggctcactgcaacctccgcctcccaggttcatgtgattctcctgcctcagcctcctgatta

SEQ ID NO: 944581 - DNA, 587 bp, Homo sapiens
tacagtccagagtctcatctaaatcagatggtgagattcaaagcatgattcatcctaaggcaaagttttctccagccataagcctgtgaaataaaaacttatctttttctaaaatacaagggcaggataggcatgggatagaccattccagaaagggaaaaatagcatagaagaaaaggtacctggttccacataagaccaaaacccagcagggcaaacaacattaaatcttaaactccagaataatctcctttgacttcatgtcctgccttccaggtacactagggtaggagttgggccatcaaagcctctatggtgttgttgggctgagtccacccagtagttctcatgggttagggtctcctatctgcggctctcccaggctggtgctacacgttgatagctctgcagttctggggtcttgttggtggcttcacccctacagttccactgggtctagtaaggactctctggggcaggtctgatcttacagttatgcccagatattgccctgatgggggctctctgaggtagtcctacccctttaacaagtatctatctgggccrccaggcagtctgcgacatcc

SEQ ID NO: 944582 - DNA, 548 bp, Homo sapiens
tcactctgtacagcggagaatccggggcaggaaagactgtgaacaccaaacgggtcatccagtactttgcaacaattgcagctactggggacctggccaagaagaaggactccaaaatgaaggtatagatgggagaggaaggcttgctttgcttccacttttaactgtggtcttaacctcagaatgagggggccaaatgtcctcacattcccccctcttcagagaatggagaacaggctaggatttactatcttgaaggacagccagtcaccttagacaacgcagtgtcaagttggtcttgtaggactagatcccgggatttcttagaagacaaggctctagggctaaacttcagaggtcaatctgcagacggctcagagagcttgttcttttgtggaagaatcacatataccaatgtgagtgactcacagcatatcctgggcttttgaaacaaatgtattacagcagcatgaaatgaatacggacaactgactggagaatcaagggattgaagtgttaaaggaatgytcagtcaagagatccccaac

SEQ ID NO: 944583 - DNA, 654 bp, Homo sapiens
tactaggagggcatcattctccactgttctctgggaagcctcggggttttaggtaagtttggcagcttggcaggattagctcagggaggctcttaagttccttccttatattattyatggtttgttcattcagtcagtgttggtttattgcccactctgtgcccagccccgcctgggctctgagggagaaaaatgttaatgtcatagcaggagccattgaagatcatctagtaggccaggcgtagtggctcacacctgtaatcccagcaatttgggagactgaggcaggaggatcacatgagcccaggagttccagaccagtgtgggcaacatagggagacccccatctctaaatgaatgaatgaatgaatgattatccagttgttaaagccccaagctgtggagtcatccgtggcccctctgttgcttttatgcctccaacatccactctgtgttcccaaggagcaaatcctgtggctcgaccttcacaatcccagaatcctagcaccactgccaccatcctgctctgagccgcctgggttgttctcctggaactcggcaggagccacttccctggtctccctgtttccaccccagaccctcagtcccttctccgcacaacagccagatgggtcctgttaaaacgcgtgtcag

SEQ ID NO: 944584 - DNA, 562 bp, Homo sapiens
acttctgtgttgagaatagatttgaagaggggaagagcagaagcaggcagaccagatgtcatcacataaattcaggagagaaatgatagtgacttaaagtagggttgtagcagcagaggtggtaagaaatggtcaccatctggatctcttgtgaaggtcaagccaacagaaagtgagaactgtttgatgtggagtataacaaaatgagaggagtgaaggatgactcaaagaaatttgttctgaataaccagacacagggaactatagcaactgatatgggaatgggtgtttgtggaaccagttctgaggaggatattggctctatagcctttggacatattaaattttaagtgtctataagtgctttcagtgaaaatcttgagtaaggagttagatgtacgaatctggaatttgggagaggagctggaaacagaaaataaattagtcaaaattgtcaacaatcaaatgatatttaaaaccacagtactrggtgaaatgactaaggaagtgaattgagaagaggaccaaggaatgagactggcttcttccatcatcgagaagt

SEQ ID NO: 944585 - DNA, 790 bp, Homo sapiens
ggcagggccataaatctcccaggggtttatgtcttttgtgttcggctaccagggtggctagagaaataccattaggtggggtcatggttagaggagtctgagctcagactctccttgggtagggcttgtcatggscactgtagggagtgtttaggggtggttctcaagccaatagggttatgttttagaggggagtatggctgcctctgctgagcagtatggttcactgtggaagtgagggatagctgatatcgaaaggtctcacccagctcccacacagttggtgaggccagtctcactcctgcagtgccccactaacagcaccgagtttagaaccatgcagcctatgcatgaaactcagacctgccccaggccataaacttctccactgagaaagcaagtacagatttcaggcctacttgtctgcttgcaatgctggcagctcctgcacttgtatctgcagctcctgcactgtatcttccccttaacccccagggttctgctcaagggagttcatgcccacttgaaattatcacaaaattcagttggaagtttctttcacctgtgactcttccctaattttgcttgctgctttccctgagggcccctgagagatatggtcaggaatggtttctctgggttcgcgctggagtctgggagtgcctacaaggctcttcccactgtggtctgtacttttatatttcacatggctccctaaatctgttccagctataggtaagattaaatacttctctcatgatctggattttcagattccctagtggaggtg

SEQ ID NO: 944586 - DNA, 678 bp, Homo sapiens
agctacagaagccaatagggacaaaactcctgttcttaatggagattacaaggctacatgtagaaagctttaaaaaaaaaaaaaagttcaaggccaggagtgatggcttatgcctgtaatcccagcacttcgggaggccgaggtgggtggataaaataaaaaaaactagcccggcggggtagcgggcacctgtaatcccagctactcgggaggctgaggcaggagaatcgcttgaacctgggaggcggaggctgcagtgagccaagatggtgccagtacactccagcctgggcaacagagcaagactccgtctcaaaaaaaaaaaaaaataggaaaaagaaaagaaatctcagatggcaaagagctatgaacaaggtaaaattaagaaacagaatcgactgtgaagaaccagcatcaaagtcaatagcagcgtttcctaaacttcacttagaagaattacctaagatatttgctaaaaataaattcctggctacatcccagacccactgaatcagaatctcctgggaaagggcccagaagctgtaaaacaagcgccttaggtgattttttaattagagatgttagagcaacatcaatgagaaactggggcctaaacgtcagacttcggctttaatcccagctctgcaacttactagctcyataaacttgagtctcttt

SEQ ID NO: 944587 - DNA, 600 bp, Homo sapiens
aactggtttttccacaagaagtctgtgtgttcccagaacagtattcatttgcttgtgtgtggacaagaatcatcacccattgctattcagttatctacaaggaagaatttgtgcttctgtatggcatacgtacctatggtctaagaagaatgtgtgttctgagttccaagctacagaatcacagagtggccagcccagaggttcactctttatctaagaggaacatctgaacccttggccccatcctgtggaacgcaggccatacgggggatcaaggccctttggggttaaattgaggttgccagatggaggttgctaggggaagggtgctagttgaaaatactatataaactgatgctctttacaaatggtagtggtcctcctgtccagcccactgccactagaccaccccgtaagtcccctcagtaaacctgcctcattcagtggctctgggtctcttcttccgcctttcaaacatggtgccatccctactgaagttaataggggtacggcacaacagcttcaatggaaaattatgtgttgtctagacagcacaaccttccagkttctagcctttctttgtctttgagaagtctcata

SEQ ID NO: 944588 - DNA, 591 bp, Homo sapiens
caaaatgaaaatagcaaggagatgccatttatacccaacagattgggaaaaaattgcaaaatctaatcctktggcagtgatttggagaaacgggatcaaacacagcgggagtgtcaaatagaagacaatttgccattttggcaattcccagtaaagttgataatgcacagacttcttaaatgaagcaattctacttctactatatgtatataatcccaagaaagacaaaccatgtataaggatgttcatagcagtagtgtttgaaattcagaaactgcaaacagtttctatcggtccctccaagaagaaaagataaataaaccacagtatatttatttatacactgaaatacaaataaaatgaatggaatcagtagttttcaaacttcgtggtctcaggactcctttgcactcttaaaaattaaggatcacaataaaatttaaaaaacaaaacaaaaaacaaaaattaagaaccacaaagagtttttacgtgggtcgtatctatagatgtttatcatactagaaattaaaactgagatatttaaaagcacttattaacccataaaaatactttttttctttattccttttt

SEQ ID NO: 944589 - DNA, 602 bp, Homo sapiens
cctcatgatagtgagttctcatgagatctcgttgtttaaaagtgtgtagcacttccctctttgctctctctcttcccctttcgccttctgccacgattgttagttttctgaagcctcccagacattcttcctgtgcacccggtggaactgtgcgtcaattaaacctctttttttccataaattaccagttttgggtagcttatagcagtgtgagaacagactaatacagtgagcattgatgctctgacccaaagagtaacaaatttaaacaatattaagtatttggcacttaaaataagcttgacaaatggtaccccatggacctccccaccaccaccatcaggttaaaatagtaaatgtggcccaatatagatagaaacaaggcgtacaagaaataagacccattatacaagacctactaaaagaagcagctattattcctgctgccttcttgatgagcccaatatggctaatgcccaaacctaatgaaaatgaatggcacttaacagtgggctactgcaaccttaatgccatratactactgattaaggcccatagccaataatattgactccactcaattaactattgaaaaattattt

SEQ ID NO: 944590 - DNA, 586 bp, Homo sapiens
cttgcattccaagaatgaagcttatttgatcatgatgaattaactttttgatgtgctgctggattcaatttgcaagtatttttttgaggatttttgtgtctatgtttaccaggaatatttatctacggttttccttttttgttgtgtctttgtcagactttggaatcagggttatactggtgtcaaagaatgggttaggaaggacaacctcctcctcaattttttataatactttcagtagaattggtaccagctctttttttctttttcttttctttttttgagatggagtctcgctctgtcacccaggctgcagtgcagtggtgtgatctcagctcactgcaacctctgcctcccgggttcaagcaattctcatgcctcagcctctcggtagctgggattacaggtgtgtgccaccatgcccagctaatgttttagtagagatgggatttcaccatgttggccaggctagtctcaaactcctgatctcaagtgatccgcctgcctcrgccacacaaagtgctgggattacaggcataagccacttttcccggccaataccagcttttccttatatgtctggcag

SEQ ID NO: 944591 - DNA, 637 bp, Homo sapiens
acgccactgctctccagcctaggtgacagactgacaccctgtctcaaaaataaataaataaataaataatgcaaaacyaaaatatataccgtttacaagagctgtgtctaaaacacagagacacagaaagattgtaaataaagggttgaaaaagataacagggaaaccactaggttaatattcaaagataaaggactttaaggtagactgcattatcagagataaatagtgacattacaaaaagctaaattattcaactcagaggatgatgtcactattctaaaattgcatgcatctaataaaagagcctcaaaatataaatgcatgaatcaagtttccaacactaacagaaacagaaatgtgcaatcatagtgggaaattgttacacaactatttcaacaactgacagaacaaataaacaaaaatccagtagagatatagaaaatataaacaacgtgattagcaaactgacagaatggacacattttctacattgcataccaaaaatgtaaaagatgcacatggaatatttacaaaacactgaccaagtggtagttacatagagctttcctttttgataaatcatcgaactgtacattttcattttatgcacattactgtttgtgtactgtttctc

SEQ ID NO: 944592 - DNA, 584 bp, Homo sapiens
agatttgagcaaataaaagaaagaatcaacaaacttgaagatgtgttaattgagattatccaggatgaggaacagaaagaaaaaacaatgaagaaaaataaagagagcctcagagacctgtgcgacactctgtagcacaagaatatatgcataatgggaggtgtctagaaagataggagagagagaaagcagtagaaagagtatttaaagaaataatggttcaaagttttccaaatttgataaaaaccattaatcttcatatccaagaagctcgagaaaattgaagtagggtaaattcaaaaactcaaagatgacacattataatcacatcattgaaagacaaatcttgaaaacaagagagagagactcatctcatatgagagattttcagtgaagttaacagttgatttatcatcagaatccatagacgccagcagtgagatgacatagtactgaaaatactgaaaggaggaaaaaatctttcagccaagaattctatatctagcaaaattatctttcagaaattaaagataaacaaaaacagataatttcgtgcaagcagaycttgcctgcaagaaatgcta

SEQ ID NO: 944593 - DNA, 797 bp, Homo sapiens
ccctctgctttgtttacactgtgaggggaaaaccacrtactcaagcctcagcaatggcggacacccctacccccaccaagcttgagtgtcccagttcgacttcagactgctgtgctggtagtgagaatttcaagccagtggatcttagcttgctggactccataggggtgggatctgctgagctagaccacttggctccctgacttcagccccctttccaagggagtgaatggttctgtcttgctggtgttacaggtgccaccggggtatgaaaaaatactcctgcagctagcttggtgtctgcctaaacagccacccagttttgtgcttgaaacccagggccctggtggcataggcactggagggaatctcctggtctaaaggttgcaaagaccgtgggaaaagtgtagtatctgggccagaatgcaccattcctcacagcacagtccctcacggcttcccttggctatgggagggagttttctgacctcttgcacttcctgggtgaggtgatgccccaccctgcttcggctcgccccaagtgggctgcacccactgtctaaccagtccccatgagatgagctgtgtacctcggttggaaatgcagaaatcacccacgttctgcgttgatctagctgggtgctgcagaccatagctgttcctattcagctatcttgccagcctctcttgaaaagagctacatttttatagtcatgtgtcacttagcgacggggatacgttctgagagatgcttcaaggtgattttgttgttgtgcaaacatcatggactttattta

SEQ ID NO: 944594 - DNA, 579 bp, Homo sapiens
tagaaaacaaaacaaaacaaaaaacctccagggctcaagaaaaatctgcatctgcagattgaaagagttcaccacatctgaatamaaattaatgaaaatatctgtaatgtaaacatatctgggatatttttgagtttcaagagtaaagaaaaattcaggaaaccattaagtaaggagaaaaaagtttcctacaaaagaagaaagagtcaagttagatttaactccataagataagcctatgaatcaacagcattttaggagaaatatttgtgactaatgaattctaaagcatagatgcaaaatcagaaagacattctcaaatttggaaggacttaaaaatatgtcatttatatacaatactgaaaatttacttacaggcattctttagccaagaaagaaattaataaaaacaacaacaacaaaaagcaagaaagtagaatttacggtataaaaggaaatcactgtgaacattgaaatcagttgtgtagatttaattgaaaattgttgaattttcaattaaatgcatagagactgtaaaaggagatgtacagttggtgaattttaaggcatataaattgg

SEQ ID NO: 944595 - DNA, 572 bp, Homo sapiens
cctcaagaagccaagaaaaataccccagagcggagaaatccacagrtcccaccacactgtgctctgaaagctgctgctaacaagccttagcttcttagcagccagtgccaatcaatttggggaaatttgccagatgggctttatcctggctggtgctcccagcctagctctgctgccccaccatgggcccccgctccttgctctgagctgacaagaactacctccttcccttggtgatgtgcgattgtcaccctccttggtctcacccacacagcctcagggacacctcccaggttcaggcaggagtagctctagggtgcataggggtttcattatttttcagcagccatatttcctttaggccttggccttcgtgggacttgtgggagggtttacctctgccctgtgttcaaggtgaaggttgttgaggtcatggtttgttggagggaagctttggccgcagttgcagaggtaaagcagtggttggtggggtgagaacatgtggtgcgctggcctgggtggcccagtgggatttctttcccctggtgtctggatgaacgtcctggggaagc

SEQ ID NO: 944596 - DNA, 718 bp, Homo sapiens
atgtgtcccagtgatcacttctgcttcttcatgagttgctttttggagaagactctagaggagggtagataaagaatgaaagctggaggggcaggttttctgcttccagcttcctgggcaaagcaaaatgaaattcctgctgtttgatttaataagaatcactgtctagctcatcggatcggtcattctcaattggcagaaaagaagtgttttgggatgtctgcatttcatttcaccatgtatactggtattcccttatgccttttccgaaaggcacaaagtagcaatgttgtggcactatttctctggtctgatccatgtaagttgtatcttttatgtaagagtttaattttacctttatgtcaaaagttaagtttaaattttccatgattttattcttcaaaatgtgtatgataatcaatgtaacactggttgaggtttcctcttctgttttcccatcctgaggcactttgaatatcacatttgaaaactgtttgggtctcactctggttttcatattcttagccatggagtttatttggcaattataaagcacctactatgtgctttcattttgaatcccaggaattcatactaaatatgaagcagtaattgtcaaagaactttctgttcttttatctgtttttcttytttgacctgtaataaccacttcttagcctagccaagagaaaagcttagaagatgcccttttcttttt

SEQ ID NO: 944597 - DNA, 620 bp, Homo sapiens
gtcctttaattttaacctgaaggactcacagtacttcttgtaatcccatatttcacagtatttcttgaaagacatgtttgctagtgatgagttctctcttttagtttatgtgagaatatcttaatttgttctttacttataaaggatagatttgctagatatagaattattttttgatgtcctttttcttttaataatttgtatacttcatccaactgcattctggcctccatggtttctgatgagaaattggtggcagatattattgaggaccccttgtatgtgatgagtcacttcttatttgctgatttcaacagttggttgtgtctaggtgtggctatctttgagtttatcctacttggagtttgccaggtttcttagacatgttgattaatgtttttcatcaaagttgggaagtcaaaaagcttgggctattatttcttcaaatattttttctctctctctctcctccttcttgtaatcccgttattcatatgctggtatttactgatattctctattctgtgcaatgtaattcgcatactttcctttaattctttaggygtggtttcctctcattctttgaatgtattcaaaatacctgattttaaatctttaat

SEQ ID NO: 944598 - DNA, 556 bp, Homo sapiens
gaatttccgttgcatgcagtacttctgcaaactctagactcattatcttttccagagccaaatatttaattttgtgaaattcctagcattggcacaagttaaaataaataactcatctttattctgcttaaacttaaaaattgttaaaaagggccatgtgcagtggctcatgcctgtaattccagcactttgggacgctgaggtgggtggattgcttgagcccaggggttcgagaccagcctgggcaatatagtgaaatcccatctctacaaaaatcacaaaagttagccaggcatggtagtgagcatctgtaggcttggatacttgagaggcttaggccagaggatcaattgagcccaggaggtggaggctgcagtgagccatgatcatgccactgcaccccagcctggctgacagagcgagaccctgtctcaaagaaaagaaaattwaaaaaaaatttttaaaaggaaacagaaagagtaataagaggtggagagaagttaaataccattaccagatattaaaatagcttatatatcctccacaattaaaacat

SEQ ID NO: 944599 - DNA, 629 bp, Homo sapiens
aaggcctttgataaaattcaacatcccttcatgttaaaatctctcaataaactaggtattgaaagaacatacctcaaaataataagaaccatatatgacaaactacagccaatatcaccatactgaatggscaaaagctagaagcatttcccttctagaagcacaagacaaggatgccctttctcaccactcttattcaacatagtgttgaaagttctggccagggcaatcggcaagaaaaagaaataaagtgtattcaaataggaaaagaggaagtcaaactatctttgtttgcagatgacaggattctatatctagaaaatcccgttatctcaatggttgagcttcttaaactcagcctaaaagcttcttaagctgataagtgacttcagcaaaatcacaggatacaaaatcaatgtgcaaaaattctcatgctattttcattctattcctattctcatgctattcctagattattgagtgtggtggttaatatttagggtcaacttgtttagattgaaggatgcaaagtattgtttctgggtgtgtctgtgagggtgttgccaaaggagattaacatttgagtcagtggactgggagaggcagagtcaccctcaatctgggtgggt

SEQ ID NO: 944600 - DNA, 562 bp, Homo sapiens
ggaatgttacatagcagcatttaaatgggagatgaacaatyttaaccacatgctggttccgaggcactttcctgcagaatgactatataaatccaggtgagtgcttgtaaaacacacaattacacccccacagagtggactgaaagcacgtagtcaggcaatgagcacagttaataatatggctataaaagaaatacaggatctccttcacttttttttttaaaggaaaaggccaatatttatgcttgaatgtctttatagtttgagacacattttttattaaaataaattaatacataattgatgatgtgtatatacatatgtacctttgtttggggtcgatattttttataaccttgtagtttaaacccaggggaaaattttttaaactggtaatttacttgagttttaaaaacctgatgatgagggtaataattaaaatagtagcaatagcaatgtagtatatgataaaggcagcatttgaatcaatggagaaaaaatgggttagtgtcactccacagtcttgggacaattggcaattatttggaagaatgtaatctat

SEQ ID NO: 944601 - DNA, 654 bp, Homo sapiens
gagcccgctcggaatgttaatacgctgcmgccaggagggggtagggggcctggagcagttcccccagctggcccctgctccagtgggtgcccctttttctttggggctttgagtgttggtggtgggaataacagcaggacccttcttggaaaaggaaagtcagggttcctcctgttgcagggttggggaaggggctatgcccccagggccagggaaggggggagctggggacacgctcagccactctgtgacctagggcatgcaagttacccctctgagcctctgtttttctctctgcaaaagagagggcctggccaccctgacctcttagagttgctgtgagggtgtagtgggcagatcctggctctctttgcctcctctgatcccctgtgtggtctcgggctgccttcttggcctttctgggcacacttccccatttatacaggaaatcaccacccaacctagcctgagctactccagccagaagtgggagtgtcctggggtgctgggggaggcctgggtcttttctccactaaagactcatgtctgcggagctctccctctggccccccactttccctcttctctcctcacaacacctggggaggcaggagtgtgcagctttgtcacaggtggagaaactgaggcttagag

SEQ ID NO: 944602 - DNA, 632 bp, Homo sapiens
aaaagcatggtgtaaacatggggaatagtgctagytatagcttgatgggaatatgagcattttgttgagaaaagtgtgacatgaaacttgtttttttttttttctgagacaaggagttgcccagcctggagtgcagtggcacgatcatagctcactgcagtcttaaattcctgtgctcaaacgatcctcctgcctcagcctcccaaagtgctgggattacaccacgcctggccattgtgggaagtcttaaatgacacagtgaaacattttcattttgtttggcaggcaatgggggagctgctggaggttgctttttttttttttttctgagatggagtttcgctcttgtcgcccaggctgaagtgcaatggcgcgatctcagctcactgcaacctccgcctcctgggttcgaaggattctcatgcctcagcctctcaagtagctgggattacaggcgcccaccaccacgcccggctcatttttgcatttttagtagagacggggtttcaccatgttggccgagctggtctcgaactcctgaccttaagtgatctgcccgcctcagcctcccaaagtgctgggattacaggcgtgagccactaagcttgcgcccggcccacgggaggtttttg

SEQ ID NO: 944603 - DNA, 756 bp, Homo sapiens
aaagcactggaaaggaggaacacaaaatatgaaagacaattgatatggtactgaaatttttcttttttaactgttagatatttgtgcaataaataaaaaaggagggaaaaccacatcagagcaataggcaaggaggtggcaaactagataagtctccttggagaacaaaaaatatatttaaaatacaatagccctactacaactgatttatggctcaggtgactaaacacaatttgaagcagtaacaacactcataagctgaaaataaaatacttttagcccttttattcttcttgcctctttcccaaagaatatgccaatgaagctgttcttgatgtcacaatattcatatatcgcagaatttctgcatttaaactaccttgcctactgaaaataagataatcatttcatctctaggaaccagtaaccaaaaaaaaaatgtccttagagaatacatttttatttgtttgtttatttagagacggagtctcattctgtctcccaggccggagtgcagtggcttgatctcggctcactgcaacctccacctcccaggttcaagcaattctcctgcctcagcctcccgagtagctgggactacaggcacgtgccaccatgcccggctacattttttgtatttttagtagagatggggtttcaccatgttagccaggatggtcttgatctcctgacctcatggtccgcccacctcrgcctcccaaagtgctgggattataggtgtgagccaccacgccc

SEQ ID NO: 944604 - DNA, 465 bp, Homo sapiens
caggaaagaaaggaaaattcrtttgaaagagacccaagcgggcacctgaagatccaagagagaaaagagagcaaaagaagactgcaaaaagagagcctttcaccttgatcccaggactttttgggctcacctcttcccatgattcttccctttagggtgggctttccacatgcccagtgcttgcaccctttggcattgagcacagcgcagtgtgtttaaggagttatatgcatgcccacgtgagcctttcttcccttttctggtggagttgcccccagaagatcatacttcaccacttttgtctcttgacacgtatgtccaggaagttgcttctccctggggtttgcattcaattgacattttgatgttaatgggtgtggaccattagtaagtggcctctccctcgtgctgccaaactgtcatttttagaaaggcaatgcaataaccaccgaaccatcaccagac

SEQ ID NO: 944605 - DNA, 595 bp, Homo sapiens
aattcttatatttttagtagacggggcttcaccatgtttgccwggctgatctcaaactcctgacttcaagtgatccgatccactggcctcagcctccaaagtgctgggattacagccatgagccactgcacctggtctgtaacctcattccaatcaaactaatcttctagtagtatatgtctgtactacccaaagtgatgcacagagtcaatgcatcctatcaaaattcctactgaatttgtggccgaattagaaaaacacatcctaaaaatcatataaaacctcaagagacccccaaatagcaaaaacaattttgaaaaaaaaaaaagacaaatttgcaggactcacaactcctgattttaaaacatattacaaatcaacaataatcaaaatgtcatggtgctgacataaagacagatatacagagcaatggaatagaatagagaccccagaaataaactttcacatatatggtcaaatgatctttgacaagggaaccaagaccaatcaacggaaaaggatagtctcttcaacaaatggtgctgtggaaacaagatacctgcctgcaaaagaatgaagttggatcagtatctta

SEQ ID NO: 944606 - DNA, 595 bp, Homo sapiens
aattcttatatttttagtagacggggcttcaccatgtttgccaggctgatctcaaactcctgacttcaagtgatccratccactggcctcagcctccaaagtgctgggattacagccatgagccactgcacctggtctgtaacctcattccaatcaaactaatcttctagtagtatatgtctgtactacccaaagtgatgcacagagtcaatgcatcctatcaaaattcctactgaatttgtggccgaattagaaaaacacatcctaaaaatcatataaaacctcaagagacccccaaatagcaaaaacaattttgaaaaaaaaaaaagacaaatttgcaggactcacaactcctgattttaaaacatattacaaatcaacaataatcaaaatgtcatggtgctgacataaagacagatatacagagcaatggaatagaatagagaccccagaaataaactttcacatatatggtcaaatgatctttgacaagggaaccaagaccaatcaacggaaaaggatagtctcttcaacaaatggtgctgtggaaacaagatacctgcctgcaaaagaatgaagttggatcagtatctta

SEQ ID NO: 944607 - DNA, 753 bp, Homo sapiens
tacaaggataatttttagagattatattagtgatatagtgtgatatagtatgatgtttcaaggtaactttactcaaaggcacctttttctaatctggacaaagccattttacgagctatcagtggctcttgtaaccaccaagagccttaaaccaggctgtcttgatggcatatatgtggggatgtcctgttctttacccccatcccatccccttccttccagctccgttaaggcaggattgggagcaggggtccaacctcatgtaggacccaaaagtagtcctataaaatctccaaaagcggtcacaaaagtctgggcacgtcgtgtgcttttactattttttagggcaactgtccacgaggttcattgcatctgtgcctctgaaaagagcaaaagtcattgttttagtttgcagcagtggttctcaaactttatcatgtattagaatcatctggaggacttgttaatacacagatcctgaacctgccctcaggatttctatttcagtaggcctggagcagagcttaagaatctgcatttctaatgagttgcctggggatgctgttgctgctgccccagggaagatatctggagaaccactgctttagaatgtcagccgtggctgggcatagtggctcatgcctgtaatcccagcactttgggaggtcaagacmagtgcatctcttgaggtcaggagttcaagaccagcctggccaacacggtgaaacccttgtctctactaaaaatataaaa

SEQ ID NO: 944608 - DNA, 557 bp, Homo sapiens
tgagaggccgaggcaggtggcttacttgagcctaggacttacagaccagtctgggcaacatggcaaaatcccagctctaccaaaartacaaaaattagccaagcgtagtggcatgcctatagtcccagctacttggtaggctgaagagggaggatcaattgatcctgggaggtagaagctacagtgagctgtgatcacaccaatgcactccagcctgggcaacaaagtgagaccctgtctcacaaaataataataataataataatgatacaaaaataaattaatttagaagtaggtagtaaaagaggaagaaaaggacaaaaatggaagaaacaagtataaaaccaataccaaaaggcatgatgtaaataaattcattcataagaaagccacattaaatttaaatggtttaaatagctatggcacagaaagagattgtcaggcctaaatacatacacaaatatactatgttcataatatagttaatgtcagttcttccaaaactgatctataaattcaacaaaatgccaatgaaaaaatctcagaagccctttttt

SEQ ID NO: 944609 - DNA, 625 bp, Homo sapiens
gcagaaacattaaaagatgaggaggccgggcacggtggctcacgcctgtaatcccagcactttgggaggcccaggcgggtggatcacgaggtcaggcgatcgagaccatcctggctaacatggtgaaaccctgtctctactaaaaatacaaaaaaattagtcgggcgtgagcgggcgcctgtagtcccagctactcaggaggctgaggcaggagaatggtgtgaacctgggaggcggagcttgcagtgagccgagatcgcaccactgcactccagcctgggcgacagagcgagactccatctcaaaaaaaaaaaaaaaaaaaggtgaggagagcaaaatttattaaaagaaagctctcagtgaaaaaaaggagtcctgccaacagggtctcacctcccagattgaataccaggtcaccacacacacgtgccgaagagaccaggctccttcctggtgcacaaggcaccatcttcccagtgtctccaccccactctcccagtgtgcaggtgggtctcccagtgtkcaggtgggtcccccagttcgttgtgggtatgcccaaacaaggccctgggtgggttccctcgtctgtacaaaagcatctgatgcaaacacttgtgaggcgggt

SEQ ID NO: 944610 - DNA, 476 bp, Homo sapiens
tttgacataaagtcctgtaatcccagcactttgggaggctgaggcaggtggatcacttgaggaaaggagtttgttaccagcctgkacaacatggcaaaaccctgtctctactaaaaatacaaaaaattagctgggtgtggtggtgcacacctgtaatcccagctactcgaaaggctgagacaggagaatcacttgaactcaggaggcaaaggttgcagtgagctgagatagcaccactgcactccagcctgggcaacagagcaagactctgctcccccgcacctccccccagccccccaaaaaaagctagatgtctaaataacggcaacagttacaaatgaaattaaaataaaaagcagtattcacaaagcatcaacagacaaaatgcttaagaataaatttaatgaaagacgtgcaagtcttctagtaaaaactatattatgctgatagacatgaaaagatctaaagaaatagaa

SEQ ID NO: 944611 - DNA, 469 bp, Homo sapiens
gaggaaaagcagaaaattatttctggcagtggcagtagtggtggcagacagaatgtggctctaggtcctagtgtgcggtggcggggggactcccacgtccttcctggactgagttaatggcatgacttttaatgtggccctggctgtgcagcttccttgattctagaagcctggttttccagccttcctggcacatctctgagctacccaatatcttatcattaaatccctaaatgagccagagttggtctctgttgctgcaattaacagcgattgctgagacacgagtccagcacaatgatgatgagcaaggaagcctgcgttctgttgagagatgtgcaaaccattagtaatcagaaaaatgagactacactaaaacggcatggagacgctacttgatatccatgtgactggcaaaatctcaggtgctggataatgccaagagtgggcrggggtgtggctcagagat

SEQ ID NO: 944612 - DNA, 584 bp, Homo sapiens
acaacttcagcaaagtttcagaatacaaaatcaacatacaaaaatcactagcattcctgtacaccaacaacagccaagctgagagccaaatcaggaaggcaatcccgttcacaatcaccacaaaaagaatagaatacctaggaatacagctcaccaggaaggtgaaagacccctacagtgagaattacaaaacactgctcaagtaaatcagtgatgacacaaacaaatggaaaaacattccatgctcatgaataggaaaaatcaatatcattaaaatggctagactgcccaaagcaatgtacagattcaatgctattcctatcaaactaccaatgaaattcttcacagaacaagaaaaaactatttaaaaattcatatggaaccaaaagagagcctgaatagccgaggtaatcctacgcaaaaagaacaaagctggaggcatcatgctacctgacttcaaactatactacagggctacagtaaccaaaacagcatggtcctggtaaaaaacaggcacatagtccagtggamcataatagagaggccagaaataaggccacacagctacaaccatctgatctttg

SEQ ID NO: 944613 - DNA, 662 bp, Homo sapiens
tgaccaggggtcagtcatgtccatcagtgacttgttcaatgactggatgaaaccactcccagagactccrcaggagccacacctgtccacatctattctatcagcacccccattctgcagaaacaactacaattccttatcttagaaccagccccaatgctcaagatcctgaagaaagttgtcttcccagagaagagacgggatccatgactatctatgccctgctagtaggtctgtcaaccataaaacccactgcagacccagtagcagtcatgtgacatggctccaacacactcaggtgcaatcttagtcaaaatctcatcagctcaggatctgaaagaagaaagtatttatttcccaaaactgtctataatgactggaagagaggtttgctccttcacattcagggacataaacataagcctacacagattataaagaatcaggcaaactaccaccaccaaaggaaattaaaaagccatagtaatcatctccaaagaaatggagatctgaaagttggctgacaaagaattcaaaataatcatcttaaagaatttcaatgagatgcaaaagaacacagatagataactaaaaagttttataatacaatacttgaacaaaatgagagttttaacagagaaatagaaaccattaaaaggaac

SEQ ID NO: 944614 - DNA, 623 bp, Homo sapiens
ctggatgaagggatatccagagagcatgaaagcattatctctgggtgtgcctgtgagggcatttccggagagactggcgattgaatccgtgggctgaataaggaagatctgtcytcacccaaagtgggagggcaccatccaatccactgagggcccaggcagaacgggaagatgaattcgtgctctcttgctctctcttcccccaccagagctgggacacccacctcctactgcccttagacatcagaactcctggttctctgggctttggaccctggaacttataccagtggcccctctgactgcgagttacactgtcggcctccctggttctcagatcttcaggcttgaactgagccacactaccagcctccctgggtctccagcttgcacagacagggcaaatcatgggacttctcagtctccatactcatgtgagccgattcccatcataaaccccctttcttccatccatccatccatccatccatccatccatccatccatccatccagctatctatctagctaccgagctagctacctgtatctttacttatctctatctatgtctacctatatctatatctctgtctacatctctatatctatctgatctatctc

SEQ ID NO: 944615 - DNA, 623 bp, Homo sapiens
ctggatgaagggatatccagagagcatgaaagcattatctctgggtgtgcctgtgagggcatttccggagagactggcgattgaatccgtgggctgaataaggaagatctgtcttcacccaaagtgggagggcaccatccaatccactgagggcccaggcagaacgggaagatgaattcgtgctctcttgctctctcttcccccaccagagctgggacacccacctcctactgcccttagacatcagaactcctggttctctgggctttggaccctggaacttataccagtggcccctctgactgcgagttacactgtcggcctccctggttctcagatcttcaggcttgaactgagccacactaccagcctccctgggtctccagcttgcacagacagggcaaatcatgggacttctcagtctccatactcatgtgagccgattcccatcataaaccccctttcttccatccatccatccatccatccatccatccatccatccatccatccwgctatctatctagctaccgagctagctacctgtatctttacttatctctatctatgtctacctatatctatatctctgtctacatctctatatctatctgatctatctc

SEQ ID NO: 944616 - DNA, 623 bp, Homo sapiens
ctggatgaagggatatccagagagcatgaaagcattatctctgggtgtgcctgtgagggcatttccggagagactggcgattgaatccgtgggctgaataaggaagatctgtcttcacccaaagtgggagggcaccatccaatccactgagggcccaggcagaacgggaagatgaattcgtgctctcttgctctctcttcccccaccagagctgggacacccacctcctactgcccttagacatcagaactcctggttctctgggctttggaccctggaacttataccagtggcccctctgactgcgagttacactgtcggcctccctggttctcagatcttcaggcttgaactgagccacactaccagcctccctgggtctccagcttgcacagacagggcaaatcatgggacttctcagtctccatactcatgtgagccgattcccatcataaaccccctttcttccatccatccatccatccatccatccatccatccatccatccatccagctatctatctagctaccgagctagctacctrtatctttacttatctctatctatgtctacctatatctatatctctgtctacatctctatatctatctgatctatctc

SEQ ID NO: 944617 - DNA, 591 bp, Homo sapiens
gcagccttccagagagctagagaacctaacagcaagcactacctgcctagtgttattaccagctgacccatccagaataactgtctcaacttcatagtaaaggtctttccctgcaaaagaacacctgtgaaggatggaggacgtggctatctccccaaatgtgcagttacaaatgtaaggtgtcatggattacaaataatcaaaattatgagacctccaaaatatgctaatgaagttccaacaatgtagacttatgaaatgcctaataaagaattcagaatagttctctttaggaagttcaatgaactacaaaaacatacagatagaaaagtaaataaaatttgcaaaacaataaacaaaacaagaagtttggcaaagtaatataaatggtattctaaaagccaaataaaaatcctagacatgaagaacataatgactgaataaattaattaaaaagacagtgttgacagcaagctcaatcaagtagaacaaagaatcagtgagatgaaagacaggatatttgaaattatccagtcagagragaaaaaaagaaaaaaaatgaagaaaatctgaagaaattatggaacacca

SEQ ID NO: 944618 - DNA, 604 bp, Homo sapiens
agtacagatgaggtttcaccatcttggccaggctggtcttgaactcctgacctcgtgatccacctgcctaagcctcycaaagtgctaagactacaggaatgagccactgtgcctggccctattgtttcatcgttttaacatattaatcacactgcctctttgaaaatttttctccttttttcttttcagttgtgctttctttctgcactctattttttattagcttggccctacttatttttaatgaaaaaattaaaaatgaaatgaaattatattcctagggtagaaaagtttaatatattttctttccagatatttatagtcaatatttatagactcatccaaaactcactaattaaaataaatgtaaaaaataattcctatatgtgaaaagctacttttaaagtatttacaattaaatgctaaaattaagataaaatgagaactttaatttttaaatcaaaattatttaaataaaaccaacatttacatttagtttctgaataattaaatcctattaaatattttttaaaaataacatttttctgagtcttacagtttaagatccagctagtgaccaatgtaaataatcaacatcctacat

SEQ ID NO: 944619 - DNA, 699 bp, Homo sapiens
ttgtctgccttgttcactactgtggcagatacttcattttgagttgcctactcaaaatgctttcttccttcccccttcttccctcctccgtccctctctatcctcccttcctcctttccttccttccttccttctttccttccttcctcctgtcctcccttcctccctccccctttcttttttttttcctaacacatcttgaagtacctttgagatgtcaatatgcctagtcaaagtacacatttgccgtttcctttgaaaatattggtggccaagtgatgagctgtgagcagtagtggggtggggcttcaggaaatgctctctaaaggaaagaagctcttctgacttgctcttccctctgcccttcttcctccctggaatgtggacctgtttcctggagatgcaacagccctcttgcagccctgggaataaaaactgaatgctgtaccagaggtagagcaggccagtggaaggagcctgggtgctctctctttctctctctctatctatctatatatatgtatattatctatatatatctatatatctataacatactataatatatattatctctatatatctatatatctctatataatatatagatatataatatatattctctctctctctctctctctctmtatatatatatatatatatatatatttttttttttttttttttttgagacag

SEQ ID NO: 944620 - DNA, 655 bp, Homo sapiens
gcagccctgggaataaaaactgaatgctgtaccagaggtagagcaggccagtggaaggagcctgggtgctctctctttctctctctctatctatctatatatatgtatattatctatatatatctatatatctataacatactataatatatattatctctatatatctatatatctctatataatatatagatatataatatatattctctctctctctctctctctctctatatatatatatatatatatatatttttttttttttttttttttgagacagggactcattctgtcgcccaggctggagtgcagtgacatgatcttggctcactgcagccttgaccttccaggatcaaatgatcctcccatttcagcctcctgagtagctgggactacaggcatgcaccaccacgcctggttaatttttgtatttttttgtagagacagggtttcgccatgttgcccagcctggtctcaaactcctatactcaagcaatccacccacctcagcctcccagagtgttgggaytacatgcatgagcccctgtgcctggccagagcctgggctttgagcaactgcaggagccctggactctgagctgtttgttctgtgaggaaaaagaaacctgtttgattaaaccactattattta

SEQ ID NO: 944621 - DNA, 589 bp, Homo sapiens
aaaaaattagccagttgtgctggcatgcacctgtagtcccagctacttgggatgctgaggcaggagaattacttgaacccaggaggyggaggttgcagggagctgagatcatgccattgcactccagcctgggcaacaagagcaaaacttctcaaaaaaaaaaagaatatagacatgaataacttaaatacatgtcatatgaaaatattgaaaacaaaaaaattaaagattattcatattcctatcatttttagtaaaataatacaagaagtagaactatcctccatgttcatactatgatggtggttaattttatgtgtccagttgactggccacagggtacccagattcaatgttatttctgggtgtgtctgtggaggtgtttctggatcagatcagcatttgaatcagtggactcagtaaagtagacggctctgcccaatgtgagtgggcatcatccaatccactgaggttctgaatagaataaaaagtggagaaaggaagaagtcattctttttctttcctccctcacagtttgagcttgaacatcccatctcatcttctccggcccttggactgggatctacga

SEQ ID NO: 944622 - DNA, 570 bp, Homo sapiens
ccaaagtccactgtgtcattcttatagcctttgcatcctcatagcttagctcccacttgtaagtgaaaacacacaatgtttggttttctattcctgagttacttcatttagaataatagtctccagttctatccatgttgctgcgaatgccattaattcattcctttttatggctgagtagtattccatcatatatacataccacagtttctttacctactcattgattggtgggcattttggttggttccacattgcaattgtgaattgcagcacctcgatttctgcaagccatctcttgcagccctgagctcgtaagatttgtcttggctgattacaggctgattacagaaaagacaggtgacttttctgtgagtttcagactccactagcgcgcaaactgcagatacttccttcccttttctccattcagttctccgtgttcttgcaatttcagtcttgttgccccgtccatatttacagatctcaattgctttgtttwaaaaaaagtttttttaaaggaagaaaacaaaagaaaaggcaagttggtggtgttgcattacaaagagc

SEQ ID NO: 944623 - DNA, 553 bp, Homo sapiens
gcttgaggccaggagttcaagaccagcctggccaacatagggagactcccattaccacaagagatgaaagaaaaaatttagcttggtgyggtgacaagtgcctgtagtcctagctaccgagggggctgaggggggaggactgcttgacctcaggaggtcgagggtgcagtgagtacagtgagctatgatcacaccaacgtactccagcttgggcaacagagagaaacactgtcaaaacaaaacaaaaaaaaaagaaaggaagaaaaaagaaagaaagaaaggaaggaaggcaggcaggcaagagaaacacacaattgctcaaagcctccgaactgtggagcaaacccctagtctacctgttacatcttttcctgcctttgctaactaaggtcacggaaacctagaagctggaagaatctcccaccatcagagcagggaaggccccgggatgctggagacgtaggaagcccttctcagaagatgcaatggaataagctcacgaactttaggcctcaggatcctataatcacacataagttttctcaggattaca

SEQ ID NO: 944624 - DNA, 650 bp, Homo sapiens
acacgcgttttaacaggacccatctggctgttgtgcggagaagggactgagggtctggggtggaaacagggagaccagggaagtggctcctgccgagttccaggagaacaacccaggcggctcagagcaggatggtggcagtggtgctaggattctgggattgtgaaggtcgagccacaggatttgctccttgggaacacagagtggatgttggaggcataaaagcaacagaggggccacggatgactccacagcttggggctttaacaactggataatcattcattcattcattcatttagagatgggggtctccctatgttgcccacactggtctggaactcctgggctcatgtgatcctcctgcctcagtctcccaaattgctgggattacaggtgtgagccactacgcctggcctactagatgatcttcaatggctcctgctatgacattaacatttttctccctcagagcccaggcggggctgggcacagagtgggcaataaaccaacactgactgaatgaacaaaccatraataatataaggaaggaacttaagagcctccctgagctaatcctgccaagctgccaaacttacctaaaaccccgaggcttcccagagaacagtggagaatgatgccctcctagt

SEQ ID NO: 944625 - DNA, 551 bp, Homo sapiens
ccaaacagccaataacaagtgatgtgatcaaagccataataaaaactctccaagtaaagaaaagcctgggaaccaatggcttcactgctgaattytaccaaacatttaaagaagaactaatatcaattatactgaaactagtctgaaaaagagaggaggagggcaaacttccaaacccattctatgaggccagtataattctgataccaagaccaggcaaagacacattaaaaaaaaaaaaaaaaaaaaaaaaaaaaaaacaactacaggccaataactctgatgaatattgatgcaaaaacctcaacaaaatactagcaaaccaaattcaacaatacattaaaaaatcattcatcatcaggtgggatatattgtagagattcaaggatggttcaccatagacaaataagtcaggtgatacattatatcactagaataaaggacaaaaagcatatgattagttcaattgatgctgaaaaagcactggagaaaattcaacattgcttcacaataaaagccctcaaaaaactgggtgtagaaggaacatacct

SEQ ID NO: 944626 - DNA, 616 bp, Homo sapiens
ggtgtgataactcacgcctgtaatcccacactttgggagaccgaggcaggtggattgcctgagctcaggagtttgcgaccagcctgggcaacacggtgaaaccccatctctcctaaaatataaaaaattagccgggcatggcggtgtgcgcctgcagtcccagctacttgggaggctgaggcaggagaattgcttgaacccaggaggcggaggttgcagtgagccgagattgtgtcactgcactccagcctgagtgacagagcgagattccatctcaaaaaagaaaaaaaattctcattatccacttccctcttatcccttacccttcacagtctccagtgtctattattctattccccatgtccatgtgtacacattatttagcttccacttgtaagtgagaacatgtggtatttgtctgtttttgagttgtttcacttaagataatggcctctggttccatccttgttgctgcaaacgacatgattttgttsttttttaatggctaaatagtattccattttgcgtatataccatattttctttatctattcattggtcaatggacacgtaggttgagtccaaatctttgctattgtgaatagtgctgcaataa

SEQ ID NO: 944627 - DNA, 627 bp, Homo sapiens
ctggctaatgggctggttgaatgctaccgacttgcttaattgaagttccactaaaaacctgaaataccaatcctctcctattcatttattcgttcatttattcttcattctaatgakaattattgagtacttactatgtataaaacatagcttttctaggcctggcacggtggctcatgcctgtaatcccagcactttgggacgccgaggtgggcggatcacgaggtcagaagattaagaccatcctggctaacacggtgaaaccccatctctactaaaaatacaaaaaaattagctgggcttggtggcgggcgcctgtagtcccagctactcgggaggctgaggcaggagaatggtgtgaacctgggaggcggagcttgcagtgagccgagatcgcgccactgcactccagcctgggtgacagactgaaactcgatctcaaaaaaaaaaaaaaaacatagcttgtctaacacagtgtgatggttaatattgagcgccaatttgattggattgaaggatgcaaagtattgttcctgggtgcatctgcaagggtgctgtcaaaggagatgaacatctgagtcagtggactgagaaaggaaggcctaccctcaatctgggtggacacaa

SEQ ID NO: 944628 - DNA, 601 bp, Homo sapiens
ctgtcatgatttgagttatgtaacccccaaattcctatgttgaattcctaaactccaggtcatcacagtgtgaccttatttggaataaagcctttgcagatataaytagttaagaagaagtgatgctggagtagggagggcctgtaatccaatatgactggtgtccttatagaaaggagaaatttggacatagggacagacatgcaaagaaggaagacgatgtgaagacacccaggaaaacactatgtgaagaggaaggcagagatcagggtaatgcagcagaagacaagggatgccagcaaaccacagagagctgtgagagaggcatggaatacattttcccttacagcccgcagaaaaaaccaactctgttggcttgcacttctagccttcaaaactgtatgacaatacatttctcttatttaagccacccagtttgtggtattttgttatggtagacctagcaaattaatataagtttgctcctctatattcctatcattactactaaaattgagatctttgttatttctcacctggtctattgctatcaaccttcagtgccatcgccactgcaaaactatcccgtcatccatcctcc

SEQ ID NO: 944629 - DNA, 786 bp, Homo sapiens
atgtttttgttttttaggagacaaggtctcactctgtcacccaggctggagtacagtggcgtgatcacagctcactgaagcctcaacctcctaggctcaagtggtcctcccaagtagccaggactacaggtacaagccaccacaaccagctaattttttttttttttttgagacagtctcactctgttgcccaggctggagtgcaatgctgtgatctcggctcactgcaggctccgccttctgggttcaagcaattctcgtgactcagcctcccaagctgggaatacaggcgtgcaccaccacgcccagctaatttttgtatttttctttttttgttttttgttttgttttgttttgtttgaaacgaagtgtcactctgttgcccaagctggagtgcagtggtgcaatctcagctcactgcaacctccaactcccaggttcaagcgattctcctgcctcagcctcccaagtagctgggactacaggcatgcgccactgtgcctggctaatttttgtatgtttttttagtagagacggggtttcactatattggccaggctggtcttgaactcctgacctcatgatccgcctgcctcagcctcccaaagtgctgggattacagatgtgagccactgcacccagccaacaaccagttaatttttttgtttgttttttaatatatatakagagatgaggtctcactatgttgcctaggctgatctcaaactcctggcatcaagcgatcctcccacttcagcctcccaaaacgcggggattgtatgtata

SEQ ID NO: 944630 - DNA, 786 bp, Homo sapiens
atgtttttgttttttaggagacaaggtctcactctgtcacccaggctggagtacagtggcgtgatcacagctcactgaagcctcaacctcctaggctcaagtggtcctcccaagtagccaggactacaggtacaagccaccacaaccagctaattttttttttttttttgagacagtctcactctgttgcccaggctggagtgcaatgctgtgatctcggctcactgcaggctccgccttctgggttcaagcaattctcgtgactcagcctcccaagctgggaatacaggcgtgcaccaccacgcccagctaatttttgtatttttctttttttgttttttgttttgttttgttttgtttgaaacgaagtgtcactctgttgcccaagctggagtgcagtggtgcaatctcagctcactgcaacctccaactcccaggttcaagcgattctcctgcctcagcctcccaagtagctgggactacaggcatgcgccactgtgcctggctaatttttgtatgtttttttagtagagacggggtttcactatattggccaggctggtcttgaactcctgacctcatgatccgcctgcctcagcctcccaaagtgctgggattacagatgtgagccactgcacccagccaacaaccagttaatttttttgtttgttttttaatatatatatagagatgaggtctcactatgttgcctaggctgatctcaaactcctggcatcaagcgatcctcccacttcagcctcccaaaaygcggggattgtatgtata

SEQ ID NO: 944631 - DNA, 587 bp, Homo sapiens
aagagtaacatttatgtcatcagagtgtcagaaagaacaaagaaagtgagcaaggctaaaaatatactcaaagaaagatgaaaatcctccaaatttggcaagagacataaacctacatatcaaatcaacaagatgaacaaatctcaaataagataaactgaaatgaaatccacacaaagacatatcataattgacttccaaaaactaaaaacaaatgaaaaatcttgaaagcagccagggagaaacaatacccggatgggcaaaaacaattcaaatgacgggccgggtgcggtggctcacgcctgtaatcccaacactttgggaggccgaggtgggcggatcacgaggtctggagatcgagaccatcctggccaacacggtgaaaccccgtctctaccaaaaatacaaaaaaattagccgagcgtggtggcgggcacctgtagtcccagctactcaggaggctraggcaggagaatggcgtgaacccaggaggtggagtttgcggtgaaccaagatcgcaccactgcactccagcctgggcgagagagcgagactccgtctcaaaaaaaaaaaaaaaaaaaaaaaaa

SEQ ID NO: 944632 - DNA, 554 bp, Homo sapiens
ctcccatcctttgcttcttgccatctttccyaccctatccaagccctagcctgccaactttcaggtctatgccatccaccatgcaggagaagctcaacataaaagatgtttgtttcacggaacagcagaaagaccacgatggccatgcacagcatgagatttagggagcaggtagacttctggccaaagaagcccaaacaagtccctgaggaaagcctggggaagaactgacctctggttggtgggatacagctccactgtgatcacatccagagcattccaggctgcaatgcttgtcccacagaacaggcactgccagccgatcattgcagactcactgttgccaaaaaacaggaagaagcagcagactgcagagattagcatggagccacctgcagagggagttcaagggcaaaaagaaacatgaggcctgtgtcttgcacatggctgtcactcacagttcttgccccatctcccaccctcactggtacacctgaagccaaggctgcctgaagtattaggttcaccctccacacagagagagcacagctgga

SEQ ID NO: 944633 - DNA, 530 bp, Homo sapiens
agtgcagtggcggatctcagctcactgcaacctccgcctccagggttcaagccattctcctgcctcagcctcccgagtagcagggattacaggcacctgccactacgcccggataattttttgtatttttagtagagacggggtttcaccatgttagccaggatagtctcgatctcctgacctcgtgatcctcctgcctcggcctcccaaagtgctgggattacagacgtgagccaccatgccccgccttaatttttatcttttaagccccaccctcagaagcaaccgttcatgaaaaaggctgtcttttctctgcggcattgcttttgagcctttgtcaaaaatcatggagcatatatgtgtgaatttatttttggactctttattctattccattgatctctttatctatctttaccccaataccacactgtcttgattactgtagctttataataattcttgaaatcaggtagcgttggccctccacctttgttctkcattttcaaagttgtttttgctattctgac

SEQ ID NO: 944634 - DNA, 599 bp, Homo sapiens
ctggagttgagttagatggttgtttcagggcctcagttgagagcaagttcagtgggcctgtcttctgatgtactactgtgcatgactgcctcctgtcagacccccaggcagrtggttttggtagcaggatcaagtccaaatagggctttcactaaacatgaggcagatggggccatttccaaatctggagttaggaccacagtcaatgagtttgccacctgggtgtgggtctaccctctcaaaacaactctcctaggtcttgggctccactggggttttacaactcctgcctaaatcctcaggttctcacaaaggcacttttgcctgtgaatggatgagacatttttgttgctattggggaatgtgagtgggagacaacctactctgccatcttgctgacatcgcttcctagcttcctttgtttctgttgagaagtcagtggtaatttgaacaactgtcccacttgtgtaatgtatcattttcctctgtcttcattcaaaattttgtcttctttttgattttaagaagcttgattatgacatgcctaagtattgttcttttttgtatttctcccattttagatttttctaatattcttg

SEQ ID NO: 944635 - DNA, 748 bp, Homo sapiens
accaggtcctcctcaaacaagggagagaaagggagtcccaagaattgggcacctggcctaataaggttcctcccaaaaggaaaaacagctaatccctcacatagaaaagctccatgtatttacaggactatgttgactccggacatggtggaggaaggagacctgatgcccctcatggttgtgccaagaaaggagggggtcctagattggagaggagaactgaaaggcccactccagagtccaggaggaggtccaccctctttcctttgacccctagaatcacctggggctcctggatggcactggccttctgaactaccagagctggggagaggaaccctgggacccatcagtactactgcaccatttggaatactggccctggacccagtgacccacatctctggggacagttcgctttccaatggtcctcactgcaaacttgacagggtcaaagtggcttccccctgctgtcctaaagtgccctaggctaccatgtttgcagcagtcagcaggtgcatctcagggactctggagtccatgagcccacaagacagctcttagaacctctgcctttttcctgtaactctcctctcttttctggacttcctcccaattcctactgcaaaagatggaggtggccactcccaggaggccctcaaaagtccatctggtcccgcagsgcatttctgcagccccctcctgacttcaggggccacctgtgtaataaattcatcccctgggacca

SEQ ID NO: 944636 - DNA, 748 bp, Homo sapiens
accaggtcctcctcaaacaagggagagaaagggagtcccaagaattgggcacctggcctaataaggttcctcccaaaaggaaaaacagctaatccctcacatagaaaagctccatgtatttacaggactatgttgactccggacatggtggaggaaggagacctgatgcccctcatggttgtgccaagaaaggagggggtcctagattggagaggagaactgaaaggcccactccagagtccaggaggaggtccaccctctttcctttgacccctagaatcacctggggctcctggatggcactggccttctgaactaccagagctggggagaggaaccctgggacccatcagtactactgcaccatttggaatactggccctggacccagtgacccacatctctggggacagttcgctttccaatggtcctcactgcaaacttgacagggtcaaagtggcttccccctgctgtcctaaagtgccctaggctaccatgtttgcagcagtcagcaggtgcatctcagggactctggagtccatgagcccacaagacagctcttagaacctctgcctttttcctgtaactctcctctcttttctggacttcctcccaattcctactgcaaaagatggaggtggccactcccaggaggccctcaaaagtccatctggtcccgcaggscatttctgcagccccctcctgacttcaggggccacctgtgtaataaattcatcccctgggacca

SEQ ID NO: 944637 - DNA, 617 bp, Homo sapiens
tgaaattaatgcttccctcgtgaggccattcttcttttctgtgyctcgggtgcttggcactaagttggcaatgaaggaaatgacaagaacatttctgccacaaatttacgtacagatactaaggcacattttgtttcatctgtgctaatcttagccttcaattttatacgtttgaccactaagccaaatgctcattctacccagtaatattatctctgtggtttgcaacatgcttaacatttaacattgtacataaagaagagatacgaactatgacaatcatgaaagaaaaaacaatagaaaagactggacaccttaacaggtggtcagggaccaggtccatgggcctttggataacacaggtgtagcctcggccagataccctcagttgacccaggacctccttccggtcccacctgagggctagaccgccatgaagggaaactggattggaacaaagccaacattcccaacatctgaggatgatgggggattgacagcatcctccccagcaagcctgtcctccgtgttgtaagtctggcagccacactaggcacttttaactgactgagacccagtatttttctttcatcttcattattgtggcatttagggac

SEQ ID NO: 944638 - DNA, 628 bp, Homo sapiens
tagacattcccctggaccatacatggttgttgttgttgttgttgttgttgttgttgttgttgttgttttgctttgttttcagttggaataaaagtaacaacataaaattaaccattttattatttttcttttaaaaaaattcttattttttttaaatatagagatggaggtcttgatatgttgcccaggctggtcttgaactcctggcttcaagtgatgctcctgcctcagccttccaaagtgctgggattacaggtgtgagccactgagcctggccaaattaaagtgtacaatttagtggtacgttcagatgttatgcaaccaccacctatgtcaagttccaaaccattttcaatcacttggaaaggagttctggtgcccactaagcagtcactcccattccctcctcccccaggcctggtgaccacagaatgctttctggctctatgaatttccctatttggggcactaaatgagatcatacaatatgtgacctcttgcatctggcttctttcactgagcatgttttcccagagcatccatgttgtagcacgttccagrgcttcactccttttatggctgaatactatgctactgcgtggctgaaccacgttgtgtttttccaggc

SEQ ID NO: 944639 - DNA, 586 bp, Homo sapiens
agggcctgaatattcatttcctgcactgagccaggcatcaactyacctacagtccaattgctctgaaactcacacagattgagatcagaagagctcctttcatccaagtgacttctgtatgcagtgactttgtgtcctctctgatcttcccagctttgtctcccactggcctctctgccttggaccctccaaccacttctgccaactctgtcttcccccgggagatgcccctgccccagggtcaaacagttccaactgacaggattgcccttaccttccctctgccaccagaccaggcccaatccccttcctccaggaagtttccctcgatctacaggtcaaatttgtctcctccacccccatgttccccagcactttgctctgtcattctgccttcaacactggaaatacaaagagggctaaatcctaaagccctgccctcagggagcactcagcctggggtagagagactcatgtaatgtggtgatggctgccatgggggtctatttggggtactatgagagcctagaggagggggatattcagtacagccttggtctccaggaaaccacctgaaggaggacag

SEQ ID NO: 944640 - DNA, 612 bp, Homo sapiens
tggctgcagaaatttgcataagcaatgaggagccaaatgttaatccccaagaaaatggggaaaatgtctccagagcatgtcagaggtcttcatggcagcctctaccatcacaagcccagaggcctaggaggaaaaaatggttttgtgggctgtgcccagggttcccatgctgtgtgcagcctagggacttggtgccctgcatctgagctgctccagccatggctgaaaggggccaacatagagcttgggccatggcttcagagggtgcaagctccaagccttggcagcttccatgtggtactgagcctgccagtgcacagaagtcaagaattggggtttgggaacctccacctaaattttagagcatgtatgaaaatgcctggctggcaaggcagaagtttgctgcaggggctgggccctcatggagaacctcggctagggcagtttgtaagggaaacgtggagtcagagcccccacacagagtccctcctggggcactgccttgtggagctgtgagaagagggccaccrtcctccagaccccagaatggtagatccaccaacagcctacactgtgtgcctggaaaagccacagacactcaatgccagccca

SEQ ID NO: 944641 - DNA, 775 bp, Homo sapiens
acaaagagccagtgtgacagccttttttgggtacccgcattcagtgggtcccaagctcctgtctggcatccaagaagaattaggttgcacggacacttgaaggttggtggaggtagagaattttatgtagcaatrgaaatggctctcagcagagagggatgattgagaggggacaggaagggaagataatcttccctgatgtctggctggctctggctggctcttctccaaagttaaactgtctctcctccaaagtccagccatccccctgaagtcaagtcacctctctccagtcaagccacttctctcctctactgactgagtctggggtctttacaggcacaagatggggatcctggcaggccataggtagttttggaaaaggcaatatttgattgttagaaagacattattcagaaagaaccagttgagagagagtgagcaaatagggatagaaattctcatttttgggccacgggtttcaggatttttgacttgaaggtgggattttgccagggacccacccctgtctgcctagaatttctctgcctcatgcctctatcaatacaattcttattaaaatgtataaatggttctatcaatataattctttttaaaatgtataaatggtacagataggcaagagtgtaaaggacaagcaagccagctctgagccacactgcctgggtctcagtcctggctgagagacactaggacttactagctgtgagacactaggagagctacttaccctctctgtgcataactttccaga

SEQ ID NO: 944642 - DNA, 639 bp, Homo sapiens
attctgttgtccaggctggagtgcagtggcgagatctcggctcatcgcaacccctgcctcctgggttcaagggattattctgcctcagcctcccagggagctgggattacaggcacctgccaccatgtctggctaatttttgtatttttagtagagacagggtttcaccatgttggccaggctcgtctcgaactcctggcctcaagagatctgcccacctcggcctcccaaagtgctgggattatagacatgagctatcaagcccagcctagaacttcccttttcttttcttttttttttttttttttgtttgacacagagtcttgttctgtcgcccaggctgcagtgcagtggcgtgatctcagctcactgcaacctccacctcccaggctcaaacgattctcctgccttagcctcccaagtagctgggactacaggcacgtgccactatgcccagctaatttttcttttgtatttttagtagagacaggccaggctagtctttaactcttacctcaaytgatccacctgcctcggcctcccaaagtgctgggattacaagcatgagccactgtgccgggccaaacttcccttttctttccatttcttggtatttggaaagtgagcagccatggaaca

SEQ ID NO: 944643 - DNA, 706 bp, Homo sapiens
cacccaggaagtgcaagggtcgggggatttccctttcctagccaagggaagctgtaacagactgtacctggaaaaacaggacattcctggccaaatactgtgcttttcccatggtcttagcaaccagcagaccaggagattctgtcccatgcctggctcggtgggtcccatgcccacagagccttgctcactgctagcactgcagtctgagatcgatctctgaggctgcagcctggcagggggagggtcgtctgccattgctgaggcttgagtaggtaaacaaaatggccaggaaactccaactgggtggagcccaccgcaactccgcaacgcctactgcctatatagactccacctctgtgggtagggcatagctgaacaaaaggcatcagaaacatctgcagacttaaatgtccctgcctgacagctctgaagagagcagaggttctcccagtatggtgtttgagctctgagaacagacagactgcctcctcaagtgagtccctgacccccgtgcaacccaactgggagacacctcccagtaggggccgagagacatctcatacaggtgggtgcccctctgagacaaagcttccagaggaaggatcagrcagcaatattttctgttccacaatatttgctgttctgcagcctccactggtgatacccaggcaaacagggtctggagtggacccctaacaaactc

SEQ ID NO: 944644 - DNA, 737 bp, Homo sapiens
tgaagcagggtggggtattgcctcacccaggaagtgcaagggtcgggggatttccctttcctagccaagggaagctgtaacagactgtacctggaaaaacaggacattcctggccaaatactgtgcttttcccatggtcttagcaaccagcagaccaggagattctgtcccatgcctggctcggtgggtcccatgcccacagagccttgctcactgctagcactgcagtctgagatcgatctctgaggctgcagcctggcagggggagggtcgtctgccattgctgaggcttgagtaggtaaacaaaatggccaggaaactccaactgggtggagcccaccgcaactccgcaacgcctactgcctatatagactccacctctgtgggtagggcatagctgaacaaaaggcatcagaaacatctgcagacttaaatgtccctgcctgacagctctgaagagagcagaggttctcccagtatggtgtttgagctctgagaacagacagactgcctcctcaagtgagtccctgacccccgtgcaacccaactgggagacacctcccagtaggggccgagagacatctcatacaggtgggtgcccctctgagacaaagcttccagaggaaggatcagasagcaatattttctgttccacaatatttgctgttctgcagcctccactggtgatacccaggcaaacagggtctggagtggacccctaacaaactccaacagac

SEQ ID NO: 944645 - DNA, 590 bp, Homo sapiens
actagcgttgggtgacttcccttttgttcacagaatgttgcaagttgggttctctgggaagtagactccagcatggatttcataatgtttatcagggtgtaccttgggattgatgcctgtcagggggagggacagaagccggacttgacaagaaaagaagttgagctgcacagcagtcctgtcagctactgccaaacccaagggacctctggaatgttcttaaaaatttatctgtattttaatctttttagagacagagtctcactctgctgcccaggaaggaatgcagtggtgtgatcatagctcactgcaacctcgaactcctgggctaaggtgatcctcccacctcagcctcccaagtagctgggcctacaggcatgcaccaccacacccagctagtttttaggtttttgtagagatggggtcttgctatgttgcccaggctagtcttgaactcctggtgtcagatgatactcctacctcaacctctggacctttaatggtctgtcaragttgtcctgtgttggtcccaaatggccaggctttctattgcttcctcagtatgggatgtgcaccactgagaaggtagc

SEQ ID NO: 944646 - DNA, 583 bp, Homo sapiens
agcaacccctgacagcccagaggaatgtcctaaacataaatgtgaagaaacagaaaatcttaagctaaaactcataaaaaataagtaactaagtaagggctattcatcttaatcccactcctacctaacctttcctctcaaagttcaccaccaaatattaaaacttctttttaactcatatttgcaagcaacttttaattatacatgggattgcatttgtaactttataaacccacaaagaagattacatcttggcaagtaaagaaataattttatatggaaattatttactatgccactcttgtggaaactgttatcatcccactactaattgcaataaaactatacactgtgtcacccacaatgtggaattctggttgtaaaattctaattgctgtaatattttgcctgattatcatccttataacaggattaataattgcaggaaagatwtactcaaggttgttttggttatagcaaaagtaatagggataaaaagtaagtataaaagttttactatcactaagtttaatacgacttttttactaaaggttgataatacaatgcactttaagctaggaaa

SEQ ID NO: 944647 - DNA, 754 bp, Homo sapiens
tcctcaatttctttctttactatggaaactaactattatgttaatgcaaaagtaactgtggtctcagaccataaattttaaattattataactaggctcaaacacatttttattaataaaaataggaaccattacaatcaacacatttttgccaataagaaatgtttgtttatccctgtagcataaaaatccgtgatttgggaatcaacgatcacttagaaagcattttctgcatcctgatggttttggaagcattttccccacaaaagttgttgagatgcttgaagaagtggtagttggttggtgagaggtcaagtgaatatggcgtatgaggcaaaattttgtagcccgatttgttcaacttctgaagtattggttatgcaatgtatggtccatcattgtcgtggagaagaattggaccctttctgttaaccaataccggctgcaggtgttgcagtttttggtgcatctcatcgatttgctgagcatacttctcagatgtaatggtttctcagggattcaaaaagctgtagtggatcagacaggtagccgaccaccaaagagtaaccatgaccatttttttgatgcaagtttggctttgggaagtgctttggcacttcttctcagtccaaccattgagctggtcatcrtcagttgctgtataaaatccactttttgtgcacgtcacaatctgatcgggaaatggttcattgttgtgtagagtaagagaagacacttcaaaacactgattttg

SEQ ID NO: 944648 - DNA, 573 bp, Homo sapiens
gaaaccctctaaatctattctcttaggaatttttaacttattgtyattaactataggcactgtgaggtacaatagatctcttgattttattccttccatctaactgaaattttgtgttctttgactgacatctccctgatcctcccattccccagcatctggtaaccaccattttgctctttgtttctattaattagattgttttagattccacacataactaagacgaagctgtctttctgtgttggggttatttcacgtaatataatgttcttcagattcatcaatgttcttgtaactggcaggatttcctttcctgtttttaaaaggctgaatagtattctgttgtggatatacatcacatttcctttttccatttgtctgtcaatggacacccaggttaattccatagcatggctattgtgaaaaatgctgcaacaaacaagggagtgcagttacctctttaacatactcttgtcatatcctttagatatatactcagtagttggattactggaccatacagtcctttatttttaattttttgaggaacctccaaattgtttttcataa

SEQ ID NO: 944649 - DNA, 575 bp, Homo sapiens
attaaagaaagccataaaagcagaaggaaacactcagacctaagtattacaaaattcacagctttgtatttttacatactgttgggcagagaagacaattttggcamcagttagtccagtaagtgggaagaagttggtattagagaaagttgtactacattaggtggaatgtgacaaatggctagactgagcagtacagtacagatacagaaaaagagacaaagcatagcattatgtacattgagaatgacatttaaaaaaaaattctagttttgtctgaatttcccttgcataccacagatttttcttctggtcaaatagagaagatatgcgtccatgttcccttctctaaatgggttttcgtcttttatcttccttcttcattccctcagataacttaaaagaagttatttttgtgtccttttttttttttttttttgagactgggtcttactctgtcacccaggctggagtgtagtagtgtgatcatagctcactgcagccttgacctcctgggctcaggtgatcttcccacttcagcctcctgagtagctgggactacaggcacgtgccat

SEQ ID NO: 944650 - DNA, 591 bp, Homo sapiens
ttagtatatatttaagtgactatcaaaaagcaaaagacggggagagagagaactaaaagacttcattctttcagtaaatatttactgagcacagaccatgtgccaaactgggatacggcaatgaacaaaataaaaaaagtcactgttttggtggaacttctggtatgagttgagagagaaacaaaataaacaaatgatgtgataaaagaaaaaccaaattaaatttaaaggagtttaactgagcaatgaatgattcacgaattgggcagcccccagaattatagcagattcacagagactccagcgcagccacatagtgaaagaaaatttataaacacaaaaaagggaaataatgtacagaaatcagaagtgaggtacagaatggctggattggttacaagttgccatttgccttatttgaacacagtttgaacacttagcagtgtatgaatggttgaagtacagctgctgggattagccaagactcagctattgttacaggcacatactcctaaattaggtttttaaccktgtctacctattaagctaggttgcagtttgtccacaagcactcaaatatagaagtacaga

SEQ ID NO: 944651 - DNA, 560 bp, Homo sapiens
agactctttggcagcagtgactctccaaaaccaccaaggcctagacctcctcactgctgagaaaggaggactctgcaccttcttaggggaagattgttgtttttacactaaccagtcagggatagtgtgagatgccacccagcgtttacaggaaaaggcttctgaaatcagacaatgcttttcaaactcttatagcaacctctggagttcggcgacatggcttttcccctttctaggtcctgtgacagccatcttgctattactcgccttcgggccctgtatttttaacctcctcgtcaaatttgtttcctctaggatcgaggccatcaagctacagatggtcttacaaatggaaccccaaatgagctcgactaacaacttctactgaggacccctggaccgacccactggccctttaactggcttaaagagtttccctctggaggacactacaactgcagggccccttctttgccccatccactaggaagtagctagagcagtcatcrcccaattcccaacagcagttggggtgtcctgtttagaagggggattaagag

SEQ ID NO: 944652 - DNA, 552 bp, Homo sapiens
gttatggatttttttttttttttgagacagagtcttactctgtcacccaggctggagtgcagtggcatgatctccacttactgcagcctcgtcctcccaggctcaagagatcctcctgcctcagcctgccaagtagcagggactacagtggggcaccaccatgcccagctaatttttgcattttttgtagagacagggtctggctatgttgctgatgccggtctcctgagcttaagcaatcctcccacctcagcctccaaaagtgctaggattacaggcatgagccaccacacccggccagattccttaaagacaggatctatatgctattgatatttggaccctcccactaacacaaagcaagctatcagtacactcttttgctttccactaggactgaaaatttcatttctttaaaaacaaaaatgttttatagcagttaggatgataaggtaattggaaagattgttaggagttaaaaaaataaaatcaatattgatttcctagagcaagaattcttaycttgggcctgtgtaagtttactatataaga

SEQ ID NO: 944653 - DNA, 609 bp, Homo sapiens
tctgagcagggtgcccacgtgtcccgggggcagtagcggccctccttcccacactgaccacaacagagggaggaaaatgctccagatgtcargtagccagaaatactgtctggcacggagaaactggtaatatcttgttcagttactgagcgctgctggtcacagaggcagcctgacccaggataaaaggctccttgtgtgagggcctgtggctccagggctaactgctgatttattctcttgtaaagcaatcgctgtgtaggtaaaataccttttacatttgtcttataactatactaaatacagttttgggcaaacaaaaattgcctttgcaattctaacgtctctgaactgtgcatatgcttctctgaaattgaaatagaatacttatactactgagagaatgcacaagaaaatggaagtggctgggcatggtggctcatgcctgtaatcccagcactttgggaggctgaggcgggcagatcacgaggtcaagagatcgagaccatcctggccaacatggtgaaaccccgtctctactaaaaatacaaaaattagctgggtgtgatggcacgcgcctgtagtcccagctactcaggaggctgaggc

SEQ ID NO: 944654 - DNA, 543 bp, Homo sapiens
cgatgttaaggatatcatcataaatggcaaacatatattctgctgtgtatcaattgcccttcagttttatttatgatggtttttgacataagttgttactgttttttrtgtgttataatcaagtttgacagacttttcctttatgttttctgcatttggtgtcatgcttagaaaacccttctccatccctagtttctaaaattgttcacccatgttttcagtgtccttatggtttatttttacataaaattaaaaaaaaactagaattaattttggggtatggtatgggctaagattctaacaaatttttcccagatgggtatcatgttgtctcaacataatgatgattgattaaaaatgccatatactacattgacttttatagatctatgtcaatttctggaaattttattctgttccatcaatgtgtatgcctttgctacacatcactacagtgttttattacgtctttataatatagtttcctatctattttaatgaatctctcttcttcttaaaactttggtcaaacttgtgttttcc

SEQ ID NO: 944655 - DNA, 455 bp, Homo sapiens
gcagacaacctgtcacacaggtttctttgtttaaaacttctagggtattgttggaattcagcaaagcccaggtaaactgtgccaaccaacggactgagccaagaaacggagatccccacaccacaggcctmactctccctccatggcctcaacaccagcacacacctgcactgtgaggcacctgcagagccccttcctgcccaggcagcctctggaactcaagatggtgtccacgtgcaggagccgcatccccaggcgcccagccccctggacttacagcagcctgtagagagcacctcaggccagcagccttctagtactgtcagcgagacagccagagaagtgggccaagggaatggcctgcagaaggcccaggctcatgacggagctggtctgaagctggtagtttcctcacccaccagtccggtgagtggtgcaagccgttcagggggcgg

SEQ ID NO: 944656 - DNA, 455 bp, Homo sapiens
gcagacaacctgtcacacaggtttctttgtttaaaacttctagggtattgttggaattcagcaaagcccaggtaaactgtgccaaccaacggactgagccaagaaacggagatccccacaccacaggcctarctctccctccatggcctcaacaccagcacacacctgcactgtgaggcacctgcagagccccttcctgcccaggcagcctctggaactcaagatggtgtccacgtgcaggagccgcatccccaggcgcccagccccctggacttacagcagcctgtagagagcacctcaggccagcagccttctagtactgtcagcgagacagccagagaagtgggccaagggaatggcctgcagaaggcccaggctcatgacggagctggtctgaagctggtagtttcctcacccaccagtccggtgagtggtgcaagccgttcagggggcgg

SEQ ID NO: 944657 - DNA, 554 bp, Homo sapiens
gcagtcaaggcactctgattttcagccaggacacagaaagaaagtgggggaactgaggggayctacactctgttaaagaaaaaatttatcactacacttgttaaaatggcaaggaagattttattcaagactattgcagtaaggtaagggtcaactctattgtaataggatagagagattggactcaactccagtaaacaaggataagtagagatttatagccaaggagcagggtgaggaggtgagtgaatggaaaattacttagaaaagacatcaaaggtagggagatacttgctaagccaagctaacaggattcttgctaaaggcagatcaaggacttatacatcaatggtgggggttaaagaacttgatcagataccaaggatgattagatatcaaaggtggagggattcttgccaaactgacttagcagaattcttgctaagattgggcaatgcaggcccagccaaggacagaataggcacaaaagcccaaggtcaaggtttagttgagaagagggctcagaggagtctaactaaattttgttgaaggag

SEQ ID NO: 944658 - DNA, 539 bp, Homo sapiens
agggatttgtctggtctgagccatcagtggagcttggtcaaggttagttacagactccaacctcaaccttcctattcactcgtagagtcccttctatcaagttggaagaagagacctcacagagaactaacagaacaataactcaatagagccagttttactaagtccagcattggtcccaggaatgctggtcaacgttataaagtcccaattttactaaacactgtttttgcctcctgtcaatctgacgacttgaatttttttaaatattatgattctcttttttaatgagtcaagagtaaagctcaagctacccaatcaactaattaaaatttatcctccctatcaccactacatacacatatagtggcactatttatacaacttccatcctttatttttttycatgacaccaccatctgctacacggtactcataattacatgttttactaatgtattcctttattatctgtctctccccactaaaatataagctccaagagggcagaaacttttctctattttgttcactgctat

SEQ ID NO: 944659 - DNA, 624 bp, Homo sapiens
ttcctaaacaagcacaaaaagcaccaactacaaaccaactacaaagaaaaaaactcaataggctgtaatgtattaaaattaaaaattgttcatcacaaggcatcattaagtgaatgcaaaaacacaagccacagagtggggaagggatctgcaatagatattgctggcaaagaacacatattcagcacacaaagcagaactcctgcaagccaattagaaaaagttagacatcttaattgaaaatgagcaaaagtacttgaataggcacatagtatatctaaatagtaaacctaagtaaggtgcatcacttcattagtcattagatgaatgcagattaaatctataaggccccattgctctaagtaaagtgaaaaagacaaacaatgccaagtcaaggtacaagaactctgttatgccactggtgggattggtaactgacacaatcactatggctaatggtttagtactatctaccaaagatgaacatcaatgtagcataacacccagcaattttattcctagayatatagagagacaaaatgtgtgtatgtgtttataaaactgtagaaacattttaatggcaaccctgtttgtaaaggtctcaaactggatgttatgaaaagt

SEQ ID NO: 944660 - DNA, 612 bp, Homo sapiens
tctgcatgcatcaatgggggctgagggcaggaacacccagtctggctccatccctgctagtgtccaagcatgctgttcagtggtctggggatcacccagccccggctaccactactggtatctaaccactccttctaggatcctgatgtcacacccaaccaacctgtcattaccaccatagctggtacccacctgcatacactacttgcaggactggggaatggcctacctagccaggtgtagttaccaccaacaccagcacagatcacttgagtgccagagggtcatcccaccactgctagtgatatcacccacacccactgcctagggacctaacaaccaacccacatgcttggcccaccactgccatccctggaactcgagcaacctggaagcccaagaataagcttgcttggccccactaacactgatgccagcatacaccaccctgaggcccaagtacaggcatgattggtccaccactgccactactggggcccaagaactggcctacctggaatgcctgtctccaataaaactttaccatagcctccattaacaactacaccytaagccacggatgacaccacagacaccatgaccactgtttac

SEQ ID NO: 944661 - DNA, 599 bp, Homo sapiens
ctgcatgcatcaatgggggctgagggcaggaacacccagtctggctccatccctgctagtgtccaagcatgctgttcagtggtctggggatcacccagccccggctaccactactggtatctaaccactccttctaggatcctgatgtcacacccaaccaacctgtcattaccaccatagctggtacccacctgcatacactacttgcaggactggggaatggcctacctagccaggtgtagttaccaccaacaccagcacagatcacttgagtgccagagggtcatcccaccactgctagtgatatcacccacacccactgcctagggacctaacaaccaacccacatgcttggcccaccactgccatccctggaactcgagcaacctggaagcccaagaataagcttgcttggccccactaacactgatgccagcatacaccaccctgaggcccaagtacaggcatgattggtccaccactgccactactggggcccaagaactggcctacctggaatgcctgtctccaataaaactttaccatagcctccattaacaactacaccctaagccackgatgacaccacagacaccatg

SEQ ID NO: 944662 - DNA, 645 bp, Homo sapiens
aatgtaaatgacgagttaatgggtgcagcacaccaacatggcacatgtatacatatgtaacaaacctgcacgttgtgcacatgtaccctagaacctaaagtataataaaatatatatatatataaagacatcctgagtttaatacttcaaaacagtttttcagttatctttttccgcatatagttttgtgggtttggtttttggtttttggtttttttagagccataaccatacagtataagcaggtgctgctcctctctgttcaacattatgttggaagtgtcatttccttgatccaacgtactctccatatccatcattttaacgattgcataatatttccatcaaacagacatataatttacttatcatctctctattgttgaacacttgaattgctttatctgtttttgctattataaataatattctgctgaacatctttgtacatagagctttgagattattttattaggctaattttaattctttccttacgctggtttctggaaaggtgagatgactgcatcaggggtaatgagcatttgcaagkctcttgaaaaaaaatattgccaaatgtattttcccaaagattttcatgtaaaaaagagaagagagagtaggggccgaaaggaagatagatgg

SEQ ID NO: 944663 - DNA, 619 bp, Homo sapiens
acatactgaagcagtctatggagaggccacatggtaaggaactgagggttcccagcaaccatgggagtgaactttggagtagatcttctgaagcagccaaaaggcacacgagtgagcttggaattggaccatctctcagttgagtcctaagaagaccatagcccagccaacagtttgactgcaacctcttgaatgatttcaagccagaaccacctagctaagccactcttaaattccttacccaaagaaactgtgagataacaaaagtttattgttttaagttgctgagttggggtaatttgctatgcaaagatattgagagaaccaatattattcaaataatcaatgcatgatgttataaaattatgcattagtaaatgagccaaagtggaggatagatttataaattttaatgtaacagaacataaaaagttcactgatatggtatttaggttgcacctaatctttaagaaattaccgttttgttttgttttgtttcayttggagacagggtcttgctctgtcccctggcttggagtgcagtggtgcaatcctagctcttagttcactgcaactttggactcctagactcagtgctgctcccatctcagccacctgc

SEQ ID NO: 944664 - DNA, 641 bp, Homo sapiens
ggccaggagacagtcctgggatagggaaagaaaagaggggcttccgggggtggggagcggggctgggcggctgctggctgagccaagtggactgggaggtgtggacagggaaccctggcggggccggccaatggtggcgtgatgcagcctggcttgggaaatgcccatggaggtgacaagtgacagccgggaacagacccactgccagggctgcctctctctttagatatgtcctggcatctgactttggtttcctggtgtttaaaggctaattgggatcggtcgtggtgcctcaggcctgtcaatccagtacactgggaggccaaagtgggaggattgcttgagcctaggagttcgagaccagcctgggcaacatagcaagaccccatctctaaaaaaaaaaattaaaatattaatactagctgggtgtgctggcacatacctgtggtcccaactactcgggaggctgaggtaggagcatcacttgagcccaggagttcaaggttgcagcaagctatgatcttgccactgcrctccagcctgagtgacagaacgagaccctgtgtctaaaaaaaaaaaatttttaaataaataaataaaggtttgttggacatgttagctcacgcctgcaatctcagcat

SEQ ID NO: 944665 - DNA, 686 bp, Homo sapiens
cttctgcacagcaaaagaaactatcaacagagtaaacagacaacctacagaatgggagaaaatatttgcatctatgcatctgacaaaggtctaatatccagaatctataaggaactcaaacaattcaacaagaaaaaaataaataaccccgtaaaaattgctcaaaggagatgaacagatgcttctcaaaggaagacatccatgcggtcaacaagcatataaaagaaagctcaacatcactaatcattagagaaatgcaaatcaaaaccatagtgagataccatctcacaccagtcagaatggcctttgttaaaatatcaaaaaacaatacatgctggcaagagtgagcagaacagggaacgcttatacactgtgggtgggaatgtaaattagtccagccactgtggaaagcagtttggagatttcccaaagaactcaaaacagaagttccatttgacccagcaattccattaattcctggatacatatacaaaagaaaaatcattctaccaaaaagacacctgcacttccatgttcatcgcagcactattcacaataacaaagacctggaattaacccaaggtgcccawcagtggtagactgggtaaagaaaatgtggtatatacacaccatggaatactatgcagccatgaaaaagaataaaaccatgtcatctgcagcaacat

SEQ ID NO: 944666 - DNA, 407 bp, Homo sapiens
cgggtttcttaatttataagtatatgtggattttctattaactatctgttactgatttctaccttaacttcattgttgtcagagaatgtattctatatgatttcaatacttaaaaaatatgagatttgccttatgacctggtatatcagcaacttttgtaaatattccatgtgtgcttgaaaagcatgagtttctgcagttgttgggtatggtgttctaaatatgtctgtgatggcaatgaaaacgcgccactcagctcttctgctaaatatgcrtagagtggtcatgaacgtgtgcaactcagctctcctgctatggggtgcacagttgactggcagccctaaccactattcctttggatcccacaatgcatttgtgctgagaccactcttcctctgagctgcttc

SEQ ID NO: 944667 - DNA, 653 bp, Homo sapiens
gtgccacacttgtacagtctacagaactgtgagccaaacctcttttcttttctttttctttttttgagacggattctcgctctgtcacccaggctggagtgcggtggcacgatcttggctcactgcaacctcagcctctccagttcaagcaattcttctgcctcagcctcccaagtagctgggattacaggcgtgcaccaccacacccagctaatttttgtgtttttagtagcgacagggtttcaccatgttggccaggttggtcccgaactcctgacctcagatgatccacctgcctcagcctcccaaagtactgggattacaggtgtgagccactgcaccccgccttaaacctcttttctttataaattacccagcctcagatattcctttatagcaatgcaaaatggactaacacattgctcctccccacactccatttcaggcctccccttagacaaggtcaggcctccttgagatgctctcacaaggactacatgcaattctgctatcacacctatcacagattaacatctttgcatttatttaggtgattatttgactaataatagatgttcctyttatgtaagtactccatacaggcagagaccatgtctatttcttacccacaattttatctggcatagtgcctg

SEQ ID NO: 944668 - DNA, 474 bp, Homo sapiens
cttattacaaaacagaaatcaaagctacaaacaaaaatggttttacttgtaaaatttatcaaaggttgaatgattaaataataccaccttatataattatttcacaaaatacaacgaataaaactgtatgtttgtgttatgagttcagaataaactttacaacaaacaaagcctgatgatgttatggaaaagagaaaagcacaaatagatcattatcagtcatgaatgtagatgaaaaaatgctaaatagaatgttagcacataaacagaacaatatataaaaatgataaaacctgaggatcaaatatgttttatcttaggaatgcaaaagtggctaaaattttgaaaataaattatcgtaatttactatattaacaactaaagataaaaaatatgtaatcacttcagtagktgcagaaaaagcatttaatgaaatttttaataaaaagttgcagcaaaatataaatgattgga

SEQ ID NO: 944669 - DNA, 631 bp, Homo sapiens
ttttagctcactttttgaagggattatttgtttttttttttttcttgctgatttgtttgagctccttgtagattccggatgctagtcctttgttggatgcatagcttgcaaatactttctcccaccctgtgggttgtctgtttactcttcttattatttcttttgctttgcagaagctttttagtttaattaggacccatttatttgtttttgtttttgtcacatttgcgtttagggtcttagtcctgaatttctgcctaagccaatgccagaagaagagtttttccaatgttatcttctaggatttttatggtttcatgtcttagatttaagtctttgatccattgggagttaatgttttttataaggtaagaaatggggacccagtttcattcttctacatgtggcttgccagttttcccagcaccattattgcatagggtgtcctttctccaatttatgtctttatatgctttgtcaaatatcagttggctgtaattatttggctttatttttgggtwctctgttctgttctattggtctatgtgcccatttttataccagtaccatgctgttttggtaactataaccttgtagtataatttgaagtattgtaatgtgatgcctctag

SEQ ID NO: 944670 - DNA, 557 bp, Homo sapiens
agtgtcaggttgtaggtccttggtcttttctctcttgccttggtacctgcagggtgctgaccagtgctatcatatcccctccccgtttcctaggaccctcttctcggtagactccaacagggcctgccttccttgggcagcatggcaggcctcttggctagtctagtacccacttcttttttttttttttttttttttggatggagcctcactctgtctcccaggctggagtgcactggcgcaatcttagctcactgcaacctctgcctcctgggttcaagcaattctcctggcccagcctcccaagtagctgggattacaggcatgcatcaccatgtccagctatttttttgtatttttagtagaaacagggtttcagcatgttggccaggctggtctcaaactcccgacctcaggtgatctgcctacttcagcctcccaaaatgctggaattacaggcatgacccaccacgcctagtcaggtacccacttyttaactgaaacttagctattccaggttctatcccttttaaaccaactctttgaagagaggtcta

SEQ ID NO: 944671 - DNA, 553 bp, Homo sapiens
aaataattgggggactgtaagttttggagggagcrttgacaaggcttcctatggagaacaatcccattccactaggggtgctgtaaaattagaaatcctaggtaaaaactccaactttatatttttaggcaaaagttagaaggaggtttgggttttgataggctgttcctatagcatatgccccagaacaaacaaaaatgaacttgtctcataaaggaactgtttagattcattggatagtgctgagctttcacatggagagaaaaaaacaaatcaaatgcaaaggagggtatttactcagggtgaaatattctctcatacagtgccatgaatgtttattactgtattactgtgggagagaaaggcccttactgagtaaaaatttagagatattttgaattcgccctgttgctaggaaattataaaacaacaactctgagttacatatctgatgactaagacactgactgactttactcagcatgattatatccataggctgtaaaaacattcacaacattgcatacaaagaatgaataggagaaattatagg

SEQ ID NO: 944672 - DNA, 600 bp, Homo sapiens
tgtggggataaggcactaacctgggggttgggggctctccataaacccttgccttgctatctacctaaggcaagctagctaatgtctctcaatgctagtaaggttaagttccttaacacattgaaaacatgctttagttttaccttagcttggaaagccaaatttggtcaaaagtaaatataacaatatacttccatataaatcattttggaattgaattcaaattattaaataaaatattaaatttgatatatgtatttgaccatcaaatttttttaaaaagttgaatagatagtgtggtgaaggtgaaacatgagagatatacatgcttttatgataaattattttgtggtcatttaaattttcaatttagcagtgttgactgtgtttaaaatgtgaatattgacatgtaagagaaaaaatgttgataacaaaaaatacaaaacaaagcatgatagtgtgaatggcttttctgaaacctcagttgttgccttagtttcaaaaaaawttaaacaagagacaaacacaaagaagatgcagcataaagtaatttattgcaaaggagtaagtctattttaaaggttaggtgcagaataccca

SEQ ID NO: 944673 - DNA, 590 bp, Homo sapiens
ttagtcaacctaaatatgttatgtttaatacatcagtttctactttatacttatagataatcatgaaaataaccagaggaaaaatgattctaatattcatgcagttaaaaacaaaacaaaaattaagtgatataatagtactttgacaaattatcaaatctatagacttttaataaggagtaatgtatctcactttaccacagtaaaagattgtaagtttgcatttgtcttaggacatcaaaagcttttacttttttaaaattgaactcataggttactatttacttccaatttttgaaaatctcagagcacagaacactccacacacacaaaaaaagttagtatttttatcttttctctgtaagatccccttcagaatctaagtaaggttcttttctgccaaaggaagataggctttacctataaaaatgtttaagttgatttttcttataatatcaggatctatgagatgctaaatttgccatagttcctgtcccttttgctattccaagcaatgttttcaaactaacaaactatggatttagcttatgctcagcratgtccaaatagtatgaacagtcattttatct

SEQ ID NO: 944674 - DNA, 672 bp, Homo sapiens
atgttaggtgagctggaatgtctatatggtcccagtgtgagtgagtgagtgtgggggtgtgtgagtgkccctgccatgggatgacatcctgtccagggctggttcccacctggtgccctgagtttccagggtagtgtgcagccacccgggagcctgaactggaatcagtgggttagaaaaggaatgaatgagtgaatacaaactattgtcaaataaaaatttgtaaattagacgataatcatacaaatgcacgacactgaacattgcactacaaaagcccttctcaagcctgccagatctgtcattgcttttgaactgtgtggtggtaggaggtgctgcttaagattttctgctttgtacacatttatttctcaatttaacctgccccctctatgcccaccatttctcactaatgcaccaaaaattgagtaaataattatcttgtttttattaaccttttaaaatgtatatgtagctcacatttatttcagtgtttaatattagaggtgtttgaggcctttatttagaagtttgatgatgtttttgtgaccaggaacatgccataggaacttcactcttgtttatatcaattagtcagtggtaaaactggtttcttcatatgttgttttgcttaaagtcacagtttgcaagtttatcgattacatcgaggac

SEQ ID NO: 944675 - DNA, 622 bp, Homo sapiens
gcaaaatttacattattcatttgtaatgaaataggtattgctgtctctaagccagacctgatcatctgtctggagcaaaaaaaagagccctgaaatatgaagagacatgagatggtggatgaacacccaggtaggtgagagtgaaggtgaatacaatgtttaacacaaatgagaggtctaaaaattaaggagaaagccagttgttaaaatatgagttggaaagctgtgttttataggaaatagtttctgggaagcctaagggttttttgtttgtttgttttgttttgttttatctcaaatttggacatcttctgttttatgcttttaaattttctaaggattctgctttctttttagtgatcttctttcaagttttcagtgcgagccactaccctgttcatggcatataaaaaactgcacagtctgactacttttacattctttttgggaacacacaaatctgcataattttaagaaactctgtgttaaacaattttttaagttttctttttgtatcatgtgtaaaatgtgaattgtagtttctgttccttttttttggttcatttttctgcacatttcatcttgtttatattactayagtcttcaaatatagtttgaagtt

SEQ ID NO: 944676 - DNA, 445 bp, Homo sapiens
tggaaaatacctggacttctatggaagatcactaagggtggtaactatcactgaggagccaaaggccatttgtagtcaagtttggagaataatgtaggtaattcagctcccagaaccccttaaagtaaaaaccacacagcaaaaacttacccaaaacaaataaggtgaagctaaatagaatctcagcctttcatgagatttgaaattatctttgaaggccatgccaaaaaagcagctgaaaacatattttgagcaatggtagagtcattgaaacaggtcaggtaaacatcccccagtgtggtactttttaaaaagacaacattcatttattttatttctctagagacagggtctcgtcctgttgcccagrctggagtgcagtggcagtcatagctcattgcagcctctaactcttgggctcaagtgattctcccacctcgtcctc

SEQ ID NO: 944677 - DNA, 611 bp, Homo sapiens
caaaaatcctcaacaaaatactagcaaaccaaattcaacagcacatcaaaaagttaatcacaatgatcaagtaggcttcattccygcgaggctaggttggtttgatatgagcaaatcaatgtgattccccacataaccagaattttttgaaaaaggtataatcatccaatagacatggaaaaagcttttgatacaatccaacatcccttcatattcaaaaaccctcaagactaggcattgaaggaacatgccccaaaataataagagccatctatgacaaacccacagcctacatactgagtgggcaaaagctggaagcattcccttgagaattggaacaaggcaaggatgtctactcttaccactcctgtttaacatagtagtagaaggccttgccagagcaatcaggaaagataaaaaaacaaaaaagggcattcaaataggaaaatacatcaacgtatctctttttgctgatgatatgattctatacctagaaaatcctaaagactccacccaaaggctcctggaactaataagggacttcagtaaagtttcaggatacaaaatcatgtataaaaatcagtagcatttctgtacaccaataatgtttc

SEQ ID NO: 944678 - DNA, 578 bp, Homo sapiens
acaggtgtgcaccacaacacctggctaatttttgtattttttgtagagacagggtttcgccacgttgcccagactggcytcaaactcctggcctcaaatgatctacctgtctcagcctctcaaagtgctgggattacaggcgtgagccaccgtgcctggcctaaaatagtaatgtaactttccattttaggatgtatatgaataacattacttaccttttattcccagaaaatcattcttttctcaagaagaaaatcattgtctcaagaatataagatgatggttctgaaaaagcttctctgtttttggaaagagcattgatttgttccaactccttatatctgtaggcagtcattccttggatggttttattagaatgtataagagccttgaatttagctatattttttttaaattatgtgtttcttgtgtttccgctgtcattcagacaactactgagctatttcatagcaatgaagaaagtggattttttaatgaactcgaggctcttagagctgaatcagtggctaccaaagcagaacttgccagttataaagaaaaggctgaaaaacttcaag

SEQ ID NO: 944679 - DNA, 623 bp, Homo sapiens
cctcgatccaagtaaccttgtggtatgagccccatttggcctttgttacwagcaggtttttagaggcaaaaaagacaatgagcgggctgatacaaagttattttttaggaatcctcatcggtttacagaaatgacaatgattagtgattatctatacattgtgaactagagtgtatgggccacagtgtccagcatgtggcattcttaggttaatttacagctatttgtggtgacagtctagagtgcatacagcaagcagcttcaagcggggaagcagattgtgactgctgcctcattcccatttctctctgggactgataattccaaatggttggaattcctcagataaatttttttctttcttaaaattaatgtttttatgcttgctaacacaacatccactctgtagcctatgtaatttcaactatcaagccctactatttaatgaaatacatttcataaatttataatgccatagatagtgatttctttgatggatccgggaaaggtaaattgaacaccttctccaaagaattaattattctagatgccattaagaatattcatgtttcatagaaagaggttgaaatatcaatattaacagaagtttaaataagttgttt

SEQ ID NO: 944680 - DNA, 737 bp, Homo sapiens
gtggggcgggggccggggcccgcgtgggattaactaggaccggggcgggagtcgrccgcggccggcggggagggctagccccgctctggcgggcgggcgcgtggcaggggctcccggaggccccgagctcccgggaggcgctccggccaacttcgggccggtggggaccgggcctgggcgcggggctctgaaggtgtggaaggaaagtttgggactccgttattcttccacagcgtccttcctcccgtaatatccagcctctttatcgcggggctcgggagcccttggagttgatctcgccaccattatccccccgggcgagcgcggaggacgggctggccattctggccaggccggaggtgttttccagcccggggctttgtgataactgggccgaaacccgagggtcctggagcgcggcgggtggcgggagcttgcggagcgcggcgcactcggcggccaggcatcggccagcccagcggcagccccctttctcctatttttatttttatttttggaaggagctgagaattagtcgattggttggcaggttgaattgccttctcttctatggcaatatgtgtcgtgacttttcaccttttgcctttggacaaaggtgaatggcaactgcgttggtcagtttttgttttctgttctgcggatgggttcgccgacgcagtaatcaaaattagagccactcttttggaagagcaaatcgttgttgttgcctccccagc

SEQ ID NO: 944681 - DNA, 737 bp, Homo sapiens
gtggggcgggggccggggcccgcgtgggattaactaggaccggggcgggagtcgaccgcggccggcggggagggctagccccgctctggcgggcgggcgcgtggcaggggctcccggaggccccragctcccgggaggcgctccggccaacttcgggccggtggggaccgggcctgggcgcggggctctgaaggtgtggaaggaaagtttgggactccgttattcttccacagcgtccttcctcccgtaatatccagcctctttatcgcggggctcgggagcccttggagttgatctcgccaccattatccccccgggcgagcgcggaggacgggctggccattctggccaggccggaggtgttttccagcccggggctttgtgataactgggccgaaacccgagggtcctggagcgcggcgggtggcgggagcttgcggagcgcggcgcactcggcggccaggcatcggccagcccagcggcagccccctttctcctatttttatttttatttttggaaggagctgagaattagtcgattggttggcaggttgaattgccttctcttctatggcaatatgtgtcgtgacttttcaccttttgcctttggacaaaggtgaatggcaactgcgttggtcagtttttgttttctgttctgcggatgggttcgccgacgcagtaatcaaaattagagccactcttttggaagagcaaatcgttgttgttgcctccccagc

SEQ ID NO: 944682 - DNA, 750 bp, Homo sapiens
gcacctgagaaactagagtacctaccctgggtaacataaggcaagcacaaatcctattgctactactgccactggtgctgttttgtaagcaccacatcctggccagaggccaactgacatagtccattacagaatctccaggtagaataacactgtgcccagaaaggagaaatcttgtgcatgaccccatctatcaccatggtctgcaccactctggctaaccaggtgggtcttgagtctattcatgtgaccagttcgttactactacaaccagtatttgagaaagccaacaaactaaggctatctataaccaagaaatctcacacagtcaatgtcactcttctaccaccccatcagagctggtactggtatctgctgctgggagagttgaggacagggaacatcactggattccttgcagtcactccccagcatgactctggagtatgtcagccccactgagtgactagacccagaggagcaacaacattcacagtattctgggtctcagggactcctactcctaggagaaggaggagtgcactaaatcaagggaacaccccatgggacaaagagcctagacagcaggcattgagtcccagatctttccactggtaggaagtttctttcaacagyggcacagttgaagtcctggcccacgaggaaaagtctacaggtacaggcaacagtcaggcagccctggtgctcatgaaggatcttggagaaggggacttcttttccttctcatcc

SEQ ID NO: 944683 - DNA, 608 bp, Homo sapiens
attttataaattatttgtgcaaatgyttaggtttttaacagaaaattaaaaggcatttggatgtatttaattcactttcccagaaaatataacattttatttacatcatacagagtaacaataaatatcacttatgtatatgtatatatgcatgctcatttatccattgattgatctgtcaagctattgatccatgaatccatcccttttgtcttttgtatgaagtgtaagagaggaagtcttccagggtgatgtatagaaaagcataatgagaatcagggaatacaagagtatagataaacaacaagataatttccttgcagactatatgatatggtttggttctgtgtccccacccaaatctcatttcaaattgtaatccccacgtgtcgagggagggacctggtgggaggcaactggatcatgagagtggttcccccatgctgttcttgtgctagtgagggaattctcacgagatctgatggtttttaaagtggctgtttcccctgtgctctctctctctcctgctgccttgtgaagaaggtacctgcttacccttcaccttctgctatgattgtaagtttcctgaggacttcccagccatgtgg

SEQ ID NO: 944684 - DNA, 671 bp, Homo sapiens
tctcacgttccaggagttcccaaataggaccaagaaaaccagaccaggcacactggggccctcaactttgacgcagagagatttctcctagtcataccacgcaaaacgagtggcatcagaaagacccccccagacggtgtcactccagggaaatttttgtcccaagtgttgagatcaaacaaaaccatcatgcccaaaactctttaaattcttctcagcactgagaagaaaaaaactacttttaaatcctcacaattgaatgcatcaacgggccacttagttctcatgagtcaggctgctcgaagagcgagcaggaaaaacaaagctgcaagggtgcctcagcaccaaagttagtccacgtttcctccaaagacatgaccatggccatatacttctgagtaactatgcagattgtttttgagacatgcaggataaaaacaagacctggttctcttgtgggtatctttgaagtccccaactttccaaagatcttctatagcaatgggtcccaaatacgcctccgccaagggttctccctgtttccctaaactatttcccaacacaccttgcatctcccaaaccaaataccagcataggtaagtcaaactgtagcccaagaaaccgagatagacaraaggagcaaaatcctaggagcaaacattttgggggag

SEQ ID NO: 944685 - DNA, 559 bp, Homo sapiens
agggccaaggagagtctgagcttagacacgcctaaccctgcccccatctgatgacctttcactaccttccctggtagggargacaaaggacatactctcttgagagctgtatggctccacccactgcctgactctagggcaagcttgtatcctccctatacaaccacagttgatgcactcttgaaagtgccacctcctggctggaggccaacgaacacaaaaccggtgcactaaacaaaaacacaagcaaggaccctcactgagtccacttcattcccctgctacctccactggagtaggtgctggtatccatggctgagaagcctgaagatggatcacatcacaggactccgtgcagacactccccagtaccaacctggagcccagtagctctgctgggtggctaaatcaagaagagcaataacaatcactgcagtctggctctcaggaagccccattcctaggggaagggggagagcctcacatcaagggagcacctatgggacaaaagaacctgaacagcagatctgagtcctagatcctccctctgacatagtct

SEQ ID NO: 944686 - DNA, 480 bp, Homo sapiens
cccattactattgtgtaggagtctaagtctctttgtaggtctctaaggacttcctttatgaatctgggtgctcctgtattaggttcatatatatttaggatagttagctcttcttgttgaattgatccctttaccattatgtaatagcctcccttgtctcttttgatctttgttcttttaaagtctgttttattagagactaggattgcaacccctgctcccctttgttttccatttgcttggcagatcttcctccatccccttattttgagcctatgtgtgtctctgcacatgagataggtctcctgaatacagcacactgatgggtcttgactctttatccaatctttatctttacctttacctttatgtttatctttatctttctctttgccagtctgtatcttttaattggagcattyagcccatttacatttaaggttaatattgttatgtgtgaatttgatcctgtcattacaa

SEQ ID NO: 944687 - DNA, 618 bp, Homo sapiens
aattctcttttatctggtataargtgaaggaatccacctccagtctgagattttctaattttgcaatctgggcagaatcactctctttgctcaccgccccacagtaagcaattacgtactttgaggactcttcttttctcctcactagtcctgatagggaggatagagaagagaaaatcatcaggatccacccaaaatatctgggaacctgttgttattcaccctccaacccagctaggttggattgcctttctgctgtttcctcaccatttgtcactgatgctgggttggtgctgctgttttttctccttactgtaggaaataattctcgcagggcaatgtgaagaaaggcagaaattacaacttaaaagttcttctttaagttcctgctgtttttgcagccagttcttttcgtatctaaattgttcttccctccatatatattagcttatgtctttctaagagtaatcagtattttattttctgtttctcagaatcaaccagactagcatttgtgtcacatatacagaattatattaaggggaagaagacagccatactcattaatttgtcaaaaactgagagaggtttttcaagtgatcttattttacccttata

SEQ ID NO: 944688 - DNA, 583 bp, Homo sapiens
atcacacatttttgccaatgagaaataagtttgcttattcctatagcataaaaatccatgcttcaggatttgacaaactcttggaaagaattttctgcatcctgctggttgtggaagcgttttacctgcaaaaagttgtggagatgcttgaagaagtggtagtctgttgatgagaggtcaggtgaatatgaaggatgagccaaaacttggtagcccaatgcattgaacttttgaagcattggttgtgcgacgtgtggttgggcgttgtcatggagaagaattgggccctttctattgaccaatgccagttgcaggtgtggcagtttttggtgcatctcatagatttgctgagcatagtcctcagatataatggtttcaccaggattcagaaagctgtagcggatcagaccatcagcagactaccagtgaccatgaccttctttttggtgcaagtttggatttgggaagtgctttggagcttcttcccggtccagccacagagctggtcatcactggttgtcatataaaacccacttttcgtcacacgtcasaatcctatcaagacatggtccatcgttgttgc

SEQ ID NO: 944689 - DNA, 606 bp, Homo sapiens
gaggcaagagaaaaggaaactgaaggagaagaaaaagaagaacctccaagaaaattcgcagcaaagggtttagcagaagcttttgcagagcttaaaatctccttaaaaagtttgaaaacatgggccctaacactgaaagattttcatttatagagaggaatgttcatggtgcattatctgcttccaagcaaatctgtaatgaaaaccaggaacaaaccaaacaaaccatcatgaacatctttctgaagagtcacacctcctcaagaagatccccagccaggttctttaggaggtattccagagaagacattcttgtcatagaaggtgacagctctatgtgtgtttattgcttgtgaagactttccagtggtacaagatgtggagatagaaaacagagatattgattattctgtaggcctaggctaatacgggtgtttatgttctagtttttaacacaaaaatttcaaaaagtaaaaaacaattctaaggatataaaaaatatttctgtatagctgtataatgtgttttaagctatattattaaaaaagagtcaaaaagttggaaaaattaaaatgtttwtgtagtaaaaaatttacaataagctaa

SEQ ID NO: 944690 - DNA, 761 bp, Homo sapiens
aattatctggttataaatagctttagtgtattgggtttatcaaatgctggttgtagtagtaataaactcatgtggacatactcctgattaaccatggtgctgcaggcaatggtgatagctgaggctatgctatcaggttttctccttcctgggtgctgtagtattctacctggagattctgtaatggactgtgtcaattggccccaagccaggagatggcttctgcaaaagagtgccagccacagtggtagtagtgagacttgtgcctgccttatgttaccatgaggaggtactctggtgactcaggcaatgggtggggccctagaagtcccaaaagtttctgtcctttgtgttaaactaccagatcaggtagaggagcaaagccaagtggaacctgggtcagacaaatttgtgctctggctctccatgtgcagggcaagcaatggccccagtgaatattggttgacagttctctggaaatttgggtaatattccacggaggagcaaaatggtctttgttgcacagaagagttcgtacatggggtggtgagtagcaggtggcagtaagccccactcagctcccagacacttggcaactcaggtctcacacctacagtattccactagcagcagctagctaatttccaggaagtctgcactcasaatgcaaaactgccccagaccataagcctttccacagagcaaccgcagctttcagaccacacccctcctggtctgcccatctagccagggcatccagc

SEQ ID NO: 944691 - DNA, 638 bp, Homo sapiens
tgcttgagcaaattaacatatctctgtgtacctggtatgcagtcattgacttgggaaatgcctgtttctacattcctgtccataaggcccaccagaagcaatttgccrtcagccggcatggtcagcaatatacctttactgtcctacttcaggggtatatcaactctctggctttgtgtcataatcttattcagagagaccttgatctcttttcgcttccacaagatatcacactgggtccattacgttgatggcattatgctgattggatccagtgagcaagaagtagcaagcacactggacttattggtgagacatttgcatgccagaggatgggaaataaatctgactaaaattcagggacttgctacctcagtaaaatttctaggagtccagtggtatggggcctgtagagatattccttctaaggtgaaggataagttgctgcatttggcccctcctacaaccaagaaagaggcacaacatctagtgagcccacttggattttggaggcaacacattcctcatttgggtgtgttactccagcccatttatcgagtgacctgaaaggctgccagttttgagtggggtccagaacagaagggtctgcaacaggtccaggttgctgtgcaagctgc

SEQ ID NO: 944692 - DNA, 338 bp, Homo sapiens
ccgtcagctacagcttagcaaagaaaatttctacctcccagagtccattcatctatcccagggaacaattctgattggctttccttggtaatgtgcctataatttggtccaatcactgtyactaggagaatggatactctgtgtttgtccaggtctacttcacgtgcttacccttaaggtcaggagtagagtctatcatgaacagaaggggagagagaaagcctgctgggaagaccaaaaacaaacaaataaaacaaaacaatacctaccagaggacactatcctgcttatcttctgattcacctcccagatctcatactaagtcctaagcagagaga

SEQ ID NO: 944693 - DNA, 632 bp, Homo sapiens
actcaagacacaagacaaagtccttcccacttttctctcctgtttcctcaagcaaaagagtctgtccttatggctaccactgcttcaggcccatagcaagtactgcctggctactgctgatgttcactcaaggyccaagggctcttcaatcagcttgtcagcttgtggtgaatgctgccaggcctgggtctctctcttcagggcagtgggctcccatctggcccagggcaggtccagaaatgccatcgaggagccaaggcctggaaccagagatctcaggagtccacttggtgctttacccgactgtggctgagctggtacccaagctgcaggacaaagttccctttactcttttatcttcttacctgaagcagaaggagtctctccccatagccaccacacctaggaatgtgctgggtcacccctgaagccaacatggaactgggtcccatctaaagtccacgacaagtactgcctggctaccactgctgattattcaggggcccaaggtctctttaatcatcaggtggtgaatcctgccagcactgggtctttcccttcaaggtagtggattcccttctgtcctagggtgtgtctagaaatgtcatctgggagttagggcctggaatggg

SEQ ID NO: 944694 - DNA, 613 bp, Homo sapiens
ccacgtataaatttgactcccaaaacgtaactgctaatgaamaatttgcaattgcaaaatcctggaaccaacccaaatgcccatcaatcaatgagtggataaagaaactgtggtatatttatatgatggaatgctactcagccataaaaaggaaggaaataatggtatttgcagtgacctggatgagattggagactattattctaagtgaagtaactcaggaatggaaaaccaaacatcacatgttctcactgatatgtgggagctaagctatgaggatgcaaaggcataagaatgatacaatggactttggggacttggggggaagagtgggaaagggggcaagagataaaagactaaaaatatggtacagtgtatactgctctggtggtgggtgcaccaaaatctcacaaatcactactaaagaacttactcatgtaaccaaacactacctgtatgccaataacttatggaaaaattttaaaaagtaaaaaaaaacatacttaactgctagtggcctactattgactggaagccttactgataacataagcagtattaacatgtattttgtatgttatacatattagatgctgtattcttacaataaaat

SEQ ID NO: 944695 - DNA, 799 bp, Homo sapiens
ttattcatctgagcggtgctagctgattcgtcacrtgcaaggtctgcaaaatatctcaagcactgatcttaagttttataatagtggtgttgtgtctagaattggtgggttcttggtctcactgacttcaagaaggaagccgcggaccctcgcagtgagtgttacagctcctaaggtggcgtctggagtttgttccttctgatgttcagatgtgttcgttgttttttccttctgatgggttcgtggtctcgctggctcaggagtgaagctgcagaccttcgcggtgagtgttacagctcttaaggtggcacgtctggagtttgtttcttctgatgttcggatgtgttcagagtttcttccttctggtgggttcgtggtctcgctggctcaggagtgaagctgcagaccttcggggtgagtgttacagctcttaaggcagagcgtctggagttgttcgttcttcccggtgggctcgtggtctcgttgggctcacgagtgaagctgcagatcttcgcagggagtgttacagctcataaaagcaacgtggacccaaagagtgagcagtagcaagatttattgcaaagaacaaagcttccacagtgtgaaaggggacccgagcaggttgccactgctggctccagcagcctgcttttattctcttatctggccccacccacatcctgctgattggtagagccgagtggcctgtggcagcctgcttttattctcttatctggccccacccacatcctgctgattgctagagccaagtggcctgttttgacagggcgctgattgg

SEQ ID NO: 944696 - DNA, 565 bp, Homo sapiens
gaatagacatttctctaaagaatatawacaaatggccagtaagcacacaaaaatatgttcagtatcattgcccatcagggaaatacaaattgaaaccacaataagacactactttatatccactggatggcaataatcagtaatatggagaatatcatgttggcaaagatgtggagaaattagaacctgcatactctgcttgttggaatgtaaaatggtaacagccactttggagaacagtctggcagtgcctcaaaaggttaaacatagagttactatctgacccagcaattccccttttaggtatttaccccagaaaaagaaaaacttatgtctgcacacaaatatgttgacgatgatcatagcagcattactcacagtagccaaaaagtgtaaacaagtccatcaagtgatgaatggataacatgaatagccatacaatgaaatattactctgacattaaaaagaacaatgtactgatctatgctacaacatgaataaaccttggaaatgtgctaagtgaaagaagccagtcacaaaagactacatattgtatgatcctatt

SEQ ID NO: 944697 - DNA, 570 bp, Homo sapiens
ctcaggcagcgggagaagcatatgaatttataatcagtcagattgaaacaatgttgtgccagactgtgtgtttgtaaccattsataacatcagacatagcagaataatccaggaccagtcatgtcccaggtttcttttgcccaggctgccacctggaaaatgtaccaatcaggctgacccggatttgctattaggggaaggaaagacataccatgtccatgattagtcagaatggagtcccaagctttcataacggatctatataactctgtactccttttgtactaattattactcagaagtaaccaaaaaggatgaccttttcttgagacagccaaatcaagtgaccaaattgccttactaaaatatgtagaccaggaaaatgtactggacaaagagtcagaaacacttttgagttagtttttgagaatgccattctagcactcagcaatactggatatagtaaggaatatggaatgtccatttaagtatttgactattatctcattgttagatgttctttgcaaatgattcagaaagcctaatgcatgacacaatttcactttaaag

SEQ ID NO: 944698 - DNA, 612 bp, Homo sapiens
aaattgttttaaactacaaacaaacaaacaaaaaacacatttcttttgggcttagcaattacaaactggccaatgtgtactaaatctatatcttagtaaagtgtttacctgtagatggtaaaattgcaaattgtttttattttcttttatgtgttttccaaatctgatgaaattagcgtgtatactcattttactcaagggataatcagaaaacaatcatttaaaaatttccatatggacaagctcctatggtaaagactaaatctaattaaatattctctgtatttgagatggttcctacaaagttggcatacttgtgatgcagtaacccataaaccaatgagttctttgctaaaaatgtattttatattctaataaaaatgcaattggtttcttgagaaagctttagagtggtaccctgagtaagatagaataaaaaagaaatccactgggccttctacaactataccccaaaacctggccagcatctctgtttygatgtaccgtgtttccatgtgccactttggcctttaaagagaaacatgaaaaatgagtgggaggtttctctaaaatcaaattataaaaatatataaaatattccataagcaacat

SEQ ID NO: 944699 - DNA, 729 bp, Homo sapiens
aataccagaccccgggagccagactgcagaagggcactctgtgtccccacagcctttaggcctaacgatgtccaccattaacccttcttagttttactctagtttctttggagaaaggggcattkaaaagttattcatgttgccacagtaaattcccattaattgactcttctccttatccccaaatcaacccagtagcccccaaactcggttcttcaaatgtgaaactgcccaagtctatcaatactgtttcttcaattttgattgtattttaatctctctctcctcttctcttactcctctttcttcctccttaaaaagaatgcttgcctctccttgcccatggaaaaacagggaggggaggccaaagcagaaggactacttgagcccaggagtttgagactaccctgggcaacatagacccccccatctcttcaaaataataataacaataataataataatattaataaattagccaggcatggtggcatgtgcctgtagtctcaactatttttgggggctgaggtgggaggattccttgagcccaggagttcaaggctgcagtgagctgtgattgcaccaccacagtccagcctgggtgacagagctagagcttgcctcaaaaaagaaaagaaaaactgggagatttagaggataaatggacatactccagtcacttcaccaccactcaactcaacagtctaaaggtgaaagtgatgtggagtc

SEQ ID NO: 944700 - DNA, 600 bp, Homo sapiens
tgctttataaacttttaagtttttaaaactttttgactcttttgtaataacacttagcctaaaacacaaayacattgtaattgtacaaaaatattttcttcacaccttattctacaagcttttttctatctttaaaactttccattttaaaatgaaagttttattttttaaactgttttgctaaaaactaagacacaaacacacacatgaacgtaggcccacatggggtcaggtttgtcggtattactgtcttccaccttcacatcttgttacactgttaggttttcagggccaacaacacacacggagctttcattgcctgtgacagtgccaacagaaggacctgctggaggctgtttcacagttcacttcttttaatgagtagaagtactctctaaaataacgattaaaagtatagtatagtaaatacataacactttttattatcataagaaataagtgtaacagtaacatagcttttattatcagctattatattcttagtgtacataattgtatgtggtatacttctaatagcagcactgtaggtttctttacaccagcatcaccacaaacacaggagtagtgctttgtgctaaa

SEQ ID NO: 944701 - DNA, 671 bp, Homo sapiens
agaagagggtccccctccttgcgtctcagagtagcaatttcagggtcatagaaagttaattaattcctgacttcattcataagtgaataaatttgccacagcagaaatatgggcatgtggtctaatagggggttaaactgcctgatttgcaaatgagtttgtctgaaaagttctttaatgtcttgtcatacacttcaccaaaaagaccataattatacacaattaggtcaatgcttacaaatctgggccaaattgacccactctaaaaccaatctctgttaccactagtgccaagcaaataggtattgtaaacctgattgaagaggggaatgcttaaccaactgaataacacaaaagcatttttaagaatgatagaatatctgatgcctttatgtaaaccatactgctaactgcgagtgagtattatcaattaaagagtgtttttaagaagatatgtggaaacgttttattagccatcaagttgaattgctacatgtgatagaaaatgttatagcagtatttcttaaagaatattctataattcagttcctgttcaagactgttgccatcatggtctgtgctaytgaggtctcgttgaagcatttctattgagtttgtggaccacacccttcagactcagacacacttgggtttgacatttaagccctctg

SEQ ID NO: 944702 - DNA, 604 bp, Homo sapiens
aaggtggttgaggtactgcctggttttatacattttagggagacagaagttacaggcaaagacataaatcaataatgtaagtaacacatttgtccagcccagaaagatgggacatctcaaagggaagggggccttccaagtcatgattggattcaaagattttctgattggcaattgattgaaagaattaagctttgcctcaagagttgaagtcagcataaggaaatcattgaattaagtaagtagggttgtggaagccaaggttcttgttatgtagataaagcctctaggtaaggggcttcagagataatggatagtaaatgtctcttaaaaggtgtcagactcttagtaaaatctctcctggatcaagaagatatgtggaaggggaaagggattctctacagaatgcaaattttccccataagagatggctttgcagggccatttcaaaataagtcaaagaaaatgtattttggggtaaaatactgagatttccttcagggcctgctgtcatgtgatgttacrtcagagtcaagttggagtttagtatgttattgctacaaagagtctgctttgtcagtcttataatctttgttttaatgtt

SEQ ID NO: 944703 - DNA, 645 bp, Homo sapiens
agcactttgggaggccaaggcgggtggatcacctgaggtcaggtgtttgagaccagcctggccaacatggtgaaaccccgtgtctattaaaaatacgaaaaaattagccaggcatggtggcrggcacctgtagtcccagctactcgcaaggctgaggcaggagaatgacatgaacccgggaggcggagcttgcagtgagccgagatcatgccactgcactccagcctgggcaacaaagtgagactctgtctcaaaaaaaaaataaaaataaaaaataatagccaggtgtggttgcacacacctgtaatcccagctacttgggaggctgaggcaagacaatcacttgaacctgggaggcagaggttgcagtgagctatgatggcgccattgcactccagccggagcgacagcaagactctgtctcaaaaaaaaaaaaaaaaaaaaaaaaaggaaaaagaaaaagacttgaaagaggtgaggatgtctggaggaagagcattctgaaccaagataacagccggtgcaaaggctctaaggaggctgtgtgactgggacggctgaggaatagaaagaaggctggagaggaggaaggcagagagtaacaggggatatcacatggtgatgggggctagattgggtgggctg

SEQ ID NO: 944704 - DNA, 784 bp, Homo sapiens
gtgcccgagctggctgcaccccgggccaggcatccagcaaccttgagcagtggggtccggcttttcagaaggggccaggaacccgcgtggctgaggtgtgaccraagcgtggggcagaggcgctgggccctggcgctttaacgctggtgtttctggttttaaatttcacgacccagtgacactgccaccctgctacctcgccagcagccctcctgggcttaacttcgggagagcagttttgctagccggccctgggtgccaagccctgcaggaggcgcagacccctggagacaggaccggactctgcagagcccgaccagcctcccagcttggccttttcctgacgcacgggcgcagaaggaaagccacagcaccggcttctctttgtaagtagtgtattttaaatagctttcaagatacacatattttttcctttaaaaaagtctgttggagcagttttgttcttgaattttgctggtcatcctcatggtcccgagcccccctactccgggtcgtggaggcggccgagggggaggctgggggcccacgtggcccgtcctggcggcacctgcagcactgggggagccgctgaaccccgtgcttcagcgctgggggagccgctgggccccgtcttccgccacaaaccatgcatggccgccacgtgagctcaaacgtccgtttatttcaaagcagtaataatttaaaattataaaaatctttccaccgctgaacgtttagagggtgaggttagacagaggacggggaggctggggacgccccagag

SEQ ID NO: 944705 - DNA, 546 bp, Homo sapiens
gtgacattcttcacagaaatagaaaaaacagtcctaaaactaatatggaattacaaaagacccggaatacccaaagctatcttatgcaaaaagaacagaactggccaaattactttacctgactgtaaattgtactgtagagctgtagtaacaaaaacaacatggtacaggcataaaaacagacacacagactaatggaacagagtatagaacccataaacaaatccacatacttagagttaactcatttttgagaagggtaccaagaatgtacactgtggaaaagacagtctcttcaataaatggtgctgggaagactggatgtccatatgcagaagaatgaaactggacccctgtctctctatatatatacaaaaatcaagcaaatggattaaagaattaaatataagacctcaaatacgaaactactacaagaaaacattggggaaaatctccaggacattagtctggrcaaaaattcctttcttgagtaatagcccacaagcacagacaaccaaagcaaaaattgacgaatggaatcatatc

SEQ ID NO: 944706 - DNA, 639 bp, Homo sapiens
aatgtccccgcctagtttckacaataagagtatttttaacaggttgaattaaaacaaaggtttaacgctgtgagatgaatttacacatcacaaagcattttcacagatagcttcttcctagtttctattttgtgatattcagtttctcactacaggcctcagtgggttaaggaatgtcactttgttgtttccagagaaagagtgtttttaaccccttgaatcaaagcgaaggtttaactctgtgagatgaatctacaaatcagaaagggttttcacacgtagcttgtttctagtttttatccggggatatttggtttttcacaataggcctcaacgaactcagaaatgtccctttgtagattctacaagaagaggacttctaatttggtaaatccaaactcaggttccatttggtgagatgcatttacacatcacaaaacattttcacagatatcttgtttctagtttttatcatggcatattcggttttatattgtaggcctcaatagactcagaaatattttttcacagattctacagaaaaagtgtttactaactgttgaattaaaacaaaggttcaacactgtgagatggatctgcacatggcaaaacatttttacagttagcttgtttctaatt

SEQ ID NO: 944707 - DNA, 668 bp, Homo sapiens
aaaaaaaaaaaaaaaaaaaaagaagaaggaaggagargaggatgaaggaaggcatcgtgaaggcgggagagcttagttctgattctagtcctagttttgggagattttccccttcagggtggctgaatatccacgtgcatttacatgaaatgctgtgaagattcttctgtcatgaagcctgaactgacatatataaccattttttttttttttgagacagagtctcactctgttgcccaggctggagtgcagtggcatgatctcggctcactgcaacatccacctcccaggttcaagtgaccctcctgcctcagcctcccaagtggcccacgccaccatgcctggctaatttttgtattttcagtaaagacggggtttcaccatgtaggccgggccggtctcaaactcctgacctcaggtgatccacccacccaccttggtctctcaaagtgctgggattacaggcataagccaccgtgcccggctaggcacttataatcttaacttactcactataatggaatggatttcaaaacctggagaagctatatcagtacaacctaacgcctttatcagagaagggtgcggttggctgcaaaaattagctcaagacctctcccatcccaggatgtacatccctttgcaatgtgactatcccatgcttcttt

SEQ ID NO: 944708 - DNA, 583 bp, Homo sapiens
aaggaaggagaggaggatgaaggaargcatcgtgaaggcgggagagcttagttctgattctagtcctagttttgggagattttccccttcagggtggctgaatatccacgtgcatttacatgaaatgctgtgaagattcttctgtcatgaagcctgaactgacatatataaccattttttttttttttgagacagagtctcactctgttgcccaggctggagtgcagtggcatgatctcggctcactgcaacatccacctcccaggttcaagtgaccctcctgcctcagcctcccaagtggcccacgccaccatgcctggctaatttttgtattttcagtaaagacggggtttcaccatgtaggccgggccggtctcaaactcctgacctcaggtgatccacccacccaccttggtctctcaaagtgctgggattacaggcataagccaccgtgcccggctaggcacttataatcttaacttactcactataatggaatggatttcaaaacctggagaagctatatcagtacaacctaacgcctttatcagagaagggtgcggttggctgcaaaaattagctc

SEQ ID NO: 944709 - DNA, 499 bp, Homo sapiens
aaaaaaaagaagaaggaaggagaggaggatgaaggaaggcatcgtgaaggcgsgagagcttagttctgattctagtcctagttttgggagattttccccttcagggtggctgaatatccacgtgcatttacatgaaatgctgtgaagattcttctgtcatgaagcctgaactgacatatataaccattttttttttttttgagacagagtctcactctgttgcccaggctggagtgcagtggcatgatctcggctcactgcaacatccacctcccaggttcaagtgaccctcctgcctcagcctcccaagtggcccacgccaccatgcctggctaatttttgtattttcagtaaagacggggtttcaccatgtaggccgggccggtctcaaactcctgacctcaggtgatccacccacccaccttggtctctcaaagtgctgggattacaggcataagccaccgtgcccggctaggcacttataatcttaacttactca

SEQ ID NO: 944710 - DNA, 587 bp, Homo sapiens
ccacctcggcctcccaaactgctgggatcacaggcgtgagacaccgtgctgggccctgctgcaggtattaataatggattccttctcactgcagcatggtatctcagcatgggggcaccccagcctgtgcattcacccactgcagggcacctgggcggtttgagtttctggcctttgtgaataacactgctatgaacagacacatacaggtttttgtgtgaacagaagtcttcattactctgatatgaccgccatgagtgcaagtgctcagtcctctggtcgttgcatgttgagttcgttaagaaactgctgaagtgttttccagaacacctgtggcattctccagtctccccagccatgcgtaagtgatccagtgtccttccctgcatcctcaccggtacttcatgctggcgctatttttaatgtcagccattctgataggtgcgcagtgatgtctggctgtgggcttccctggcggctgatggcgtttgtcatcttttcgtgtgyttacctgtcatttgtccattctcctggtgaaacgtcttttcagttctgctcatttcctaactggacggtttgtttccttg

SEQ ID NO: 944711 - DNA, 453 bp, Homo sapiens
agctctgtctctccttcctcaccagcatgggcctgtgyaccacctggatccctggtagccacatgagagcgggcaagagtcccagctactttgagagattctccactctaggcaaccaaggactcaggcagtcgatacttctattcatgtagaaaggtgcccctgggatagtggaccagctttggggctcaggatgtctgaactctggcccagctctatcacttactggcagtgcgatggtacactgccctccatggcagattagaagcaagtgtctgctcctcagccctcactcccatgggcagagtacaattcccaggtccttgatgttgaccagtaagatttagcagatgtaccagcaggcttgaattgtacttgcctgtttctgtttatcctcttgtacttctggtatcaccatgagaattaagctggttccaggagaaggatgcaaga

SEQ ID NO: 944712 - DNA, 632 bp, Homo sapiens
gattgtgctggagtcccaggtcatgtggccttgcccagtgaggagaagtgaggatcaggatctgcatggagaacagttcagccacttttctatgaygtggatgctctgtgttatgggtcccaaccagcccttggtcccacagactctccagggcctggggacacaaggatgaagactgtgagaaagcaaagatgacaacccaccccttccattgggagctttgtcccagggcattgcagaactgctactggctcaatagtcccagtgtaagggtgactggagactaggctgggaggatctgccccaggagaagatacaggattggggacccacataacatacagtctgaccacttttccatagagctgctaccatattctggggatctgctccagtccctagtcacttcagattttccagtacctgatggtatcaacagtgaagtttgtcaaacagcaaagatggcggcctgcgcctccctctgggagctctgctccaggaaggaatggacctgttaccagcccaaacacactggcagggttggctggggatcccagaagttcccactcagtgaggaaaaacaggatcaggaggtgcattaaaaagcagtctggccactttttcatagagca

SEQ ID NO: 944713 - DNA, 542 bp, Homo sapiens
tgggaagtgaggagcatctctgcctggccgcccatcgtctgggatgtgaggagcrcctctgcccacccgccccgtctgggaagtgaggagcgcctctgcccggctgccccgtctgggaggtgtacccaacagctccgaagagacagcgaccatcgagaatgggccatgatgacaatggcagttttgtggaaaagaaaagggggaaatgtggggaaaagaaagagagatcagattgttactatgtctgtgtagaaagaagtagacacaggagactccattttgttctgtactgagaaaaattcttctgccttgggatgctgttaatctataaccttacccccggccccgcgctctctgaaacatgtgctgtgtccactcagggttaaatggattaaggtcggtgcaagatgtgctgttaaacagatgcttgaaggcagcatgctcgttaagagtcatcaccactccctaatctcaagtacccagggacacaaacactgtggaaggctgcagggacctctgcctaggaaagccagagacctttg

SEQ ID NO: 944714 - DNA, 693 bp, Homo sapiens
attttccttggatacatgcccagaagtaaaactgctggatcatatactggtagttctgtttttaatttttttaaggaaagatcgttttaattttttgaggaaaaaccatactgttttccataatgcttataccaatttacattcccaccaaccatgtataaggattccctttcctctacaccctcattaacacttattacctcttatctttttgataataactattctgacaggtgtgaggtaacacttcattgcaattttgatttgcatttttctgattagttacgttcagcaccatctcatatacctgttggtcatttgtatgtcttctttggaaagatgtctattcaggtcctttgtccatttttgaattaggttatttgttttattgctattgagttgtgtataatttctcgaaaagatttttctttcccccactgaattgccttggcagtatttttgaaatttaattgaccataattataaacttttatttctagcctctctattctattgatctgtatgtctatccttatgtcagtatcactctgtattgattattgcagctttgtagtaacttttkccatgagcaagtatagttcctcaaactctgttctttgtcaaaagttttgtaacttttgtagttcactgaatttccatataaattttaatatcatcttgtcagtttctgca

SEQ ID NO: 944715 - DNA, 587 bp, Homo sapiens
aaaaaaattagccgggcatagtggcaggtgcctgtaatcccagttacaagggaggctaaggcaggagaattgctrgaactggggaggcagaggtttcagtgagctgagatcataccactgcactccagcttgggaaacagagtgagactccgtctcaaaaaaaaaagattctcactttggatctaacgacactcggaagttgaaattggaaggatagagaaggatattcatgaaaatagtaactaagaatttttaatgatctctcatagggttctatgtgttggctgggttcagatgatggcctgagagtgttacatggtccagggattgaaatggaaggaaccagatgcaggcaggatggttaacagcagtgcccagaactgacacaagcatacttctgccgtattctattgggtagcgcaaatatcagatctgcttatgtttaaagagtggagagaccttacctcttgatgagggagtggtgggtcaaactaaagaaaagcaagtgtgatggaagatatttagatatttttgcagctgtctttggaaaatacatgcaatccaaaacatcctgtctgccagaaagg

SEQ ID NO: 944716 - DNA, 733 bp, Homo sapiens
aaagggattgagttcttgatttgattctcwcttggtcgttgttggtgtatagcaatgctcctgatttgtgtacattgattttgtgacctgagactttactaaatttgtttatcagatctatgggtcttttggatgagtcttagtattttctaggtatacgatcatatcatcagtgaacagggacagtttgacttcctcttttctaatttggatgcccattatttctttctcttgcttgattgctctggctagaacttgcaatactgtgttgaatagaagtggtgcacgtgggcatccttgccttgtttcagtccttggaggaatgctttcaacttttccccattcactatgatgttggctgtgagtttgtcatatatgactttcatgactttgaggtaagtcccttctatgcctattttgttgaaggtttttatcataaagcaatgctagattttatcaaatgctttttctgcatctattgagataatcatatgattgttgtttttaattctgtttatgtggtgtatcacatttattgacttgcatatgttaaaccatctctgcatccctgggatgaaacccacttcaacatggtgtattatttttttgataggctactggatttggttagctagtattgtgttgaacatttttgcatgtatgttcattggggatatttgtctgtatttttcttttttgttatgtcctttcctacttttggcattagggtgat

SEQ ID NO: 944717 - DNA, 592 bp, Homo sapiens
caatggtgtttctcttagtcaasttaggagttccatgcctttggccttcaggctgctctttatatagttcgtatctgtctcctgggcatagtactgtctggattttctctttctttttttttttttttttttgagacgaagttttgctctgttgttgcccaggctggagtgcaatggcacaatcttggctgactgcaacctctgcctcccgggttcaagcgattctcctgcctcagcctcccgagtagctgggattacaggcatgtgccaccacacctggctaattttgtatttttagtagagatgggggtttctccatgttggttaggctagtcttgaactcccgacctcaggtgatccgcccacctcggccttccaaagtgctgcaattataggcgtgaaccgctgtgcccggccctcttatttaaagttcgcaaatacagaacaggtcaggagcttttctaatcattttttttttttctgaaggaggttccatatttgtctgtaccttgagagttgtttcatactagaatttgtaacttatcatcaactacagaaattttttttaaagtgtggttgaagagataatggt

SEQ ID NO: 944718 - DNA, 621 bp, Homo sapiens
tttagctccagatcgactgcaagaacaaaccagcaatmctgagaggatccacagactctctgaaggaagcagactgctcctgcaggacccaggagacccccaaatactgtgagtgccccaactgcagtgccacaactgcagaagtgggaaagggagaccctcctctcccgaacacacacccccactggagaagccgaagatctgtttgtgggagaagtttccgactttacctgaagctgagtcaagttagagagccgagcgaaaaacaggggtagaggaagcggcagaaaggccctgggagctcgctgggtgcccctgcagcccattcctgcctggcaccacagggatccactgagagggtggccagagatgcagggggtaaaactccacagggagaaggaatgctctagccgaaatttgtaccaatttgaacagggtgagaaacctcctggccagaactcaggggagggcgtgaatccagtatgcagacttcactcgtaggggaagaactaaagcccttttctttcacagctgtgaggcagatagccttgggcaagttttcaagcctatctctcccttttcctggaaacagactcagggctgttggtgggacatggtggg

SEQ ID NO: 944719 - DNA, 646 bp, Homo sapiens
ggactcaggctggactacagtggtgtgacaaggatcctcctgtctctgcctcttacaggcatgagccactgcacccagctattcattggtttttattgtctgccatgtgctggggcactgacctaggtgcttggggtacatcagtgaatcaagttcactgccctagtaggtcttatattctagtgggcagagacaaatgataaaaataagttataatatgtgagagagggattagggatgtgatttttttttttttttttttttttgaggtggagtctccctctgttgcccaggctggatttggctcactgcaacttttgcctcccaggttgaagtgatcctcccacctcagttccaccaattagatgggactacagatgtgtgccactgtgccagctaatttttcttttttttgtagagacggggttttgccatgttgcccaggctggtcttgaactcctggacttaagcgatctgtccaccttggcctctgcaagttctgggattacaggcatgagccactgcttttttttgtttttttttcgtttktttttttttaaagagagacagggtctccaactcctgggatcaggagattcacctgcctcagcctcccatagtgctggggattacatgtgtgagccac

SEQ ID NO: 944720 - DNA, 559 bp, Homo sapiens
gtgctgccattcttctccaggagccctttctgccacatccctcaatgacatctgccttctactgcaacatttctaggtacagagagttcarcccatttcacaattcttcaattctgctgttcaaaaaatcgcctccttatgcctgtcatcccagcactttgggaggctgaggcaggaggatcatttgagcccaggaatttgagaccaacatgggcaacatagtgaggcctcatctctacaaaaaattaaaaaattagcctgggcaacatggcaaaaccatgtctctacaagaaatacaaaaattagcaaggcatggtggcatgcacctgcggccccagctactcgggaggctgaggtgggaggattgtttaagcccaggagtgaggctgcagtaagctgagaccatgccactgcattccagcctggaaaacaaagtgagaccctatctcaaaaaaagaaaaaattagtcgagaatggcagcacgtgcctgtagtctcatctactggggaggctgaggcgggacaatcgcttaagcccaggaggtcaaggctgcaataag

SEQ ID NO: 944721 - DNA, 553 bp, Homo sapiens
tattgttatgtaaatgcactactgayttttgtatgttgattctctatcctgccacttcagtgaatttgtgtattagttctaagggaatttgggtggagtctttaggtttttctacttataagattaagtcatcttcaaagagaaaccttttgactttctctttcccaatttgaatgtcatttatttacttctcttacctaattgctttggctaggacttccagtactatgtagaataagactagtgaaagtgagcatagttgcccagttcttaggggaaacacattcaggttttccccattcattatgatgtttgctgtgtgtttatcatatatggtcattattgtgatgaggtatgttatggttattattgtgatgatgtatgctctttctacaactaatttaacaagagtttttatcatgaagcatagttcagttttattttttattatttttaatttttgtgggtacacagtaggtgtatatatttatggggtacttaagacgttttgatacaggcatgcaatgtgaaataagcacatcacggagaatgg

SEQ ID NO: 944722 - DNA, 553 bp, Homo sapiens
tattgttatgtaaatgcactactgatttttgtatgttgattctctatcctgccacttcagtgaatttgtgtattagttctaagggaatttgggtggagtctttaggtttttctacttataagatyaagtcatcttcaaagagaaaccttttgactttctctttcccaatttgaatgtcatttatttacttctcttacctaattgctttggctaggacttccagtactatgtagaataagactagtgaaagtgagcatagttgcccagttcttaggggaaacacattcaggttttccccattcattatgatgtttgctgtgtgtttatcatatatggtcattattgtgatgaggtatgttatggttattattgtgatgatgtatgctctttctacaactaatttaacaagagtttttatcatgaagcatagttcagttttattttttattatttttaatttttgtgggtacacagtaggtgtatatatttatggggtacttaagacgttttgatacaggcatgcaatgtgaaataagcacatcacggagaatgg

SEQ ID NO: 944723 - DNA, 637 bp, Homo sapiens
catagaaaaactatacaacagagcagaagtctaccaactgacaaatatgcctagtaccacctactggatcataccccaaagcttcaacaccaaaaatacctcattaatataccccytctgaaaccaaagacaaaaagtcagcttcaaataaacatcttgcacaaagcctcatacctgtgaaaacatccaaaaaaagcagtctattgactgtactcaatctacactgcagttgaaagaacactcacatgcagagatgagaaacaaccaacgcaagaactgcagtaactcaaatggccagagtgttgtgtgtcctccaaatgattgcaccagttctccaacaagagctgttaaccaagctaagcttactgaaatgacagaaattaaattcagaatatggataggaagaaagatcatcaagattcagtagaatggcaaaacctaatttaaggaaaccaagaatcccaataaaatgatacaggagctgaagaatgaaacagtcagtatattaaaaaaaaaaaaaaaacctgatggacatgacagagctgaataatacaatacaaaatctttacaatgctaccataaatattagtagcataatagaccaactagaggaactaatctcagaacttgaaaactg

SEQ ID NO: 944724 - DNA, 477 bp, Homo sapiens
acttaaatgtaaaatccaaagctataaaaatcctggaagataacctaggcgataccatcctggacataagaacaggcaatgatttcatgacaaaaacaccaaaagcaatctaaacaaaagcaaaaatggacaaatggaatctaattaaacttaagagattctgcacagcaaaataaactctccacagagtaaacagaaaacatacagaatgggaaaaatatctgtaaactatgcatctgacaaaggtctaatatccagcatctataaggaacttaaacaaatttactggagaaaactaaacaaccccattaaaaagtaggcaaacaacatgaactgacacttttcaaaagaagtcatatatgtggccaayaactatattttaaaaagctcaatatcacggatcattagagaaatgcaaatcaaaaccacaataagatagcatctcacacctgtcacaatggctattattaaaaagtt

SEQ ID NO: 944725 - DNA, 615 bp, Homo sapiens
agagggtcataagcaagcaaaacttatgaggaagatgaagccataagtaagcagaacctataaataggctaaaaatatgagatggagggctgggcgcaatggctcatgcttgtaatctcagcactttgggaggccgaggcgggaggatgacctgatgtcaggagttcgagaccaggctggccaatttggtgaaaccccatctctactaaaaatacaaaaattagccaggcatggtggctggtgcctgtaatcccaggtattcgaggttgaggcaggagaatcacttgaacccaggaggcagaggttgcagtgagctgagatcttaccactgcactctagcctgggtaacagagcgagactccgtctcaaaaaaaaaaaaaaagagagatggagaaaaaacaaagtggatgggcgagccaatatttaaaaagcagaaattataagacaccaaagataagcagagaggccgggtacagtggctcacacctataatcccagtactttgggaggctgaggcaggcggatcacctgaggtcaggagttcaagacagggagaaaccccgtctctactaaaaatacaaaattagccaggcrtggtggcgggtgcccgtaatc

SEQ ID NO: 944726 - DNA, 639 bp, Homo sapiens
gcaaatatatttatagctgttcacttgggaaaacagacccaggcatttcaaagaccactggatatagggtccaagttgacattgatactcagagaaccaaaatgtcaccatggctcctgttagaatrggtatatgtaggattctgctaataaatgaagttctggcatagttaagcttgcagatgtccactaggtctgcacacccacacggtggtatttacccaatcctaaaatgtataattgggattacacttggtgtctaatgtaatccttatgttattgtgggttatgaattatcatgttcaggaaggccaagtggaaacttttcctttttctgacccattacattaaataaaaaataatattatacagaggcaaggtagtgctatcctttaggctataaaggatgcagagatggtagcccccatcatacccccaattatatatacatttaatacacaattctggaccctgcagaaatcaaattgatctgggaagaaaaaagtagactactatgaactctctcaagaagtagattcaactgcagctgccatgacaggtataatatctttattaaagcagattaagatggtttctgacaaatagtatgcaattacagattggagagtgcactattttt

SEQ ID NO: 944727 - DNA, 808 bp, Homo sapiens
cagatctccagaaaataagggtcccttttttataccagatcctggatccccaaaagagagaattaatccatctcccacaggaggcttatctctcagtgtggggtggrggacatttccatatttcctaggtggccaagagtgtgcttctctgatccaaatgtgcagaactgagtatctccccataactactattagccatccccaaaagtatatttcctatctagttattacacaacaaagttctcataatgtgaagtaatttctgatacccccccaaagtcaaaaacatcagataatgcaacgcaaaccagaacagagcctcagattttgacagggatttatccactgttaattcctggggtttcatgaagaaaacagaggttttttccaaaatggagtctgtggcgctcctgtttttctcaaggagtcccaggctgttacggcttgaataaccacttttaattaagctgacttttaaccataccactcttttttttttaaagtccttttaaatcttttattacccaactagccagtccaaatggccaatatttctggcttttgaactctacaaaaagtaacctcacaggtgctctgagaaaagaaattcaagacagtttgtggaggggaagagaataaaaaaaatggcaaaggtcacccaaatatcaatcagaaaggctcatcccctaagctagggattgaaccctgaacctgggcagccattgtgatggtggagaccaagaggaagtactgccacgtggttacaaggtcaggcttccaaggacatcgaagaagatgagaggagaac

SEQ ID NO: 944728 - DNA, 630 bp, Homo sapiens
ctttaattcattttgagttgatatttgtatatagtgtaaggaatgggtccacttccaatcttctgcatatggctatccagttatcctgcagcatttattgaatagggagtcttttacycattgcttgttttagtcagctttgtcaaagatcagaagactgtaggtgtgtggccttatttctgtgctcgctactctgtttcattggtctatatgtctgtttttgtgtgagtaccatgctgtttttgttactgtagcactatagtatactttgaagtcaggtagcctgatgcctccagctttgtactttttgcttagaattgccttggctattcagtctcttttttggtttcaaattaaatttaaaataggtttttctagttctgggaagaatgtcattggtagtttgataggaatagcattgaatctgtcaattgctttgggaaatatggccattttaataatattgattcttcttatccatgagcatgggatgtttttccatttggttgtgtctttgatttctttgagtagtattttataattctcattgtagagatttttcaccttcctgatcagctgtattcttagctatcttatatttttttgtggcaattgtgaatgggattgcct

SEQ ID NO: 944729 - DNA, 637 bp, Homo sapiens
aattgcctgaatttaagtaatcaaaacagtgagatattggtgaacggatagacatatatgttaatggaataaaattgagagcccaaaaatagatctacaaaagtkacaaataaattgatggagaaaaggtagtcgttcaacaaacagagctggaacaacttgacatcaatatgtaagaaaatgaaacttggctcattcctcatgtcttataaaaaagttatgacagccaatcgaaaaacttgaaaggtaaaacctacaagaaaacatagaagaaaacctttgtgatcttggataaggtaaagatttcttagatatgacatcaaagcactatacataaagacaaaaatgttgaatttaaatttatgcaatttaaaactacctgctctatgaaagagaactcaaaagactgacaaaagctgcaaagtgggagaaaatatttgcaaaacacatatataacaaataacttctatcaaaaatatactaaaaacttacaagtctcaataataaaaagtaatctattttttcagtgccaaagatttgacatacacttcattgaaaagatatggagatgacaaataagctcatggaatggttgtcaacatcattgtcattaggaaaatgccaattaaattcacga

SEQ ID NO: 944730 - DNA, 586 bp, Homo sapiens
tagataccctgaacagacaaataacaagcagcaagattgaaatggtaatttaaaaacyacaaagaaaaaaaaaagtccaagaccagaaggaatcacagcagaattctaccagacattcaaagaagaactggtaccaatcctattgacactattacacaagatagagaaagaaggaatcctccctaaatcattttatgaagccagtatcaccctaataccaaaaccaggaaaggacataaccaaaaaagaaaactacaggccaaaatccctgatgaacatagatgcaaaaatccttaacaaaatactagctaactgaatccaacaatatatcaaaaagataatccaccatgatcaagtgggtttcataccaatgatgcagggatggttcaacctatgcaagtcaataaatgcgatacaccgcataaacagaattaaaaacaaaaatcacatgatcatctcaatagatgcagaaaaagcatttgataaaatccagcatcactttatgactaaaactctcagcaaaattggcatacaagggacatacctcaatgtaataaaagccatctatgacaaacccacagccaac

SEQ ID NO: 944731 - DNA, 667 bp, Homo sapiens
ctacaaaaatcttctaaaaattagctgggcatcgtggcatatgcctgtggtcctggctactcaggaggctgagttgaggagatcacttgagcccaagagttcgaggttatggtgagctatgatcrcactgctgactccagcctaggcaacactaagaccctgactctaaaaaaataaaagtaaataaatcactctgatcatacctaatgaaccttaaaagcaagaagcaagatccacaaggatcacagtgaaatggcctcattgcctgatccaaagttcttgatctcacagccaaggaagtcaaggacacggccacaccaagggtgaggttagagcagaagcagaagtttattaggcaaaagaaagataacagctctctgcagcagagagggattaaaagcgttgccattcagcagtgaaattcaagggtttttataagctagctagtggggaggtgaggtgttatcttacctacatagggtgtgaaaaaccccaggtgtgccatctgcgtagagcatgaatctctggcatcccccaccccacccttttattatacaggcaggtcttttgcctgagctactccacgttgctttcctactgtgtatgtgcttcaaagggggaggtggagcctccatggtggacacacctggcctcaggtacccctttc

SEQ ID NO: 944732 - DNA, 622 bp, Homo sapiens
tgtctactaaaattacaaaaataaaaaawaaaaattagcagggcattgtggcgcatgcctgtaattccacctactctggaggctgaggcaggagaatcgcttgagcccaggaggtggaggttgcagtgagctgagattgcaccactgcactccagcctgggccacagagtgacactcttgtcggaaaacaaaacaaaaagtctccttagattaaaactggattccagcctcggttccactggtcaccattcaagtactttgcatctctaagtctctgtttctttaacttcaaagggaagttagcattttccttacagaggtgctgaggattaaatgagaagagggtatgagatttgaggctggggaaggaggcatggggttctaggaaagggaggcagtcacttaggcctggagtaaggggacaggggcctgggcaggcgacagagccccacagtgctgttgctaccctgttaatgggcccagaatctggaagccagccaccacatgccctcacacccagggtcttcctgcaggtggagctgaagagccaagaggctcagagtctgcagcagcagccagaccattacctgggtcacctgcagcagtacgtggccacctatca

SEQ ID NO: 944733 - DNA, 536 bp, Homo sapiens
atggctcactgcagcctcgatctcctgggctcaagcgattctcccacctcagcctctggttgctggaaccataggcwtccaccatgtgtacctaatttttgtatatttgtagagactgggtctcacttatttgcccagattcattttaaccttttctacgtgtgcaatacaagtgtgcattaaggatatccacaaggctgtgtaaccctctccgcgaccattcccagagctttcctaatcagaaaactgtaaccattgcacagtaattgcccttccctgaactcccagcccccggcgagcggggctcatggctgaataacactgcactgcatgtgcagactacattttgtttatccacttatccctccagggtccttgggttgtttccaccctctggctgctgtgaatagcgctgctgtgaacatgggtgtaatgcgcttgcttcagttcctgcattcagcccttctgggtatatactgaggagaggaattgctggggcgcatggtaattctatgtttagggttttgaggatccac

SEQ ID NO: 944734 - DNA, 536 bp, Homo sapiens
atggctcactgcagcctcgatctcctgggctcaagcgattctcccacctcagcctctggttgctggaaccataggcatccaccatgtgtacctaatttttgtatatttgtagagactgggtctcacttatttgcccagattcattttaaccttttctacgtgtgcaatacaagtgtgcattaaggatatccacaaggctgtgtaaccctctccgcgaccattcccagagctttcctaatcagaaaactgtaaccattgcacagtaattgcccttccctgaactcccagcccccggcgagcggggctcatggctgaataacactgcactgcatgtgcagactacattttgtttatccacttatccctccagggtccttgggttgtttccaccctctggctgctgtgaatagcgctgctgtgaacatgggtgtaawgcgcttgcttcagttcctgcattcagcccttctgggtatatactgaggagaggaattgctggggcgcatggtaattctatgtttagggttttgaggatccac

SEQ ID NO: 944735 - DNA, 581 bp, Homo sapiens
ataagtaacaaggaagtgaatgttaatagccaagacaatggggaaaatgtctccagggcatttcagagatcttcaaggcaacccctctcatcacaggcctgaaggcctagaagggaaaaatggtggcccagggccttactgctttgtgcagatttgggatatggcaccctgcataccagccactccagctccagccacagctaaaaggggccaaggtacagctcaagccatggcttcagagggtgcaagccccaagccttggtggctttcacatgatgttgggtctgtggatgtttagaaggcaagaattgaggttttggaacctctacctagatttcagaggatgtatgaaaatgcctggatgtccaggcagaagtcttctggagccctcatggagaaccccctactagggcagtgtggatggggaaatgtgattttggagctcccacacagagtccccactggggcactgtctagtggaactgtgagaagagggccaccatcctccaaaccccagaatagtagatrcatctacagccacaggcactcaacactagcctatgaaggcagttgcaggggct

SEQ ID NO: 944736 - DNA, 627 bp, Homo sapiens
ctccagcctgggtgacagagcgagactctgtgtcaaaaaatwaaaaataaaatgaaattaaataaaataaaatgtcttgtgatgaaaaaccaaagccaggctggaagccacagagcaccagtggtgttgtgacttcacactggcaggtcaagaaaagtttctctgaacaggtaacacctatgcagagatctacaggaagaaacacagtgagccatgcagttatctgggaagtgaccaacatgaaggaaacaaatggagaggccctgaggcatcttcaggatagtaacaaaaggggccttccaacatccatgaagcccacagggcagggctggaacacagcagaaaagccagcaagagctggtgagagtcccatttcacagaggcgagccatgtgtgggagctggacccagatgttctaccacctagaccaatgtcctttgacttcacaggctgctatttacgcaagacccctcaggaacaagatgtggcctgcagccctctggaccaccccctcagggcctcacaggctaagattcccaggcaatcctgaccatgtgacttaaagagggcaccctcactcaccatcctccaggcctcggccgcggggcctgggcttgttgcccacca

SEQ ID NO: 944737 - DNA, 607 bp, Homo sapiens
actgagtgcccactgtgtgccctgtgtttgacgttggctctttaatgcccactgtggttttggggctggctggcagtggggccaaggagccttccgtctcctcccgctttcttggaaagatcagtgcccgcattcctggcctttgcttacaggcaggcgtgggtcccaggaatgggagagcaaattccagagggcagaggccaccaggacagagcagggtgcctcagcccggtgggggtgggggtcttagaggggactgatcctggaggtggcaccagggtccaccccctgttgtgttctgaggaagaagtggtgtgttaacggctcctaagctattaattcattgatccgttcaacagtttccccaaatgaaatagcaaaggggtggtggggctggagaagaggggatgagggggcagtaggggcagtgggggctggaccacagagggctcgtatactctggggtgcagggggctgtggcggggcttgcaggggacttgagaaggctcccgtgtrtcctttggtttttttattgaagtgaaattcacgtgacataaaactgtctgaaagtggacaattcagtggcatttagtagattcacagtggt

SEQ ID NO: 944738 - DNA, 731 bp, Homo sapiens
gttgactgagtgcccactgtgtgccctgtgtttgacgttggctctttaatgcccactgtggttttggggctggctggcagtggggccaaggagccttccgtctcctcccgctttcttggaaagatcagtgcccgcattcctggcctttgcttacaggcaggcgtgggtcccaggaatgggagagcaaattccagagggcagaggccaccaggacagagcagggtgcctcagcccggtgggggtgggggtcttagaggggactgatcctggaggtggcaccagggtccaccccctgttgtgttctgaggaagaagtggtgtgttaacggctcctaagctattaattcattgatccgttcaacagtttccccaaatgaaatagcaaaggggtggtggggctggagaagaggggatgagggggcagtaggggcagtgggggctggaccacagagggctcgtatactctggggtgcagggggctgtggcggggcttgcaggggacttgagaaggctcccgtgtgtcctttggtttttttattgaagtgaaattcacgtgacataaaactgtctgaaagtggacaattcagtggcatttagtagattcacagtkgtatgcaaacaccacctctgtctagttccagaacattctcatccctccaaaaggagaccccaccccatcagcagtcactcccccctcccctcccccagcccttggtggcacccatctgcttc

SEQ ID NO: 944739 - DNA, 661 bp, Homo sapiens
ctgaattataacagataaataaagaagagctggtaccatttctactgaagctattccaaaaaactgaggaggaggaamtcctccctaattcattctatggggccagcatcatactgacacacatactttttaatacagtttgccatcttttctttggtattgtttgtattttctttctacaagtttttttaagcctgttagatttgggttaggattgcattgaatctatggatttacttaggggtaactgacagcttaacaatattgagtcttgtgacctatgaacacattatttctccttttagttggttctactttaactcagtgatatcttgtagttctccttttatagatctttcgcatctttaaaaaatatatccctaagtatttgataattttgatgatactgtaaatggtattttttatttgaatttcaagttgtttgttgctagtatatagatgtagaattgatttttgtatattgaccttgtatcttgcaacttgactaacttattggttctgtatcagttctagaagtgtttttacagattccattgcatttctatattaacaattacactgtctgtgaataacaacaggcttacttgtttctttccataatagatgtctttcctttttctttgttgcgctggaaagaacc

SEQ ID NO: 944740 - DNA, 554 bp, Homo sapiens
atttggttttatgttcctgcattagtttgctaaggataatggcctccagctctatccatgttcccacaaaagacatgatcttattcttttatatggctgcatggtattccatggtgtatacgtaccacatgttctttatccaaagtgtcaatgatggacatttaggttaattccatgtctttgctatcgtgaatagggctgcagtgaacatttgcgtgcatgtgtctttatggtaaaatgatttacattcctctgggtatatacccagtaatgggattgctgagtcaaatggtagttctgctttttggcagtttcctctttgaggaatctgcagatgtaattaaggtttctaaccaaatgaccataagatggggaaagtatgctggattatccaggtggacccaatgtaagcatagtggccttgagatagaagagggagagagacaaaaggygagggtcagaggaagagctgactatggaagaaaagcaagctctgaaagctgcaaggttgctggctttgaagatggaggaggggccaagagctaaggaataca

SEQ ID NO: 944741 - DNA, 747 bp, Homo sapiens
tgggactataggtgtatgccaccacacgaggataattttaaaattttttcaaaatagaggcgggatctcagtgtgttgtcyaggcaggtatcgaactcctgggatcaagtgatcctcccaccttggcctcccaaagtacggggattacaggtgtgagctaatgcacccagcctaatttttttattttttgtagagacagggtcgcactatgttgcccaggtggggggccaaaggttttcagaataagaagaggggatgaagtcctctgggggtgaaaagctttattcttttttattattattattttgagacggagtttcgctcttgttgcccaggctggagtgcagtggcgccatctcggctcactgcaaccttcacctcccagattcaagcaattctgctggcctcagcctcccaagtagctgggattacaagcgtctgcaaccacgcccagctaattttttgtatttttagtagagacagggtttcaccatgttggccaggctggtctcaaactcctgacgtcaggtgatccacccgcctcggcctcccaaagtgctgggattacaggtgtgaggtaccgcgcccggccaaaagctctattctttgaaagattccatatacagaaccttcagtcagattctcactgtcttttctaactaaaatcccaaagccctttccctccaactgtgtttgggggaagtattcctcgcataacacatcaggggaccagcctctggagagggg

SEQ ID NO: 944742 - DNA, 670 bp, Homo sapiens
aggaaaggaggcacagaggtcgctgggtttgggtattggcatgtgtgcagtggcggccaagggagaaaaagaggcaggaaaaaggctgttaaaacagcaggaggccaggcgccgtggctcatgcctgtaatcccaacactttgggaggccgaggtagcaggatcacttgagcctaggagttccagaccagcctggcaacgcggcaaaaccctgtctctagaaaagattaaaaaaaaaatcacctgtaatcctagctattcaggaggctgaggtgggaggatcatctgagcctggggaggctgcagtgagctatgattgtgccactgcattccagtgtgggtgacagagtgagacgccatctcaaaaaaaccacacacatacacacaaaaacaaacaaacaaagaaaaaacaggaagaaagcaaactaaggcaggactatgtgaatgtgaaaagggccagggcctaccaagtacagtgaaattccaatgactcgccagtcattcaccaggtggaaacacatcaagtgacattgacgtgtcctcacacactgctttgggtcattttgtctcgtcctacttctggccagtcccagggttgaaagckttatggcaaaccagagcaatcttgcaaatggctttcccccaaatcctgaagcctgcaaaaatgtttg

SEQ ID NO: 944743 - DNA, 549 bp, Homo sapiens
agaagctgggattacaggcacacactaccaygcctggctaatttctgtatttttagtagagacgggatttcaccatgttggtcagtcttgtctcgaactcctgacctcaaatgatccatcctcctcagcctcctggagtgagccacggtgcctggcctggaaagaggtttttaaaggttagaggacacgagggcctgtttttaagctgagaggaggaataattattgaagatatgaaagagaatggggacagggacagagcaagttctcagaggacaccagcacaggtggctaagatccgagctgcttcctgcagcgtcaccacaccggcgacccatgctgaggcttcctcaatgaaaatccccaccttttttctacatgaactgctgcaagccacagttgcccatctgatatttgcatgcctgtgagtttcagatgtaactacaagaatttacacttatcctaattacgtttcataaactgtctttatgatcatctgttctggtacaacgaccaagaaaacattcagtgggtggtttggcaagttctg

SEQ ID NO: 944744 - DNA, 797 bp, Homo sapiens
gacgcgtgccaccacacccagctaattttttgtattttagaagagacagggtttcaccatgttggccaggatggtctcaatctcctgaccttatgatctgcccaccttggcctcccmaagtgctgcgattacaggcatgagccatagcacctggccgccaatggcttttttctttgtagattcctgtcatattgagagacgaaatattcaaagtacaaattaaatgtactcatttaaagaaagaaaataaaatgatagccaccccaaggttttaaaaaactttttagagtgataaagcacattttaaattaatatgtgacaacagatgcattgcaactacagccataaataattttttgtttttgattttttggcttaaacagcaaaaatttatttctcacagttctggaggctacatacaagtctaagatcaaggttctggtagggctgagtttctcttcctgacttgctgatggcctccctcttgctaagtgctctcatgacctttccttgtgcctgtgtacatagagagtgagtaagctctctcgcgtcacttcttataaggacagtaatcctataagatcagggcccacccttgtgacctcatttaaacttaattgcttccataaacgccctatctccaaatacagttacactgggggttagggcttcagtgtatgaattggaagaggtggcacataaacatttagtccataacaaaaatgtttcacatattttcaacaactatttttttctaacttttttctttttcccttcctctcttggctctgaaactc

SEQ ID NO: 944745 - DNA, 797 bp, Homo sapiens
gacgcgtgccaccacacccagctaattttttgtattttagaagagacagggtttcaccatgttggccaggatggtctcaatctcctgaccttatgatctgcccaccttggcctcccaaagtgctgcgattamaggcatgagccatagcacctggccgccaatggcttttttctttgtagattcctgtcatattgagagacgaaatattcaaagtacaaattaaatgtactcatttaaagaaagaaaataaaatgatagccaccccaaggttttaaaaaactttttagagtgataaagcacattttaaattaatatgtgacaacagatgcattgcaactacagccataaataattttttgtttttgattttttggcttaaacagcaaaaatttatttctcacagttctggaggctacatacaagtctaagatcaaggttctggtagggctgagtttctcttcctgacttgctgatggcctccctcttgctaagtgctctcatgacctttccttgtgcctgtgtacatagagagtgagtaagctctctcgcgtcacttcttataaggacagtaatcctataagatcagggcccacccttgtgacctcatttaaacttaattgcttccataaacgccctatctccaaatacagttacactgggggttagggcttcagtgtatgaattggaagaggtggcacataaacatttagtccataacaaaaatgtttcacatattttcaacaactatttttttctaacttttttctttttcccttcctctcttggctctgaaactc

SEQ ID NO: 944746 - DNA, 605 bp, Homo sapiens
aatggacttagtgggctcctcggaaccaccttaaggccaggtgcggtggctcacgcctgtaatcccagccctttgggaggccaaggcrggcggatcacttgaggttaggagtttgagaccagcctggccaacgtggtctttagtaaagatggggaaaccccatctctactaaaaatacaaaaattagccaggcgtggtggcacgcgcctgtagtcccagctactcaggaggctgagacgggagaatcgcttgaaccagggaggcagaggttgcagtgagctgggacggtgccactacactccagcctgggcaacaagagtgagactccatctcaaaaaaaaaaaaaaaaaaaaagaaaagaaaacctaaacatcaaactcggcacttgttgcactgagagtttctgatggcctggccgactctaggtcaagttctgcgtcgcagtgccatttctggccgtcctcctccccggccccccattggtcacatggtggccccctcaggtgcatactcataagtggttatggtcaaccccttcttgtgagtgtgcacttcaaaatgacgtttggagatgaaaactgggggagtttgtttgtcggagtggt

SEQ ID NO: 944747 - DNA, 625 bp, Homo sapiens
ggctacaaaaccattagctctttcttaaaccatttggatttggcagtattctttgcaaaaaggaaagtgtgaccatgttacagttgaggggcacatgctgaagcatggcagcagaagggattgcctttaaaaattcagtacagtccttcaatctgtaatagtcattaaagaaaaaatatcttagaagtgcagtttcccttggattactgaataaatccaggtcacatagatgccttcttttagacatagttcactgagtttaattatgcttcatgcttccaggaaaaaccttggtaattaccagttagattaaggattctgcagcaaggaaactccctccacccaacactaaggtctcacatatagtgttttaaaattctgaatttgaagcttagtaaagaagccttggtcttataccataaaataaaaacgggggaggttacatttataaaaggcaggcaacacaatggcattttatggaatacaatcattaaacwtatgtttgctgttgatactgttattataggtgaccaaatcatggaatgaaacagatattgttcatataacatttgtttcttcattttattttctctcgctagatggcataaggcagagagtagggttt

SEQ ID NO: 944748 - DNA, 428 bp, Homo sapiens
tggtaaagaaccctgttttgtcatattaccagagctgattttctggctccttctcatttgggtaggctttgtcagggggaaggtctagggctcaaggttcctttcgtcccacagggtgtttccttgatgtagtgctcttcccctttttctagagatctggcttcctgagagccaagctgtagagattgttatctctctactggatctagcctcccagcaagtctaccaggctctgggctggtactgggggttgtctgcacagagtcctgtgatgtgaaacacctgtgggtctctcagccatggatyctggcacttgctccaggtggatgtggcagggggtataatggactctgtgagggtccttagttttgattagtggactatttttgtgctggttggcctcctgccaggaggtggcactttcaaga

SEQ ID NO: 944749 - DNA, 651 bp, Homo sapiens
cggcagtgtaaacaagagcagggcatgtatgagtagttgagaatggagaayaggagtatgactagacagaaaatagtagggatgacaagttttttgggggcacagtctaagttggtccggtgtctggaatgagactggggcctaataaaaaggagctcaaatgggctgtaccttgtagcatgccgaggacaggtctgacttctaagaagggaaagtggtaaaagtattgtccagtctttttaagttggtggctgagcttggtgaggtgtgtttttaaaagacctttagtccgttctacttttcttgaagacagaggaccgtaagggatataaaggtttcactgaatactaagagcctgaaaaactgcttggctgatttgactaataaaggctggtctgctatcagactgtatagaggtgggaaggctaaactgaggaattatgtctgacagaagggaagaaatgactgcggtggccttctcagaccctgtaggaaaggcctttacttattcagtgaaactgtctatttagactaagaggtattttagtttcctgacttggggcatgttgaataaagctaatttgccagtcctgggtgggggcaaatccttgagcttgatgtgtagggaagggagggggcctgaataatccc

SEQ ID NO: 944750 - DNA, 587 bp, Homo sapiens
agagatctgatttaaccaacactcagcgtgcctttaacctccaaactgtgcttaatcattcctggatttgagccaaactaactgatatggtttggctctgtgtccccacccaaatctcatctccrattgtaatccccacatatgaaggaagggacctggtgggaggtgattgaatcatgggggtggtttcccccatgctcttctcatgatagtgagtgagttctcatgagatctgatggttttaaaagtgtgaagtgtttggcacttcccctattgtgctcttttctctctctcctgctgccatgtaagatgtgccttgcttccccttcaccttccaccatgactataagtttcctaaggcctcctcagccatgcagaattgtgagtcaattaaacctcttttgtttataaattacccaaatcttgggtatttcttatagcagtgtgaaaacagactaatacattaaattggtgccagtagaatgaagtcctgctataagtataacctgaaaatggggatgtaactttggaactgggtaatggggagaagctgaaacagtttggaggactcagaagaagacaggaag

SEQ ID NO: 944751 - DNA, 632 bp, Homo sapiens
cagcggggactctcaggtccacgaaatttggggtgagaactacgacctttggctcttagcctttgacttatgctatccaagttccttggtaaatatttttttttacaattgcaaatagtgttttctgacaaaggagcagagattttaacaccagattaagcaaagcaaacagcaggcctctttgttacatactctctacgggtgtataactaataagcaatcagaaagctggacttttatttacccagtacacagggtggcattcagctcttcatttttagaggccttcttaaaagattagaagtatagtaagtagcaaatttcgttgaagatttcaagaaattctatggaagattacaagacaatttcaggaggaaaaaagtttgttctgctcagatgacgtgtgtgaagaggcttgatgtgatacacgcaccctgatcactaggcattttgttaaatagcatttctaagcccggtcaaatctggataacttttgggataacatttgtgagaagaagagtcactgagttgcctctctgatgytcattgctaagatcatgattttaagagggaagagaaagttatttagagaaagtagagcctggaaatacaatgaattggtagagtttaaa

SEQ ID NO: 944752 - DNA, 553 bp, Homo sapiens
tgtgacttttataaaacattttactagaggttctagccraggcaattaggtaaggaaaagaaataaaagactttcagattggaaaggaagaagtaaaccatttctctttgcagataatatgatcttgtatatacaaaactaaaggaatttacacctaaaacgaacaaaaaccaattagagctaataaacaaatttagcctagttgtagaatataagattaatagacacaaataatgatattttatacacactggcaataaataatctgaagatgaaattaagaaagtgatttcatttacaataatacaaaacagaacaaaatggttaaagtaaatttaacaaaattcattagttatgttaatatgagatgaatttgtttattagtgtgagacttgtgcaataaaacctacaaatgttattgaaataaattatagaaaacctaaataaatggaggatataccatgttcatagattggaaaacttaatgttatcaagatgacgcctcaaattgatctacagattcaaagtaatctctataaaaaatcccagctgg

SEQ ID NO: 944753 - DNA, 570 bp, Homo sapiens
aattacatgaggtcaggagttcgagaccagcctggccaacatggtgaaatgctgtctctgctaaaaatacaaaaattagctgggcgtggtggtgcatgcytgtagtcccaactactagggaggctgaggcaggagaatcacttgagctgagatcgcaccactgcactccagcctgggcacaagactcgtctcaaaaaaaaaaaaaaaaaaaaagaaagaaaagaaaagaaagtgcatggaaggctctccgcactgtggaaaatactggcatttctcaactcacaatgcatagattgtgagacatatcatggtccattgaatatcttttgactcaggggtggtgaccaggtgctgatagcaaggcctggggcccagtcctcctcccacaaccgcatcccccccagccccacccacagccacctgctgctctagcactagctagaaaagtcagcccctgggcattctcaagaattgagcccacccctttgtcagaccattctcccagggcagagactggcctgatcacatgaaaaccacacctgccgagccagagggcaaatgctccaacat

SEQ ID NO: 944754 - DNA, 569 bp, Homo sapiens
ttccaggttcaaatgagtctcatgcctcagcctcccaagtagctgagattacaggcacccaccaccaygcccagctaatttttgtatttttagtagagacagggtttcaccatgttggccaggctggtctctaactcctcccgacctcaagtgatccacccacctcgcctcccagtgttgggattacaggcgtgagtcaccatgccaggccgactcctagatttgataaatgaatcagcagcctcaggttacaaaagcaatgtacacaaattggtagcactgctacacaccgccaccaacaacaaccaagctaagaatcaaatcaagaactcaatcccttttacaatagctacaacaaaagtaataaaatacctagaagtgtacttacacaaggaggtaaaagatctttacaagaagaactacaaaacactgctgaaaaaaatcatagatgacacaaacaaatggaaacatcccatgctcacagactggacgactcagtatcgtgaaaatgaccacactacccaaagattaatagaacagagtagacaacctaggaaaaaagccaacta

SEQ ID NO: 944755 - DNA, 577 bp, Homo sapiens
gaccaattggtgcccacttcctcccctctgaggcccatgaaagccctggactcagccagacttgaggagacaatgactaggtatggacagcaactacctacccccgtgtctcgtctctacttagagctgaacactagacaagacaacctgcttgtggggagaagctacccaatgcaggcctcctctgaacccttctgtcactcaataaagctcctttttgccttgctcaccttccacttgtctgtggacctcattcttcatagacacaggacaaaaatccaggacccacaaaatggtggggctaaaagatctgtaacacaaacagggctgaaacatccccctggctcaccacattgcagaaggacagaagaaagaaagagagaatagctgcagcccttcggggagtccacacctaggagctccctaagctagggctatgacaccctctttgggactctggttcctggcatctctaagcttctgaatgtcactgcattccctggtgccagccatggaagctgcttgtggtgtgcttggtccagccacagsctgacaggaagcctcgcagggagctggc

SEQ ID NO: 944756 - DNA, 576 bp, Homo sapiens
gatttattgcaaagagcgaaagaacaaagcttctgcagtgtggaaggggactcgagcaggttgccactgctggctctgccagcctgcttttattctcttatctggccccacccacatcctgctgattggtccattttgcagagagccaattggtctgttttacagagagctgattagtccgttttgacaaggtgctgattggtgcgcttacaatccctgagctagacacaaaagttctccacatccccactagattagctagatacagagtgtcaattggtgtatttacaaaccctgcgctagacacagagtgctgattggtgcatttacaaaccttgagctagatacagagtgccgattggtgcattcaaaatcccttagctaggcataaagattctccaagtccccaccagactaactagatacagagtgctgattggtgcattcacaaaccctgagctagacacagagtgctgattggtgcatttamaaaccttgagctagatacagagtgctgattggtgtatttacaatcccttagctagacataaagattctccaagtccccaccagact

SEQ ID NO: 944757 - DNA, 579 bp, Homo sapiens
gcagtggatcccgcaccagggccgcaggtggagctgcctgccagtcccrcgctgtgtgcccgcactcctcagcccttgggtggttgatgggactgggcaccgtggagtagggggtggtgcttgtcggggaggcttgggctgtgcaggagcccacggcggggtggggggctcaggcatggcaggctgcaggtcccgagccctgccccacggggaggcagctaaggcccagcgagaagttgagcacagcatctgctggcccaggtgctaagcccctcactgcccgagtgtggggcccgccgagcccacgcccacctggaactcatgctggcccgcaagcgccatgcgcagccctggttcccgcctgcatctctccctccatacctccctgcaagctgagggagctggctccggccttgtccagcccagaaagaggctcccacagtgcagtggcaggctgaagggctcctcaagcacggccagagtgggcaccaaggctgaggaggcactgagagcgagcgagggctgtgagggctgccagcaggctgtcacctctcaatcccccctctaaacaggacaccc

SEQ ID NO: 944758 - DNA, 594 bp, Homo sapiens
tacttttcaatcttatccctaaattttaattccttctatttttatttacctagtagccttaactgcagtagtcttttttttttttttttaagacaagagtctggctttgttgtccaggctgtagcgcagtggtgcgatctcggctcactgcaagctccgccctcccaggttcacgccattctcctgcctcagcctccagagtagctgggactataggtacccaccaccatgcccagataattttttgtacttttagtagagacggggtttcaccgtgttagccaggatggtctcgatctcctgaccttgtgatctgcccgccttggcctcccaaagtgccaggattacaggcatgagccactgtgcccagccgactgcagtagtcttacacagccttcctggcttgatttctcccttgaatttagtatgacagtggcagaatcacacctgtaggtgagataatmctagagttctggtgatgtccagccttaagagaagcaggggcacaaggtggaactaacagcagcaaaaaggaatatctgcaataagagtaacttaggaggacacatgtgatattaataatcatggtaatag

SEQ ID NO: 944759 - DNA, 594 bp, Homo sapiens
tacttttcaatcttatccctaaattttaattccttctatttttatttacctagtagccttaactgcagtagtcttttttttttttttttaagacaagagtctggctttgttgtccaggctgtagcgcagtggtgcgatctcggctcactgcaagctccgccctcccaggttcacgccattctcctgcctcagcctccagagtagctgggactataggtacccaccaccatgcccagataattttttgtacttttagtagagacggggtttcaccgtgttagccaggatggtctcgatctcctgaccttgtgatctgcccgccttggcctcccaaagtgccaggattacaggcatgagccactgtgcccagccgactgcagtagtcttacacagccttcctggcttgatttctcccttgaatttagtatgacagtggcagaatcacacctgtaggtgagataataytagagttctggtgatgtccagccttaagagaagcaggggcacaaggtggaactaacagcagcaaaaaggaatatctgcaataagagtaacttaggaggacacatgtgatattaataatcatggtaatag

SEQ ID NO: 944760 - DNA, 589 bp, Homo sapiens
tttattacaattagatcttatgctgtttgtctaattatacttctgcactactgtccacttcatcagactagcataaaaatatacaggttgtcctgattctttgggtctgtatttttgaaagctcttgtgtcaagtttattattgtcgacgaaaagagtcaaactctgtaaaatatttgactgttcagtcaaatattcattctgagccaaatacgagtgaccctggcccatgacacagccccaggggatcctgacaacatgtgcctgaggtggtcaggctacaattcgtttttatgtattattgggagacataagacatcaatcgaaacatgtaagatgtacattggtttggtcaaaagctaaaagccccacacgaagtgggggcttcgaggtcataggtggattcaaagatttttctgattggtaattggttgaaagagtttatctaaagacctggaatcaatagaaggcagtgtctgggtgaagataaggagttgtggagaccaagatccttattakgcagatgaagcctccagttagcaggctttagagagaatagattgtaagggtttcttatcagactttaaaag

SEQ ID NO: 944761 - DNA, 589 bp, Homo sapiens
tttattacaattagatcttatgctgtttgtctaattatacttctgcactactgtccacttcatcagactagcataaaaatatacaggttgtcctgattctttgggtctgtatttttgaaagctcttgtgtcaagtttattattgtcgacgaaaagagtcaaactctgtaaaatatttgactgttcagtcaaatattcattctgagccaaatacgagtgaccctggcccatgacacagccccaggggatcctgacaacatgtgcctgaggtggtcaggctacaattcgtttttatgtattattgggagacataagacatcaatcgaaacatgtaagatgtacattggtttggtcaaaagctaaaagccccacacgaagtgggggcttcgaggtcataggtggattcaaagatttttctgattggtaattggttgaaagagtttatctaaagacctggaatcaatagaaggcagtgtctgggtgaagataaggagttgtggagaccaagatccttattatgcagatgaagcctccagttagcaggctttagagagaatagattgtaarggtttcttatcagactttaaaag

SEQ ID NO: 944762 - DNA, 460 bp, Homo sapiens
cagaaggatcacttgagcccaggggttcaggagttcaagactacagtgagctatgatcacaccactgcactccagcctgggcaacagaagaagaccctgtcgattgattgatcgatcaatcgacagattagatagaaattattattttctagccagactagaatttctttgctaatattgaggataagagctcaagttctggatacaataggtcactgggctgtgaattccaactctgctatttattagttgttgatttaggtaattggtagcctgcctgttcctcagtttcctaatctataaagtggtgataatagtatgtgcttcctaggattatcatcagttttttaaatttcttaacgtatgtaaagtgcttaaaacaggatcttgcatatagtaatcrttcaataaatattacttattatcatattcctaagcattgtaataagcagagagagcc

SEQ ID NO: 944763 - DNA, 404 bp, Homo sapiens
catattagggagggaaacctgatttacagtctacctatttaaatgttaatatcatcttaaaatctaaaataatgtttgaccaaatatctggataccccctggcccagtcaagtgagcacataaaattaatcatcacgcctatcaagtcacaaatgatatagatgaaccttaaatgtatattcaaacttaaagaacccagtaagaaaagaatatatactatatgattccgagtttgtgacatttaggaaaaagcaaaactatagagacagacagtagaaagaacagtgattgtcagaagttctgcaggaggrgctcggggtttaatatgtgaaacatgggcgatttgggggtggtaaaagtatttggaattatactatagcagttggtatatgaaactgtgcatt

SEQ ID NO: 944764 - DNA, 700 bp, Homo sapiens
gcccctcagttttcagacttgagccagtttacagacccagaatgccttgaatgatggggaggccgggtccccttgaggaaagaccccactaccttaccaacaatttatgcaattgagtctttctcccatctttccccaaggacacagccagccttttaccagggtaactgtgcattgggaacagggaaatgatcagacattctggggactactggacactggctctgaactgacgttgactctaggggacccaaaatatcattgtggtcctccagttaaagtaggggcttatggtggtcaggtaattcactgagttttagctcagatctgacttccagtgggtccagtgggtccctggactcatcctgtggtcatttccccagtatcagaatgcattattggcatagacatatttagtagctggtggaacccccacattggctccctgactggtatggtgagggctattatggtgggaaaggccaaattgaagccattagagctgcccctccctagaaaaatagtaaatcaaaaacaatatcacatccctagagggactgtggagattagtgccaccgtcaaggacttggaagatggaggggtggtgattcccatcacatccccattcaactctcccatttggyctgtgcagaagacagatggatcttggaaaatgacagtggattatcataagcttaac

SEQ ID NO: 944765 - DNA, 598 bp, Homo sapiens
aacaaatccacaaatttacagccaactgattgagaaagcaccatgaacacacattagggaaaggatactctcttcaataaatggtgttgggaaaactggatatccatatgtagaagaatgaaactaggcccccgtctgtcatcttataaaaaattaactaaaaatgggttaaagagttaaacataaggcctgaaatgataaaattaatagaataaagcagaagagtaatgcttcatgatattggtctatgcaagtattttgtggctaagacttcaaaagcacaggcaacaaaaacaaaaaatagacaattgggactatattaaatgaaaaagcttctgcacatcaaagggaacaatcaagagtgaaaagacaagctgtagaatgggagaaaatatttggaaactatttttccaacaagggtttaatatccagaatatacaaggaacgtgaacaactcaacagcaaagaaaacaacccatcccattaaaaagcagscaaagggcctaaatagacatttctcaaaagaagacatacaaaatggccaatgggtatatgaaaaaatgcttgacatcactaatcactagggaaatgcaaatca

SEQ ID NO: 944766 - DNA, 740 bp, Homo sapiens
atcacaaccttagaagctttttcaacacatcattctaagtagccactccccactgactggagatgcatcttgagtttgcaaaagcatctctattatctctgtacccatttcagaggtaggcaaaatcccaaagaatgaaacatgcttatggcacctgggtgggttcacaggtagggtggtcagatttaacaaatacaaatacaaggctgggcacagtggctcatgcctgtaatcccagcactttgggaggcctaggcaggcgatcacttgaggccaggagtttgagatcagcctggccaacatggtgaaacccctgtctcaactaaaaatacaaaaattagctggacctggtggcatgcgcctctggtcccagctactcaggaggctgaggcagaagaattgcttgaacccgggaggcggagggttgcagtgagccaagatcgcgccattgcactccagcctgggtgacaaaaacaaacaaacaaacaacaacaacaacaaaaaaccaggatgcccagttaaatttgactttcagataaacagtgaataaatttttaagcgtaattatgtctcaaatatggcatcgagcatacttatactaagaagttattcattgtttatctgaaaytcaaatttaacttggggtcttgcgttttatctggcaaccctattcctgggtgaccagaaaattgaccgtttgtccctcaggtactacaaatataacttctaggaaggaatcc

SEQ ID NO: 944767 - DNA, 740 bp, Homo sapiens
atcacaaccttagaagctttttcaacacatcattctaagtagccactccccactgactggagatgcatcttgagtttgcaaaagcatctctattatctctgtacccatttcagaggtaggcaaaatcccaaagaatgaaacatgcttatggcacctgggtgggttcacaggtagggtggtcagatttaacaaatacaaatacaaggctgggcacagtggctcatgcctgtaatcccagcactttgggaggcctaggcaggcgatcacttgaggccaggagtttgagatcagcctggccaacatggtgaaacccctgtctcaactaaaaatacaaaaattagctggacctggtggcatgcgcctctggtcccagctactcaggaggctgaggcagaagaattgcttgaacccgggaggcggagggttgcagtgagccaagatcgcgccattgcactccagcctgggtgacaaaaacaaacaaacaaacaacaacaacaacaaaaaaccaggatgcccagttaaatttgactttcagataaacagtgaataaatttttaagcgtaattatgtctcaaatatggcatcgagcatacttatactaagaagttattcattgtttatctgaaattcaaayttaacttggggtcttgcgttttatctggcaaccctattcctgggtgaccagaaaattgaccgtttgtccctcaggtactacaaatataacttctaggaaggaatcc

SEQ ID NO: 944768 - DNA, 595 bp, Homo sapiens
acaaaataatgaactaggtgtaaattaagagccagattaaaatgttttaattgttcaataaatatttattttgtaaataaataaagtatatattattagtccattctcacactgctataaagatactacctgagattggttaatttatacagagaggaggtttgattgactcatggttccacatgactggggaggcctcaggaaacttacagtcatggtggaaggcaaaggggaagcaggtaccttcttcacaaggcagcaggagagagagagaagtgtcacactttaaaaccatcagctcttgtgggaactcagtatcatgagaacaacacgggggaaacagttcccatgatccagtcacctcctaccgggtccctccgttgacacgtggggattacaattcgagatgatatttggatggggaaacagagccaaaccatagcaacaagtgtgaaacagttcctcaaaaagttcaacctagcgttatcatatgacctggcaattccactcctatgaagacacgtgtccacacaaaaacttatgcacaagtgttcacagcagcgtttttsgtaatagccaagtagcggaaatgaca

SEQ ID NO: 944769 - DNA, 551 bp, Homo sapiens
caaaggttataaaagcggttcagtggaagaacagttctttcaacagatgatgttaaagcaattagatgtccaagggcaaataattgagtctcaacctaaacctaatacttcattcaaaaattaattcaaagtgtattatagatttaaatataaatgtaaaactaaaaaactttagcataaaacaaagaaaaattttaggaagtagggctagatgagaagatcttagatatgacaccaaaagcacaactcataagagaatataattactctattggacttcataaaaattaaaaacttttgctctgtgaaagactacatttagagaatgaaaagttaatctaaagttaatctacagactagaggaaaatatttgcaaatcacaagattcaacatagggcttctacttagaatatataaagagctctcaagctgaacattaaaagaaaaataagcaggctggtctgaagatagcgaagtatctcaaytgattgttcacagttcgttaaggatcttactctttgttctacaattccccccttctcactactgca

SEQ ID NO: 944770 - DNA, 612 bp, Homo sapiens
gcccctgtgggagccacagtagcctcccagcacctgtgagtgggaccccactctacctcctactttgctttccacttatacttctggttcctctgaaaagccagaggcctcacaattaattattgtagcagttgctccttttgcaaagatatctctgattccttccatttctgctacccatagccagtctccctgagtcttggatgacaccagacatccagtaaaaagagctctcttccaaacagtaatcttcagatgcaggaggtggtggccaccactggcagtgtccccacagacagaaccactatatcacaaagggaattatgtaaccatacaaagattaacctcccccttctagtcacaattcaccagtccctctaacaactggctggggatcttgggggtctaaaggctgcatcccaagggaatggtgtggttttgcttccctgaaagtgacaagaggaatgttttctctttatctacctcaagaggtgcctaccaggcaaggcctcagtggttcaggacatttcaggcaaagaagaggctggagccagacggcagtcwtctttggggaagatggggaactacagggctcgctcctaaggcagctat

SEQ ID NO: 944771 - DNA, 717 bp, Homo sapiens
cttcaaccagctgccttagtgcagcagaagctgggagctggcctgctgaccactggaaggcagaagtctctgggrtccaggcaggcaggagagcaggcaggcccagagcctctgctccagctctctatctcggcccgggagaagccagagacctgaatggagcatgcgtctgagcctggcatcaggcactacgcccagcagcttctccagcttcacgggaccctacatggccagtgttactattattgtgcccatgttgtagctgcagggcctgaggcacgcccagagccacaccgggggaagcggcagggctggccagggtagaccaggcacatggtgcacagggccagcgctctgacccaggggctccagggctgtgccatgcagcccaggacagaagctcaaaggctgggcaaagcctatctactccctgtcgtgttttgtgccattcacaggcccccaacgtgtccccatgccacctgatatgttcctccactagagtcgtgaccaaaagccttgtcatggtttgttggcctacccggctccccagtcagtgtttcctaaaagtactcattcattcattcattcattcattcattcatctattctctcatgcaacaaatcactttgctaagcacagggaccaaagcagtgaacaagagagttaaacgtcttgctctcaaggaacagaagttctagtcatggagagacagacaa

SEQ ID NO: 944772 - DNA, 643 bp, Homo sapiens
tgtgtacatattatggtccaacctttttaacatccttgttatgacttaatttccattgtccttatttagcttgaaaatttacattatttcaacgatttatattacttttgtttacttaattaaagccccctcttgctttgagttttctcaatgtcatactagagaacaaactagtacaggttcagagctcaggtaccagtgtctgagtgcctgtgtttaaactgcaccttgccaccaaactagttatatgacctgggcaggaaacacaggttctttgtgcctcatttccttttctctataatagtgataatcatatcacctaactcctaggctgttttatgattaaattagttaagtcatgtaatatgcctagaatggagtggcacacagcaaatgctccacagcggcagctattgtcttcatcttttattgttgtcacctggtgaggaccacatcagaaagtttatcctcaaaatctcttacaaaacctcatactagaagtgggtgctcaaaacaggtgtgaagtaacagtggtaggtagaaaaatgcactcccacccaagatgtmgacttccacttggaacctgtaaacatgttaggttgtgtggctagtgggaattaaggttggagatgggcttaaggtt

SEQ ID NO: 944773 - DNA, 657 bp, Homo sapiens
atcccatcttgggccagtcagtccctggtggcgtgtgccttgggtacctgcctccaatacagtgtggggctgggctgggcttagcaactgagcccgtccaggcagggagtccagcccacacccaggctctggaggcccgctgaaggtcactgtcctccgagtactgcagggtctgtggtgacactgtctccagactgatcctgactccactcactttcccagaaaaagaaagattacgaggtggagctgctccgtttcctcgaggtgagtgttcctccggtggggcagtgggcagagaagactgggacttggcaggcagagccctggtgagcccctggagatagggcaccatgcagtctgggtgccaggcatgcagccccgtgctcctctttcctgtccagagcctgcctgaggaggagcagcagcgggtcttgggggaagagaagatgctgaacatcaacaagaagcaggccaccagccccgcctccaagaagccagcccaggaagggggcaaggtgggcagagggtgcggcygcgcaggcgggggtgggcaagactgggctccctggcagcacccacggaccccgaccctctgcacctggacagggcggctccgagaagcccaagcggcccgtgtcggccatgttcatcttctcg

SEQ ID NO: 944774 - DNA, 638 bp, Homo sapiens
ctggtggcgtgtgccttgggtacctgcctccaatacagtgtggggctgggctgggcttagcaactgagcccgtccaggcagggagtccagcccacacccaggctctggaggcccgctgaaggtcactgtcctccgagtactgcagggtctgtggtgacactgtctccagactgatcctgactccactcactttcccagaaaaagaaagattacgaggtggagctgctccgtttcctcgaggtgagtgttcctccggtggggcagtgggcagagaagactgggacttggcaggcagagccctggtgagcccctggagatagggcaccatgcagtctgggtgccaggcatgcagccccgtgctcctctttcctgtccagagcctgcctgaggaggagcagcagcgggtcttgggggaagagaagatgctgaacatcaacaagaagcaggccaccagccccgcctccaagaagccagcccaggaagggggcaaggtgggcagagggtgcggccgcgcaggcgggggtgggcaagactgggctccctggcagcacccacggaccccgaccctctgcacctggacagggcggctccgagaagcccaagcggcccgtgtsggccatgttcatcttctcggagga

SEQ ID NO: 944775 - DNA, 580 bp, Homo sapiens
accatgttggccaggatggcctggatctcttgacctctttatctgctggccttggtctcccagagtgctgggattacaggcatgaaccattgcacccagccactgaaactggtttcttatttaaagttcctcactgtctttgggagacatataccctaagtgtgtgtgtggatattatgtcgaattgagtgaaggatatcagaatgcaaaagtggagagagagcaagaaggagagagagagagagagatacagagataggagaaagagagagagagaaagagagagagagaaagcaggtgtcaagtagtcaagtaaaaatagagttctttacattttttgatctgtacaagaaatgtaataactaagaatttggggcaaaatctgggaaagggaaaaagagagaaaaaaaggaggttggtaaaatagggctttaatatgtcctaataatagggctgtaatatgtcctaataagayaggcacgtgtctcatccaagcgtttttgacacagttgctctgcagtctcaatgggtcattctaggatatgtactcccttgtctccaatggatgcatcagttttct

SEQ ID NO: 944776 - DNA, 592 bp, Homo sapiens
tctgtagacgtctgagtttgtaactcctactttgtaccaacatcactgattccagagaagaccttcttttcatgaagaagatctgttttaagaaataaagatttcttgctggccatggtagctcatgcctgtaatcccaatactttgggaggccatggcaggtggatcatttgaggtcaggagttcaagaccagcctggccaacatagtgaaaccctgaatacaaaaattatccaggtgtggtggcacatgcctgtaatctcagctactcaggaggctgaggaaggagacttacttgaaatcaggtggcagaggttgcagcgagccaagatcatgccactgcactccagcctgggcgacagagtgagactccatctcaaaaaaaaaaaaaaaattcatatgtaaaagtaaaaactaaagcaagatgccaggtgtggtggctcatgcctctaatcccagcactttgggaggctgaggtgggcggatcacttgaggtcaggaatttgarattagcctggccaaaacagtgaaacctcatctctactaaaaaaaatatatatatattagctgggagtggtggcggagcctgtaat

SEQ ID NO: 944777 - DNA, 592 bp, Homo sapiens
tctgtagacgtctgagtttgtaactcctactttgtaccaacatcactgattccagagaagaccttcttttcatgaagaagatctgttttaagaaataaagatttcttgctggccatggtagctcatgcctgtaatcccaatactttgggaggccatggcaggtggatcatttgaggtcaggagttcaagaccagcctggccaacatagtgaaaccctgaatacaaaaattatccaggtgtggtggcacatgcctgtaatctcagctactcaggaggctgaggaaggagacttacttgaaatcaggtggcagaggttgcagcgagccaagatcatgccactgcactccagcctgggcgacagagtgagactccatctcaaaaaaaaaaaaaaaattcatatgtaaaagtaaaaactaaagcaagatgccaggtgtggtggctcatgcctctaatcccagcactttgggaggctgaggtgggcggatcacttgaggtcaggaatttgaaaytagcctggccaaaacagtgaaacctcatctctactaaaaaaaatatatatatattagctgggagtggtggcggagcctgtaat

SEQ ID NO: 944778 - DNA, 584 bp, Homo sapiens
attcaagaactggttccaccacatataagctgtgtgaccttgggcaagtgamctctctagtttcaagttcctcatctataaaatgggataacagtgtctccttgggttgttgtgaggattaatggtgcacagaaacagcacagcacagtgtctggcacacagtatgccctcaaatacaaatgtcttcactacccaataggtattccctcctcccttgccccaattttttgaaagtcgcaatgtacccagcaaaacacttacatttcccaatctcccttgtagctgaggatgatcatataacatagctttggccaataagatataagcataaattgctaggcggagtcctccaggaaagtctttacaagaaggcaagcttagctaacccttctcttcttcctgcctgggatttagactttgctgaattgcaaagtgataaaaataaggatgcaagtcatatgctaaaaagctgggtagaaggtgataaaaagcccatgtccctgattgcatcacagtgctactgtaccaacctactgactacccctggattcctgctatgggagaaaactaaaatccaatttgat

SEQ ID NO: 944779 - DNA, 808 bp, Homo sapiens
tctgaactgacctcgtttaattttggggggctctgcagggacacaaaagcatacaaggaagagggcacttgtgtggtccttcagcagcagctctgagcacctctctgcctggcccccaacaytacgctgcccccagcactcctgcccactcccggtgacaccctgaactgcctgggagctccccacgtggtccctcaggcatcactacggggtgagtgccaccagccgacagtcccctcgagccacactggtcactccgtctgggtgaggcaagactttgaacatttcattgaaatagaaaaagcacagcgtggccacgaaggaagagaagctgcagagtacttaatgcagcctaactccagacagagctagagtgaccaggcggctcaggacaggccctcacgcagtcgcaatggagctgggtggaatcaggaagaaaaaggaacatgtgtaaagaggtaggcaaaccattctagaaccctctcccaggctggctgggctcctgggaacggagatgggcctttcgtgcacccaaggccttggccgcggttatgctcacaggagcagggaggccagcaaccctgtccaccagcacggctggctccgtcccacaggacttttgtcagttggcctggtggggaggaaccatggaccccgactgccagcaggaccctgcagcctccagggaagcccatcttgggatgaagttggccctggtcagcacggaggagccgggaaaagcgaatgccagttcgtaggcagccagtggccctggccagttttcaggctgagtctgagcagggtcttc

SEQ ID NO: 944780 - DNA, 482 bp, Homo sapiens
tttttcacctcagctagaatctcctgtttgcctgttttctactttgggcataactcttgccttgaggttgagattgatcatttctaatccattttatatgagaatgggcaaattccctcaattttgagtgccttgaatctgctactgtctctgctttattccactcatcttgtgtggatgttttgatgtttactcattgcctggacttcccagacacctgcgtcactctgtcctactcttctgtcattgtcttgttgcgtggaattgtacttaaatcttaatttgtgtctgtttaaaatcttatgccctgatatggtttggctgtgtccccatccaaatctcatcttgaatttccatatgttgtaggagggggccrgtgggaggtaattaaattatggaggcaggtctttcctgtgctctcctcgtggtagtgaatgagcctcacgggatctgatggttttaaaaatgggagttccctgcac

SEQ ID NO: 944781 - DNA, 620 bp, Homo sapiens
ccaagacatagcatcatttcctctactccctcttttcacatgtttactttatcttatgtaaaatgtagatttactgaggctaatcagagcctcaaaagaatggaaccatctgcctcastgtctaccctctcttcctttttttttttttctctcctgcttgctctttcttttttaaataaagaatttcccaaaaccccctttggaaaaagcataggttacagatgctcttgtgagttgcatttttttcccagacatgttctcaaccttggctaaatgatcgctaacccacagagatctgcctcagtcactttttggtttgcagtcccaagtcagttgattttagttaatcaaaaaggggttaagactattttcagtgggcctcacttaatctggtgattgtccttaaaagatgggctggggcctccctgaggtacagaattgtccttgctggcttgatgtagtaagcagtctgctgaggaagcccacatgggaagggatggaggtgacttctagaagctgaaggcaactccagccaacatccagcaaaaatgtggggctgtcagttatatggttatgaggaaaataattctgcaaacaatctggatgagcttgggatcaga

SEQ ID NO: 944782 - DNA, 452 bp, Homo sapiens
attagggagtaccccaagtgcaataacactgtagttcttgcagatttacagagttatcaccttggtggtcttggataagatccagaagaattstctggattaccaggcagagattcgtgttctcttcccgtaatttctcccaagctaatggagtctctctttctgttctgagctgcctggagcttgggaaggggtgaacacaagcactcctttggccaccaccactggaactgcacagggtcaaacctgaagccagcacagcactgagtcttgctcaaggccccggcaaccactgtttggctactgccttgaatactaaaagacctagggctctacaatttacaattagcaagtgtcaaagccaaacaaggccctgggtgggttcagaaatgcagtctaggatccagggtctagagtgtgaaatcttttaaacctacctggtgccctaaact

SEQ ID NO: 944783 - DNA, 568 bp, Homo sapiens
tcaatgagaaaatagtagtcttcaacaagtggtactggaaaaatggtatatctctctgcaaaaagtaaactctaaatattgcttcacacaatatacaacaattacctgatagggatgacagacctaaggttaagagcaaaaatttaaaaacctctggaagaaaacatataagaaatatttccaaaactttgaattaggaaagattttttagctagaatatgaaaagcacataccagaaaatttgataaattggaccacattcaaatgaaaagcattttctcttcgaagacaccattaagaaaatggataagcaagccatacactgtgtgggaatatttgcaaaatatttgacatacatacacacacacacagagatacacatatttaccatatatatatgtggtcttgtgtccagcatatataaagtcttacaacttaagaaaacaatctaatttttaaaaatggactagcaatttagayataactgcatagtgagatacctccacacacactgcagactgactaaaattagaaaggctgacaataccaagtgttggcaaggatatgg

SEQ ID NO: 944784 - DNA, 653 bp, Homo sapiens
cctgggagcagacggtctagtgaagaaacattaatggggtcaagcaaataattaaagttcaccatgacaaacaccatgaaractgggcccagagcgggaagggtctctgaagctgtttggcacacatcaggaaatgagaatataaacatgtcaagaaaaattggaaacaagattagaaatgagactgtgacattgaattcacaactctctcccaggaagtcagtggggctgtaaatacagctttctagtttgtccatgtgatggcttcgtcccacgctgggaaacaagagtgactattataccccctggcttatgggtcttggcaggttagtaccttgaaatgaaagcatgaagagattggccaaaatacaccaaaaagggcaaagccaatggaaggacatttattttcctcattgccttatgaacctgtctttgcagaggctggtgatttggaggtgtggcatgctgagctctctgggggttgctgggccgtggcagaaatccacctctgttggaaataaaaaccctgaaaccataaatgtcagcttttgtttcttttttttttttttttaacacgtgctttttctttttttaaagtttaacatctttggtgtttgacttggggctgctgataccaaagcaagcctgggggt

SEQ ID NO: 944785 - DNA, 470 bp, Homo sapiens
ttaggagtttgcagttgaggtggaggtgggggctacagcatctcagggcttgactgcagagggatttgcttccaagctcactcacattgctgttggtgggattcagttcctcactggctgttgtccagaaggttcctttcattctgagtcacgtggacttctccattgggaagcttacgacgcacaggctgacttccctcatagcaagcacccaatcaagccagtgagggggatgaggaatatggaagccacagcctttgtgtaacctaattttggtaattgcattccattgcagtcaacacattgtgttcattagaagcaagtcgtgcatcctgcctacactcagggaaaatgattatacaagggartgaatgccaggagtggggggttcttgaagtttctcttagagtgagctttcctatgttggcaacatatgcagaatctctagtatatcaggttcaatcaggaag

SEQ ID NO: 944786 - DNA, 606 bp, Homo sapiens
gtgcctctaacctctgtgttgttcaaagatcaactgtatatatagttatatatacttttatataggtacacatatacatatgccaacatgtttatatttatatacatattttacatatgtatatgtttatatgtrttactatataaccagttacatatataaatatatatgtattgtgtatatatgtatataaataagtatatatgtctttgtgtatatgaataaatacacatgcatgtaaatataaatatatgtatatatacatatatttatttacatatacatacacttacatacatttatatatacatacacatatacactatatataatatataaatacatatactttatatacactcacacaaatgcacacatatatatattttttatacacacacacatatatatttctttacatacacacatacacagagttttgaagaaattggcttatgtgattgaagagacttggcaagcccgatatctccagggtagaccagaaggctggagacccagggaagagctgatgctgcagctcaagcccaaagtcctctgtgtggaggcagaatttcttcctcctccagggcccacagtcttttgttc

SEQ ID NO: 944787 - DNA, 606 bp, Homo sapiens
gtgcctctaacctctgtgttgttcaaagatcaactgtatatatagttatatatacttttatataggtacacatatacatatgccaacatgtttatatttatatacatattttacatatgtatatgtttatatgtgttactatataaccagttacatatataaatatatatgtattgtgtatatatgtatataaataagtatatatgtctttgtgtatatgaataaatacacatgcatgtaaatataaatatatgtatatatacatatatttatttacatatacatacacttacatacatttatatatacatacacatatacactatatataatatataaatacatatactttatatacactcacacaaatgcacacatatatatattttttatacacacacacatatatatttctttacatacacacatacacagagttttgaagaaattggcttatgtgattgaagagacttggcaagcccgatrtctccagggtagaccagaaggctggagacccagggaagagctgatgctgcagctcaagcccaaagtcctctgtgtggaggcagaatttcttcctcctccagggcccacagtcttttgttc

SEQ ID NO: 944788 - DNA, 709 bp, Homo sapiens
gcgtatctccagacagtagcagagatggttctttgcccagcaaagttttgtgggtccacatccataatatagtgttgctgctacaaaatagccatccaaatgcattttcaggcccccttacatccamtggggtgtgaggactggttcccaccaatgaaatatgagtggaggaggcgtgtgtcttttctggttaagaccattcacaagtgggtgtacctctgtctttcccacatccattgcttgatggcctcttggaatgaagctctaaaagctaagaaaaagcaagcctcttgaatgtctagcagtaaagactcccaagtaggcaactgagcaaatccaatgatgttgagttggaaataagtttagaagctgcaaggaacagacgggaagactgtgtggctagaaataaacgaataagaagagcaatgggaccaccatgctagaggatagtggggacaggtggagcgaccattgtgtggagacttcttggagggaatgtgcaaatgtgtatcttatcctaaaagcaatggaaatcagttacgcagaggtgtggcctgaatgggtgcacatcctgtaaaaatgttctcactgctttgtagagagtgaatggaaaacagggctgacaaggacatggggacacttgtttagaatgctccccctttctaccagagagaggaaaggagcttgatccaggccagcagctgtgagg

SEQ ID NO: 944789 - DNA, 591 bp, Homo sapiens
tacaatgttctatccatacttaggttcaaagaaataatttctgatgcatcttcctaatttatcaaaagaaacattttaacagccttaaagtgacaacactaaaatcctctaacacattaatcatagaaaatgacataaaatatgttctaaaagagctataagtgcaaattcaattttctatagacattttaaaatggatcaaggtagcttcatttcatcttgaatttatattacagtagataggaatctttgacttttatcattttcagttggcatacacaatcaaagcaatacatggaaatggatttctcatgcttgagtaaccagacgttctcctttcttagaactgttttccctacttgctgttttgaaattctaggctattattttagataagtttatggtagctgttgtaacagaaagacccctgaagctcaatggctttatacaacagaagcttattttgggcccacatgaattccaaytggtgacaggtgtgaggatgggcttctgctccatttagtcatccaagaatctctactaaacggattctgacatatttaactcttggtttctaagatatccatattg

SEQ ID NO: 944790 - DNA, 656 bp, Homo sapiens
cacaacgcccggctaatttttttgtatttttagtagagacggggtttcaccgtgttagccaggatggtctccatctcctgacctcgtgatccgcccgcctcggcctcccaaagtgctgggattacaggcgtgagccaccgcgccctgccaggtctataaacatttttaagtgtacagttcagtggcattaagtatattcacattgttgtgtagtgattaccaccatctgtctccagaactgttatcatcttacaaacctgaaactctttatcagttaaataactccccattagccccgtcctggcccctggcaaccagcagtttcttttctgtctttatgaatttgactactctaagtgcctcgtataggaggaatcatatagtgtctgtctttttgggtctggcttctttcactcagcataatgtcctccatgttcatccatgttatagcgtgtcagaattccattcctttttaagactaaacaatattatacataggaaagccggttagttttacatttatctttagtattcagcaatttaccacattgctttgacatagtaagtacaatcaggatttgtttcattaaatkgggttaatctacttgaagggctggggtggagaatggggtctaggaagaattctgtggtactca

SEQ ID NO: 944791 - DNA, 473 bp, Homo sapiens
aggcttggcctgggatgccccagagaacaggacagatggrgcaggggcaggcatttagggagcagtgacagaacgagttgatgaggatggagggaggccacgaggggaaagcacccagtgtagtgtcgcgtgcaccagcactgccctgggagatgcctttagctgggcccagggaaggagcaggtgtgtggggaggagctccctgcagggggagtggtgttaggttggcggcccccaggtcagggaggagctgacagagtccgtgtggggagcatggagggcgctgaggacttgggccgaagtgaccctggtgagggtggaccctgctgggctgtgggttccgttgagggcggttggcatcccctgggaaggctccaggctgggagggactctgtccccctctggtggacagggagggaaatgtgaacggcagcaatcccaggccaggctgcatgttttattccacatggatc

SEQ ID NO: 944792 - DNA, 473 bp, Homo sapiens
aggcttggcctgggatgccccagagaacaggacagatggagcaggggcaggcatttagggagcagtgacagaacgagttgatgaggatggagggaggccacgaggggaaagcacccagtgtagygtcgcgtgcaccagcactgccctgggagatgcctttagctgggcccagggaaggagcaggtgtgtggggaggagctccctgcagggggagtggtgttaggttggcggcccccaggtcagggaggagctgacagagtccgtgtggggagcatggagggcgctgaggacttgggccgaagtgaccctggtgagggtggaccctgctgggctgtgggttccgttgagggcggttggcatcccctgggaaggctccaggctgggagggactctgtccccctctggtggacagggagggaaatgtgaacggcagcaatcccaggccaggctgcatgttttattccacatggatc

SEQ ID NO: 944793 - DNA, 570 bp, Homo sapiens
tttttttttttttttttgagttggctctattgcccaggctggagtgcagyggcgtggcgtgatcgcagctcactgcaacctctgccttccgagttcaagcaattctccgacctcagcctcccgagtagctgggattacaggtgcctgccagcacacccggctaatttttgtatttttagtagagacgtggtttcaccatgtgcgccaggctggtctcaaactcctgacctcgtgaccacctgcctcggcctcccaaagtgctaggattacaggcatgagccactgcgcccggcctggactgctgtcttgctggtcactgtatccccaccacctggcacatcgcctggcatcagtaggggtttaattaatatttgaattcatgaacaaaagactttttaagtctgctttttaaccaaatgaataaatcccaaagataccatattcagagaaagaagctggacataaagtgtacactctgtaggattccatttatatgaagttttagattcagcaagggttttcctcaaggtacagttagtaaatgctttcagccttgtgtgctgtgcagtt

SEQ ID NO: 944794 - DNA, 582 bp, Homo sapiens
taaacaaacactagtcttatgataagcaatattaaaataattacaactcatcagctcacagacaaggactaatggggcccctgttccaccagccataactacagctttgattggacaagagactgatttcagtaactttctcctgataacaccactgaccatgggctggttctggctcattgacagaggctgtgcatttgggtaccttcgtgtcctgaaaagaccttttgatgtataaagcctaaatgtgatacatttaaatgttaagtaaatgttaagtatccaccccaaagtggacatggggtcatatgttacatgcaactttcttcaatatgcatgcatcagggccacctacatgaatattcatagctcctcctgtaacctgttgaatatgcatgtttagccaacccattcagcataaagctcctactccaacccctcctccttagaagtgccygtctctgctcttgaccggacgcatgcttcccagcctgtgggatgacctctttgcaggctataatcttttacaataaataaagtctcctttttcaaatgtgtatattgtggttttttaggttggca

SEQ ID NO: 944795 - DNA, 582 bp, Homo sapiens
taaacaaacactagtcttatgataagcaatattaaaataattacaactcatcagctcacagacaaggactaatggggcccctgttccaccagccataactacagctttgattggacaagagactgatttcagtaactttctcctgataacaccactgaccatgggctggttctggctcattgacagaggctgtgcatttgggtaccttcgtgtcctgaaaagaccttttgatgtataaagcctaaatgtgatacatttaaatgttaagtaaatgttaagtatccaccccaaagtggacatggggtcatatgttacatgcaactttcttcaatatgcatgcatcagggccacctacatgaatattcatagctcctcctgtaacctgttgaatatgcatgtttagccaacccattcagcataaagctcctactccaacccctcctccttagaagtgcccrtctctgctcttgaccggacgcatgcttcccagcctgtgggatgacctctttgcaggctataatcttttacaataaataaagtctcctttttcaaatgtgtatattgtggttttttaggttggca

SEQ ID NO: 944796 - DNA, 608 bp, Homo sapiens
aataaagaaatctgtcattaccttaacctagtcaccaatcatggcatctctaataacagtgagacagacattatgcatcttttaagatgaataaagtacatggtatcacctattaagtattcttgycagaaatgtttgcacttaattagattaagtcttcacattagctcccagtttatagaaaacacaagagatacagaagttaaatgagataacaaggaaataatcagatgaatccttcaggttggatattctcggtataactgacttggtctcttcaacaagccaatatattaaaaaagaagattggaataggtggtgctgatctaaatttttaaaaatgtaagtgaacaactgaatacaatgaaatcaatggcaaagacatttttggcacaactgaggaaatgtgaacatagactgagtattaggcagtattatggaactactgttaagtggtggaagcaatgtggtaaatgaggcaaattactttatggacatgaatactgatgtattaaagagtgaagtgtcacaatttctgagctttactttgaaaaaaataaatatgacaaaatattaacaatatttactttgaaatactttgaaaaaaa

SEQ ID NO: 944797 - DNA, 742 bp, Homo sapiens
tggaggagaagaggccctctggctttttgcactttcagcttttttgcattgattctcatatttgtaggcttctctacctttgatccttgaggttgctgacctttgaatgaggtttttgtgaggtcttttttgttgatgttgttgcagttgttgttttctatttgtttggttttcttttagcagtcaggcccctcttccataaggctgctgtggtttgcttgaggtctgcttcagaccctacttgcttcagtgtttctcatacccagaggtatcaccagtgaatgcaaacataacagcttgctatcaccagtgaaggcaaagataacagcaaagatagcagcctgcttcttcttctggcagctcaaacctagaggataactgacctgttcctggcctgaactctcctgtagaatgtgctggagacccctgctggtaggtcttacccagccaggagaaacagaatcaggaacctctccaaagaagcagtctggctgccctttggtagagcagatgcattgcattgggtgggaccgttcctcatccagaccgtgtgtattttccaaagctggcagactgaaatggctgagtctactgaaccacagagttgtggctgctcctcttcactagagctcagagttctgtctctagaacccttgctrgagtggctgaagcccctgcagggaggtctcgcccactggggagggatggattagggtcccgtttaaagaagcagtctagccac

SEQ ID NO: 944798 - DNA, 712 bp, Homo sapiens
gggagaatcgcttgaagccggccttggagattcatttcttcgccttgctattgttcttcgtctcctgcatcatcagttttcttcctgtcttaggtgaagagattgaggtgaggcaggagaatagggtctgcaggcagggaacataaagctgattcacgctgacttcttagaactaaataaaatggacacatttcagctatgacaggaaatattttcttcatttacatatggcgttcactgagtaagtgactgagcaacttcacttcatcttcttcatttacatagggtgtacaccaattaaccaatgggagcctctagagggtatttaaatcccagaaaattctgtaacggagttcttgagcccctatgctcacgctggctcccaccctgtggagtgtacctttgttttcaatacatctctgcttttgttgcctcattctttccttgctttgtgcattttgcccatttctttgttcaagatgccaagaacctggacaccttcaacaagtaacacaggtgcctgtgatttattgaaggaagactcttaggagagtggtgggtatgatagggcagaggaagaaaaagtgaaacaagtatgtagtcagtggaggctccatggggaggtctggaatgtgaaggtctggaacaagaggcagcctcctttctgcccagggcaattcttctggacragggggaagctgtgtgagtgttt

SEQ ID NO: 944799 - DNA, 579 bp, Homo sapiens
cagctgtggaagctgtaccctgaaaaacttcagggasagagcttcccaaggcattgggagctcatcccttgcaccggtatgccctggatgtgagacacagagtcaaaagagattattttggagatttaaaatttaatgactgcactgctggctttcagaccttcatggggactacaacccctttgtttggactgatttctctcttttggaatgagagtctttactcaatgcctgtacctccattgtatcttgcaagtaactaacttgttttttattttacatgctcataggtggaagggactttccttttctcagatgagaattttgattgtagaattttgagttaatgctaaaattagttcagactttgagggactgttgagaaggaatgactgcattttgcaatgtgagaaggaaatgagattcgggaggggccagaggtggaatgacatggtttggatttctatccccacctaaatctcatgtcgaattgtaatccccagtattggaggtgggtcctggtgggaggtgactgaatcatggggatggatttcctctttggtgctattctcatgacag

SEQ ID NO: 944800 - DNA, 444 bp, Homo sapiens
atagaaaaaatactatcaacagaagcaggcccacagatggatcagatactggaactagcagakaaagactttaaaacatctactgtaaatatattcaaggatgttcagaaaaagatggccagaatgaataaatagttgggggattacaacagagaaatgggagccataaaaaagaaacaaatgaaattctagagtaaaaataaacatctgatgtaaataatggattgaataggcttaacagcagaacagaaactgaaagaaaagattagtgaacttaaagaatggttaatagaaattattcaaactaaagcacagggaaaaaaaatatttaaaaacactttacccatcatcaatcagtgacctattaaatggcctaaaatgtgagtagttgcaatcctagaataatgagagagagaatgggccagaaaacatatttaaagaaat

SEQ ID NO: 944801 - DNA, 730 bp, Homo sapiens
gggcacggtggctcatgcctataatcccaacacttgcaaaggccaaggcaggcagatcccttgagcccagagtaygaaaccaactcgtgcaacatggcaaaatcctgtctctagaaaaagaaaaacaaaagaaatgtaattccaattctgtaccagaagtacacatcgtggtgataaagacatgacagggatctattagattttgccaattatcactctaaaattaaagtcagaaataatgaaatgtgttaataagtaaaattataaaacatttttctttgagttgactaaagatcctttgcattctttaaaaatactaggtaattcttataaaaaaaatgtcaagtgctttaaggaggaaatagaaagtgaagaaaagatctgaacttggctgcacccatcaaatctcaaactaacagtttatctccttctacctgtgcacctccatgttaaaatattccctgctatcccaatagggtcttatttagattcagtaaccaattgcaatttgtaaatgctgtacagggaagtgtttagtgttcagaggaagagctgtactgtattatcctggcttcaagcacaagactaatctcatgaatctgagattcttcacaaatgtacatattagaagtcttcaggaaagcatcccagacatttgtagcattattaaagatttaaattttaaaccattgtaagtgtgggcataacagaagcagcaattttatggatt

SEQ ID NO: 944802 - DNA, 592 bp, Homo sapiens
tggagtgtcccagggctcagttcctccctgatttcatcaagtcttatggctttaaactccatcacatgtagacagctcccaaatgtacatctccaggccatccccagcctctctcctaactccacatttgcatctccgacagcctacttgacaactctacttgaatttgtaatgggcatctcgcacttaacatgtccaaaatcactccagaataccattccccagcccaaactgcaatctttcccatcttagtaaatagaaagtccttttttgtttttccaattgctcaggccaaaagcacttggactgggccaggagcagtggttcacacctgtaatcccagcactttgggaagccgaagtgggtgaataacttgaggtcaagaccagcctggccaacatggcaaaaccctgtctctactaaaaaatacaaaaattagccaggcgtggtggcacgtgcctgtaatctcaactrcttgggaggctgaggcaggagaatcgcttgaacccgggaggcaggggttgcagtgagccaagatcatgccactgcactccagcctgggtgacagagtaagactccgtcttcccccaaa

SEQ ID NO: 944803 - DNA, 592 bp, Homo sapiens
tggagtgtcccagggctcagttcctccctgatttcatcaagtcttatggctttaaactccatcacatgtagacagctcccaaatgtacatctccaggccatccccagcctctctcctaactccacatttgcatctccgacagcctacttgacaactctacttgaatttgtaatgggcatctcgcacttaacatgtccaaaatcactccagaataccattccccagcccaaactgcaatctttcccatcttagtaaatagaaagtccttttttgtttttccaattgctcaggccaaaagcacttggactgggccaggagcagtggttcacacctgtaatcccagcactttgggaagccgaagtgggtgaataacttgaggtcaagaccagcctggccaacatggcaaaaccctgtctctactaaaaaatacaaaaattagccaggcgtggtggcacgtgcctgtaatctcaactacttgggaggctgaggcaggagaatcgcttgaacccgggaggcaggggttgcagtgagccaagatcaygccactgcactccagcctgggtgacagagtaagactccgtcttcccccaaa

SEQ ID NO: 944804 - DNA, 645 bp, Homo sapiens
actcaggttctggcggcctggggcttccgggggtggggcaggtgggacccgccggctggctctctgccggctggttactgcccgtaccaccttggccacgggcactcctgggctctcagcacggccccgccagcgcccatgccttctgcctgtgctgccccgtcgccctgctgaactgtctgtgtccttggaaccctcgccagggtccagtggccgtggcttcctctgccttcctttctgtaagagagatgcagacacatcactggggcagaccctcacctcctcctgttccttgagttccatcttggttgggggcaccctcagacctagatgttcctgcccaccttttacccagagaagcgcttttcacctaaggactccgcacaatcagtaccaccatgggagcacctccctggccagccactgagggcgcactgggcctccctccatcataccaacacccccgtcccccactggctctcagattacatggcagtgtgcttggttttctgttctggactcagataccacttyctttttcagcagatgttaaaataaatatctacgtgtgtcccaagggaagggtgcaaagaccccaccgagggtacaagtgtccacctaagacccagcactcccaccgagggc

SEQ ID NO: 944805 - DNA, 760 bp, Homo sapiens
tagcaccttcacttcctaagtgactttcagtctctgggtttctgaactccatcccaaatctcagattgacctctctggcctggatagctcccttgaacgttcaggcatttaactaccagcctccttgacatctcacatgggagctcgatagacctctcaaagccacaagcccaaaagtacctcctgctcttcgaccccaacctgctcctacttcatcttccccatctcagttaatgacatctccatccttcaggatgctcaggccaaaaacttttaggaatcatttttttttcttttagatagagtcttgctctgttgcccaggctggggtgcagtggcgcaatcttggctcactgcaacctctgcctcctgggttcaagtgattctcctgcctcagcctcccgagaggctgggactacaggcacatgccaccatgcctggctaattttttatttttaatagagatggggtttcaccaagttggccaggctggtcttgaactcctgacctcgtgatccacctgccctggcctcccaaagtgctgggattacagatgtgagccactgcgcccagccaggagtcatctttgactctctttccctcacaccccacatccactccatcagtaaatcccatcggggccaccttcagaatacatgtggaatgcsatcccttctcaacacctccctcactatccctgcctggattccctggtcttccagctcctactcttgttcccctaaattccgttctcatcaca

SEQ ID NO: 944806 - DNA, 432 bp, Homo sapiens
tgacctattgaaggcatttttaaagaaactcaagattatattgctacagaaaataatggcaggccagtttacattaggttctagttgtgaaaaaaattagagtctggaatgtctattttattcacaagtgccattttcaccatgtattgcaaataaactaaagcttaatgtatcatcatactataacataaatactagtaaaaatctccattttagatttaatatatttctaaattttagaattcctcatgtactctaaaagctatttgatgtaacttttgctggcaaactggactaaataattttgtgactaacagagattrtgcttctccttttatcctaaatttataagcaacaatttttattcatttccagatcagttaactaaaatgtttgttttcaaatccacaggaaaggaaaagaaaaaaataa

SEQ ID NO: 944807 - DNA, 565 bp, Homo sapiens
atttcttagaggctttgtttgtttctttttactctaaccctgtcttcttactttatttcattaatttgatcttcaatcactgataccctttcttccacttgatcgaattgtctgttgaagcttgtgcatgcatcatgaagttcttgtgccatggttttcagctccatcaggtcatttaaggtcttctctacactgtttattctagtttgccattcgtctaagcttttttcaaggtttttagcttccttgcaatgggtttgaacatgctcctttagctcagagaagtttgttattactgaccttctgaagcctatttctgtcaactcatcaaagtcattctttgtccagctttgttccattgctagtgaggagctgcaatcctttggagaagaggcactctgggttttagaattttccacttttctgttctggtttcttcccacctttgtggttttatctaccttttgtctttgatactggtgacctacagatggggytttggtgtagatgtccattttggtgatgttggtgctattcctttccattggttagttttccttctaac

SEQ ID NO: 944808 - DNA, 613 bp, Homo sapiens
ctccaatgtgtttctattgaattagaagctaatacagccatttgcccattataggatcttatgactctgggagaatagwtaaaaagcaggtgtgtgttgttgagtgaggtgattaaaccagacaatcaaaagacatttgagttgtagatgcaggggaaattgtaaataaaatcagggcatagcctgaagtgccccttacagtctctaggtcaggtaagttaatggaggctgggcacggtggcttgcacctgtaatcccagcactttaggaggcagaggtgggcggttcacctgaggtcaggagtttgagaccagcctgtccaacattgtgaaaccccatctctactaaaaatacatatattagctggttgtggtggcggccacctgtaatctcagctactcaggaggctgaggcaggaagaactgcttgagcccaggaggcagaggttgcagtgagcggagattgtgccactgcaatccagcctgagcaacagagtgagactctgtctgaggacaaaaaaaaaaaaaaatggttaatggagactacagcaaccacaggtaggaccaacaagtgctcagaccactcaggaattgatatttggatatctggcacc

SEQ ID NO: 944809 - DNA, 902 bp, Homo sapiens
ttgcccaggctggtctcaaagccctgggctcaagcgatcctcctgccttggcctcccaaagtgctgggattacaggcatgagccactatgcctggcatccttccctttcttatcttgaatttctttgagtttcctcaaaacagctattttgaattctctgtctgaaaggtcacatatctctgtttcttcaggattggtcctgggtgcgttatttagttcatttggtgaggccatgtttgtctggatggtattgatgcttatagatgttcttaggtgtctgggcattgaagagttagatatttattgtagtctttacagactgggcttgtttgtgcttgtccttgggaaggctttctagatattcaaaaggacttgggtcttgtgatataggttgtgtctgctttagggggcccaaagctcagtaattctgtggttcttgcagatttgtagaggtatcgccttgatggtcttagacaagattcagtagaattctctggattaccaggcagagattctaattctcttctcttaccttttcccaaacaaatggaaactttctgtctgttttgagccacctggagctgtgcataggctgatacaagcatccctgtggccaccaccgctaggactgcactgggccaggcctgaagccagcatagcactgggtcttgcccaagacctgctgtaaaaagtccctggctaaggcttatgttcactcaaggccctggggctcgataatcagcagatggcaaagccagccaggcttttatccttcccttcagtgtggcaagtwgccccaggccccgggcatgtccacaggtgctgttcgggagccagggactagagttgaaaaccttagaagtctacctgttgttctatcgtactgcagctgagctggcact

SEQ ID NO: 944810 - DNA, 775 bp, Homo sapiens
ctctgaggctaagataaaagttagaagaaacaataagtgatataaataaataatcactctatcttagctattagaaatattataaaatcattgtcacttgaataggtgaccaaagagtgtgcagccaaacaaaaaggaaaacaaaggaacaaaggtactatagagttgtgtgatgaaagtagctaagaaaaaactatgcttttcggattatctcatgtggttggcatttattgattttttttcaaaatttacacttttttgtgatttgattctgattctaaatataaatttactttctttcttaaataagcactttcttctcatttgatcgtctgcttttcaagctctcagttgtatatttatcttatttattgaagttttcagcttcaaagtttctgagattttttatgatatctatatttttgctgaatttctaatccaaattatgaattttttcctggttgaattgtattttctatctggattcttttgtatcttactgaatttccttaagatcattattttgatttctttttcagacaatttgtacatttccttttccaagtgatcagttactgtgtcatttctttttactgtttcatgtttcttgtgtccttgcattgatatctgtgcatctggcacaacaactgcctttttcmgttttgtaaagtggtttttgtagggaaagattttcaactccagatgtgttacaggattttggttagatggggtgaactggatttgattctgggtgggcgctgtagtatcatcttca

SEQ ID NO: 944811 - DNA, 584 bp, Homo sapiens
aagtatctctccccaacctctatctaccccactgagggtgaggattctagactatctgtttaatattacctgccattttcggacttaattatttaattttaacttttgaagtttaaaaccttctatatagattctagatattagtgctctggcatgtaagtattttaaaatattttttccaagtctatagtttacctttgtatcctcttcatggagccaacttattattttcaataaagtccaatttgtcaattttccttatataaaacatgctttcatagtcaaggctaacatatctttccttaaacctagattctgaatgtcattctggttgcttttaatatttttcccttgtctttagttttgagagatttagttatgatctgtcttggcatagatttcgttgaagttacgtatttggtattcacatggtttcttgaaattgtaggtttctatctttggccaagtttgtgacatttttgttcattatttcttagaattcttyttaatcacctcattcattctcctttccttctgatatttcaatgacataaattgagatccttttatcatcccacgtgttc

SEQ ID NO: 944812 - DNA, 572 bp, Homo sapiens
ctgagactgagatgtagagagtaggaaggsagataaggcatcagccatgtgcaaattttccctgtagcactttgaagtctttgagtttgccatagtttttaaaattagactatatagtcaattagagatcattattacatgttttttttttcatagtgctcttggttgctcctcagataaaatgaccatccatatggcaatagcctcacccaaggccagatggcttattgcagggattgggaaccaacaatcttttgcttaaagaggcacttaaattttttcaaaatgacacagccctaggaaaaatctttttatggaatatctccaacttccctgtttgcaagcacctccctgttctctatgaatagcctatttcctcaagcctcttccacacccactcagtttgcagcctctgtttagacttgcgttgtgctgactatcaataaattcttcctaaggtgttttttacagtgggcttattagggtgataacctatacagaaaattctttgactattccttccgctgacaaaaacctgttgcttgggggtaatgaagcaggcttctgtcacc

SEQ ID NO: 944813 - DNA, 569 bp, Homo sapiens
tctgtgaccccctggccttagctccagggcagtaaggccaacaccagacttctggcctgtggctgcagggccagccaggagggaaggatggtccagttctattctaccagcaggggctgctgcgtctactggccccaaactcagggcagaattccccccaactgagaaaggcctgttcccccaatggctcccatccagggcttcagcttcaggctggcccccacccatacgcagccagaggaggccctgtctttctgagggtgcatagcatgtcctgctttctctgctctgctgtgcaccacagttgagcgtgctctgcaggcggtctgcatgcctctgtgcccttgcacagtctgttctctttgcccaaaaggccttttccaatcctgctcccctgggaactcctcagtgttccaaagctcagcctaaacacaacctcctctgtgaagctgccagggcccgccaacccccaagggcagacctaatcagtgccccctccattccgggctccccactgggmtgggagctccaggagggcagggctacactctgcatctctgtgtccttgg

SEQ ID NO: 944814 - DNA, 603 bp, Homo sapiens
aacccatgagagcagctgcaggaactgaaccccacaaagccacaggagtggagcttcccaaggccttgggagcccayccctcacacgagtgtgccctggatgtgagacatggagtcaatgaagattatttggagctttaagatttaataactgccctactggatttcggacttgcatggggcctataattctttcttttggctggtttttcccttttggaacaggagtatttacccaatgcctgtacccgcactgtatcttgggagtaactaacttgttttttattttacaggctcataggcagaagagagttgccttgtctcagatgagactttggactttggacttttggcttaatgctggaatgagttcagactttgagggaccattgggaagggataattgtattttgcaatgtaagaacgtcatgagatttcgtggagggtgagggcagtggcagaatgacatggtttggatctgtgtccccgcccaaagctcatgtcacattgtaatccccaattttgtaggcaggccctggtgggaggtgattagatcatggggcaggtttcccccttggtgctattctcataacagtgagagaga

SEQ ID NO: 944815 - DNA, 636 bp, Homo sapiens
agattaaaagaaaattgatgaaattcaacaatgaatcatgataaaactctgagcaaaccagaaagaaaagggtacttcctmaatttaataaagtatttgggaaaaacctatgagtagcacatacttaattgtaaaatatggaacacttttctcataagatcagggttaaggcaagaatgtctgctctcaccacttctgtttatattgtcctggaagtcctagccattataatgacaaaataaataaacaaatattaatattggaaaggaagaaatagtctctgcaaattaaaagtctgtttaaaatccatttacaatagaattttttaaaccataaaatacataagaataggtattacaaaaaacttttgaaacctcaatacttaaaactacagaacatgctgagacaattttttaaagacccaagtaaatggaggtatatatgttcatacgatctgatgactcaatattgttaagataccaaatcttccctaaattgatctaaatgttaaaaacattcccaatataaatcccagcggaattctttgtagaaattgaaaagttgattctaaaatttatatgaaaatttaaatgacctataatagccaaaacaatgtttacaagtagaacaaggttg

SEQ ID NO: 944816 - DNA, 605 bp, Homo sapiens
tttgaagctttaaattctgagttctagataagtgaccatagtaagaactggggacaaaacccatcccatcctccagctgtgccttttagccatgctgggagagatgagattatccaggcattttcttcatagctctgttctttgtcttgggctttgcatctggtacatagttagaacggtttactccctagttttttttctactgaaaataaggctgtttaagtctgtttttacattgctacagacaaatacatgaacccgaataatttataaagaaaaaaggttgaatggtctcatgattcagcaggttgtagagtaagcatgattctgacatctgctcagcttttgaggaggcctcagaaaacttacaatcacggagaaagccaatggtggaggaagacatcttatataatgggagctggaggaagagaacaagggttgcacactggtaaacaaccagataaaactcactgttgctataacagcaccaaggaaaatggtattaaaatatgagaaagcacctscatgatccaatcacatccaaccaggctccacctccaactttggagattacaatttgacatgagatttgggtggggataaag

SEQ ID NO: 944817 - DNA, 581 bp, Homo sapiens
gcagctgtcatggaaaaaaaaagaggagaaggaataaataataaagacagcaagggttttagccaattattttttgagatagggtctcactctgttgcctaggctggagtgcagtggtgcaatctcagctcactgcaacctgtgcctcccagtctcaagcagtcctcccacctcgctctcctgagtagttgggactataggcacacaccaccacacatgcttaatttttgtattttttgtagagatggggttttaccatgttgttgagggtggttttgaactcctggactcaagttatccacccgccttggcttcccaaagtgcagggattacaggtatgagccaccgctcctcccggtttcatgctttttataataagaatcaactctttatgtaataataaataaataaacagaaattatttgctttagatgtagcatatgtagatttagattgtccagagtcaggagctaagcctcatatttttttttttttgttttagctcagtgtagagtgcattgaaggtgttstaaaaataattccatatagtaagccaactttaaaccctgctcacagccaga

SEQ ID NO: 944818 - DNA, 822 bp, Homo sapiens
tacagtctccaatttcatacacccaggaatcatcgataaccaaaagtcagggggcagcagtcaacttctgctcagcactgacacctttaagaaaaatccataaacaatcygcagactggggagaaaattttcatatctagaatatataaagaacccctacaaatcaataataaaaagacaaccaacccaatattttcagtgggaaaaagattggaacagacacatcacaaaagaaaatatgtgaatgacctagaattatgtgaaaaataagctcaaaatcattagtcatcacagaaatgcacaataaaagcaaaatgagatactactactcataccccagagtggctaaaataaaaaagactagcaccaaagcttggcaaggatgtggagcaattagaactctccgtattactagtgggagtgtaaaatggtgcaccacttcagaaaatgtttggcaattataaagttaaacatacagccacctgcaacccaacaattccaccccaattatcaacccaagagaaatgaagacatttgcccacacagagccttgtacatgagtgtttggagaagcttattcattagagcccaacaaggcaaacaacccaagagtccatcagtaagtgaaggggaaacaaagtgtgctgtccatctatgcaatgaaaaattaatcagcaatgaaagtaatgaactactgatacatgcgacaatatggatgaacctcaaaaacattgttcagagtgaaagaaacagtatttattgttatatacataattccaatatataataccatttatacaaaattgaagaacagagcttaca

SEQ ID NO: 944819 - DNA, 595 bp, Homo sapiens
tctctatcagcattttggtcacaaccatttagccagtctacaagttgcaaactttccttcatcttcctgtcttcttctgaaacctccaaattcttccaatctctgcccattacccagttccaatgctggatccacatttttaggtacctttttagcaatgcccaactcctcagtactaattttgtgttatgccattcttacactgctataaaaaaaagtacctgaggctggctaatttatagagaaaaaaagctttaattggctcatgattctgcaggctttacatgaagcatggtgctggcacccacctctggggaggcctcagggagcttacaccatggtgaaaggtgaaggaggagccaatgtgtcacatggtcagagcaggagcaagagagaggtggaggtatcacactcttttaaacaaccagatctcacatgaactaccagagcaagaactcactcttcaacaagcagatagggmtaagccattcatgagggagccacctcctaccaggccaccacctccaacattgggggttacatttcagcatgagatttggaggggacaaacatccaaaccataacagagatgaaa

SEQ ID NO: 944820 - DNA, 605 bp, Homo sapiens
ggtgcagggtgccagacagaggcgtttagctctgatyccttagcaatagagagtccttgtaggcacttggtcaggcgagtgatgcgatgaaagctgtgtttaagaaagattatgctttctgctgatttcatacccccaacacccaagctctgaggcccctcctcacaggtccttgcagggctggccaaaataaagcagcttcactccgttgtgctgctttccagctaatgtgtctgtttggcagaagtttccctcaaaggcagatcagtgaaataagcagaagcctcgacccccctttgtcagccagagctgctgaagtgccttgccccagggtcactttgtgtgaggggattagagagcactggggctgccaagaaacactgccgtttctacagattagcaggatgctggcttgtggccttttagcgaggctcagagctgcggtggccctagtctgcatgggctaaagacaagctccatctcctgtccttgttccctccttcctgggcacagccgccctgcttcttggttctctctgttggttcctgtccgcacggtagttaggctggcagcgtgtgtaggatttggcttagaagattgacaac

SEQ ID NO: 944821 - DNA, 726 bp, Homo sapiens
caggtataggacgtttctgtaatcagagaaggttcttttggacggcactgagctagagagatggtgatgtcattcatcgagctattgatggttgtggtgggacaacagtagctgccagaaagcgctgtttattagaaatatgagccacatatgtaattaaaaaatttttagtagccacattaaagagtaaaaagaaacaattggattttataacttatttaacacagtatgtccaaaatatgatttacaacacattaaaacatttaaaaattattgatctatttacataattttttttaatttttttgagacaggctcttgctatgttgcccaggctggtctcgaactcctgggctcaagtgatccatccgcttcagcctcccaaagtgctgggattacaggtgtgagccaccatgcccggccacattattttttaatactagctctttgaaatcaattgtatactttcatagtatatcttaattgaaatactaatttttttgttctttcgttattttcaaatgcttagttttatcagaaatatttcatctgtatttatatctgtaaatcataaaatttacagttgaaaaagtagatttatatgcccaggttattccaaacatgcttaaaacttttccagtaatggaattaagtatcggtttttaaagtttcaattcccrtgaaataagaataaaaattcagttcctcggtctcactagccacctt

SEQ ID NO: 944822 - DNA, 468 bp, Homo sapiens
tgcagtgacacgatctcagctcactgcaacctccgcctcctgagttcaagcgattcycctgcctcagcctcccaagtagctgggatttcaggcatgtgccaccacgcctggctaattttttgtattttagtagagacgggattttgccattttggccaggctggtctcgaactcctgacctcaggtgatctgcccgcctcaacctcccaaagtgttgggattacaggcatgagtcaccatgcccagcttaaattctgtttttatagtttggtattgaattgtaaatatcaggagaaaaaaatgagtttgctttctttagttttgtggttaagtatcaatataacctaggtcttggaaactgtatctgtatttttaggggttgtattgggttctttttctttttcttggtaaaaatgagattggtaaatttggagtatgtaatggtgtatactagtgcccaaatatgag

SEQ ID NO: 944823 - DNA, 580 bp, Homo sapiens
aggacctcttcaaggagaactacaaaccactgctcaaggaaataagagtacacaaagggaaaaacatttcatcctcatggatagagagaaacaatatcrtgaaaatggccatactgcccaaagtaatttatcgatttaattctatttgcatcaaactaccatttacattcttcacagaattagcaaaaactactttaaatttcatatggaaccaaaaaagagcctgtatagccaagaaaatcttaagtgaagagaacaaagctggaggcatcatgctacctgacttcaaattatactacaaggctacagtaactgaaacagcatggtactggtaccaaaacagtcatatagaccaatggagtagaatagagacctcagaaataacaccacatctacaaccatctgatctttgacaaacctgacaaaagcaatggggaaaggattccccatttaataaatggtgctgtgaaaactggctagccatatgcagaaaactaaaactggatcccttccttacaccttatacaaaaattaactcaagatggattaaagacttacatgtgaaaccccaaaccataaa

SEQ ID NO: 944824 - DNA, 638 bp, Homo sapiens
gcaagaccaaagccaagggcaggcggtggagggggtttgctgctgtactccacttgtgtgactcccgggctttcctttgggatctcatgcggctgctcttcaccttggcgttcaccatgataccggagccagcgtcccttgaaatgatgttcagcttcatgaatggctgactcagtgtccccttggatcactttaagtaaaattgtattttctttgttgttatcaaaactccagttttgttcaggtatctgcccccctgcagacccagccccagctcaggaggtgggaggtggtcagggtaagtgcatcagagcgtggtcttccctggtagccgttattggtctaggggtaagcacgtgacctaaatggaggcggcaggggaagtccgcgatgcacgtgtgaccatgcgggggactagcctgaggatgaaactaaggcacagtgagggggtgaacgaacccgggacctcagaggtctcgctgagctgccgtcttacaacacttaggggccaccgkcctgtggactttcagttgggctaggaacgtcacttttctcattaacatagtttgtattttaaacttcttagctgataccagtggggaagccaggaggaatgacaaacttgaagtcatggaatt

SEQ ID NO: 944825 - DNA, 638 bp, Homo sapiens
gcaagaccaaagccaagggcaggcggtggagggggtttgctgctgtactccacttgtgtgactcccgggctttcctttgggatctcatgcggctgctcttcaccttggcgttcaccatgataccggagccagcgtcccttgaaatgatgttcagcttcatgaatggctgactcagtgtccccttggatcactttaagtaaaattgtattttctttgttgttatcaaaactccagttttgttcaggtatctgcccccctgcagacccagccccagctcaggaggtgggaggtggtcagggtaagtgcatcagagcgtggtcttccctggtagccgttattggtctaggggtaagcacgtgacctaaatggaggcggcaggggaagtccgcgatgcacgtgtgaccatgcgggggactagcctgaggatgaaactaaggcacagtgagggggtgaacgaacccgggacctcagaggtctcgctgagctgccgtcttacaacacttaggggccaccgtyctgtggactttcagttgggctaggaacgtcacttttctcattaacatagtttgtattttaaacttcttagctgataccagtggggaagccaggaggaatgacaaacttgaagtcatggaatt

SEQ ID NO: 944826 - DNA, 626 bp, Homo sapiens
cttgcggcccgccggccgctccgagtgcggggcccgctaagcccaygcccacccggaactcgcgctggcctgcaagcgccgcccgcagcaccggttcccgcccgcgcctctccctccacacctccctgcaagctgagggagctggctccggccttcgccagcctagaaaggggctcccacagtgcagcagtgggctggagggctcctcaagcgcggccagagtgggcttccaggcagaggagacgccgagagcgagcgagggctgtgaggactgccagcacgctgtcacctctcaccagcactttgggaggccgatgtgggtggatcatttgaggtcaggagttcgagaccagcctggctaacatggtgaaaccacatctctactaaaaatgcaaaattaacccagcagtagtggtacgcgcctgtgatcccagctacttgggaggctgagccaggagaatcacttgagcctgggaggcagagcttgcggtgagccgagatggtgccactgcactccagcctgggtgagagagtgagaccctatctaaaaaaaaaaaaggaacagaatactgatactagtacacagatagacctcacaaatatcacactaagtaaaagaagtcata

SEQ ID NO: 944827 - DNA, 606 bp, Homo sapiens
accttaaaaatggacaccgtcacccatttggctccttcaatrtcaaatcctaatttgaatgtgacagatatttagccatcagtgaaaatatcagccaggctggtggctcatgcctgtaatcccagcattttgggaggccgaggcaggaggttcacttgaacccagaagtttaaaaccaccctggccaacatggtgagaccaaaaaataataaaaatgtaatcaaccaagcgtggtggtgcacacctgtagtcctagctacttgggaggctgaggatagcttgagtccagaagtttgaggcttcagtgagctatgagaccctgtctccagaaaaataaaaagaaaaagaaaatatcaaactaagtttaaatatattaaagcttatattactacttatcatagaaggttagacctttccaattttttttgtaagaaaatatagaagatataattacatttatactaagagcttacatggaattctgaaaagtggaaaagtcatcaacttgtgatccaaaaacaagaaatcctaactgggcataagcaaagaatattataaaaaacatgatggcaaatcctactatgtctttaacacaacgggacaagg

SEQ ID NO: 944828 - DNA, 515 bp, Homo sapiens
ggctaactagaataaacaatgtagagaagaccttaaatgacctgatggagctgaaaaccatggcatgagaactacgtgaygcatgcacaaccttcagtagccgattcgatcaagtggaagaaagggtatcagtgattgatcaaatgaatgaaatgaagtgagaagagaagtttagagaaaaaagagtaaaaagaaaagaacaaaacctccaagaaatatgggactatgtgaaaagaccaaatctatgtctgactggtgtacctgaaagtgacagggagaatggcaccaagttggaagacactcttcaggatattatccaggagaacttccccaacctagcaaagcaggccaacattcaaattcaggaaatacagagaatgccacaaagatactcctcaagaagagcaactccaagacacataattgtcagattcaccaaagttgaaatgaagaaaaaaatattaagggcagccagagagaaaggtcaggttacccacaaagggaagcccatcaga

SEQ ID NO: 944829 - DNA, 564 bp, Homo sapiens
gtgatattgaattctggatgagttagtcaggtgtctaatccacataaacaatcccttctctgaagaaagagaggcgaaaaagctactcccaaaattacatgaagtgatatttgttcctagactagttatttatattgtctaatccttatgagtaaatgcttctctgaagagggaggaggaaaatgctaacacaaaaattgattccagtgagataagttcctggacaagttagtcatgggtctgatcatatatggtaaatgctgatttgaaagaagaggacaaaaagtctcatcccaaagtaatcatagtgatgtttgtttctagactagttgtttgtgttgtctggtccatataagaaaatgcttatctgaagaaataggcaggcaaaagtcatcaccaaacacatggccagataagctgcactgtatactacaggtttattgaaatgactatgtggctgtgacaggcattaattttgtctcattgtgcaactttgrtggaaaaagaaaatgggagaatgagagagacttctagcatgaggagaatgctggggcagggtggagg

SEQ ID NO: 944830 - DNA, 511 bp, Homo sapiens
ctcactctacccaaatagagtacacaggaaacccatcccttttgcctgacataagggcaagtgcagtcacttgccctattttattttagtcctctgaaagacagattcagacacagtgttttatatttctctgctgtgaagcagttcactacatcaccctaactccaacggaacatagcaatggttttcctatagcagcagcacacttcattagagttgaagcaaggagaaagtatataaaccctcaccctgggcttgcatatttaaaagaacaccaaaaactctctatgcttgtattccctacctttcttttaactctcttatattccacatggattagggatactccactcgaatccagcacagggggtgtgacaactcttactttggaatatggagtaattggctcctctttgcatggaggcttcagtcaaaagcaagastagaatacatttatttttatatattgcaacagtaattaaaataagaatttacagatgttctaaggaga

SEQ ID NO: 944831 - DNA, 511 bp, Homo sapiens
ctcactctacccaaatagagtacacaggaaacccatcccttttgcctgacataagggcaagtgcagtcacttgccctattttattttagtcctctgaaagacagattcagacacagtgttttatatttctctgctgtgaagcagttcactacatcaccctaactccaacggaacatagcaatggttttcctatagcagcagcacacttcattagagttgaagcaaggagaaagtatataaaccctcaccctgggcttgcatatttaaaagaacaccaaaaactctctatgcttgtattccctacctttcttttaactctcttatattccacatggattagggatactccactcgaatccagcacagggggtgtgacaactcttactttggaatatggagtaattggctcctctttgcatggaggcttcagtcaaaagcaagactagaatacatttatttttmtatattgcaacagtaattaaaataagaatttacagatgttctaaggaga

SEQ ID NO: 944832 - DNA, 457 bp, Homo sapiens
tatacttggcaaagctgtgcttcagaaatgaggaagaaatagtttttcacagacaaaaactgagggaattcatcaccactaaacaggatttacaagaaattctcaagagaatcctacaactagaagcaaaaagatgataatcattaccatgaaaacatgtacaagtataaaactcattgttagagcagttacacaaagagaaaaagaatcaagccatatattactaccatcaagccacattactcctataaaaccaccaaaccacaatgatgaacattaagagagaagaaacaaagcatttacaaaacaagcagaaaataattaacaaaatgacagtattaggtcctcacctatcgtaayaaccttgaatataaatggataaattccttacttaaaagatatagactggatgaatggatttttaaaaattacccaactatatgctgcctaaaagaaa

SEQ ID NO: 944833 - DNA, 589 bp, Homo sapiens
catttacctcttttacttgctacttaatccaggcctgtcaaggactccccatgtagatgcagccaaacacgcctgagaagatgccagctgaataaagccctcaccatccccttcactgtttcctattgtttgtattttgataatctcacaagctcactacaaactttcactatttaaaaagtgctctgttaagcaatgagaagtcacatgcacattagagagctgatttttgaaactgagagttggctgtgggtgccggcattggcagtgtagatgtggaagcaggtacctgcccggggggagcagggctggtccatgcacagttctatgggaaggatttgaggacttctctgtgagaggtgccatcacattttaattaccaccaagcttgcttggcaatgcgtcctttcttggcaacatgtgaaaaaataattttgcaaactggaaggcagactggtggttgaattcttctttgaaaaagagactctgtggtgcccagagggaaatgatattttaagcttgccacagggctccatgttgcactgagaaagacayttctccatgctattttgtgctccacaaagcactg

SEQ ID NO: 944834 - DNA, 766 bp, Homo sapiens
gtggtggcgggcacctgtaaacccagctactcaggaggctgaggcaggagaatcacttgagcccaggaggcggaggttacagtgagccaagattctgccactgcactccagcctgggtgacagtgagactctgactcaaaaaaaaaaaaaaaaaaaaggaaataatacataaaaactgctgtacccagtgcctggtacagaataagtgctcaaaatatgaaagtatttccactccttgtactagccacctccaagatgaccatcagtgatcctcacctagtattcactccctgctctgctaaacaaaaatcataggaggccattgctttgtactaaactccagcactaggtcccaacagacaagaccaaaaatcaagatggagtcacccatgctcgctaaactgaaactgagttgttatctgacttgagaaatcaagagagatagcctagccaggcacggtggctcatgcctgtaatcccagcactttgggaagctgagggaggtggattactggagtccaggagttctagaccagcctgagcaacatggcgaaaccctgtctctgcaaaaaatatacacaaaaattagccaggcgtggtgccgagctcctatagtcccagctactagggaggctgacgtgggagtatcgcttgagcccaggaggtcaaggctacagtgagctgatgtcagcctgggcttcagagtgagaccttgtttgagagagagygagcgagcaagcctaatttccctaacaggccaattaca

SEQ ID NO: 944835 - DNA, 701 bp, Homo sapiens
gaaatctttaaaccaaatgtgtcattattctgtctttgacagttccctcccacactgagcagggctgagctgtgtacctgatagattgctgtagaaatgatggaatttggccagrcgagatggctcatgcctgtaatcccagcactttgggaggccaagacaggtggatcatctgaggtcgggagtttgagaccagcctggctaacatgaggaaaccctgtctgctaaaaatacaaaaattagctgggcatggtggcacatgaatcctaactactcgggaggctgaggcacaagaattgcttgaatctgagaggcggaggttgcagtgagccgagatcacgccactgcactccagcctgggcaacagagtgggactccgtctcaacaaaaaaaaaaaaaaaagaaagaaagaaaagaaaaaagaaatgatggaatgtgactcagaaagcttcactgtaagataccaccacttcctccctgctcactgggatcacttatggcgggaagccaactgccatgttgtgaggatgcttgagcaggccctgtgaggaagaactgaagcctcctgccaacagcgagcacagacttgccaactatgtttgacaccttggaagcagatcctcctgtcccaatcaaaccttcagatgactgcatccccgatgggtatcttgactgcaacctcatgagagaccctgagtcag

SEQ ID NO: 944836 - DNA, 720 bp, Homo sapiens
catgtgaaatgtgctatggtgttccagcagtatatgtacacaagacttttcctgatccagcctaggaacccttttcaacagtttgttgttttcaaatgygccattattgtctaagttcacatctcccaccatgaggtaaaagtagcaactctttattattcacacggccatgtctctttagaattcattatattgaaacaatatagattttcatgcctctgcaatctcctaatacctcttattagggattgttatatgattacctatgacactgtgttattcatttagctatccctgaatacaggctcccaataattttcttaaatattgttattgtggttcactgataatgaccacaaatgcaggttttaacaacagcatgtggggaaatatgaacaataatttgctttctgatcatgttaaatttactatacaggattttatagttgtatgtttatataaacatataaccacatatcttacaacaatttcttcttttgaactcattaagctgtaattgctgtattcctagaaaactttatcttttgatacctcatttttacctttcataaatcaacagtggggaaagatacgtaaagggaccttgggcagagtgagaagaatgttcctatcttcacaaggactgcccatctttcatctcacatggcctaagattaatccccatgagtacgacctcaccacattgatcaggggcaaaaa

SEQ ID NO: 944837 - DNA, 605 bp, Homo sapiens
gccaaaacctgctctgcctagcagactggtcatgtctccctttcccttcccttccctttcccttcccttccctttccttktccttcctttttccttcccttttcctttcctttctttttctttcagagtttcgctcttgttgcccatgctggagtgcagtggtgtgatcatagctcactgcagccttgaactcctaggctcatttctatttatttatttatttagagatggagtctcgctctgtcgcccaggctggagtgcagtggcacgatctctgctcattgcagcctctgcctcccgattcaagtgattctcctgtctcagcctcccgagtagctgggattacaggcgtctgccaccacgccgggctaaatttttgtatttttagtagagtcagggtttcaccatgttggccaggctggtctcgaactcctgacctcaggtgatccacccttcttggcctcccaaagtgctggaactacaggcatgagccactgcacccagccttctttttaaatatacattttttgagacagggccttgctctgtggcccagggctggggtgcagtggcatgatcatggctcactgtagtctccacctccc

SEQ ID NO: 944838 - DNA, 379 bp, Homo sapiens
ttgttatacagacttaagtccatgcaktctccattgataagactctttagtgatttagttatccttctcttcttggtgttgagagaggtagcttttgaatggggatttcctttatagatgtaaatttcccttacacaagggtaacttctactctgttttcagaacttcctttgttagcatttttttttttcaaaataatcagcttggaataattcttaagcaaaagggacatattttggggtggcatattctggtttcctaccattatattttggggtggcatattttggtcttatacactgtgttccaccggcaatgaaaagagttcttgtttttcctccagcaatttgtcattttttaaagagtttagcagttctaa

SEQ ID NO: 944839 - DNA, 628 bp, Homo sapiens
tttgtaatttctaagatatatttcttgttctctgttctctctttttcttttttttttttttttgagatggagtttcactcttgttgcccaggctggagtgcaatggcgtgatctcacctcaccgcaacctccgcctcctgggttcaagtgattctcgtgcttcagcctcccgaatagctgggattaacaggcatgcgccatcacgcccagctaattttgtgtttttggtagagacggggtttctccatattggtcagtctggtctcaaacttctaacctcaggtgatctgcccacctcagccttccaaaacgctgggattacaggcgggagccactgcacccggccgttttctctttttcatagctatctagtcttattttatggatgcagttcttctcaagtgtctctaagtatactagctagaatgtaggttcctgtgcctgtctcttcccatttgttctttggcttttctctctcatgctgaccgtggggatcactgtgtttgtgagggaaggttggggttgactagtgttcagagcatgtgggttttctttttagtcaygtctatttccctggaatccttcccctccctgcagtagccaaaatagaggtgaggctgctcagctg

SEQ ID NO: 944840 - DNA, 585 bp, Homo sapiens
gctattaaaaattaagctggtagaaacatgcatgtatcagcctttgtaacactttcttttctctcatgtaaatatttagttgcagaatgattgcatcatattcaaagtgtatacttaactttcaagaaattgccacaccgttttccaaagtagtttgccattttaagcatccatcagcattgttgaaagttttagttgctccatatggttactaacacttggtataatcagtcagtaattttcatttcagccattttactagctgtgtaatggcatctatatatggttttaatctgcatttccctaatgactaaaatgttgagcatcatttttctgtttatttgccattcttacatcttttttggtcaatggttgttaagatatttgtctcatttttaaaacaccgttatcagatatatgatttgcaactatattgtcctagtctgtaggttgtatttttcttttttaaactgtgcctttgaaagtgcagaagattttggttttgataaaatccagttwaacaatttattctttcataaatcatatttttgaaatcatatctaagaagattttgtgtaaccaaag

SEQ ID NO: 944841 - DNA, 440 bp, Homo sapiens
tgaacccaagaggcggagctggcagtgagccaagattgtgccactgaactccagccwgggcaacagagcaagactccatctgaaaaaaaaaaaaaaaaatcttggccgggcatggtggctcacacctgtaatcccagcactttggaactccaaggcaggtggatcatgaggtcagaagatcaagaccatactgaccaacatggtgaaaccccatctctactaaaaatacaaaaattagctgtgtgtggtggtgcatgcctgtaatcccagctactcaggatgctgaggcaggagaatcacttgaaccagggagtcagaggttgcagtgagccaagatcatgccactgcactccagcctgggcaacagagcaagactccgtctcaaaaaaacaaaacaaaacaaaacaaaacaaaatcctcttagtcatgaaaagccaagc

SEQ ID NO: 944842 - DNA, 594 bp, Homo sapiens
aaagtcattagcacaattgttccaggcacaataaaaaatttattgtatttgtttttaatccttcctctttgttactctcttctgatccacaaccaaaaatgcaggacagggtatatggaactcaaaatttagtctctgatagttcagttttgtttctaaggattggaagatcacttcaaaattaaaacattactctcgcctctactgctgctgcaataatttcagggaagatgagagactgtgtggattccagacaatgaacataattcatagcctgctctaaagctctgtaggacactttcttttaaatgtgtaagacattaacatatcagtcattttaaagactcatagagaatgaaagacttaccagatagtttttgatgtgtgaaatttagggaaatgggaggtgagatatgtagacggcaatggacacaagtgtgtgtattacctggtgatgtcacagcactataaggggagaggagacaaaggataagaaaggacctatgaagaacttaaaaggtcagtaaaaggaaaaagaaacaagaatatcattatttttaattktttgtgtaaaaagacaaatttggggacttt

SEQ ID NO: 944843 - DNA, 489 bp, Homo sapiens
cttataaaacttagttatccatcattttacactctaaataaatgtttattttcatacaatctttgtttattattttatgttcytttccctaaagggtacctcgtaaattatctgtttcataccccacaaaacctgaatgtatttttacctgaattatttaaatcataaatttttcattttctcctgcatcatttccataagcacaaatttcatatgcctttgccatctgaaggaaaaatgaacctccttaagaccacatcacacctaccacttgagaataaatcatttttagatttaaaaaaatagatcacattatgtatcaccttacagacatggtcccatttcactatgctcctttacatagagattccctgaaggaactaactgcacctttcattcccatgttctccccttcaatcactgcccatgaggtggaaattaaagaagaaaaaataaaattaaaaagaaaaagaaacaaactttcctgta

SEQ ID NO: 944844 - DNA, 642 bp, Homo sapiens
cattaacattaatagagatcttaagactttctgtagcaataagacacccaaatccagcctgactcyagtatagcattacatgacagatagcaggtcctgaaagaaatccaagtattttgtcttaaaatatatttctttggcaatttttgaaatggccctgcaaagctgtctcttgtggggaaaaatctaacttctgtagagaatccctttccatttccaggtcttttccctaatccaggagagaattcactgagtctggcacctttttaagtctgataagaaacatttacaatctattctctccaaagccggctacctgtaggctttgtataataagagccttggtctctacaaccacttatcttaatccagacactcccttctatggattccagatctttagataaactcaaccaattgaaattacaataggacatctgggcaacatcatgagaatctgcctatgacctggaaggcccccttctacccttggcttccagttgtcctgcttttccagacaaaaccaaagtatatcttacatgtatcgagtgatgtcttatgtccccctaaaatgtataaaaccaagctgtagcccgaccaccttgggcacatgttttcaggatttcccgggaccattggtca

SEQ ID NO: 944845 - DNA, 543 bp, Homo sapiens
gaggccctgtctctttagaattaaaaaatgtttaataatttaaaaaaaaagtacacgggaaaatgctcctaatattaaatgataaaatcaagttatgcaactacatattcaatatgctgtcaattttgtgaaaagaagaaaaaattatgtaatagaaaacagtctgaaacaagatgtacaactaaatatttatgtatttttttgactagaggaattattatctcttcatatttttctgtgttttccaggcctttctttggtatacttgtattcctttttatataagggggaaaacaacctacttgaaaaagcaacaacaaaataataacagcaaaaacctattggtgggagcctgagtcagtatttctctactcatgagtttactcagtgtttacctgagtgtttacatttttttccgataaaatacattcttgattcctgctkttatttagctcatggattatttctgaaaaactaaccaaattaaggcagctctgcagttatcctccactcccgcttaccacttaggagtttgctccatct

SEQ ID NO: 944846 - DNA, 583 bp, Homo sapiens
ggttatttatgagatacaaggtatgtatttgcaaatatattcycccagtctgtggcttatctttttattctcttgatactgtcttttagagaaaaaattttgtaattttagtgaactccagtttataaattatttatttcatggatcatgtttttggtgtagagttaaaaatcatgatcaagcttaaggtcatctaacttttttctatgttatcttctgtaagtttcataattttgcattttgcatttaggcctatgactcattttgaattaaggatgtaagttcagtgtctaggttcacttttctatatgtgggtgtctagttgttctagcatcatttgttgtaaaaataattctttctccactgtattgtcttttctccttcatcaaagatcagttgacttcatgtttgtggttctatctctggtttctagtctgttcctttaatctatttatcttatgccacactgtcttgattactgtagcttcagtattgtattggctgttcttggtcttttgtctcttcaaataaactttagaacaagtttgcctatatcctcaaaataaatttctgggagtttcat

SEQ ID NO: 944847 - DNA, 621 bp, Homo sapiens
atatggagatcaatatcttgaggcataccagttgcagaactcaaatagaaaggaggttgaggccgggcctggtagctcatccctgtaatcccagcactgtgggaggccaaagtgggtggatcacttgaagtcaggagttcgagatcagcctggccaacatggcgaaaccccttctctactaaaatttaaaaaattagatgggcgtggtggcaggtgcctgtaatcccagctacttgggaggctgagacaggagaatcacttgaacctgggaggtggaggttgcagtgagctgagatcatgccattgcactccagcctgggcaacaagagcaaaactctgtctcgaaaaaaaaaaaaaaaagcaaggaggttgaatgaaataggttgatttcaatgctatattagtttcctcttgctgctataacaagttactatgaaaataatgacttgaaacagcacagattgatgctgctacagttcttgaggtcggaartttgcaatgagctgatggaactaaaatgaagaaggggttgggtcaggagggctgggtcaggaggtctggtccttctgggggctcttgggagatccatgtccttgccttttccagcttccagaagctgcc

SEQ ID NO: 944848 - DNA, 705 bp, Homo sapiens
cttcctctgctgtgtccccaggagctgggggatggggtccatgggggccctggtcccactgtagccggagctgtgggggaggcctgyggagccggacccgggcctgtgaccagcccccaccccagggcctgggggattactgcgaggggccacgggcacagggggaggtctgccaggctctgccctgcccaggtacctgccagggatgggggtgggggtcagggacagaggaaggggagttagaggaagcattccagggagagaggccagggtggatggccccacacagttctcagcccatcctgtttgccctcagtgaccaactgcactgccattgaaggggccgagtatagcccctgtggccctccgtgccctcgctcctgtgatgacctagtggtgagtcccagctcccttggcactgccacctgacccaaggcccactttgcgggagggcagggtgtggatttgggctcacggcctctttggctggggcctggacagcccagcacaggaaggcacgggtgggggccctggtttcagttcacagagcatgccaggccaccccagagagacaccagcctctctccgcacagagccagcctcacctgacagcctttgtctgtagatcagacatttctcacattaaagtgttatgacaaaaatggcataaacacaaaggaagggggaaatcatctcctgaacccc

SEQ ID NO: 944849 - DNA, 658 bp, Homo sapiens
aggtcagtaccactctgtgatgaagyttccagaggaaggagcaggcagcagtctttactgttctgtagcctccactagtgatactcaggtggacaaagtctatggtggacccccagcaaactgcagcagacctgcagaagaggggcctgactgataaaagaaaaacaaacaaacaaacagaaagcaacaacaacatcaacaagaaagaccccacaaaaaaccctatccaaaggtcaacagcctcaaatatcaaagatagataaatccaagtagatgaggaaaaacaatgcaaaaacgctgaaaattctaaaagccagaatgcctcttctcttccaaatgattgcaacacctctccagcaagggcacagaactgggctgaagctgagttggatgaactgacagaagtaggcttcagaaagtgggcaataatgaactttgctgagctaaagggttgtattctaacccaatgcaaagaagctaagaaccatgataaaagattatgggagctgttaattagaataagcagtttagagaggaaaataaatgacttgatggagctgaaaaacacagcatgagaacttcatgatgcaaacaccagtatcaatagctgaactgaccaagcggaagaaagaatatcagaccttgaagactatcttgc

SEQ ID NO: 944850 - DNA, 636 bp, Homo sapiens
accattgacattctttacagaattagaaaaaaaattttttaatttatatggaaccaagaaagagcctgaatagccaacacaatcctaagcaagaagtacaaagctggagacataatgctatctgacttcaaactgtactgcaacgctacagtaaccaaaactgcatggtactggtacaaaaacaggcacatagaccagtgaaacagaatagaggactcggaaataaaactacatgtctacaaccatctgatcttcaacaaacctgacaaaaacaagcaatgggggaaaggattccctatttcataaatggtgctgggagaactggctagccacatgcaaaaaaattgaaactgaccctttccttacaccttctacaaaaattaactcaagatagattaaagacttaaatgtaaaacccaaaactataaaatccctaggagaaaatctaggcaataccattctggacataggcatggacaaagattttatgatgaaatcgccaaaagtaattgcaacaatagcaaaaaatgacaaatgggatctaattaaactaaagagmttccgcagagcaaaagagactatcatcagagcaaacagagagcctacagaaagggagaaaatttttgcaatctatcc

SEQ ID NO: 944851 - DNA, 826 bp, Homo sapiens
aagaaatctgaaagtgtcagggaatatgcagtctgtgggccctggcagagaatagcaggaacactgcagatcggcactgcttacagcacagcagagccacaaacctggcatctgggcaaccacagatcaggtggacagacactgaccttggagccagatctgaaatttagaatgtgagtaagtcaatgacttaccttccagaccttagttttctcatccatcaggtgaaactaatgatataccttctccatctcagatgaagggacgtatattacaccttacagtctttgtatgcagtaaacttcttttgtgaataggaggtcttttatattggggtagaggtctcagggaaagtacagggccaggaactgaaggagattacctggcttttttttttaataaaagggtcttgttctgtcactgaggctggagtgcagtggtgccatcatagctcactgtaacctcaagctcctgggcttgagcaatccttctgcctcagcccctcaagtagctgggactacaagtgcatgctaccacacctagttaattttaattgtttcgtagagatcaggtcttgctatgttacccaggctgatctcaaactcctgggctcaaacattcctcctacttcagccccccaaagtgctagggttacaggcatgagctgctatgcctgcctggcctgactgggctttttctttctttctttcttagtttctttttttttaaaagaattrtagatatgtagtaagccaccttatggaaattgtaatatgatggaaattagagaacaaattggccaagcttttcattgacttacaaggag

SEQ ID NO: 944852 - DNA, 618 bp, Homo sapiens
gaggagtcaaactatatttctagtaaatatggatttatttggatttctttagtatcattcactcattcaacaaatactcattgagcacctgctatgagccaacttctgttttagacattggagaaacaagataaacaaaacagacaatgcccctgcttgatggggctaatgagagaaggctagtgataaatattttctgtctgataagtgccgtggagaaaagtgaggcaggataagagagttaaagagctagaatggtgggaacagagaatcttgttattttatagaggaaagcctcctgagtaaggtgacatttaagctgaatcatgaaagtaatgacagaagaaactgcagctttctagaggaagagacttccaggaagagagagcttcaaagtggaaacctgcctggtatttcaaggaacagtaaggtggccagcatggcaggggcaaggggaagagctgggagacagggccagaaagaaaaccagaaccagattacgtggcatcataatgtgaaaatatgtagttcaaaattaagctgctagaactktaaaacactttgagccttaaggaaatgtgatcatgggacctgagtcacataaacaggcagctataa

SEQ ID NO: 944853 - DNA, 552 bp, Homo sapiens
cccctttaccttctgccacaattggaagcttcctgaggcctccccagaagtcaagcaggagccagcactattcttcctgtacagcctgcaaaaccatgagccaattatacccctcttctttgtaaattacccagtctcaggcatttcttttattattattatactttaagttttagggtacatgtgcacaacgtgcaggttagttacatatgtatacatgtgtcaggcatttctttatagcaatgcaagaacagcctaaaacagggccccttgagatttccatacctaacatctcttgtccgtacagtgtcattataaactgagaatgtgctgtttctttgtcaaggttgcaagtgattctcccacctcagcctgccaaatagctgggattacaggcgtgcaccatcatgcccggctacatttttttagtattattatttttagtagagacagggtttcaccatattgtcaaggctggagataactttgggggtcacaaaaaaaaattgaagaaggaatgactgcctttmaggatgttgcaaccagctgctg

SEQ ID NO: 944854 - DNA, 630 bp, Homo sapiens
tgggatctgacactgtctcccagtagatagtgtcagaattgaattgatttttagggcatgcagtcggtgtccattgcagattgctaggtgtgtggggaaaaacctcaacgtatctgttgttagaagtaaattgttgagtgactgtgtgagtataagcaaaggagtaggaaaagcacctttggttttttcaatattttagagaatccagatgtcttggctctgagccagtcatctgaggaccaaaccaggccgtgcctagtagtgaacctcttctcttgacccaacaagattacaaaaattaaaaacaaacaaataaacagagacaggtcaaaaaaagtaaacaaaaaccaaaacagcaagtcaaatgaaagcagggctcttaatcaaagttcatcaagaaggtaagaaaaattgatatggtctgggaaaacatcagagctgtgagacagcattccaactcttgtttttctcccactttttcttttttcttttcttttcttcccccccccaccccccycattgagacagggtctttctctgtcacctagggtggaatacagtggtgcaaccatggctcactgcgaactcaacctcctaggctcaagcaagtttcccatctcagcttttcaa

SEQ ID NO: 944855 - DNA, 654 bp, Homo sapiens
gtgggcagctccaggcaccagcactggcaccagctctggttccatgcaaggctatggctggaccagacrtaaggcaagcagcttccactgtgggcactgaggtctggacaggggagacgccatggcacccaaaagcttggagatgccataagccacagagccccaaaaagggtgttacagccctggctctgggagcccctaggtctgagctcccttaagggccactgctcttctctcctgttgcctgcaacctggtgagctggaaggcatgtttcagccctgtttatgtcacagctctttcagtcctgccattcagtgggtccccagttcttgtcccatgtccaggaagattgaggtacatggacaactggagggtgagcaaggtgaagaggagcttcattgagcgagagaacagctcaatgaagacccgaagggcatagctccttcctgtagctggtagtccagccatctgtctaagtctggctgagtccagggttttcatgggctcagaagggaggaagtatgtgctgactggtccatgggtggccatgggcggcccaggaaagcaccgtaagttctcactccctgccgagtgctgcacccggaaccgacagcctggcttcaggccatccctggcttgaaggtgggtgagga

SEQ ID NO: 944856 - DNA, 638 bp, Homo sapiens
atggttttcatcactagcagcaaaaaatgaggctctctggactggaaagkagagaagaaaccatttagtattttggaaccacatccctggccctatctatcaaagtcaacaagtggtctagttggcagtcatgtctagtatttccagtgcaggatgcactggaaatcttatttcccaaccctcacagggaaaaatatgactgttttagctataagaggattgtagccatgtaatttccctttaagaaacatttgtgagtcaatttctagtcccccctcttccctgctcatcactgtagcattctatgaaatgtttctctggaaacagtccttgtgccaaatttccagaccaaggctttccactcagcaatgaaataaatgcgttcgagagctagcattatgcttaaaacttcttgaagtatgttttccaccacaagattcctggacactctggttggctttaacataaatccataccacctgtattccaaaacataccaagttaaaatttaagccaagaaaactaaatcaaatttaaaataatctcccattagaaaccaaaacttctaccatttgtatatgaaggagattaaccaacacactgaaaaatcaagttagaactgggaatttccatctgct

SEQ ID NO: 944857 - DNA, 542 bp, Homo sapiens
agctgcctagtgatttcagaagatcctgacaagctatgtcttatggaacctgagactttctkctgtgccagagcccttgttcagttcctcagcaaattctcagtggtcccagttgatgataacagacagtgccctgccaaaccaaagttcctggcaactggaaggtgtagttgctctaggatggatctcaagtgtttccaatgcagttttcctgttgaacacagttacaaatgtgataccttgcagcaacttaaaaacacagaaaccggccacacacacaattcgtgcatgtttgtgtttagtaccagaaatgtggcttgtaacttttctgtctttaatacaaggtagggaatttttaaaacaatccactgcttccagctttggctctttctcaggtaggactcacccagtagatataactgagttcccgctgaacttggcagtagagagcgaacccaggaatttggcaggaagtaagttatgactgcacaacctgagaagctacacgtctgactcaggatgccatgggtttgggggttggg

SEQ ID NO: 944858 - DNA, 576 bp, Homo sapiens
tttttagtagagacggagtttcaccgtgttagccaggatggtctggatctcctgaccctgtgatctgcccgsctcggcctcccaaagtgctgggattacaggcgtgagtcaacacaaccagccttgagttaatcaactttttatattattggtaaggcttccagtcaacagtaggctattagcagttaagtttttggggattcaaaaattatacttggatttttgactgcacgtgggtcagtgcccctcatctttgctttgcctaagggtctactatatttgtttccccttgtaggagaggatgatatctccttgcctgttgatgtcacaagctttggccaatcaactgagagccaaagtgatagaagtatgaaagtccaaggagaagcttcaaagccattgtgttttctgccatttccctttctcttctttcacataacatttacacaaaagaggggctgctgcttcattctaggttctggaatgacctaggaattcaacctgagtagatcctcaaccatcccacaaaggacgcgggatctgagtgagaaataaatgcttgctgctaactgctaa

SEQ ID NO: 944859 - DNA, 407 bp, Homo sapiens
ccactgcactccagcctgggcgacagagtgagactccatctcagaaaaaaaaaaamaaaaaaaaaaaaacgaaaggacggcgctgaggtttggggcctgggtgatgaggacagactggcccttaagtggcttcatctcggatccccgcccctcctcgcacgcacctgcaaaataaatgtcctgccaccattttgcagagggaatcacagactgagagtttaggcccattcattccttttcaccagatactcactgagccattgtgaagggttaggctctggggaacgcagcagtgagcaaaagagacgggcatccccctcgatacctcacacccgttaggctggccaggaccaaaaggacagaaactgacaagtgttgacgaggagggtagacgtcggaacccggtg

SEQ ID NO: 944860 - DNA, 765 bp, Homo sapiens
cccagaaggaccaactggaccagatccaaagtccttgccagcattaatgacaagcccaggtcaggcctccagccctcctatccatgccacctgtgctgtcatctgccttgggcctctagtatcccagccagggccaggactgcccgggtgtcttttgcccttcctaatcaaggccacactcacgaactcattcactgacacccgctaggtccatcagcccttatgctctaatttggaccctcaggtgtaccaaccagcactcctggctagggaggttttcttcactcccagcattttgtgaaatttgactttctttgtttctgtgttgagagcagaaaattcatgattccctgaatacataaggtaagactggagggagacatttgcccttgacaacccaggtccaatgaccttgaacctcacagttctatgacctctggaagttcaaaacctcctttcccaaagacttatgctaattcccaagggttttggctttctcatcctatagatccttcattgcatctgccccagcttgaaattcaattcctcttttaaattcaacaacaaccattggctcttgataagcatttgcgtttggttttcatggaagactcaggtggagcacgtccccaggaggggcctctatactccgcacagccttgcacctttttgcyagttctcacccttttttcgctctgcctctctctaataagaaaaagttcctctcgttgtttactgcctcgaagttctgcaattactgcttag

SEQ ID NO: 944861 - DNA, 567 bp, Homo sapiens
gtgcctcaggcctataatcccagcrctttgggaggccaaggggggcagatcacaaggtcaggagatcgagaccatcctggctaacccagtgaaaccccatctctactaaaaatataaaaaattagccaggcatggtggcaagcgcctgtagtcccagctactcgggaggctgaggcaggagaatggcataaacccaggaggtggagcttgcagtgagccaagatggtgccactgcactccagcctgggcaacagagagagagactctgtcttaaaaaaaaaaaaaaaaaaaaaaagaaacatcaaagtcaaacttctgaaaactagagattggattaagttaagtttgtacttaatccaaggagattaagatccaagaaaaaatactgaaaacagctagataaaaacaacagtttacttacgagagaaaagcaattcaaatgacagcagatttctcatcagaaaccatggaggccagaaggaagtggccttttttcacatgctgaaagaaaagaactgtcaactcaaattcctatattgagtgaaataatcctttaagaatgaaaag

SEQ ID NO: 944862 - DNA, 541 bp, Homo sapiens
attctaccagaggtacaaaagggagctggcacccatctcacaccggttagaaaggcgatcattaaaaagtcaggaaacaacaggtgctggagaggatgtggagaaagaggaacacttttacactgttggtgggactgtaaactagttcaaccattgtggaagacactgtggcgattcctcaaggatctagaactagaaataccatttgacccagcaatcccattactaggtatacacccaaagggttataaatcatgctgctataaagtcacatgtacacgtatgtttactgcggcactattcacaatagcaaagacttggaaccaacccaaatgtccatcagtgatagactggattaagaaaatgtggcacatatacaccgtggaatgctatgcagccaaaaaaaggatgattttatgtcctttatagggacataattgaagctggaaaccatcattctcagcaaactatcgcaagaacaaaaaaccaaacaccrcatgttctcactcataggtgggaattgaacaatgagaacacttgg

SEQ ID NO: 944863 - DNA, 711 bp, Homo sapiens
caactgtggtaaattttatggagaaaattaaaacatggtagtgaaaatgagaattttgtgggatagcttaggttaccatttcrgtagaatgactcttcctgcagagattctaatagacagcttgagcgttccatgaagtctcttctttaatttgtctctttgttttagcactttaaaacattattattttgttttgaaaacataaattactttggggcaggtttttttttttttttactatttattcagatatctattgagaaagattttttgtgaagtgtagtactcacttgtatgttttctaaattattatttaaaattatttctgtaactagcaagctgtatttggagtgaatgcatgtttgactagtatccatccatgcttgtcagatagaaggaactgcacagcattcattgtaagatgcaacaggaataaacgcagtttgtaaagttatagggatgaattatagtcgcattttccctaactgctcatctcaaaattagtcacacaggttattcccttaaacacacatcctaactccaaaataattggtcacaataattggtcacaaaatgatctttcctttttttttttgaatgcttgttcataatgagatcttcaaagggaaataccatgttcatctttattgtcattgttttcatattatagttgttcagtaaatatttgttgtctaaattaaaaaaagaaaa

SEQ ID NO: 944864 - DNA, 603 bp, Homo sapiens
ttagacttggaaaaagcttttgataaaatctaacatcgtttcatgattaaaaaaccctcaacaggctagaggcatcaaaggaacatacattaaagtaatgagccatctctgagaaacccacagccaacgtcatgctaaacaggcaaaaactggaagcattccccttgagaacaagacaaggatacccactctcaccgagaatccccactctcaccactcctattcaacatagtactggaaatactagccagagcagtcaggcaaaagaaagaaagaaagacattcagataggaaaagaaaaagtcaaactatctctctttgcagacgatatgattctatacctagaaaactctaaagactctgctaaaagactcctggaactggaaaatggctttagtaaagtttcaggatacaagattaaatgtacaaaaatcagtagcatttctacacaacaattatgttaaaaattagagccaactcaagaatacaatcccatttacaatatccacaaaagaataaaatacctgggaatacgwccaaggagatgaaagatctctacaaggagaactacagaacacttttgtaagaaatcacagggccagg

SEQ ID NO: 944865 - DNA, 793 bp, Homo sapiens
tgtggttttagttttgtataggaaatcttatatgtttaatcttcattagaaaaggttctaaaaaaataaacacctttaaattttggaatcattaaatatttttgtacaataaaaggttaaatggagattaagacaaagaatacaaagtacaaaatgatatgtaaaagttattacatacctctgtattcatttattactcatacagtgtctgtatccaaaaaggatttgctgcgatttacaataaaagacaaacatgagacacaggacacacctttagaaacagggcaagaagggccaaagagagaagtttaagataatttaaaaaatctaatccaaggaatgctacaggtttggaacaaaacttactgaaacagcagtgttccctgacacccctcgcaggacatgccacaggggtgtgattctgtgttcaggccgctgcaagctcaaaacccttattggacagggagcacacatacgggcaggtgcaggaactggggtgagaacttttgggctccagccccatggcagcatctaggggtgggtgcctgcgactcctgaagccccagtgttacagtgctcttttagctctgccatccgcagatggcttaagtgctagcctctcagtgccccccttgtcacacaggctcttgtttggagtccaggaagaatcaggtcacacatggacttgaatgatgaatgtgggggttttactgaatggtggacgtggctctcaatgggatgggtggggaactggaagggggatggaktggaaagatgatcttcccctggagtt

SEQ ID NO: 944866 - DNA, 483 bp, Homo sapiens
aaaagctataagaaatggataaaatcttggacacatataacccatcaagattgaaccatgaagaaatataaaacctcagtaaaccaataacaagtaatgagttcaaagttgtaataaaacgtctcccatcaatggaaaggctgggactggatggcttcactgctgaattctataaagcatttaacaaagaactaacaccaattctacacaaaatgttcaaagatatgaagaggagggaacatttctaagcttcttctacaagaccagcaataccttgataccaaaatcagacaagtacagaaagaaaaaaggaaaactgcatgtcaatatcactgatgaacatagatttaaaaattctcaacaaaaatactagcaaaatgaattcarcaacatattaaaaagattattcaccatcatcaggagggattcatcatggggggtgcaaggatggctcaacattcacaagtcaataaatttgataca

SEQ ID NO: 944867 - DNA, 576 bp, Homo sapiens
aaagtcaccagctgcattagccccttacaagagagtcagcctgtccttggaagctttgaagccagtcattggcttctctctagcgagaaaagtcctagatggcatcttcttccaatagaaggctatatggtctacattgaaaatctgttgtttagtgtagctaccttcatcaatgatcttagttagagcttctgaataacttgctgcagcttctacgtaacacttaactgcttcaccttgcactttcatgttatgaagatggcctctttccttaaactcatgaaccaacatctgctagctttgagcttttcttctgcagcttcctccctttctcagccttcatagcctaatctcatctggattagattttggcttaagggaatgttgtggctggtttgatcttctatccagaccacaaagctttcttcatatcgccaataaggctattttgcttaatcattcatgtgtcccctgaagtagtgcytttaatttccttcaagaacttttcctttgcattcacaactggtattaattaggaaatactttattgctaaaaaatgctaatggtcatctaag

SEQ ID NO: 944868 - DNA, 606 bp, Homo sapiens
cttaccatgcaagtttccacggatcccactgtgtgcatgttcatagaagaggaggaaacttttccctgggagcccaccaattacacagagaacaaagttgtttctrtattgggccttgctcccttatctgtgcagctgcagcttgatttttcaggtttttttctctgtttaaaagaattctactgaggactggccttaactgtctgcttacctgggtgtttttttcctttttctgctctcatttccccactcaggactggagaccccagctgctgttagggaggttgggtgatgatctttctagctaattctggctaaatagtggcatcgtgtgggggactataacagtcaaggctcctcttgaggttaatttaagggtccccagaagaatggtgtggccatgtgtggttccatttacattaccatttgaagttcaatggcctctaagtgagaagaaacagtttggattattagaggacatgtatcaaaacaaaacaaggtgggggtaaggacagctcaaaaatcccaaggctgtcaacactcccaagtaactggtggctatagttatgcctgttaagatttgggtgcatgggacttgactttggt

SEQ ID NO: 944869 - DNA, 606 bp, Homo sapiens
cttaccatgcaagtttccacggatcccactgtgtgcatgttcatagaagaggaggaaacttttccctgggagcccaccaattacacagagaacaaagttgtttctatattgggccttgctcccttatctgtgcagctgcagcttgatttttcaggtttttttctctgtttaaaagaattctactgaggactggccttaactgtctgcttacctgggtgtttttttcctttttctgctctcatttccccactcaggactggagaccccagctgctgttagggaggttgggtgatgatctttctagctaattctggctaaatagtggcatcgtgtgggggactataacagtcaaggctcctcttgaggttaatttaagggtccccagaagaatggtgtggccatgtgtggttccatttacattaccatttgaagttcaatggcctctaagtgagaagaaacagtttggattattagaggacatgtatcaaaacaaaacaaggtgggggtaaggacagctcaaaaatcccaaggctgtcaacactcccmagtaactggtggctatagttatgcctgttaagatttgggtgcatgggacttgactttggt

SEQ ID NO: 944870 - DNA, 532 bp, Homo sapiens
tctctcctgaattccagactcatcaatccaactgcctagttgacatcatcttaggttatttaaccacatttcaaattcaccatgccccaaagtgaactcctgatactctcctaaacctattttttcccttgacctagccatctcaataaagacaactccattctccagttatctagcccaaaatgtttagccagaattgattccccttttcttttataccctacatcaaaaacatcaacatgtctctttcattcttttaaaaattcccagaacctgacctcttgatatcctgtcattcttcacacttgttttacttttccttgctttatttttctgctaagccctcatacctccttttttttgtttgtttgtttttgtttgtttgtttgttttttgagatggagtctcactctttcacccaggctggagtatagacrtgagatctcggctcactgcaacctctgccttcagggttcaagcgattctgctgcctcagcctcccaagtagctgggactacaggtgcccgcctac

SEQ ID NO: 944871 - DNA, 580 bp, Homo sapiens
agcttagaggacatcaagcagcaaaacaaaacaaaacaaaacacaaactctacatctagttatgatattcaaactactgaaaaagaagggacaaataaaaaatatttaaggaagccagaggaaaaaaagacatattgcctacagaggagcaagataagaaatatagcagacttcttggcagaactcatgcaaacaagaaaacagtggaattacatcaaatgtttaaagaaaaacatctcaatacaggattctacacccagtaaaaatatcctctaaaagtgaaggagaaagaaagacttttcagacaaaaacaaatctcatggaatttactgccagtagacatactcttcatgaaacattaaagaaaattcttcaggcaaaaggagtatgatataggtcagagactgggataaatacgaagacatgaaaagcatcataaatggaataaaggaaggtaaattaaaattatttatttttaagttctctaaaagattacygactggttaaagctgtaatagtaaaaatatctggtgtgttgatactgtatgtaaaagtaaaatgtatgacaataatagtagaa

SEQ ID NO: 944872 - DNA, 551 bp, Homo sapiens
gttgattttttcatagtgtaattctgaaccatccttacattttcggggattcaatctacttggttatggtatactgattatgccttgtaatttcttggtagagccttccttttcagcaggaaatatccctctttgtcccttttaacactgtttaccttgaattctaagttttcttatattaatgttgctcaacctaatcaacatggttaatgtttgacatgttttcatactatgcaattaaaaaatttatatcctataagtagcatataacatagctgtttttcgaggtggagtttcgctcttgttgcccaggctagagtgcagtggtgtgatctcggctcactgcaatctccgcctcccatgttcaagcgacactcctgcctcagcctcctgactagctgggattacaggtgcccgccaccatgccyggctaatttttgtacttttaggagacatggggtttcaccatgttggccaggctggtcttgaactcctgatctcaggtgatccacctgcctcggcctcccaaagtactgggattgcaagcgtga

SEQ ID NO: 944873 - DNA, 628 bp, Homo sapiens
ttattttgttatatactcatgctattgcaggtatcaatatctcatttgattttataactgagtagaatcatattgcatgcatatacacaatttatttatatctttacttgttgagggacattcggactgtgtccagtcttggttcagtagaaataaagcttctatgaacacttgtatattaatatagatatctttgtatgcaaatatatttttttctcttagttaaataactaggaatggactggttgaatcacatggtatggtaggtacatttacattttagaaaattctgtcaacttcttttccaaagtgtctgtatcattttatatttctaccacaatgcgttaatctcccagctcttccacgtccttgccagtggttatatatttgtttttaaactttagctattctaacaggtatgtagtagttactcattgagcttttaatttgaatttgtctactgacatgattttgagcatcttttcttgtgcttttaaattttatttttaaatgacaaataataatyatgaatatttattgggtacaatgtgggttttgttttgttctgttttgtttttgagacaggacctcagtgtcacagaggctggcatgcaattgtgagatcaca

SEQ ID NO: 944874 - DNA, 564 bp, Homo sapiens
ggtacatatggagctagcacatctcagagcccatcgcccrtggtgtactgcttgggtatcattgttggctattcagggcccagaggctctttagtcagcaggtaatgaatcctgtcaggtctctattgcgacagggcagcattgcgttcaatgtgaagtcccccagttgctgtgctttcccttttccaagtgaacagatttctccactttgtgtggtgcctgctgggtgatggggaagggatggcacaagcactcccttaaccatcctgactggtacctcattaggatgcattcccctgccccctaccaccacccagtctactgtctatgttcccagcccagaattagaacttgtttaggaattacagtccttgtagcctagactgcccttcaagtttacttagggcccgagaataatccagcccttggtggcaaggcttcctggaaatcaagctccagcaattggggtggatgattcccctctggctagggccagtccaaatgctcccgcggtgggcggacgtcagctcaatacagcctggtcctgctttctgctatgtcagg

SEQ ID NO: 944875 - DNA, 558 bp, Homo sapiens
ttatacagattgataggctcctctacttaccttcaagatgctttccaattgatggtgattgatggtgactagccttgagactttctcaggaaagtcaaatacatctatattcttttggggtatgatagagtgtgtgtgtgtgtgtgtgtgtgtgtgtgtgtgtgtgtgtgtgtgtgtgtagagggggtggggaaggtgcttcatcttttggtgacatcttagaagtgagggagagaatcagccaaaatatttcccaatgggaaatggacttctttcggacatctgagttttgatcctggttctagtttaagccattaattttctaagtgactggagagtaaatataatataattattctaagactgaggctaaataggatgttcactttgaggacagcaaaaatgccagtctcttcaagatctaagaggtaggcatcaagtttctgggcatagatctttttactgaagtaagagtgcttgaatgatatcttactcaaaggwactgtctggaggcagccttggttgtgagatgaagacattactcaatttttgttgact

SEQ ID NO: 944876 - DNA, 432 bp, Homo sapiens
agcccctctgggagaagttggcaggagcagggatgtcctggtttgtccgtggggccgtgaagctctgggtggctaagggtggcaccatggtcagacaggtcacacaacaggatcccaccctcaccttaccaagcctgacagccctccccagccccatcccctgcagcacctgctccctgcatctccctgcaacacacccgctactgcccttaggcccacaggcccatttcacatagggaaaaccgaggcctggccccagcagcacccaccgttgctgagggccaccaccagccagatggtatccaagtcagagatgttgtggctgctgaactggcctagaggctgctccagcgtgaaggtggacagggtgagcctccccgccarggtgtcgtttgagagctggggcacatagctgatgtgctctggggcagc

SEQ ID NO: 944877 - DNA, 539 bp, Homo sapiens
ctgttcagttcagttcagttcaacttgattcatttacgttgaattcaactcaactccaaaggttcaggctagagtcttccttggggaaggattgtcacgattcctttcttagagctctcagtcctatctctgaagcccagggcactctgcgtgcaggaggcacttaatgtttagaaagagaagtggaggccgggcgcggtggctcacgtctgtaatcccagcactttgggagactaaggcgggcatatcacgaggtcaggagttcgagaccagactggccaatatggtgaaaccctgtttctactaaaaatacaaaaattagccagacatagtggcgcacggctgtaatctcagctactcaggaggctgaggcaagagaattgcttgaacccgagaggcggaggttgtggtgagccgagatcgcgccactgtactccagcctgggygacagtgggagactctgtctcgaaaaaaaaaaaaaagaaagaaagaaaaaaaagaaaaagaaagagaagcggagcagtcagagattggggttg

SEQ ID NO: 944878 - DNA, 642 bp, Homo sapiens
ggtgacctcggaccctctgccgttgctggcctctgtggaacctcccacccagctctctctgctgaggtaggggagcagcagggcagggcctaactctcctagttctagagacagggagctgggctgagggaggctcaaccacgtgccactgtctcctgcgagttcaggcagagcaggtgcccaaatccaaatctgatccggccaccgtggtcccccgggccggaagctcagtgaaaccatctgagctttcactttccatcctgtgccttctgctttgtggagagtagaacagggattctctccggagtttggtcctgatggttctgagagcacaggaggctcaacacgcaatacccgtgagacacaacatcaaacaccagtgacgtcacccgtgagcctttcctcaggctgtgccgggggccacgcgcttctccagcctttcactgcaggggcctggcagtcctgccaagtgcattcaggtgcccctctggccagagttagtttcgttccttctgctgtctccctagaaatgccttaaagagcccactgcgcttaatgaaagctcttcacattctgtggcctgcctcrgtcccctctggaactcagcactccatgcaggtgttggtcctctgtgggtggcac

SEQ ID NO: 944879 - DNA, 774 bp, Homo sapiens
tcagtgatcaataaaatcagcaatgttagccgggaatggtggcttatgactgtaatcccagcatttcaggaggctgaagccggaggatcgcttgagcccaggagtttgagaccagcctgggcaacatggtgaaaccctgtctctactaaaatatacaaaaattagccaggtgaggtggcatgtgcctgtagtcccaggtactcaggaggctgaggtaggaggatcactgatgtatgtgtgtatacacacacacatgtatttgtagattgggggtccccaagaccacccttaggtttgacaccttgctagaagaactcagagaatgtattaaaaactattatgctcatggtcatggtttattacagcaaaaagatacagattaggatgggcgtggtggctcatgcctgtaatcccagcactttgggaggctgaggagggaggatcacttgaggtcaggagttcgagaccagcctgaccaacatgatcaaaccccaactctactaaaaacccaaaaattagccgggcatagtggtgggcgcctgtaatcccagctacttgggaggctgaggcagaagaatcgcttgaacccaggaggcacagattgcaatgagcctagattgtgcctctgtactccagcctggatgacagagygagactcagtctcaaaaaaaaaaaaaaaagatacagattaaaatgagctagggaagagacacatggggcaggccgggcacaggagagtttcatgtatggaacctctagttgtcgcctcccagt

SEQ ID NO: 944880 - DNA, 585 bp, Homo sapiens
ggtgccgtggcactgcaggggccagcagctttccacctatccaggacttgctaacaacttgctaacggccctgactgagatgactcartttcccagctagaactccccagcagcaaatgcaggcttggctgctgtatcattgatcactcccagcctgtccctgccaagcaattctatatccctcacctgcttggagagtggaaaggccacaggcgtcaatagcctcagacccagcatttaaatcctggctccacacactagttctgtgggctggtcgcttcctgtctgaacctccatttgctcatctataaagtgagcacagcgatacctgtcttgcagaattgtcaatatattgtatatgaaatgaggtgacaagtacctgatgtggcacaattggtggtacagagtaggcctgaataaatggcccttgttactgtcattccccgacctgcccagcactaggcacaatagtgttagaaacccacattgattagccgggcacagtgactcatacctgtcatcccagcactttaggaggccaaggcaggaggattgcttgaggccaggagttagagactagcctgg

SEQ ID NO: 944881 - DNA, 669 bp, Homo sapiens
aagtaaatatttagctgccaagctttatagagacggcaggaaaagcagatgagggttgggaagtttgaaatggtgttagattagcccttcttcattttgtttgcctggggagtacctattgaactttttttttttttttcctgagacggagtctcgctctgcccccaggctggagtgcagtggcaccatctcggctcactgcaagctccgcctcccgggttcacaccattctcctgcctcagcctcctgagtagctgggactacaggcgcccgccaccatgcccagcttattttgtttttatatttttagtagagatgaggtttcaccgcattagccaggatggtctcgatctcctgatctcgtgatccgcccccctcagacaagtacttatttaacttttaagattcactttccctcatattttattttgaaaacttttaaactttcagaaaaattgaaagagttgtacagtatatacctacatactcactacctaaattctattatcaacattttactatatttatttatatatgtatttatttattattattattatttttagagacagagtcttgctctgtcacccaggctggagtgcagtggcatgatctccrtttactgcaacctctgactgctgggttcaagtgattcccatgcctcagcct

SEQ ID NO: 944882 - DNA, 687 bp, Homo sapiens
cacacccgtctaattttggtattttttcgtagggatgggttttcrccatgttggccaggctggtctccaactccttacctcaagcgatccacctgcctcaccttcccaaagtgctgggattacaggtgtgagacacagtgcctggcctgttttctgttttgttttttttttttttttagacggagtctcacgctgttacccaggctggagtgtaatggtgcaatctcagctcaccgcaacctccgcctcccaggttcaagtgactctgctgcttcagcctcccaagtagctgggattacaggaacgcaccaccatacccggctaattttttctatctttagtagagatggggtttcatcatgttggccaggcttgtctcgaactcctgggctcaattgatctgcccacctcggcctcccaaagtgctgggattacaggcatgagccacggcacccggcttttttttttttttttttttttttttttgagacaaggtcttgttctcttgcccaggctagtgtgcactggtgtgatcatggctcactgcaacctttgtcttccagcctcatgcaatcctcccaccacagcctcctgagtaactggaactataggtgtgcaccactacatctggctaatttttaaaatacacctgcattttcttttcattgtacccctagcactgtgtgg

SEQ ID NO: 944883 - DNA, 608 bp, Homo sapiens
cagctgccaacaaggaaagcttttaggcttgtattgaaatattagcacctccctaatgatggtgagcagcacacatgctgttccctgtacctccaggctgcrccagcattgcgagctgcaggactgccctatctctgtgccttgtcaggaggaatcactgtagtattaccccacattattataagatgttatacctaatgcctcagaagccagacaggatgttcagtcaacttcccaacaaaatcttcaagagttagaggactgtcttcaagtcttactgctaatatcacttttcttgctgttctggaaggaaatgaagatgaaaactgtcagaaagtaactgtgggctacgactaaagctgctgactgatagaggataaaggaagaatgcaaatatactactgcatcggcttttatttaatcctaacaggagatgtagggaaggtctgcgtttctatgccttggattagtgttcagttggtgtgtttttctgaagattaaaagtgagtttgcatgcagaggaagcatacaatgccacctaaaagtctcccagaaaaagcttcataaagggatattttgtcatatcaggaaaataggaaccttatacc

SEQ ID NO: 944884 - DNA, 553 bp, Homo sapiens
tgagaaaaaaaagctgaaaacaactcaaaggcccaccaacagaatggataaaatgaatatttccatacaacgtaatattgtaaaggaatgaatgtgatctacagtcacaagcatcagtgrgaaccaatgtcaaatagactgttaaagataaaaaactaagtcatcaaaggggatgtgtgtgcatgtcaatatatatgccatttacatagggcctaaaagcaaacaagacaatattatagaagatatagtgtggcaaaacagcgaaagcgtaggcataattaattcaaaacataggctggtgatcacttctaggaaagaatgcaatacaggagaagccctgggtgcttcaatgttaatattcaatttcttggtgttaagtatacaagtgttcattttataattctttaaaatgtgtgtttatatatgtatataatgcttatatatttatactcttcaaagtagggcttttattcctcatcagtggttcttaaacctcatgttctctttaggtaactctgggagcttaaataagcatcaagagttgttctgatga

SEQ ID NO: 944885 - DNA, 596 bp, Homo sapiens
tttatgggcttcagaggggaggaaggggtggtggttggttcatgggtggccatggggagcccagagaaagcaccataagttcccatcctggctcttcagccaggcctctggattcaggccatccmtggctcaaaggtggggcttcactagggacctgcctctttctgccctgcctcctgctgtcatccatagcactcaggctgtttgtgccaagaggcaactgcaggccagtgccgagctgccttcagcaacccccctcaccctctcccgtgcttgttgatacccaaagtctgaagggcgccaaggcagcaggggtctggtgtgtcagcactgctccaagcatgtgcacccacccagattgtgacagcacccaggctcagcctcaattttgcttcaagatcagagcaggcaccaggagtggggagaagccaggctgtgggagcagacacctccaagcctgagggggcagaggggcttcctgggcccccaagaacacaggtatgcccaggtccacagctgtggcttgggtggctgcagctgtacctgggaagcttgaggcttctgcactgccaattcggaagggcatgaggcttctg

SEQ ID NO: 944886 - DNA, 649 bp, Homo sapiens
cggtgcagcacagaggaagggagaaatcctaagccaagcttaagttattatccttgttcattactgcagccaccacctaggtggtgcctaaagcacctatagatgcagctatgtcaagaggtggtgtgctcccaatgaccagaggccagggacttctcatctcatgcagatttctgcagaacagagggttggcctgggtgaactggattgctcttaactgggagagctcacataccaaagattcttctgggaagtgaccatttcagtggcagagtcaaaggctgttctgcatcctgaatgagcagttggggtctgagcacatacccacagacccacagacccgaggtcccctggatgtggggccatttcttcatggatcttattattataggcacagttgtcattcgagatgtgacagagggaaaactagaaaaggtagcagtttgggaacaaattgattttacagctcactttagtgtctgcaaacaggcaaatgaggaagaaattgggaagagccccaaaattccctcaattttactaaatccaagtacaaacaaacaaagacaggggcatttttgctaactaaagaagcagaggtagattagaggctktgggatagtgatgggttcccagcgctgcaggccagccc

SEQ ID NO: 944887 - DNA, 626 bp, Homo sapiens
gcatttctaagcctcagttacttcatctatcataaagaataataaaatctacctttttggattattgttagcattaaataaaatgaagcataaaaagctcccaaaatatatgacattggttaatamtttattattaatattctattacatagctaaatataacaaagctaaaatattgtcttctctcaagcatatcttgatttgtacattcattctggaacagatactcagactcaaagctcactggagagcagaatgagtattccaaaaatggccatcatatgtctggacccatattctcttctagaacattgcccctactccatcaagaagttgagtgtatgtacttctctctgaacctgggtaggtccttatgactttttgactttttcaactgatatggtatggcagaagcaaagctgtgtacatctaaggctaggcattaaaaggggatagtgcatccacctggtgctagtgctctctcgctctctctcttttctccctctctctgtctctttctctccttctcttaaaatgatcacccctggaaatgagccaagtaacccaggctacttggaccagcccatgttgaaagaacagaagttcccactctgtagtcatggcta

SEQ ID NO: 944888 - DNA, 564 bp, Homo sapiens
gggtggggacttggagaacttttctgtcttacaagaggattgtaaaatgcaccaatcagcactctgttaaatggaccaattggcactatgtaaaatggaccaatcggcactctgtaaaatggacccatcagaaggatgtgggcggggacaaataagggactaaaacctgggcattccagccagtagcagcaacctgctagggtccccttccacactgtggaagctttgttctttcgctcttcacgataaatgttgctactgctcagtctttgggtctgcaccacctttaagagctgtaacactcaccacaaaggtcgttggcttcattcttgaagtcagcaagaccacgaacccactgcaaggaagaagctccagacatatctgaaagaacaaactctggacacaccatccttaagaactgtaacactcactgagaatgtcagcggcttcattcttgaagtcagcgagaccacgaacccaccagaaggaagaaactctggactcattaacayacacagttaaaggctgacatgaagtgacttgagtatttttgtcatcttccac

SEQ ID NO: 944889 - DNA, 646 bp, Homo sapiens
ttagcacttaatcagatttctggttgcatgagtcagaatcaagactttataatttaaatagctctttaaaagaaaaaaggaaaagctactctgctaatatcagaaccatgacaacattttactgaaagttctttaaaaacattcacttttttagtcatttaacatacaactctatatattatatataatgatgtactttccagaattaaagaacccttttttttgcaaattatctggttttaaaaaatcaataaacacaaaacttaagaaggtcctactgatgaaaactcttttatgattctattgtgatccagattcacacttgtgacaaataccaagcatagaaaacaattaccctgaaaaataccagtgggttggaagtgtagtggatttttcagctcttcatctgagcactagatatgttaggaaatttgtcacggtgaggatattcatatatggcagctcatgtaagtcatgtcctgttagactaatcagcaattttaacaagaatgagtcagcatcctgtaaaayttagaacaattggttgaaagcctgttttgatttctaccatggtaacaatgaaactatcaaataaaaaaatattttttggaattatttgactgttgttcatgaaacaagtttggta

SEQ ID NO: 944890 - DNA, 646 bp, Homo sapiens
ttagcacttaatcagatttctggttgcatgagtcagaatcaagactttataatttaaatagctctttaaaagaaaaaaggaaaagctactctgctaatatcagaaccatgacaacattttactgaaagttctttaaaaacattcacttttttagtcatttaacatacaactctatatattatatataatgatgtactttccagaattaaagaacccttttttttgcaaattatctggttttaaaaaatcaataaacacaaaacttaagaaggtcctactgatgaaaactcttttatgattctattgtgatccagattcacacttgtgacaaataccaagcatagaaaacaattaccctgaaaaataccagtgggttggaagtgtagtggatttttcagctcttcatctgagcactagatatgttaggaaatttgtcacggtgaggatattcatatatggcagctcatgtaagtcatgtcctgttagactaatcagcaattttaacaagaatgagtcagcatcctgtaaaatttagaacaattggttgaaagcctgttttgatttctaccatggtaayaatgaaactatcaaataaaaaaatattttttggaattatttgactgttgttcatgaaacaagtttggta

SEQ ID NO: 944891 - DNA, 600 bp, Homo sapiens
aattacattcattaacatttctagactgccctctatgatccaggaaatggtctgtatgttttatatgtgttaatctaatctttataataactgaggttgctattactatcacctccattttaaagaccaaataastaaaaagcagagagattatgtgatcttgccaatatcacccagaaatggcagagctaagatttgaatctagctagcactccagtatataatctcaattatcacactctattgcctctactgtataacaaggcatacagcaattgtacatgtatgccttgttatttagaagaaacaaaaatagagtttcatgtagaagtatttggaaataaaacattgtctctatcttaaaagacttaagcaacagatgacatgattcattatactatttctctcttctgtatatttaaaatctttttcctgataaaaataatcttacattgaaacattatgctcatttgaatgatgtaggctctttggaaataaaactcaacttttttttattaatactatatgtagaataagaaagtgaaatccgcccaatttcctcaaagaattaatgtctgcagtgttttcgaataaacacaa

SEQ ID NO: 944892 - DNA, 604 bp, Homo sapiens
tctactttttatagatcattgactctttctttggggacagtaagcatatattcaatgttgtttttctgcctgacatatctgaagtaatactatcttagagaagaattttcctctgkgtctttaatacttactttactgttactgagtatctcatggatttctccattgactggattttactttattagtcttaaatgaagaaaggcctatctagtctcaagactgggaagtagtctttcttccccaagtgtttgtccttggtgctgtcatatttgtaactacagaagtgctaatgatataaaacatttggtcctgccactggtcaacaatagggcaagcgttttcttcaaggtatgtatttcattgccaatcctctagattatagagacctacacaagtctggactaaggttgggatagtagggaaaggatctctctaaaaattaaagtatggggaagtaattctagaatataactatgacgtgttcttaaactatacttcagaacattccttttacagttgtgtgaaatgaagctttaatatgaacttagatttattgggaaagaaagtttgagtgattacaatgtgtactcgatattgtaag

SEQ ID NO: 944893 - DNA, 758 bp, Homo sapiens
tcgtgaggccctcattccagggcccagctcccaggcatttctagacacacgctatcccaaaaaggaagccactaccttaaagggaaggaccaacttctggcaggattcatcacctgctaaatatagagcctttgggccctgaataatcggcagcagtagccaagcagtacatgccgtgggcctggggtgagactctgagatgtgctgacttcactagcacattcccagctatggtggccacaaggagggactccatctgcttgagaaaagcagagggaagagtaaagggggctttgtcttgcaccttaggtaccagtttggccacactggggtggagcaccaagcaggttcttgaagtactaggtcccaggctttggctcctggaaggcatttctggatctgctctgggccagaggggagctcactgcccttaacagtgagctccaggcctagaagcattcactacaaactgactgaagagcccctgggccttaagtaaacattagtggtagcctggcagtactccacgtgggcctgtggggtggtggacacagggagagaatcctctgcctgtggaaaggcaagagtagaaaggattttgtcttgtggcttggacgccagctcagctacagaagaatggagcaccaggtagatttctaaggtttctgactccaggtcctgatctccagatggtatctctggacccacccaaagcctggggaatcccattgccctgtwgggaagaacaaaggcctggc

SEQ ID NO: 944894 - DNA, 614 bp, Homo sapiens
ctgatcaattatcctccttcaaaaaggctgtaaacactcaaaccactmaataccaatagtatatattctctggtctttattaccttttctgattttatagtggccacaccttattcactggaaactaaggtatttttattaatgaataggaaaataattgtagcttatgacaacaccaagggaataatttgtgattttttttttttgcttcaaaccagtttaaaatcaaaaacagtatttctactactttctgttcaattataattactgtaatagttcactctagtttcaaaaaaattgcaagagtagatttggaaaagacattctataatgaaaaggttagttctataattagaattaaaatagtaaattctattataaaatagctaattagttccatacatggaaatatcatcagttagtgctactttgatttttaaaaaaacttatggctgaatatgtcttttaagtttatagataacatcttgaacattaacagatgaaataactctttagatagttaactgggggaaaaaaaatcttataccagaaagaaaataaaggactttctactcaaataggttacaaacagagcttaggaacagaactcatgc

SEQ ID NO: 944895 - DNA, 787 bp, Homo sapiens
ccttgccgttgggggttccccacccacccccctgcctgcccggggcctggtggtacctcagcaggcatatgcatgagcaagacagcggcaatgggcgcctgggcctggcagtagccctcctcgggccggtacagcgtgtaggccttcagcacacggaataggtcctgctggctgtggagaggccgggcagagcagtgatgaccggggtgactctgctacccacggccttcacctatgccccagtggaccagccagcctcagaatctgcccctcccttgagagggaaggtgatctgcttgtggtcaccaaggggtcagtctcctactggagcacatggactctcacgtgcccagaaggaaggaggtggggaaggtctcccccatgacaggggagggcagaggctcaaagagaaaacagggagcagggccagggcgggatgtaaagctatgtcagggctggaagtaggggcccctcactcagcagctatggccccttggccgggccagctttgtccctgcatctgtcttggtccccttgcctgccctatctctcccctgcataccctccactcacccaattccctctatccctctttctcgccaacaaaacctgtttccggaagagggccaggctggacaagctctagcactctggagtcaatgaggaaagcccccccagaggtaagaggagatgctgagaacacacatcagactcaaaccaaaaaaagggaaatgctaagagtggagttgggggcaccragcttctaaagccctgaactcactgtacc

SEQ ID NO: 944896 - DNA, 569 bp, Homo sapiens
cacaactaccagcccaaagtgagtactgccaggccagtaccaatgttcacttaaagccccaggactgttcagtcagactctgatgaatgctgccaggcctggggcccacycttcagggcaatggtctccgctctggccgagggcaggtccagaattgctctccaagagcctaggcctggctccaggaccccaagatcctgcttgctgctctatcccactgtggctgagctggcacctaaggtgtaagacaaagtcctcttactttccctccttcttttttcaagcagaaggagtctttctccatagctaccactatttggaacatgctgagtctcacctgaagccagcacatctcagagtctcactcaaggcccatggcatactatttgagtatggctgatggttatttagggccgaagggctctttagtcagcaggtgatgaatcctgcaaggactgggtccttttattcaaggcaccaagttcccttctggtccaagttgtgtctagaaatgtcatacaggagctagagtgattttgatttaggctaaagtttaaggcttaccacct

SEQ ID NO: 944897 - DNA, 569 bp, Homo sapiens
cacaactaccagcccaaagtgagtactgccaggccagtaccaatgttcacttaaagccccaggactgttcagtcagactctgatgaatgctgccaggcctggggcccactcttcagggcaatggtctcygctctggccgagggcaggtccagaattgctctccaagagcctaggcctggctccaggaccccaagatcctgcttgctgctctatcccactgtggctgagctggcacctaaggtgtaagacaaagtcctcttactttccctccttcttttttcaagcagaaggagtctttctccatagctaccactatttggaacatgctgagtctcacctgaagccagcacatctcagagtctcactcaaggcccatggcatactatttgagtatggctgatggttatttagggccgaagggctctttagtcagcaggtgatgaatcctgcaaggactgggtccttttattcaaggcaccaagttcccttctggtccaagttgtgtctagaaatgtcatacaggagctagagtgattttgatttaggctaaagtttaaggcttaccacct

SEQ ID NO: 944898 - DNA, 828 bp, Homo sapiens
ttagatgcacattatttataactttgtaaytaagacaaatctacaatttaaaaaaaaatcttccttgttactttaccattaattttgcttggagctattatgacagatgctgactggggaaaggaacaggaaataagcatcacataaaaccaccaaaaaacagtcagaattgtcatcctagcacaaactattaacagattattgtaaattcatatattttaataaagcagactaagtagagtgatacttctcaaaagactcatttaagaatgaaaactatattaatcaataaaattggagtttgaagtgctctgtatcagtaatgcctttacagcatgtaaaacaaattcacgtcaagtacgttattttcattccttcattcagtaatcaattataagtgtctactaggcacagagcaccataaaggtagtttggaagttataaagatgtatgtgaagtgcttacagcagagtgtggctcactgtcttcactcaagaaatgttaactacaaggaaaaaaaagcctaaaagcttctgttgagtaggaggttgttcatttacatatgaagaattggtttcagaaaaattaactgattttcaaatataacaagtctagcaagggacagaactaagacttactaaatctagaattttaaagaaaaaaaaagaaagaagtggtcaggcacagtggctcatgcctgtaatcccagcactttgggaggcagaggtaggaggatcacttaagctcaggagtttgagaccagcctgcgcaacatggtgaaaccccatcgctacaaaaaatacaaaatttagccaggtgtcgtggcat

SEQ ID NO: 944899 - DNA, 609 bp, Homo sapiens
acaacttaataggaaaataaaatctaataatctgatttaaaatgggcagaagacttgaatatctcaaaagaagacatacaaatggcaaaccaatatataaaagagttctcagcatcactaatcagcagaggaatgcaaatctgaactacaatgagatatcatcttaccccagttaaaacggctttcatgcaaaagacaggcaatagcaaatgctggcaaagatgtggagaaaatgaacccttcatgcactgttgatggaaatgtaaattagtacaaccaccatggagaacattttgtaggttcctccaaaaaactaaaaatagaactaccatatgatccaggaattctcttgctaggtttatatccaaaaaaaagggaaatcagtatattgaagagatatctgccctcttatgtttattgcagcactcttcacaatagccaagatttggaaaaagcctaagtgtccattaatagatgaatggatraagaaaatgtagtgcatatacacgaatgaaatactattctgccataaaaaagaatgagattctgtcatttgcaatatcatggttggaacttcaggccattatgttaagtgaaataagtcaggca

SEQ ID NO: 944900 - DNA, 783 bp, Homo sapiens
gggtatttggtggaagaaatttctaagcagcaaagcattcaagaggtgacttggttgctgttaaaagcattccgttttataagggaagcagagcataagagtttggaaaatttgcagcctgatgatgcgatagaaaagaaaatctgatttttggaggagaaattcaagctggctgcagaaatttgcattagtaatgagaagccaaatgttaatccccaagacaatggggaaaatgtctccagggcatgtcagaggtcttcacagcagcccctcctatcataggcccagaggcctaggaggaataaatggttttgtgggcctggtccagggtccctgtgctgtgtgcagtctacggacttggtgctctgcatcctggccactctagccatgactaaaatgggccaatgtacagctcaggccatggcttcagagggtgcaagccccaagccttggcagcttccacatggtgttgagccagtaggtgcacagaagtcaagaactgaggtttgggaacctccacttagatttcagaggatgtatggaaatgtctgaatgcccaggcagaagtttgctgcaggggcaggtctctcatggagaacttctcctagggaagtgcagaagggaaatgtgggggtcagagccctcacacagcatccttactggggcactgcctagtggagctgtgagaagagggccaccatcctccagacctcagaatggtagattcacctacagcttgcactgtgtkcctggaaaagctgcagacactcacttttcagccca

SEQ ID NO: 944901 - DNA, 443 bp, Homo sapiens
acagatgggacctcgagaaagctcctcccatcctcactggcctgtaagggtgtggactgaacaaacgatttcacgattaatacctgtgtatgtgatacatgagcttactagacaatatcacccatcaagtaccagatgctatttttaaaacttcttaagctgtacgacaaaactgaaatctatgtgaaatacaactatgcttttcccccaaattgttaatttcctttaataccacaaaatccggctgtcaagagacctgttcaatctactagatgctaaatcttggtcattaaccatttgggaacatcagtgtttcctctccactcctcacactttgcgatataaaaacaactgcctggccgggtgtcctggctcatayctgtaatcccaggactttgggaggctgaggccagtggatcacctgaggtcaggagtttgaaact

SEQ ID NO: 944902 - DNA, 592 bp, Homo sapiens
caagcccttccttgacgtggcatctgggggtgcatctctgtgtctaccacgttttggggtgaacttgacaacrtgattttaaagttcaacaagagggatcagtaaacaagaagagccaacacatttttgaaaaaggaaaatattgagaagggatttgttctgtccattggtttcttttttcttttctccttttttttttttttttaattttactttaagttctgggatacatgtgcagaacgtacaggtttgttacataggtgtacatgtgccatggtggtttgctgcacccatcaacctgtcatctaggttttttgttgttcctggtttttttttttttttttttgtgagatggagtcttgctctcttgctctgtcgaccagtgcagtggcacaatctcggctcactgcagtctccacctcctgggttgaagcaattctcctgcctcagcctcccaagtagctgggattacaggcacataccaccacccccagctaatttttgtatttttcgtagaaacagggtttcaccatgttgtcccggctggtctcgaactcctgacctcaggtgatccaccctcttctgcctccca

SEQ ID NO: 944903 - DNA, 602 bp, Homo sapiens
cagccgcagaagctcgggcgccgaggacsggtcgatgagggagtagcgcctctgatccgacagggatttctctttgtcctggaagtggcaggagagtggaagagtacatgagtgtgcgtgtgtgtgttggtgggcgtctcaactctaggcaggaaagtcttccagcctcactttgtctctgggttccaagcctgggcatcacccagaggtccctcaggcctctgtgaggtgctccatggtctccaagtggggaacccaggaccccatccctcttgactttttttttttttttttttttgagacagagtctcgctctatcacctaggctggagtgcagtggcgcgatcttgggtctctgcaagctccgcctcccgggttcatgccattctcctgcctcagcctcctgagtagctgggaggggcccaccaccacgccccgctaattttttcctatttttagtagagacgtggtttcaccgtgttagccaggatggtctcaatctcctgacctcgtgatccacccgcctcggcttcccaaagtgctgggattacaggcatgagccactgcgcccagccttgcctttaaaaataattaaaaaaaga

SEQ ID NO: 944904 - DNA, 657 bp, Homo sapiens
ggaggctgaggcataagaatcgcttgaacctgggaggcggaggttgcagtgagccaagatcgcaccactgcactccagcctgggcgacagagtaagactgtctaaaaaatttwaaaaattaagaaacataaaactatttctcgctgtaataccatggtctcagtgaattcttcctgtgcagcggcaggaacacccgtcagacaattacactggggtctcttctggacacacaccaggaacttggtgagggttaactttggctgaccaggtctcctataggaaacccacaaacccatcagactgagagctcctcccaggcaggccacatctgcagtgcccagcacaaggcagggcgcagaggggccctcatgcccacagaggatgttgggccatgtcagggttgggaatgaagtcaccaatgctccctccatccttcaccaccctcctgttgtaaggaggtctgggacatctcaaggcaccctcctgtgtggccctctgagacccaggtcgtctcccaccctgcctctttctctttttcttttctttttttttttttgagacggagccttgccctgtcacccaagctggagtgcaatggcatgatctcggctcactgcaacctccgcctcccagtttcaagcgattctcctgcctcag

SEQ ID NO: 944905 - DNA, 547 bp, Homo sapiens
gattttctgtatttttagtagagacggggtttcacagtggtctygatctcctgaccttgtgatccacccgcctcggcctcccaaagtgctgggattacaaggctgagccaccgcgcccggttgctatttattctttaaaaataagacttgaggctgggagtggtggctcgtgcttgtaagcttagcactttgggaggccgagatgagaggatcacttgaagccaggaattcacgaccaacctgggcagcatagtgagacccccatctctaaaaaataaataaataaataaataaattcactaggcatagtggcgtatgcctgtagtcccagctactcgagaggctgaggcaggaggattgcttgagcccaggatttgaggctgcagtgagctgggatcacaccactgcactctagtctgggcaacagagtaagaccctacctcaaaaagaaaggaaaagacaacaaaagaaaagaaaatgctaaagtagcaactgacaattattcaatgctgactctaatttattgctgctaaaaactttacatgag

SEQ ID NO: 944906 - DNA, 607 bp, Homo sapiens
tgcccttaatttctttctcttgcctgactgccctgtcgaggccttctaatactatgttgaaaatgagggttagagagggcatgcttgtcttgtgccagttttcmagcttttgtctattaagtataatgttggctgtgggtgtgtcatagatagctcttattattttgaggtatgttccttcaatatctagtttgttgagagtttttaacatgaaggatgttgaattttaataaaagccttttcaacatctgttgagataatcatgtgcttcttgtctttagttctgtttatgtgatgaatcacatttattgatttacgtatgttgaaccaaccttgcatcccagggataaagcctacttgattgtggtagataagtttttctgttctgctggattcggtttgctagtattttgttgagaatttttgcatcaatgttcgtcaaggacattggcctgaagttttcttttgtgtgtgtgtgtttctgcaggtatggtaactggatgatgctggcctcgtataatgagttatggaagaatcactctacctcaattcttaacacatagtttcagtagaaatggtaaccgctcttctttgtacatctggtgaa

SEQ ID NO: 944907 - DNA, 626 bp, Homo sapiens
gtttacctaatcaagcctgggcaatggcatgtgcccctcccccagcctcgctgccgccttgcagtttgatctcagactgctgtgctagcaatcagcgagactccgtgggcgtaggaccctccgagccaggtgcgcgatataatctcgtggtgcgccgttttttaagcccgtcggaaaagcgcagtattcgggtgggagtgacccgattttccaggtgccgtccgtcacccctttctttgactgggaaagggaactccctgaccccttgggcttcccaagtgaggcaatgcttcgccctgcttcggctcgcacaaggtgcgcgcacccactgacctgcgcccactgtctggcactccctagtgagatgaacccggtacttcagatggaaatgcagaaatcacctgtcgtctgcgtcgctcacgctgggagctgtagaccggagctgttcctattcggccatcttggctcctcgatcctgagtgagtttcttagtcctgagttctaatttgattgcactgtggcctgagagactgtttgttatgagttctgttyttttgcatttgctgaggagtgttttacttccaattatgtggtcaattttagaataagtgtgatgtggtggtgag

SEQ ID NO: 944908 - DNA, 582 bp, Homo sapiens
tagcaacaggcagaccaggagataccctcccgtgcctcgmtcggcaggtgccacacccacggagacttgctcactgctagtgcagcagtctgagatccacctgatatgctgcagcttgatagaggaggggtatcagccattgctgaggcttgagtagcttactgtgtaaacaaagaggcctggaagcacgaagtgggtggagcccaccgcagctcagcaaggcctactgcctctgtagattccacttctgggggcagggcagagtagaacaaaacacaggagacagacagcctctgcagacttaaacgtccctgtctgacagctctgaagagagcagtggttctctcagcacggtattcgagctctgagaacggatagactgcctcctcaaatgtgttcctgacccccctgtagcctgactgggaaccactttccagtagaggccgacagacacttcaaacatgcgggtgcccctctgggatgaagcttccagaggaaggatgaggcagaaatatttgctgttctgcagcctctgcaggtaatacccaggcaaacagggtctgaagaggacctccagcaaac

SEQ ID NO: 944909 - DNA, 603 bp, Homo sapiens
gagaggagagggaagagttgggaggactttgtcttgcatcttggataccaactcagccacagcaagatagggctccagtcagagtcaacaggcccctgttccagccctagttcccaaatgacatttctagacaaactgtgggccagaagggaacccactgccttgaaggaaaggaccccatcctgccagcattcatcacccgctaactgaagagcccttgggccctgaataaccaacagcaatgcacaggcactacattgagggccatcatgagcctctgagacttgctggcttcaggtaccaacaccaccacgggggctagagcaccaagcaggttcttgaggttccagattccaggacttgacagcatttctggacctgccccaggccagaggggagcccactgccctgaaggatgagtcccagaccaggcagcattcaccacaagctaacttaagagaccttgggccttaacggaacattgatggtagtctgtcagtgctccttgtggccaggggtgkcagtggctgtggagtgaggctcctttgcctttggaaaggggagggaaaagcaggaaggactaggtcttatggtttcagtgcc

SEQ ID NO: 944910 - DNA, 466 bp, Homo sapiens
gacctcctgaagtgctgatattaaaggtgtaggccactgcacctggttctagaatatgttttttgagttttagcagtcttatacatttttgttgaaaaccatacatgatgtactgggtagaaagaactgaggtaggctgggcatggtggctgtgcctctctattcccagcacttcgtgaggccaagtcaggaggcccacttgaggccaggaattcgagaccagcctgggcaataatatagtgagaccctgtcactacaaaaaaaggaaaaataaaaaagcactgaggtaggtagttcttttgtgtgaggttttatggttctctggctaagaattatgctgtttactgttggccgtagckttaagtgtcagaagctaaaatttcttgtagggcccttgtctttgtcttctttgttgtctttgagtttttccagaggctccttaaataggatctgaggcttgcagtct

SEQ ID NO: 944911 - DNA, 840 bp, Homo sapiens
gctggttttagccagctatggtgaatccaaggtgtgacacctgcaactttaacagcagtgggagtagacatgatcacaatatggagcccatcctataagggccccagggttgttggattccacctttttttttttttttttgagatggagtctcgctctgttgcccaggctggagtgcagtggcgcaatctcggctcactgcaagctgtgcctcccgggttcatgccattctcctgcctcagcctcccaagtagctgggactacaggtacccaccaccatgcctggctaattttttgttttcgtatttttagtagagacggggtttcaccgtgttagccaggatggtctcattctcctgatctcgtgatctcccccccgccggcctcccagagtgctgggattacaggtgtgagccaccaggcccagcctggattccacattttaacccagacagaatccccggtttatgtggatgcactgggtctgttagacttaaaggtatcctttcacttacccagccttgcacctcctgcattgccactcctaaagcctgcatctgtcttctaagggttagctctcctaactcctttaactaccctctaatttgattaatgattgggggtggccttccaaataatatttcatagggtgaatacccaatttgttctgtaagtgtacacctgacctggaggaggaccatgggcaagacctgatcccatcgtaagtgagtttcctggcaaaacattttyagtagctgtttgagtgtctggttcatccattccgccttccctgaactctgtggtcagtaggctgtgtgcagtttccatttgatctttaaa

SEQ ID NO: 944912 - DNA, 589 bp, Homo sapiens
gtttaccaggagtagaagcccaccagcagaaacccacagttggagccaatatgagtaggaaaactttcaactgtcattgttgaatttctagaagctcagcatggactatctggagagttaaaactccaagggtggtggcagccttaaggggactgcacattttcatgagttttatctccagaagccccaccaagttgtcactgggaagggagggcatgggaatcccttcctgcttccagcaggtggacaagaaaagcaatcattttgaaatatgcccagagctctttgttttccttaaccaaggactactctgggaagaaactattttatcagagcctaaccaacttgggtttccccagactgaccaaccacggcgaaaggaagtactcaactccagccccgtctagtctgccatctaacccaaaaggatgggtggggacgctgagaagcacttgtaaaggtcacagcccagggacacaggctcagtgaacaactgagatctaatcatggcatgatagaatgcttgccctcctcccaaccttaycaccacatcagtaagaatcctgtataataactgcagattataggt

SEQ ID NO: 944913 - DNA, 580 bp, Homo sapiens
ggggccccagctaaaaggaagttgagttgcgaatatatttagtttgggttcagtaggggatatttttgtggttggtagttgtttctgaatgcagttaagttattactagtcatcctggtgtaggaacggcttctaggaatactcctacggccccctgcactgacgcacccagcctcgtgacaggaagtggagggtcaaacgtcatctggtgatatgaatttgtcctgcagcatctgacaccagacgtttatgcagaatcaaggagaagcaaagtttgaaatatacaaagcaggaagctggtctctggaaaattcttccaaagtcagatatgtaaaatcgtaagcagaggactttgttttcaatgacagctagtcaaaacagaagttgtctcctttcaggaatatagcacgccatgctgtgtatacaattatacaggcctcatacattttyctttcctccttgatgagaattctgcaaaagagatttattggaattctcatgttttaacctatggttgtggtatttatcatcattctaaagttctattttttttgaggtttatcttctcattctaaataac

SEQ ID NO: 944914 - DNA, 694 bp, Homo sapiens
actttaactggggaccacaatgacattttgggtcctctggaatcaatgtcagctcagagccagtgtccagtagtccctgaaatgtctgatcatttccctttccccagtgcacagctaccctggtataaggctggaggtctccttagggaaggatgggagaaagattcactgcataaatttcagtaatatggggtccttacacaaggtgacccagcctccccttctttcaaggggttgtgggtctgtaaactggctcaagcccaaaaatttattgatgggccatgattctctgtttttataattcaaattagcttttcatccattggacctagaagttttctgtttatataaattaagcaagaatgcagtgggcttcctatcaattttacttctaggaacaccatgattaattagccaatgtcagaactctacaggagtcagactattctgattgtcactgtgcctctgctgtccatttcagtagctatgcccctcttgcctttgatggttgagtgctgccacttggcccctgccaccctgggatccaattattcccattatatttaaattttgtagtggagtgattgtggttcccactgttagatctgacatacagggaagarcaattacaaagctcttcagtgatacaggtgctgccctcacaagtctattttgcaaggcatttgtcaagggt

SEQ ID NO: 944915 - DNA, 488 bp, Homo sapiens
tcagccattctgtctcttaatgggaaaatttaatccatttacattcaaggttattattgttagataagtacttctgccattttgttcattattttttccttatcttgtagattccttatttctttcttcttctcttgctatttacctctgtggtttggtggttttctgtggtgctaagctttattttctcattctcatttgattgtctgcagtacattatttgtttgtgattaccacaggctaacataaagagtcttgtagttagaattgactattttaagatgatggcaacttaactttggttgcataaaattactctagacagttttccttccccctaaaatttatacttttgttcacttaatttacttctttatctgtggtgtgttcctttgccattaattgtaattcttggttttgaccatttgacattaaacgttcatactagaggattgaaagacrtatcatatcactggaaatattaggaa

SEQ ID NO: 944916 - DNA, 594 bp, Homo sapiens
tggccacatgcaggcaggttcttggggccacaggcctctatgtgtggccaggggctctgggggtgctcaaggccctgtccaaagggctggtggagtcagatgtattatttttgtaatactactaagtgtcatttgcctttttcactcgctatctctcgtgaggcaacgtggattttcttgaggttgtagcatgtgatactgcagcagagtgactgcacatgcagccatgaggatctacctgttttttaagccagacattaaaacagtttgcaaaagtgagaaatgatgtgattcatctcatgagattttaaaaaatagagtgacttttccagcaaaatatgtgctttcagttagcatgtgcagtattcctcccttaaacttggtttttgttttggaggttttagttacctgcagaaatggtccatcactgtctgaaaatagtcaatggaaaattccagaaataaamaatttctaagtgttaagttgtgcactgttctaagtggtgtgatgaaatctttgctgtaccactctgtcttgcccaggatgtgaatcctccctttgtccaatgggtccatgtttgtctctgccacccac

SEQ ID NO: 944917 - DNA, 646 bp, Homo sapiens
taaaactttaaaaaaatacttaatgatagggctctttcttgctttatggaaccgatatgtgctttcagagttagctcrgtagggcaatttcattttctcttgatgttggatgataaagctggaaattcattcatttaaaaaactttgattccacaatagaatgatttagaaaattaccaagagagatgaggctattgaacaatttatttttcttttgtacttgggaaaattattcccaaactttcctgtctacccaacccattcaggaccataagaccatttccctatgtctgtggcttctatatttctacacctgtacttaccttgaattttgttctttttctggatgtttctaataacttagggagagctagcctgttgtttcaatacttcatcaagacaggtgtcacttctaactctcaaatttcaaatgccgtaataaaccccaaattgggtcttctaaattgatctagaatgagacagacatacctatgttttatgatgacaaaccagaaacttattttacaagtcagataaaatggtagaataatttgaatttatttttaaaatatactgtagcaaaagttcataagttctgtgtcccagcctggacactgaccattgaaaaatagatgcctttctgtgc

SEQ ID NO: 944918 - DNA, 597 bp, Homo sapiens
ttttgaccaatcatgtttctccacaactagtcacttctttcatcacactttgcataaaaacagttctcccagatctttgggtcttcatttctgaaggctcccatgtcacataaaactgtgactaaatcaatgtattatggctttctcttatgtgaaaggaaaataaatactcaggaccccaattcactctgccaaaagaaaaaactaagctgaaagctgagtcatgcaagaagctgcctttccttttgttcctaactggacagctacagataacaggttacgtatctccacagatagctactctatgttctccttatcttatgtaaaatgctgctttactgaacacgagaagaatacataattggctattcccctacctgctccttttctcttgcaacatgtggattaccataccctcccacccacttttcccctttaaatactggcacccttaaattcatctttggagaaagtcatagaccacagactgttcctgygattttctattttttgttccgtgcattgtccttaaccttggcaaaataaagttctaaattgagacctgtctcagatactttttggcttatacttgttaat

SEQ ID NO: 944919 - DNA, 595 bp, Homo sapiens
aggattgcttctaaaaatgtatttagtatttatttgggamtcatttcagtttagacactttcattttcaaaaaagcaacagcccaacttacattacagtaaacactatcgaaagtttttcatttaagttaattatactttttaaaagtttaatttatacaaaataaatacaaggaaggaaatgctacctctccacctgttgagggttcaatatccgagtatttggagtcacaaacaatgtctcccactccctgggcctggccagatgtgatgttaggaaaggaagtggcacagtcttttgcaaaatatttgaacactttccagttgtgtccatagtctgtggaacgttcaactaacattgcagcaggccgaaaagtctaggaaaaatgagtaaaagttggcacatttcacaaaggcagattttattatcaacttcagattgaatatttgtattttctaattccatttttaaaaactttaggtgtatctttttgttgtttgttttgttttgtttttgagacaggatctcactctgtcgcccaggctggagtgcagtggcatgatctcggctcactgtagcctcaacttcccaggcc

SEQ ID NO: 944920 - DNA, 595 bp, Homo sapiens
aggattgcttctaaaaatgtatttagtatttatttgggaatcatttcartttagacactttcattttcaaaaaagcaacagcccaacttacattacagtaaacactatcgaaagtttttcatttaagttaattatactttttaaaagtttaatttatacaaaataaatacaaggaaggaaatgctacctctccacctgttgagggttcaatatccgagtatttggagtcacaaacaatgtctcccactccctgggcctggccagatgtgatgttaggaaaggaagtggcacagtcttttgcaaaatatttgaacactttccagttgtgtccatagtctgtggaacgttcaactaacattgcagcaggccgaaaagtctaggaaaaatgagtaaaagttggcacatttcacaaaggcagattttattatcaacttcagattgaatatttgtattttctaattccatttttaaaaactttaggtgtatctttttgttgtttgttttgttttgtttttgagacaggatctcactctgtcgcccaggctggagtgcagtggcatgatctcggctcactgtagcctcaacttcccaggcc

SEQ ID NO: 944921 - DNA, 643 bp, Homo sapiens
aaactaaccatcacaatgatcaaggctatttttatcctttctttcagcattgtttgtggattttccctcaaaaatcccaggtttccttgtttatcctttatgttagtccattttcacactgctgataaagacataccccagactgggcaatttacaaaacaaagaggtttaattggacttacagttccatgtggctgaggaaacctcacaatcatgtctcacatggatggcagcaggcaaagagagagagagtttgtgcaggagaactcctcattttaaaaccatcagatctcatgagacttattcttcactatcataagaatagcatgggaaagacttgccctcatgattcaattatctcccaccaggtccctcccacaacacatgggaattcaagatgagatttggttgggaacacaggcaaatcatatcatccctcatctcccagattctaatacccatagtatcctacccacccccttttctgattctatttcccacttcctcacttcctgaaacaacttcaatgtrcttgtaggaactctttattcatcagcagcaaaatttctttatgcttggcttctcttctgaatgtttcctttctcttctttctctccctgaaagttgactctcccctgaggac

SEQ ID NO: 944922 - DNA, 559 bp, Homo sapiens
tgagaaaaaaaagctgaaaacaactcaaaggcccaccaacagaatggataaaatgaatatttccatacaacgtaatattgtaaaggaatgaatgtgatctacagtcacaagcatcagtgrgaaccaatgtcaaatagactgttaaagataaaaaactaagtcatcaaaggggatgtgtgtgcatgtcaatatatatgccatttacatagggcctaaaagcaaacaagacaatattatagaagatatagtgtggcaaaacagcgaaagcgtaggcataattaattcaaaacataggctggtgatcacttctaggaaagaatgcaatacaggagaagccctgggtgcttcaatgttaatattcaatttcttggtgttaagtatacaagtgttcattttataattctttaaaatgtgtgtttatatatgtatataatgcttatatatttatactcttcaaagtagggctttgattcctcatcagtggttcttaaacctcatgttctctttaggtaactctgggagcttaaataagcatcaagagttgttctgatgacacgtc

SEQ ID NO: 944923 - DNA, 813 bp, Homo sapiens
aacctgggaggtggaagttatagtgagtcgagatcgcgccactacactccagcctgggtgacagagtgagactctgtctcaaaaaaaaaaaaaaaaaaagtgtcaccagacgtgcgtatccccagatgatagcaagcaaggagatactgagacttcctctcatcctgtggacagtgtcctttttgcagtctctcgagtgccatgtttttcaaatttctgtgcttttgctggtgatttcactatgtaagatgacccacgagaacaggactgaagggctgtctagggttcctaagtgcaagaaggttgtgctgtgcctcatggagataacacgtgtgttcaagaagccactcaggcatgctgctggctgtgagttcaatgttaatgactccacaatccatattgaataatgtgttattaaatagaaacaaacattaaacaaggtcatgtatgaattgattgacaaaactgttgtgaccagatgtatttctctgggagcaaaggctcagtacttgcaaattcagtattcacagtagctttagaacgtcaccaccatcaacgtttcactttagaactgactgtatattgttaatgaacaggctgcgtgtgcagaaaccgaagccctaagaaaggcaaaatatgcatgggttacttgtcttttgttgtcagcccaatgccaagcactgagatatctgtaagcacatgaawtcttgatggaagtttgcttttgtaaatgatcagccttgacattgtggaaatacagtgctagtggttacgagattgtagccactctggggccaggacgaggggagccat

SEQ ID NO: 944924 - DNA, 599 bp, Homo sapiens
attcatcagtagtgggactgtgctacattaaaggtttcaggtaaaaggaatcgatggaaatatggatatacacaaaagaatgaagaacactggaaattgtaactccgtagtgcatggagaaaaatgtaattttttcttattacctatttaaatttttttaaaaactaatgattaattttaaaagttacaatgtggcatggagtttataacatatgtagaagtaagatgtctaatcgcaatagcttaaaggccaaaaagggagaaatggaagtatgctaattcatgcttttatactacacatgaaataatataatatcacttgaaggtagattgtcttaagttaaatgtgtacaccataaactctaaagccatcactgaaatatcaaagttctataaataagctcacaaaagagataaaacaaaatcataaaaagtactcacttaatccaaatgaagacagaaaatgagtaaagcagaaaccaagaatcgatgsaaaaaagaaaacaagtagcaaggtgactgatttaatttaataatatactatcaatcatcagattaaatgtaaatggtctaaacactccaattaaaagtcagagatt

SEQ ID NO: 944925 - DNA, 624 bp, Homo sapiens
ttatataatacccagtttccgtgcacatttgctgaaaacatctatctttctatgtattttcwgttcacaatatttgtcagaacttcagtgtatttaagctgggtactatgttttttgccaaaacaaaccatatgaagacacaccctttggtaggaaccccgatatttggtatgcattaagcattattgttgttatgtttataatttaccatgtattttctggtaattaaagatggcattttatttaatatggctaaggttatagttgtaagaactagctaaaatatattcaaatccttttaaagctctgtgttagtctgttcttgcactgctataaagaaatacctgagactagtaatttataaggaaaagaggtttaattggcttatggttcttcgggctgtacaagaatcatggctagggacacctcagaaaattttcaatcatggcaaaaggtgaaggggaagcaggcaggtcttacttgactgagcaggaagaagaggcgaggggtgctacacgcttttaaacaactaggcattgtgacaactcactctcacgagaacagagccaaaagggaaatccacccccatgatccaattatttcccaccagaccccacctccaac

SEQ ID NO: 944926 - DNA, 655 bp, Homo sapiens
gatggctccacaaatttccttttattattattttttacaatggtacttatgctggattcatttatcttgagatggtggagaactacaactgcacacctcaatctaccatacatctttagcaattcaacttcttcttgcaatgtgataacttctttgcttctctggagcacttccagcatcactagtggcactttgtataggtcacataggtgttactcaaaatttactgtattgaccaggtgcggtggctcacacctgtaatcccagcacttgggaggccaaggcgggcggattacttgaggccaggagttcaagaccagcctggcaaacatggtgaaaccccatctctactaaaaataaaaaaaattatccgggcgtggtggcgggcccctgtaatcccagctactcgggaggctgaggcagaagaattgcttgaacctgggaagtggaggttgcagtgagccaagatcggaccactgcactccagcctgagtgacagagcaagactctgtctcaagaaaaaaaaaaaaattactgtattgcactraagactatgaagaattcatgagaaccacaagagatcactttttattgccatacacaatttactgagagatgaactgctcctgggcatgtgtcacatggcattttacat

SEQ ID NO: 944927 - DNA, 646 bp, Homo sapiens
gcttaggctatgtcggttagtggaggttgtggtgagatcttgctggcgatgaagatgccaggtggcccagtcctcaagccccagtggtgttagtgtaagctgagcatgactgtccttgggccccagagtgttgtatactggcatcagtgttagtgagtccaggcaagcctattcttgggcttctaggattcttgctcaggtgccattagtggtagcagtgagccagttaagagagtgtgttcttgagtccctggcaagcaggtgtggcttgggcaatggcaatggcagtggcagggcaaccttctggctcccaagtggtatgcattggtgttgttagtggttgcagtgggctggtcaggccagtcactaggccagcagatggtgtgtgctgcttagtgctagttgtggtggtagtggcaggttgggtgggcctgacctcaggtacccaggaggaattcctaggtgccaatggcagtggatggggctgggtgatacccatgtctctgatggcatgcttgggcactggragggacagagctggactgggcagacctggcttcagggtcactggtggtgtgtgcaggcactggctatggtagtcaggggcagggtgatcccaggatgcaggtggaatatttgagtgggg

SEQ ID NO: 944928 - DNA, 613 bp, Homo sapiens
gaggactttccataggtcaggatcctgggaagtaccaagctaaaagtccactttggcagcttcaagcaagattatttttccactttgatgtttcttatcatttatatttccgaatctgaaattctcatcgttatacgtctatgatcatctttgctcatataatttcatgttttctatttccctatgatggcaagggcatggaggatgatggtgctcaacatgtcgcaaaaaaaaccttgaaatccaagatgtagaacatgatggaggtggccactgatatgtataacactgattaatttcaaacctcttctcaaggaatgatcttgaaaggcaacactgactttggcaatttgtttttttactttagtgtttagcagaatggaggcattctctttaattaaatcatttctacatttcaccattatgcttgagtgtgaaaaagcatcataaaccactccttgtagataattgtgaaggttggagaatatatactctggcattgtcccatgttcattcacaaataatattatttctttttaaaaaatattkaactattctaagaaagaacaaatatcaatatgtgtagaaatattttagattactttttggcatg

SEQ ID NO: 944929 - DNA, 585 bp, Homo sapiens
acaagtgtaggaaatacagtatgtgtagcaggttggcagggaaagttgtattctggttttggacatgtaaggtttgaagtttcctgtgacacagagatggagctgtcatgtaaacaataggataagtcttatgacttgcctgggcctccaatgatgaccatgtggtaacaagcagcaattctgctcctttacatggattgtgatgaccaaggcaacttacattcaatgggaaatttttcaatatattattattatatgttatttatgtacctttgccattgacctgttttatttaattcagtgctactaacaaccttagaggtagccatttctttcttttgatagaggaatgaaccaaggctcagacagggtaagaaaccaaagttccacagttattaagttttgagctggggtttaatctgatatgcaggtgcctctcggtgtctgcaggggaactggttccaggacatcctgaggataccaaaatccacagatgctcaagtctctgatataaaacggtgtagtgtttgcatataacctacatatatcttsctatacactttagttgatctctagttatttata

SEQ ID NO: 944930 - DNA, 636 bp, Homo sapiens
ggaggagtgactcctccctatttcattctatgaggccagtatcatcctcatacaaaaacatggcagagactctacaaaaaaagaaaatttcagcccattatccttgatgaacattgattcaraaatcctcaacaaaatacttgcaaaccaaattgagtagcacatcaaaaatcatatccaccataatcaggtaggctttgttcccgggttccaagtttggttcaacatacgcaaattagtaaatgtgatttttcacataaacagaactaaagacaaaaaccacatgattatctcaatagatgcaaaaaagggttttgataaaatccaacatcctttcatgttaaaaactctcaataaactacgtattaaaggaacatacctcaaaataagagccatctatgacaaacccacagccaacatcatactgaataggcaaaagctggaagcattctccttgaaaacttacacaggacaaagatgtcctctctcaccactcctattcaacatagtattggaagtcctggccagagcaattaggcaagagtgaaaaataagggaaatccaaataagaagagaggaagtcaaactattgctctttgctgatgacgtgattctatatctagaaaaccccatagt

SEQ ID NO: 944931 - DNA, 555 bp, Homo sapiens
cctagtccagcactccctccccaccaccatttcccaggacttcccaggacagagacaggtaaaagcaagttgtacwgaatcgttctgattgtaagaatggcgtatcttcagcctaggcggcatagcaagacctcggctcactaaaaaaaaataaaaataaaaaattagccatgtgtggtggcacgtgcctgtagtcccagctacttgggaggctgaggtgggaggactgcttgagtctaggacttcaaggatctagtgaactataattgcacaactacactccagcctgggcgacagagtgggactccatctcaaaagaagaaaacacagagaaagagagagagagagagaatggcatatcttcattgtacaagtcttgggaaatacagaaaccaaggagaaaatagaaactatcagtagttccaccacccaaagacaaccactttgaacacagtatggtatttccttgcaggcttttttccatgtgtccgtaggtacatagagttaaataaccaggaacatgctgctggaggaggtctgttgctgtttttactc

SEQ ID NO: 944932 - DNA, 552 bp, Homo sapiens
aaacctagtggcttaaaataaattcttagggccaggcacagtggctcatgcctgcagtcccaccactttgggaggccgaggtgggagatcgcttgagtccagcagtttaagaccagcctgggcagcacagtgagactccatctctacagaaaatgcaaacattagccaggcatgatggtgcaaacctgtggtcccagctactcaggaggctgatgcaggagaatcgcttgagcccaggagggagaggttacagtgagccaagatcacccactgcactccagcctgggtgacagagtgagactctgtctcaaaaataaataaataaataaataaataaataaaatacttacttaggatctccatttctgtgggtcaggaattcaggagtggcatagctgggtcatttgggctcagggtgtctcatgacattgcactcaagctgtccactgagactgcagtcacctaaagcctgtttccaagatggctccctcatgtgackgctgacaggaggcctcagttcctgttacatgagcctctctacaggctgcttag

SEQ ID NO: 944933 - DNA, 717 bp, Homo sapiens
attgaatctagcaagatgtgtttgtgttcatctgggtggaatgatgaaggggaagggaaaatatcaggcataagaaataatgcatgcaaagrcagaggatcataaaatcaagctcaggaaacaatgatgagaagttcagggttgtgtagggctctggcaaggcaagacgtcatacacaggaaaggatcagataataaaggccttctatccctgtgaagaaatgtggattatattttgaaggcagcaggaagccactaaaggagaggagaaaagtaataaaaccctcatattgattttagaagatgaggcaacaaggaatccatggtcaagtgtagctctcagagacagtgagaactttcatttccatgaaaatgatgggagcacaattatagcaattttagacctaggacatacagcactcagtgtactttcaaatcaataagagtccaggtcaggaagaagaagggaggagtgccccaggctggtatctcgcagttcttgacctcaggtcttaactggcaactgggcagccctggggtccggggacagcttgtaacgagagtggagtgcagagcagaagaacattgtagaagacaatgacgaggtgatttatagctgcagtgagtgctcttcttctggaatgctctaacacacaggagagggccatggtcagcctgtgctgtgtcccaggccaccgctgaccaatggagaggtgga

SEQ ID NO: 944934 - DNA, 598 bp, Homo sapiens
agccttaaggcaattttcaacaattcaaaaaaaccaaaatcataccaaccacactcttggaccacagcataataaaaatagaaatcaataccaggaagatctctcaaaaccatacagttacatgaaaattaaacaatctgctcctgaatgaattttgggtcaacaatgaaattaaggcagaaatcaagaaattctttgaaactaatagaaaagaagatacagtatactagaatctctgagacacagctaaagcagtgttaagaggaaagtttatggtgctaaacacccacatcaaaaagtttgaaagatctcaaattaataacctaacatcacacctacaagaactagaaaaacaagagcaaatgaatctcaaagctagcaaaagaaaaggaaccaaaatcagaactgcaatgaatgaaattgagacacaaaaaaccatacaaaaggtcaacaaaactaaaagctggctttttaaaasaataaataagattgatagattgctggctaaactaataaagaaaaaaagatagacgatgcaaataaacacaatcagaaatgacaaaggggacatttccacaaaccccacagaaatacaaaa

SEQ ID NO: 944935 - DNA, 590 bp, Homo sapiens
ctttatacacaggccaaacaagaatacagttttcataacattatgaaaaggaaaaaaaatgaaacagagtagtgactgaaccacaaattatgtcatatttcagatttaatagggtactgatttatctgtactcaccagtggttccccagctcttttgtgaataccaagaatacgaatggcatctactggtaataactgattattgatagaagaattattcatttctgggcttgatggaggtgaatcataacactttgatgccacaatatcatgggcctccaacagtgactataaggagtcaaaatagcctgtggttatttatgatatgtggatgaaatttgttactaaaagtactttgttatttcattattccaatggagtactaaaaatttccaaggcacatggtattaaattcccaaatatcaggttgatcaaataaatatataatttttaagagatataaaaatatatagttttattatcatcaaacaatatyatattccttctttgagatatgaagagatattagtgatgctttttaaaaactggcaagttcactggaaactgaacctaggtttccagtctggtgc

SEQ ID NO: 944936 - DNA, 573 bp, Homo sapiens
cccccgcaagaagatcctcaggcaggttcttcaggagattccagaagaaggcactgttatcataggaaatgatagctccatgggtgttactgccccctgaagactttccagtgggacatgatgtgaaggtagaagacactgatattgatgatcctgaccctgtgtaggccaaggctaatgtgtttgcatcttagtttttaataaaaaagattaaaaggttaaaaaaaattaatagaaaaaagcttatagggctgggtgcagtggctcacacctgtaatcccggcactttgggaggctgaggcaggtggaccacttgaggtcaggagttcaagaccagcctggccaacatgatgaaacctcgactctactaaaaatacaaaaaacagccaggtgcggtggtgcacacctgtaatcccagctacttgggaggctgggacgggaraatcactggaacccaggaggcagaagttgtagtgagcccagatcacaccactccactccagcctgggtgacagggcaagactccataaaaaaaaaaaaaaaaaaaagcttatagaagatattaaaaaagaa

SEQ ID NO: 944937 - DNA, 573 bp, Homo sapiens
cccccgcaagaagatcctcaggcaggttcttcaggagattccagaagaaggcactgttatcataggaaatgatagctccatgggtgttactgccccctgaagactttccagtgggacatgatgtgaaggtagaagacactgatattgatgatcctgaccctgtgtaggccaaggctaatgtgtttgcatcttagtttttaataaaaaagattaaaaggttaaaaaaaattaatagaaaaaagcttatagggctgggtgcagtggctcacacctgtaatcccggcactttgggaggctgaggcaggtggaccacttgaggtcaggagttcaagaccagcctggccaacatgatgaaacctcgactctactaaaaatacaaaaaacagccaggtgcggtggtgcacacctgtaatcccagctacttgggaggctgggacgggaaaatcactggaacccaggaggcagaagttgtagtgagcccagatcacaccactccactccagcctgggtgacagggcaagactccatmaaaaaaaaaaaaaaaaaaagcttatagaagatattaaaaaagaa

SEQ ID NO: 944938 - DNA, 557 bp, Homo sapiens
agtaaccagaccctctgtggagagcagatgacgacctccactagtaaccagaccctttgtggggagcaggtgacgacctccactggtaaccaggccctctatggggggcagatgatgacctccactggtaaccaggccctctacggggggcagatgacaacctctgctagtaaccagaccctctgtggagagcagatgacaacctccactagtaaccagaccctctgtgaggagcaggtgatgacctccactggtaaccaggccctctgtggagagcagatgacaacctccactggtaaccaggccctctacggggggcagatgacgacctccactagtaaccagaccctctgtggagagcagacgacgacctccactagtaaccagaccctctgtggggagcaggtgacgacctccactggtaaccaggccctctatggggggcagatgatgacctccactggtaaccagaccctctactgggggcagatgatgacctccactggtaaccagaacctctgtggagagcasatgacaacctccactggtaaccaggc

SEQ ID NO: 944939 - DNA, 433 bp, Homo sapiens
aaagataaggtcttgctatgctgtccaggctgtccttgaactactggactcaggccatcctcctgcctcggmctcccaaagtgctaggattacaggcatgagccaccatgcctagccaggaaaaatttctttcttgtttcaaagaaatgccttcctcagcttccccctctgtgaaatggggattgggaaacctctgtaccagggtggctgtggcagtctatttgagggccactctaacacctggcagcggggaggggatggaaagggtgtcgggaaatgctggggccactcactatccttcttctggcccccaggcctccaggcccaaggtcagcatcccactgtcagccatcattgaggtccgcaccaccatgcccctggaaatgccagagaaggataacacattcgtcctcaaggtgaggtctcaccccta

SEQ ID NO: 944940 - DNA, 512 bp, Homo sapiens
cactcgcccagccacatttcctcctaagggtcttcctaactgtggtgactacgtattgtgggcagccctcatttaaaacaatctgtctatgctttttgttctggaaaatatggacaacataactacacaagttatgatctagccaaagtgcttctgaattaccaaattatggggtttcattagaagaaatgacagcgataacatgattaataggagtttttttagcagaatgccctcatgttaagccttccgaagcctttcttttaaacccctagtttttctcgcaatgatgttatttttgttttttaatatggaagactagaggttactctcagtcaaaaaaatatgaaacagttcactaagacccacagaaaaccctaccgtctgcttctcctacagagcgtttaattagtatttcctagataaggaacgtagatggtcgtggtraaagacagctattttcaggcacggtttctcgtgtgctttaattacagaaagcactccaaagacct

SEQ ID NO: 944941 - DNA, 569 bp, Homo sapiens
gaggcagctgcagaaccatggactcacagtcaaaaggcttagatgctcccacactgtaacttaccatccctatggcttagggcaagacactaaaccctggactctcagttttcttctctgsaaaagagtggcagttgtccctatctcattaggttgttataaagtgctattttccatcataatagcaaataggggacaaagcggtggaacaaaggacccagcaaatatgattgggggaaaaaaaagcgagaaacccagcatatttagggcccccagggagaggcagaccaccctaggtgtatgagtggggaaggaggcactcagaaatatggtttggaatgagcatgagtcttgtgatcatctggaggacagaaggaaagcatacttcctgagtacctactgtgtgcagggactgtgctagacactttcgagtacatttttttaaaaaagtatttatttcaataggattttagggagcaggtggtgtttggttccatgaataagttctttagtggtgatttctgggattttggtgtacccatcactcaagcagtgtacactgtacccaa

SEQ ID NO: 944942 - DNA, 602 bp, Homo sapiens
acttataagtgagaacatgcagtatttcgttttctgttcttgagtttattcgtttaggataaggatattgcatccatgttgctgcaaaagacacaattttattcttttttttctggctgcataatattccatggcatatatgtactgtattttctttagtctactgttgatgggggtctaggttgattccatgtttttgctattgtaaatagtatcactgcaatcttaaagaacaaaaacaaagacaaaagctgttgaaggatctgcttgcttagaggcatctgttgaaggaactgtcttgctttggaggcaatgtttcaggcttcaaattgaaggcaatgagaccaacaaaaatttaagcaaggctatatcagatatgaagaaacttgtaatgacctggattggagaccagacacagaagcatatccttctcagcaccatgaaaattatggccaaagcaaaaagtttgtgatgttgaaagaaaaggctggacctgatcacaatgttgaatttgctgccagctctgggtggtttaaacaattcaagaatcattattcattgcatcatgtaaaaaygagcagtgagtctgcgagtgctgatgt

SEQ ID NO: 944943 - DNA, 581 bp, Homo sapiens
aaaggaaggagaggaggatgaaggaargcatcgtgaaggcgggagagcttagttctgattctagtcctagttttgggagattttccccttcagggtggctgaatatccacgtgcatttacatgaaatgctgtgaagattcttctgtcatgaagcctgaactgacatatataaccatttttttttttttgagacagagtctcactctgttgcccaggctggagtgcagtggcatgatctcggctcactgcaacatccacctcccaggttcaagtgaccctcctgcctcagcctcccaagtggcccacgccaccatgcctggctaatttttgtattttcagtaaagacggggtttcaccatgtaggccgggccggtctcaaactcctgacctcaggtgatccacccacccaccttggtctctcaaagtgctgggattacaggcataagccaccgtgcccggctaggcacttataatcttaacttactcactataatggaatggatttcaaaacctggagaagctatatcagtacaacctaatgcctttatcagagaagggtgcggttggctgcaaaaattagc

SEQ ID NO: 944944 - DNA, 497 bp, Homo sapiens
aaaaaaaaaaagaaaggaaggagaggaggatgaaggaaggcatcgtgaaggcgsgagagcttagttctgattctagtcctagttttgggagattttccccttcagggtggctgaatatccacgtgcatttacatgaaatgctgtgaagattcttctgtcatgaagcctgaactgacatatataaccatttttttttttttgagacagagtctcactctgttgcccaggctggagtgcagtggcatgatctcggctcactgcaacatccacctcccaggttcaagtgaccctcctgcctcagcctcccaagtggcccacgccaccatgcctggctaatttttgtattttcagtaaagacggggtttcaccatgtaggccgggccggtctcaaactcctgacctcaggtgatccacccacccaccttggtctctcaaagtgctgggattacaggcataagccaccgtgcccggctaggcacttataatcttaacttact

SEQ ID NO: 944945 - DNA, 548 bp, Homo sapiens
ttcttggtagcgtctttagaagcgcagaagttttatatttgatgaaatccaatttrtcgatttttcttctggtatttgtgcttttggcatcatacctaagaaaccattgcctaatccaaggtcataaaggtttacacctgtgttttcttttaagaggttttatagttttagctcatatattttggtctttgatttattttgagttaatttttgcatatggtgtgaggtagggatcaaactttgctcttttgcatgtggatatctggtcgtcccagcaacatttgttgaaacactgttcttttacccttgaattgtcatgtcactcttgtcaaaaatcagttgatcataatatgagggttcctttctgggctgtattgatctgtgtgtttatccttatgcccctaccagttcaggtcaatgtagttttgtatttagtattgaaattgggaagtgtgactcctccaaccttgtttcctttttcaaaattattttggttatttggggtcattgcattttcatatgaatcttagaatcaacttgtcaatttc

SEQ ID NO: 944946 - DNA, 617 bp, Homo sapiens
gacattcttcagggacttgggttctttgcaactgctttgtcattctctctctctctmtatatatacacacatacatatatgtacatacatatatacatatatagataattgtatagagaaatataaaatatatatttaaaatctatatataaatatatataaaaatttatatatttatatataatttttttttccaagactgaatctttctctgtcacataggctggagtgcagtggcgcaatcttggctcactgcaacctccgcctcctgggttcaagcaattctcctgcctcagcctcccgagtagctgggattacaggtgcacaccaccacacctggctaatttttgtatttttaatagagacggggtttcaccgtgttggccaggctggtctcagactggctggtcttgacctcctggcctcgtgatccgcctgccttggcctcccaaagtgctgggattacaggcgtgagccactgtgcctggcccattcttagcatattatccttgtcttcatccagctttcctggcatgtgcaagatgggtcctgcagtttcaagggtcacagacattatcctatgcaaaaaggggcctttgctttctagttctttatag

SEQ ID NO: 944947 - DNA, 591 bp, Homo sapiens
gaatggggagagtgtgttgattggtttgtgagtatgcaaaaaatgttaaagcaaagacaccactcaaaggtgggcacgacagagtagaaaaccaattaggaaagggtaggtatatgtkaaataggtgaatggtggggatctatcagaggaaatcatgccaaataggcaagttctcaatccagtctgaggatgtaacttgtagcttggctttcaggctttaaactgtcttgggcttggaaggggggtttcactggggacccaccctatctgcctaggcatttggctgcttcctgccactctcaatattagaaacaataagctaaaattagcacaaatatatgataaataatttaacagacaaagagatgggaaataaaacaaattttttaaaagttataagactaagaattcaaaagtttagtaaacaaaggcaatcaggattttccaagcaaaagcaattaccatgtctagcaaatcccccaacaatttgccctcacccaagacatggagctctccttaagaaaatggttctcaaactttagtatttacagagtttgttaatgcagattccaaggtcctcacaaaacgatt

SEQ ID NO: 944948 - DNA, 642 bp, Homo sapiens
aacttactacaaatctacaataattaaaacagtgtggtactggcaaacaaacagacatatatatagaccaatggaatagaagatagagccyggaaataaatatatgatccactcatatatggtcaatttttgagaaaggtaccaagaccatttaatggggaaaagacaaatcttttcaacacatgctgcttggaacagtgtatatccacctgcaaaaaaaatgaaagtggaccattactaacaacatatacaaaaattgattcaacatagatcaaaaacccaaatgtaagacttaaaacaatacaatttttagaaaaacatatggcaaaattttcacgacattggcttagacaatgatttcttggatatgacaccgaaggcataggcaacaaaagaacatagacaaactggacttcataaaaattttaaaaattttgtgcatcagaggacagtatcaggccaagcgtggtgactcacgcctgtaatcccagcactttgggaggctgaggcgggtggatcacctgaggtcagaagttcgagaccagcctgccaacatggcaaaaccccatctctactaaaaatacaaaaattagccgggcatggtggcgggcacctctaatcccagctacttgggaggctgag

SEQ ID NO: 944949 - DNA, 699 bp, Homo sapiens
gatttcatgaccacaaccttggggctctcttccttcctgcaacctgccgtccccaccacaaaggccaggcagcgaacaaaagcctcccatttgcagggcagagtgggtgaccctcatgttggggtctggagtcagtcttctggaatgaacaaggggtgtggagaaggccccagccctgagtcctctcagcccttcctgggccctgcggttgctgtgatccaggcgtcctcaagcgcccaggcctggggggccgccatcttgctctggcgtggtgtgttgctgtggcaacctggagcctccagccccactgcactctgaaaaatttatcaggaaaacttccatgtttaaaaattaaccatgggattgaaatattaaagatgagctgctttgggtgaggcagagggcaatggatttgggggtagaggagccaagtccttactcccaacaggatggcacctgcccgtcgcccagtttccaggggcctagccatccattcccacccattcgcccctgtccgaggcctcctatgtagatggaggctggggccggggtagggggacaggcagcgagggtcctgcctcccatttcctgtttgtccctttcccatgatactcckggggccctcccgttactctgcctgatggtggggtgcccctcaccagccaggagggcataatgaggcagagggctggccgggct

SEQ ID NO: 944950 - DNA, 584 bp, Homo sapiens
aagacccccatctctacaaaacaagcatggtggcatgtaccygtaggcctagctccttgggagacttaggtgggaggatctcttgaacccagtagcttgaggttgcagtgagctatggatatgccactacactccagcctgggtgacagaatgagattctgtctccaaaaactaaaataaatacaaagctgaacactcaagaaagaaagttaaataactaggtgcctgaaacacaaagggaaccaagaccactacagtacctgtgaattcaagcttcatttgctctagaaggtaggggacaaggggaaaaaaaaaaaccttccctgaggaattaataaccatgagcctgtgccttatgtgagcttaaggtttacttttagaacaatatgatagaggatatacgataaagttagtatttttaatgtgtatgtgtatttttacacatttaaaatgtgtaaaagaagaaatgcaagaataaacaagagtgaatgaaataagaacaggtagaaatgcaaaacaatcaaacttccagaaattataaataaaacttagtgaataagttaaacggcagattcgacacagcc

SEQ ID NO: 944951 - DNA, 584 bp, Homo sapiens
aagacccccatctctacaaaacaagcatggtggcatgtacccgtagrcctagctccttgggagacttaggtgggaggatctcttgaacccagtagcttgaggttgcagtgagctatggatatgccactacactccagcctgggtgacagaatgagattctgtctccaaaaactaaaataaatacaaagctgaacactcaagaaagaaagttaaataactaggtgcctgaaacacaaagggaaccaagaccactacagtacctgtgaattcaagcttcatttgctctagaaggtaggggacaaggggaaaaaaaaaaaccttccctgaggaattaataaccatgagcctgtgccttatgtgagcttaaggtttacttttagaacaatatgatagaggatatacgataaagttagtatttttaatgtgtatgtgtatttttacacatttaaaatgtgtaaaagaagaaatgcaagaataaacaagagtgaatgaaataagaacaggtagaaatgcaaaacaatcaaacttccagaaattataaataaaacttagtgaataagttaaacggcagattcgacacagcc

SEQ ID NO: 944952 - DNA, 578 bp, Homo sapiens
gcattaccctaaaacaaaagcaggcagacattgcaagaaagaaaaactgaccagtatgtctcatgaatgtaggtgcaaaaatcctcagcgaaatattagcaaatcaaatccaacaatacatttaaaaaattacacaacttggcaaggcgcagtggcttacgcttgtaatcccagcactttgggagaccaaggcggggatcacctgaggtcaggagttcaagaccaggctagccaacatggcaaaaccccgtctctactaaaaatacaaaaaattagccaggcatgatggtgtatacctgtagtcccagctacttgggaagctgaggcaggagaatcgcttgaacccgggaggcagaggtttcagtgagctgagattgcgccactgcactctagcttgggtgacagagggagactctgtctcaaaaaaataaataaataaaaaataaaaaagtatacaccttgacctagtgggatttattccagatatacaaggctagttgataatcaattaatgcaattcattataccaacagtataaagacaaaaatatcattygaacatatcaatagatgcagaaa

SEQ ID NO: 944953 - DNA, 518 bp, Homo sapiens
taaaaccattcttccttcctaagattttggacctgggatgggagaggctgccacaaagttctctgaaatgccttggagtccttttcccgatagtcttgactattagcacttgggtctcctttagttatacaaatttctctagtaagtggctgctccaaaacctgcttgaattcctttcctgaaaaagctttttctttctctgccatatggctgcgctgcacatttcccaaactcttacactctgcttcttgtgtaaatatatgttccaactttaagtcatttatttgctcttgcatctgagcgtaggttgttagaagcagccaagccacagcttgaatgctttgtggcttaaaaattcattccaccagataccctaaatctttagtccaaacttcyacagatccctaaggcatggacataatacagccatgttctttgctaaggcataacatgtgtgacctctgctccagttcccaataggttcttcatttccatctgcgacctgttcagcctgaact

SEQ ID NO: 944954 - DNA, 622 bp, Homo sapiens
agacaaagggggagaagggggtagtgccacacacttttaaaccatcagatctcatgagaactcactcatgagaacagcaagggggatatctcgtcctcatgatccaatcaccttccactaggtctctccctcaacattggggattacaattcaacatgagattgtgtggagacacagagccaaaccatgtcattccaccccagcccctcccaaatctcatgtccttctcaaatttcaaaacacaatcatgccttcccaacagtcccccagactgttaactcatttcagtattaattcaaatgtccaagtccaaagtctcatgtgagacaaggcaagttgctttggcctacgagcctgtaaaataaaaaacaagttaagctactctcaagatacaatgaggatacaggcattgtgtaaatagacccattccaagagagagaaatcagccaaaacaaaggggctacaggccccatgtaaatccaaaaccagcagggcagtcactaaatcttaaagcttcaaaatgwtcttctttgactccatgtctcacatccaggccacactgatgtaacggatggtctcccaagaccttgagcagctttgcccctgtggcactgcagggtac

SEQ ID NO: 944955 - DNA, 622 bp, Homo sapiens
agacaaagggggagaagggggtagtgccacacacttttaaaccatcagatctcatgagaactcactcatgagaacagcaagggggatatctcgtcctcatgatccaatcaccttccactaggtctctccctcaacattggggattacaattcaacatgagattgtgtggagacacagagccaaaccatgtcattccaccccagcccctcccaaatctcatgtccttctcaaatttcaaaacacaatcatgccttcccaacagtcccccagactgttaactcatttcagtattaattcaaatgtccaagtccaaagtctcatgtgagacaaggcaagttgctttggcctacgagcctgtaaaataaaaaacaagttaagctactctcaagatacaatgaggatacaggcattgtgtaaatagacccattccaagagagagaaatcagccaaaacaaaggggctacaggccccatgtaaatccaaaaccagcagggcagtcactaaatcttaaagcttcaaaatgatcttctttgactccrtgtctcacatccaggccacactgatgtaacggatggtctcccaagaccttgagcagctttgcccctgtggcactgcagggtac

SEQ ID NO: 944956 - DNA, 803 bp, Homo sapiens
tgatttgaaacactaaatttttcctattactaataacagtgagttgggtttgagagatgaaccttcctgttgaaaacaacttagtaatttgtataaagtattttaaaacatcttttcaaaagaactgaaaaattacaagatagtaagaaattaccaagtaaaaactaaaaagagaattcaacaaataacactgggaaaataaatatccacatgcaaaagtatgaagttggacccttagcttacaacatacacaaaaattaactcaaaatggatcaaatacataaacattagggctaaaagtataacactcttagaagaaaacatatggggaaagttctgtcacatttgatttggcaatgattacttggatatgatatcaaaagcacaagcagcaaaagaacaaaatagacaaaactggactacatcgaaactgaaaacactatcaacagagttaaaaggcaacccacagtactggaaaaaatatttgcaactcacacatctgataatggactactatatagaatatataaagaactcctaaaattcaacaacaaaaaataggcaaattcaaaaatgggaagaggatttgaacagatgttttttcaaagaagatatgaaatggccaataggcatatgaaaagatgctcaacatcatcagaaaaacacaaatcaaaaccacaataagacaccactacttcacacccattagaatggcaattatttaaaaaaaaatagaaaataacaaatgttggctagaatgtggagaaaytgtaaccattatggcattactggtgagaatataa

SEQ ID NO: 944957 - DNA, 618 bp, Homo sapiens
aactctattttgtgtacactcatcatggagttacttattttgggaattgagtatcctatgaaattcattatcaagtttattatagaaatattttatctttgctggttttttttagaattacaaaagttaaaaaatttttttccatatgttttgcttacacaataaggatatttgtgttatgtctacataaaaaagaaacgagttgttaaaaagagggaaaatagtcattatggtggttgatttatctatatgccactaaacaattggtttggcagacttctcttaattgattcaattatcattataaaatatggtcttaatatctacttgataattaatttccgactcaaaaccccaccttccctgcctttagaaatctgctaatagaaatgaagtttcaaaaataagtatcagtgaaattgaagaatctggagtccagatgaaggaaatagagccagttcatgtaatgaagttctaattcattcagctttaagactatacaaaatttgggttcctcaattcttttttttttttttttttttttttgagacacagtttcactctcgttgcccargttggggtgcagtggtgtgatctcagctcactgcaacctccacc

SEQ ID NO: 944958 - DNA, 607 bp, Homo sapiens
ggctattgtgaagagtgctacaataaacatgggattgcagatatttctttgacatactaatttccttccctttggatatgtacctagcggtaggattgctggawcataaagtagttctattttagtttttttgagaacctccataatgttttctataatggctttattaatttacattcctaccaacagtgtataagagttcacttttctccacagccttgccagcatttgttattttttgtcttttttaaaataggtgtgagaaaatatcttattgtggttttggtttgcatttgcctgatgattagtgatgttgagcattttttcatatacctgttggccatttctatgtcttcttttaagatgtctgttcagcttatttgcttattttttaatcggattattattattttttgctattgagttgtttgagttctttgcatattctggctatcaattccttgtcagatgaatagtttgcaaatatttcctcccattctgcaggttgtctcttcactctgttgattgtttcctttgctgtggagaaggtttttttgtttgatataatctcatttgtttatttttgcttttgttgcctgtgcacaaa

SEQ ID NO: 944959 - DNA, 573 bp, Homo sapiens
tattgattggaatagtttcacaaggaatggtaccagctcctccttgtacctctggtagaattcggctgtgaatctgtctggtcctggacttttcttggttggtaggctattaattattgcctcaatttcagagcctgttattggtctattcagggattcaacttcttcctggtttagtcttggttggatttctaaattagaatgagatacggttttagagggcaactggtaacaattataaaaatgaaaatttaggtaatcatcctaaaatttaagagttattgcactaactcttgtttgtcaacatgtttcagatttccaaaggaaatgaacccacaggggctgtcagtgagtagggtactcaaaatattatgacatattgcttgtgagaatggacctatacggtggggaagacagacataacacagtggtgtactggagttggctggaactagatcacaagagctggttgttayattttcagaaattttcccagccagttgtttaaccattggtggcttgaaaaactccacaaatcagggatctgttttctttctttcttgttactttttt

SEQ ID NO: 944960 - DNA, 571 bp, Homo sapiens
tctcactcactgtcggttgcagtgagctgacatcacgccactgcactgcagcctgggcaacaagagtgagactctgtctcaaaaacaaaaaaaaagaaagaagaggattgaggactgagccctggagtgctccaacttgaagagattgagagagaagaaccaggaaaacaggctgacaaggagcaaaccatgaagtaggaagaaaagcaaggagcatggtgtaccagaagccaagagaagaaagtgaatcaaggaggagagagtactcagctgggtgaagtgctgctgagaggtcaagtaagatgagggtgaacactcaccctgtggatttagcagtgtggaggccaggcgtgaccttgacaagagcaattacagcagactggtgggggcaggagcctgtttggtgggttgaagagagcataggagcagggtattggggactaaatgtttatgtacccctcaaattcatccatcaaagcccraatcctcagtgtggctgtgtttggagtgaggaagtaattagggttaaatgaggtcatgagggtggggccttgacctaataggactagcg

SEQ ID NO: 944961 - DNA, 663 bp, Homo sapiens
tctggaggccaaggcaggaagatcgcttgattccaggagtttgaaaccagcctggacaacatagtaagaccctgtctctacaaaaaaagttttaaaacattagccaggcatggtggtgcacacctgtggtcccagctactggggacgctgaggcaggaggattgcttgagcctgggaggcaaggctgcagtgagccatgactgtgccaccgcactccagcttgggtgacagagtgaggccctgtctcaaacataaataaataaacaaaaaactgtatctaacaaacaccaccccagaagctgactgcacactcttggactccacctcagaacttcagaatccaaatctgttggtagagatgagagtattatttttttaaagctttcagaagatactgatactaaggcttattgctttttagtcttttctttcaaggcagtttcctctattttaataacaagggagaatgcaagatattactccttttagcacacgttactcaacctactttgaccacttgtacaggataaaggtatcagaccagagggtgagggtaagcgactgataagcaaacagaaaagtrgaactaaatttggaatctctgagatactacccattttgagttgagttctgtattcataaaatattagaggcaggagagga

SEQ ID NO: 944962 - DNA, 663 bp, Homo sapiens
tctggaggccaaggcaggaagatcgcttgattccaggagtttgaaaccagcctggacaacatagtaagaccctgtctctacaaaaaaagttttaaaacattagccaggcatggtggtgcacacctgtggtcccagctactggggacgctgaggcaggaggattgcttgagcctgggaggcaaggctgcagtgagccatgactgtgccaccgcactccagcttgggtgacagagtgaggccctgtctcaaacataaataaataaacaaaaaactgtatctaacaaacaccaccccagaagctgactgcacactcttggactccacctcagaacttcagaatccaaatctgttggtagagatgagagtattatttttttaaagctttcagaagatactgatactaaggcttattgctttttagtcttttctttcaaggcagtttcctctattttaataacaagggagaatgcaagatattactccttttagcacacgttactcaacctactttgaccacttgtacaggataaaggtatcagaccagagggtgagggtaagcgactgataagcaaacagaaaagtagaactaaatttggaatctctgagatactacccaktttgagttgagttctgtattcataaaatattagaggcaggagagga

SEQ ID NO: 944963 - DNA, 638 bp, Homo sapiens
gggaacaagggaagacaaccataaggtctgactgcctgcggggtcaggcaaaaagagacatatttttcttcttgccgagagcctataaacggttgtgcaagtaggagagatatcactaaattattttcctagcaaggaatattaatattaatacgctaggaaacgaatgcattcctggggcgaggtctataaacggccgctctgggaatgtctgtcctatgcggttgagataaggactgagatacgccctggtctcctgcagtaacttcaggcttactaggattgggaaactccaccctggtaaatttttggtcagaccagttctctgctctcgaactctgttttctgttgtttaagatgtttatcaagataatacgtgcaccactgaacatagacccttatcaggagttctgccttttgccctttgttctgtttccccagaagcatatgatctttgttctaccttttgccctttgaagcatgtgatctttgtacctactccctggtygtacaccccctccccttttgaaatccttaataaaaacttgctggtttcaaggcttgggcaggcatcaaggtcctaccgatatgtgatgtcacccccggcggcccaggtgtaaaattcctctctttgtact

SEQ ID NO: 944964 - DNA, 662 bp, Homo sapiens
gagtcaccaaccccaatgccaggctgcgcagcaaagaaaatgaatacacagctcatgtgcatattttatttatgcttaaataaaaccattaaaactgccaaaaatttakccaagtatggtgacacgtgcctgtagccctagctacccgggaggctgaggcgtgaagattgctggagcccaggagtttgaaggctgcagtgagctatgattgtgccactgcactccagcatgagtgatacagtgagatcccatctctaaaaataaattaaaataagataaaatcataacaaataaacacaccttaaaatgtgaattatttcttcatcatctgtattaggattctcttaaaaggacagaactaataggatataataggagatatacatatatattatatatatataggagtttattaagtattaacttacatgatcacaaggtcccacaataggctgtctgcaagctgaggagcaacgagagacagtctgagtcccaaaactgaagaacttggagtctgatgttcgagggcaggaagcatcagcacgggagaaagacgtgggctgagaagctaggccagtctctccttttcacgtttttctgcctgctttatattctctggaaactgattagattatgccaccagattaagggctgcctttccc

SEQ ID NO: 944965 - DNA, 589 bp, Homo sapiens
ctaggggtaattattccccacttttaaatatcttcctgagtattctacacaaggcaccataaaatatgaaccataaatgtctccaatctggctggtagggacatgtactattcccagtgctgtgtgattgccaggaactgttcctctgttccttttcacatggttctttccctggcctcaaatagtttcctcacatacaggaacatatccatactctgccaaacagtcaaggtgactcaatgcagatctctaaggttctctctctaagcagctctctcctctctaacagtctgtcctgtggactctaactgccatagcctccctggactctcagttctatctccttaactcaggaagttggctggactctacttcagttctccctccctgtcttgcagcctagaaactctctcaaagcattaagctggggcaattggagggctcatgttatttgttgtcatctctcaggaatcactgtccttttttcctcatctccaatgtcttgaaaaccactgtttcaygtactttgtctatttttggttgtttcacatgagatgataaatccaatcctgttactccatgttgactg

SEQ ID NO: 944966 - DNA, 633 bp, Homo sapiens
gtatttttagtagagatggggttttgccatgttgccgggctggtcccaaactcctgacctcaggtgattcgcccacctcagcctcccaaaatgcyggaattacaggggtgagccaccgcacccagccaccatttgattttttgagacacattaaattctaaaatttaattttttttccttttttttctgagacagagtctcgctctgtcgctaggctggagtgcagtggcgcgatctgtgctcactgcaaactccgcgtcccgggctcaagcgattctcccgcctcagcctcctgagtaggtaggactacaggcacatgccaccacacccagctaatttttatatttttagaagagacggggtttcaccatgttggccaggatggtcttgatctcttgacctcatgatccacctgcctctgcctcccaaagtgctgggattacaggagtgagccaccgtgcccggctttttctttttccttttttggcgaacagggtcttgctatattgcccaggcaagtctcaaactcctaggctcaagctgtcctcccacctctgccttcctaaaagctgggattataggcatgagctaccgtgcccgacaaattctaaaatgtatatggaagaaaaaagt

SEQ ID NO: 944967 - DNA, 481 bp, Homo sapiens
ggtggctcacgcctgtaatcccagcactttgggagtctgaggcgggccgatcgcaaggtcaagagatcaagaccaccctggccaacatggtgaaaccccatctcttctaaaaatacaaaagttagctgggcgtggtggcactcgcctgtagtcccagctacttgggagggtgagacaggagaatcgcttgaacgtgggaggcggaggttgcagtgagccaagatctctgcactctagtctggcgacagagcgagactccgtctcaaagaaaaaaacaagagtgcttgtctatgtgtctatgtgaaagtcctttgttgacaggaaaaagttgagtgcgtctctctaaataggcttatgcaaatttctatgcatttgttatctgcatatgtgcatarataatacatttattcattcccatccttctaagagctcagacttaaagacataactttgtctgagagggaacttggcatgaattggc

SEQ ID NO: 944968 - DNA, 645 bp, Homo sapiens
agaattaaccacaccctagtcacaatgagcacactgagagcccagatcttgttttctagtactattctgcagtaagaagaactagagctccttgragaaatagctgattctagaggtagggcaggacatatccaagataagcctggaacatcagtagagccagaacgtaaggaaatgctcaaaatacaagcaaacaaaattacaaaaactaacagacacaatgatggggatgggtcaaaggaacactggcaccaacggaaagaactcccaatggccaaagctggaacaatttgaataagaaaataaagctaactagattataacccaaagtataaaacaaatacccatgagtccatactgctataaagaaatgattggatcaataaataaatgagagctagtagacaaatctcccatgcagaagaattcaaaataatttaggtagatactctgcccacaaggaagcaggatctagtaacatcctttcagagagtacagtatgaaaatgctggaaatcaagtaatgctcagtggagaaagcaagaaacaccagttcagccaggtgatcaaggtcagtatcagcagtgatgtcatgttttatctgcaccattgatacaagatgataagagtggcactttacctctga

SEQ ID NO: 944969 - DNA, 474 bp, Homo sapiens
tcctttcttccagccgatcgaattggctattgaagcttgtgtatgctttacgaagttctcatattgtgkttttcagctccattaggtcatttaagctcttctctacactgtttattctagttagccattcgtctaaccttttttcaaggtttttagcttcctcgtgatgggttagaacgtgctgctttagtttggagaagttagttattaccggcctttgaagcctacttcggtcaacttgtcaaactcgttatccatccagttttgttcccttgctggcgaggagttgtgttcctttggaggagaagaggtgttttggtttttagaattttctgcctttctgctctggtttctccccatctttgtggttttatccacctttggtctttgatgttggtgacctatgtatgggattttggtgttgatgtcctttttgtttatgttgatgctattcctttctgtttgttagttttc

SEQ ID NO: 944970 - DNA, 615 bp, Homo sapiens
aattaactgattattcagacctgagtattkggcctataacttatcaaaaatgaacccaaagtgcctgtcacggtaaggaaaataactgagagtaattgttgctaataaaattagaactttcaaggaaaactttaaatttttgaaattgtgcgttggccaccatgatatcttgtcaatacttagaattttctaatgagataaatggtgtaattaatgaaagtgttttgttagataatgtacaatgaagtgtgtcagcatttggaaaatctgtataatttagtgacacacattttttccaaatgaccagtgagtgatgcaatatcaagcatggttaaaaagcccattcaaagtgcaagatagaccaacaaattttaatgtaataagagtattaaaaattattgatatggtgtcagcttctacattgcgaccaacctttagaaaactactacttttgaagtttcggtgtggtattatagaataatctccataattgtctgcaaagattcttaaaatacttcttcctctttgagcaatattatctgtggaaggccaaattttccacatattctcaacctgaaacacatattgctacagattgcatgcagaagcagatat

SEQ ID NO: 944971 - DNA, 560 bp, Homo sapiens
tggagcaaacggaggtgtgargtcgcatctcaggtagagaggaggctgcacccggagcttggtgctggaggaggaaacaccgagcaggagagcacagatgcagtgggcgaggcttctggaaaaccttggctacctcaatgttctctgaaatgagaggcaattggcgtgaatccagaaccgggtcagcgaatccctagggtcccactttggcttgacgttcacggaattcccaggtaggcctcaagaggaacggatcctgcatcctgagctctgggactcgcgggctctggagctcccgttgcgttcaggccccgggtgctgcggcgggcgcactcctaggcagggagaggggtggccgccgtctccgaagcccgtttcttgccgggatgcctggaggaagtggtttctgggtctgaatccggtgagcgcggcctcgtcctcttcccgccaactccccgccctcgaggagcgcccgcctcccaccaggggccaggtctccctcgggacgccccgcgactccgggccgcgggtttctggaatccatgggggcacggcccact

SEQ ID NO: 944972 - DNA, 799 bp, Homo sapiens
tttgtgccaattctatcgagctttagaagctgaggacactcccaagtggaccaagacacatacacatgagaccactacttctcacgctttttggactcatcttaataggttttgcatgggaacccgatacgtttacacgtacacacaagtatcacatgcagaaatcaaagtttcaggacaggacggttactgtatgtgcctgcactctggtctcttctagtttcttttcctttttcttacctagcataaccattaaattgaattcacaacccacaaagaggtcacagcctgaggactggaaaacagtgaactagacaacctcagcgctctggcgcttccagaaaaccgcgtgtcactgcagcatcctccgcatcatccagcaaggagggaggtgactgtcatccccatttacaagggaggagacagagcagggggctctagatgggccgccccatgaagtcagccagtcagcccaagcacctggactcggatctcccaaacctcatgcgatttctactccatcgcactgcctttccacgtggctttcaaagtcattgctaagccttgtttccatgatgccacactcaagttttaggtgaaaatctattacgaaatggaaactttttttggaaactatactgctgcagaaaatgcgcacactgtctagagtctttgttccgggtgcagtgggcgggagggaagaacctacaacatacggtctataggatagctgctttttcaaagtgagtgggggtgctrgaggtacaactagaactgtcattgaacagtcatttgctgc

SEQ ID NO: 944973 - DNA, 496 bp, Homo sapiens
gatgctatggaatttgggaccttgccatttagagttaactgattcttaragattgcaaatgactcactctgaaccatgccttttatttgcatactaacaaatccagagtaccctaatgtgaatcatctcctctgtctggctcttacactacaggagacaattttttttttttttttttttttttgctctaatgactccagggccaggtactaggcagacagggacagctcctagaccccaaagtctaccaactttattcaaaccagcaaatcctcttctggttacccagccctgcctttcttttcctgtggaaaacaataaaggatctggcctctgctttctcctctgcttctgcttcttataccaccctggtgcttctcacatagccctgcaggatgtgttttgcctactgtttctaaaactccgtgagttgaaagttcttccttcctggcaatcatttgcatgtccgagtttcttatcagaccatactgcaaaa

SEQ ID NO: 944974 - DNA, 496 bp, Homo sapiens
gatgctatggaatttgggaccttgccatttagagttaactgattcttagagattgcaaatgactcactctgaaccatgccttttatttgcatactaacaaatccagagtmccctaatgtgaatcatctcctctgtctggctcttacactacaggagacaattttttttttttttttttttttttgctctaatgactccagggccaggtactaggcagacagggacagctcctagaccccaaagtctaccaactttattcaaaccagcaaatcctcttctggttacccagccctgcctttcttttcctgtggaaaacaataaaggatctggcctctgctttctcctctgcttctgcttcttataccaccctggtgcttctcacatagccctgcaggatgtgttttgcctactgtttctaaaactccgtgagttgaaagttcttccttcctggcaatcatttgcatgtccgagtttcttatcagaccatactgcaaaa

SEQ ID NO: 944975 - DNA, 594 bp, Homo sapiens
aaacaaacagtatctggtttgaggcaataatactaatgctaccatttataaaaataagtaatttctaaagggtggtagtaaaacacaggaaattgatagcaygtaaattggaggatatcaggtccttacaaggttgtcacattgttgtatgaattcaagatcaatcaaaaataataattataaatggaaataatgcataaatataaatacaatggaaattttaaaaagaatatgcaaccaacaactctttttcaataaatttgagaattagataaaatggataattttgcaaatattggtacttaaggagactatctggaaaagccttataattagactttaaaattggtacatattaaaatattctcacaaagaaaataccaagaaaacagtgttttgtaaattttcccaaaatttcaagtagaagattataacactcttactcaaatcttccaaagaacagcctaaatctcaactcactccacaaatcccatataatctcgatattaaagccatgtaagaagagtaaaggaaggagaaaagaaaggaaaaagttatttattcatgaacatggatgcaaaaattcaaagaaag

SEQ ID NO: 944976 - DNA, 640 bp, Homo sapiens
atgtcaatgtattaattatattttcctactttctatattcttgatgctgtggcatttggagtctgtggaccmaagaaactgcccctcccaggattaattaattcctagaggtaacaagtaactcacttgtgggcatgcctttgatatgccaaccaactacttggagtccagccctccaggagtctgcttttctgctaggcagttcttctgccctaatctccacggagccaggtacaactagggaccacccctatagcccagagcctgcttcatagtaaatttttttttcatgaaccacagagatttaagcttgacagtgaacttctgccacgtgttgactttgctttgcccactcctttcggtgttaactgcaatcaaggctaatgcgtgcagctccctctttccgtgcctgctcatgtggctttggtgctttcccgtgtggccctgaatgggctcatgtgcttactgtttcttggcgactgcgaatgtaataaaacacttcttccttcctggcaatcgtttttgcatctgtgtgtattatacctgctccaaacaagtcctgggtacatttatagaacagcaaaagatggcagatatgactcaacaagaataacaatgagacatctcaggaaatattaag

SEQ ID NO: 944977 - DNA, 640 bp, Homo sapiens
atgtcaatgtattaattatattttcctactttctatattcttgatgctgtggcatttggagtctgtggaccaaagaaactgcccctcccaggattaattaattcctagaggtaacaagtaactcacttgtgggcatgcctttgatatgccaaccaactacttggagtccagccctccaggagtctgcttttctgctaggcagttcttctgccctaatctccacggagccaggtacaactagggaccacccctatagcccagagcctgcttcatagtaaatttttttttcatgaaccacagagatttaagcttgacagtgaacttctgccacgtgttgactttgctttgcccactcctttcggtgttaactgcaatcaaggctaatgcgtgcagctccctctttccgtgcctgctcatgtggctttggtgctttcccgtgtggccctgaatgggctcatgtgcttactgtttcttggcgactgcgaatgtaataaaacacttcttccttcctggcaatcgtttttgcatstgtgtgtattatacctgctccaaacaagtcctgggtacatttatagaacagcaaaagatggcagatatgactcaacaagaataacaatgagacatctcaggaaatattaag

SEQ ID NO: 944978 - DNA, 818 bp, Homo sapiens
acctaatcacccttaccccactcaaggccagtatcccatcctgcagcatgctttaaaaagattaaagcctgttatcactcacctgctacagcatggccttttaaagcctataaactctccttacaattcccccattttacctgtcctaaaaccagacaaggcttacaagttagttcaggatctgcaccttatcaaccaaattgttttgcctatccaccctgtggtgccaaacccatatactctcctatcctcaatacctgcctctataacccattattctgttctagatctcaaacatgctttctttactattcctttgcacccttaatcccagactctcttcgctttcacttggactgaccctgacatccatcaagctcagcaaattacctaggctgtactgccgcaaagcttcacagacagcccccattacttcaatcaagcccaaatttcatcctcatctgttacctatcttggcataattctcataaaaacacaggtgctctccctgccaatcgtgtccgactgctctctcaaacccaagcaccttctacaaaacaacaactcctttccttgctaggcttgattagcactgtcagaattcttacacaagagccaggaccacaccctgtagcctttctgtccaaacaacttgaccttactgttttagcctagccctcatgtcygtgtgcagtggctgccactgctttaatacttttagaggccctcaaaatcacaaactatgctcaactcactctctacagttctcataacttccaaaatctattttcttcctcatacctgatacatatactgtc

SEQ ID NO: 944979 - DNA, 603 bp, Homo sapiens
tgtgtgtccacatttgaaggctatcacttcaattaatcatatatgttttattttactaattattttatagtcctgataatattactgagtcaaaattgtataaacaatcacagrgaaaaaataagattttttgttttttaagtgtattattcccattaaaagcatttcctagagccctagagctgtatatatttcactaaaatatgcccaatttcaagaaaaatattctgaattacttctactcggagtaatttgagatctctccttttcattgctgtctctgcactaaagcattttaaaagatgtgctttagtgattcgttttaaagctagacatacacatttgtggatgctattacaataaaaaccatgcagagtaactgagcctttggcattgactatttcacttcattacccatcaaatttgagacttcttccagaaaagcaagaggaaaatttaaatcaaattgatttataatagtgacaaatgaccttttttctccttaaacatttaatactaatatttgaaaggaaaagatggaggcatatgagggttttgatttgctgagagatgatggttttttgcattccttttgaaagcagg

SEQ ID NO: 944980 - DNA, 701 bp, Homo sapiens
aagagggttagccatgctttctccactttctcacttctattcttatgcccccttccatccagcttgcatctctgtcactccaaaaaccactcgacaaagttgacaatgacttctrtttggcaaatggcaatggacagatctttccctgtctcatcttgccctctcagaaacattcatgacagtgaatcactcttgtccctctttgcttctttgtcccatattatccttgcttttcctcctacctctcagtctagttggttcttcctcctctgtaaaatcaccagatggatgggcccatctcctttccatttctttccttagaagatttcatcaattctcatggttaaaattatccatgtgctgataatgtcaaaatatatttttcatttcagattagtcctctgagttccagactttaatatctgactacttacttgtcatctgtactttgatgtatcacaaaattaaatgtctcctctttcccatcaataactaattgtccatcaaccatcgatcatatccatctctgtaaatgacaccacactctgcctgaaccaaaaatctatcttaaatctacccatctgtctcgacctccactgccctcctggcccaagacagatcttcctggttccatctttgaccctttccatctttgctccggagcaagagtgatcttaaaatgtaaatcagagtggcatatt

SEQ ID NO: 944981 - DNA, 638 bp, Homo sapiens
accacacccagccagttttgtattttttgtaaagacagagtctccctatgtttcccaagctrgtctcaaactcctgggctcaagcgatcctcccaccttggcctcccaaaatgctgggattacaagcttgaacaaccccacctgcaccagccccagtttggttgactaatgtctgttgagaatatggcccaaacttaaaggagagggaaagtgagagagagtctaacagcaaaagtcttattattgacagcagtccctgtattatagctagtttgttcttgaaatcaaagctaaagcaaaagtacacactacaaggcatgagtttcaaggaattaaaaaaagaatacaataataagtattggaaacttttaatgatgtacataattataatttttcacataattatttattatctgcacaagccaccatgttggagtcagagagtggaaaatggatataaatatatttatctttaacaccctctggattaactgatgttattacaagcatataatcatacatattaattgcgatgtatacaatcttttaataaagatatgattcaagaccccctttccacgtctcagtggtgctaccagatgtagttacttaataacctgaatgttagttcaagtctc

SEQ ID NO: 944982 - DNA, 638 bp, Homo sapiens
accacacccagccagttttgtattttttgtaaagacagagtctccctatgtttcccaagctggtctcaaactcctgggctcaagcgatcctcccaccttggcctcccaaaatgctgggattacargcttgaacaaccccacctgcaccagccccagtttggttgactaatgtctgttgagaatatggcccaaacttaaaggagagggaaagtgagagagagtctaacagcaaaagtcttattattgacagcagtccctgtattatagctagtttgttcttgaaatcaaagctaaagcaaaagtacacactacaaggcatgagtttcaaggaattaaaaaaagaatacaataataagtattggaaacttttaatgatgtacataattataatttttcacataattatttattatctgcacaagccaccatgttggagtcagagagtggaaaatggatataaatatatttatctttaacaccctctggattaactgatgttattacaagcatataatcatacatattaattgcgatgtatacaatcttttaataaagatatgattcaagaccccctttccacgtctcagtggtgctaccagatgtagttacttaataacctgaatgttagttcaagtctc

SEQ ID NO: 944983 - DNA, 638 bp, Homo sapiens
accacacccagccagttttgtattttttgtaaagacagagtctccctatgtttcccaagctggtctcaaactcctgggctcaagcgatcctcccaccttggcctcccaaaatgctgggattacaagcttgaacaaccccacctgcaccagccccagtttggttgactaatgtctgttgagaatatggcccaaacttaaaggagagggaaagtgagagagagtctaacagcaaaagtcttattattgacagcagtccctgtattatagctagtttgttcttgaaatcaaagctaaagcaaaagtacacactacaaggcatgagtttcaaggaattaaaaaaagaatacaataataagtattggaaacttttaatgatgtacataattataatttttcacataattatttattatctgcacaagccaccatgttggagtcagagagtggaaaatggatataaatatatttatctttaacaccctctggattaactgatgttattacaagcatataatcatacatattaattgcgatgtrtacaatcttttaataaagatatgattcaagaccccctttccacgtctcagtggtgctaccagatgtagttacttaataacctgaatgttagttcaagtctc

SEQ ID NO: 944984 - DNA, 646 bp, Homo sapiens
aaatgagtgagattctatatatagagagagagtaattgtggtttttgcaattacttttaatggcaaaaaccatgattacttttgtaccagcctacagtacaaacagtacaagtattaatacaaccgtctgtcattctgtcatgtatcaaaatagatcaagagtcttttttttttttttttttttttggagacagggtctcactctgtcacccatgctggagtccaatggcgcaatctcagctcactgcaacctccgcctcccgggttcaagcgattctcctgcctcaccctcccaagtagctggaattacaggcatgcaccaccatgcctggctaatttttttgagacagaatcttgctctgacgcccaggctggagtgcagtggcacaatctctgctcactacaacctctgcctcctggattcaagccattctcctgccttagcctcccaagtagcttggattacaggcgtgtgccaccatgcctggctaatttttttttttttcttttttgagacmgaatcttgctctgatgctcaggctggagtgcagtggcgtgattttggctcactgcaacctccacctcctgggttcaagccgttctcctgcctcagcctcccaagagctgggattacaggcaccagcca

SEQ ID NO: 944985 - DNA, 585 bp, Homo sapiens
attgatacagagcttggcatgtttgaaggacagcaaggaagccagaatagcgggagcacagcagcrgggagacaagtgccacaagatgagttggagaaaggcactgggaaaggtttgtattttaagtgctctgagaagcaattgaaggtttgaaatagaatagtgacttgcttgatcacatttgtacttttgaaaagttcctctggctgctgtggggaaaggcttgagtagatgcagggtgagagaagcataaccagcagtagactcttgtagcaggttaggtgagagatggtggtggccacgagtgtgctgctagtggtggaagtgacaagaagtagaaggatcggagacaaaacttgaagataaaaagtcttgaatttgctgatgatttgcattgacgaagtgttgggggagaggactgaaggagcagaggagagtgacaagggactggatgccatttataaggatggggaagactgggatgaaaccggttaagggagaaattttaaacatggcaaaattaagaggggttttgtgtgagaaaatggaaatgctaagaaggaagttgaaaatcctgctaatttg

SEQ ID NO: 944986 - DNA, 501 bp, Homo sapiens
tgacccagacttcagcttaygcggtatgcctgcaaccagccaaggctgtctgcatgccacagcacacctagtgggaagctttgggatggcaagtgtgaatcttgacccttgtgaagaatgtggcctctgaggcagggctacttctatttgctcattgagacacagcaacatgacagtggcaactcacataatggtctctctgcagtgttttcaccatggcgtcccctgcaaagtaaggtgacagttttagggcttcgtccagccccagatacgtagttagccccccgtagatattaactgtcattggctttgtaattactctaatttgaaccaaactgggcctagaataaccaaaaatttgtttttctgtccaatcacttcttcaaaatgctccaccccgtttctcctttctctcccttatgaacatctctgtcagacccgtcagtcttctcatcgttttctggtattaaagaatacaaagaacacagcgggagcttcaat

SEQ ID NO: 944987 - DNA, 599 bp, Homo sapiens
atggtcaattaatttttcacaaggataccaagaccattcaatagaggaagaaatagtttttttcaacaaagagcgctggggcaactggatgtctatgtgtaatctttgtataatatcatttacaaaaattaattacaaatgaaacaaagatctaaatgtaagagctaaaacaataaaactcttagaaggaaacataaatgtgaatctttgggaccttgtattagtcagggttctctagagggacagaactaataagatatatgtatatataaaagggagtttatcaaggagaattgactcacacaatcacaaggtaaagtcccacgataggccgtctgcaagttgaggagcaaggaagccagtgttggatcagtctgagtcccaaaacctcaaaagtagggaagtcaacagtgcagccttcagtctgtggccaaaggcctgagacctcctggaaaaccactggtgtaagtccaagagtccaaaagccaaataacttaaggtccaatgttcgagggcaggaagcatccagcacrggagaaagatgaagtccagaagacccagcacgtctgctcttccatcttctcctgcctgctttattc

SEQ ID NO: 944988 - DNA, 634 bp, Homo sapiens
aacatggaggtattggaaacctagataagggctgttttggtgaggtgatgggcaaaaaagcccaaaagcattgagttcaagatggaaaaagaggtcagaaattggagaycattctgcaaaggagagcagagaaatgagtgggaactagaagtaggtaaagggtgagcaaagggtttgtgttttgcattggatggaaaaggtcaagaagagagagaaaatttgatggtgcaggagacagcgtggctgaccgatcaatgaccttgttattgaaaaagagaatgaggacctagggttcaagcagaagggctggcattagagctttcagttcatctgtgatgttgagtgggaatgcagagcttctaggacaaatgccctgagggtggtagatgtcttggtggaagcctgcaacattttcttctgattgcttctattttcttagtccagagtgaggaggagaaagaagttacaaaataatagtttagtctcttaattggattttctccaatcacactaggcagaaaagcatataaatggatgacttgcgaaatggagtaggattggaaggtagcatttgggccccttgaggtaggatctcatgcatttgaaataggccagtcaatatgcttgcgtattt

SEQ ID NO: 944989 - DNA, 571 bp, Homo sapiens
atgggcaaaaaagcccaaaagcattgagttcaagatggaaaaagaggtcagaaattggagaccattctgcaaaggagagcagagaaatgagtgggaactagaagtaggtaaagkgtgagcaaagggtttgtgttttgcattggatggaaaaggtcaagaagagagagaaaatttgatggtgcaggagacagcgtggctgaccgatcaatgaccttgttattgaaaaagagaatgaggacctagggttcaagcagaagggctggcattagagctttcagttcatctgtgatgttgagtgggaatgcagagcttctaggacaaatgccctgagggtggtagatgtcttggtggaagcctgcaacattttcttctgattgcttctattttcttagtccagagtgaggaggagaaagaagttacaaaataatagtttagtctcttaattggattttctccaatcacactaggcagaaaagcatataaatggatgacttgcgaaatggagtaggattggaaggtagcatttgggccccttgaggtaggatctcatgcatttgaaataggccagtca

SEQ ID NO: 944990 - DNA, 639 bp, Homo sapiens
acatggagaaaccccatctctactaaaaatacaaaattagccgggcatggtggtgcatgcctgtaatcccagctactcgggaggctgaggcaggagaattgcttgaacctgggaggtggaggttgcmgtgagccaagaccgtgccattgcactccagcctgggtaacaagagtgaaactctgtctcaaaaacaaacaaaaaaactaattaaaaatctttgcatctcccttgcacagtaattcctgctttgcctatgtatttttgtgtcctgaggcagaaaagagagaggaaaacattgggcacccacaattccagttcaggctgggaagagaagacttctattagctagagtctgccaccagacccagctccctgctagcacactcaatggctccctccttcccctttaagggtccttatctgtatggtattaggttgacgcaaaaagaattgcggtttttgccatttcaaagtaatagtaactctatcaagaagaatttaagattctgctcatttctgcatttaaaaatctggctctgtgaaattttgcaggagaaatgggttctatttttaaaggggctgattctttctttcttctgatcattttcaagtgaaatttgaatgaaatagagcagtttt

SEQ ID NO: 944991 - DNA, 666 bp, Homo sapiens
aagacacaagcacaacaaatttagcttaaagatcttaattggtttttatttgtgattctagaattgggcaccacttccttctgtaaaacagaatgagtgttcccacgagctgagcagaggaggttggttttatattcagaaaagagctggggaaagcagaaacaaaatgtggactgctatttcaaagttaaaagaccgggcacggtggctcactacctgtaatcccagcacttagggaggccgaggaaggtggatcacttgaggccaggagttccagaccagcctggccaacatagcgaaaccccatctctattaaaaaatacaaaaattagctgggcgtggtggcacatgcctataatcccaactactcaggaagctgaggcaggagaatcacttgaagctgggaggtggaggttgcggtgagctgagatcttgccagtgcactcactctagcctgggtggcagagggagactccatctaaaaaaaaaaaaaaaaaaaaaaaaaagttaaaggttaggccaggtgcagtggctcacacctgtaactcctagcactttggaaggccgaggctggaggatcacttgaaggccggagctccagaccagcctgggcaacayagtgagaccgcgtctctacaacttttttttttgaaattagctgggtgt

SEQ ID NO: 944992 - DNA, 563 bp, Homo sapiens
tagtgccagcactttgggaggccgaagcgggtggatcacctgagtttaggagtttgagaccagcctgaccgatatggtgaaaccccgtctctactaaaaatacaaaaattagccaggcatggtggtgtacaccygtagtcccagctactaaggaggctgaggcaggagaactgcttgaacccaggaggcagaggttctagtgagctgagatagcaccactgcactccagccaagggacagagattcgtctcaaaaacaaagttacaccctactctgttttaaaagttttctcatttctcttctctttctccaccttcctgcaatacattcataagacctgactcacctgtctcataattcctactccacggtaaaaataaaacattatgatatgctccatgtgttagttcattttcatactgttataaagaactgcctgatactgggtaatttataaaggaaataggtttaattgactcacagttcagcatggctggggaaggtcacagaaaacgtacagtcatggtggcaggtgaaggggaagcaagacaccttcctcacaa

SEQ ID NO: 944993 - DNA, 687 bp, Homo sapiens
attcaaaacctagcataagacaagaaataactaagatcacagcagaactgaatgggagagaaacacgaaaaaaccttcaaaaaaatcaattaatctaggagtgggttttttgaaaagattaacaaaatagttagaacggtagctagattaataaggaagaagagagagaaaaatcaaatagacacattaaaaaatgataaaggggatatcaccactgatgccacagaaatacaaactattatcagagaatactgtaaacacctctacacaaataaactagaaaatctagaagaaatagataaattcctggacacatacaccctcccaagactaaaccaggaagaagtcaaatccctgaatagaccaataacaagttctgaaattgagtcagtaattacagcctaccaaccaaaaaaagcccgggaccagacgtactcacagctgagttctgccagaggtacaaagaggagctggtaccattccttctaaaactattctgaacaatagaaaaagagggactaactcattttatgaggccagcatcattctgattccaaaacctggcagagacccaataaaaaaagaaaatttcaggccaatattgctgatgaacatcaatgcgaaaatcctgaataaaatattggcaagtgaatccagcagcacarcaaaaagcttatccaccacgat

SEQ ID NO: 944994 - DNA, 791 bp, Homo sapiens
tgagagattttgtcaacaccaggcctgccctaaaagagttcctgaagggagygctaaacatggaaaggaacaagtggtaacagccactgcaaaaacatgccaaaatgtaaagaccattgaggctaggaagaaactgcatcaactaacgagcaaaacaaccagctaacatcataatgacaggatcaaattcacacataacaatattaactttaaatgtaaatgggctaaatgctccaattaaaagacacagactggcaaattggataaggagtcaagacccatcagtgtgctgtattcaggaaacccatctcaagtgcagagacacacataggctcaaaataaagggatggaggaagatctaccaagcaaatggaaaacaaaaaaaggcaggggttgcaatcctactctctgatagaacagattttaaaccaacaaagatcaaaagagacaaagaaggccattacataatggtaaagggatcaattcaacaagaagagctaactatcctaaatatatatgcacccaatacaggagaacccagattcataaagcaagtcctgagtgacctacaaagagacttagactcccacacaataataatgggagactttaacaccccactgtcaacattagatagatcaatgagacagaaagttaataaggatacccaggaattgaactcagctctgcaccaagcggaactaatagacatctacagaactctccaccccaaatcaacagaatatacatttttttcagcaccacaccacacctattccaaaattgaccac

SEQ ID NO: 944995 - DNA, 719 bp, Homo sapiens
cttgtggtagtgagtaagtctcctgagatctgatggtttcatcaggggtttccacttttgcatattcctcattttctcttgccactgccatataagaagtgcctttcacctcctgccatgattctgaggcctccccagcaatgtgaaactgtaagtccaattaaacctctttatcttctgagtcttgggtatgtctttatcagcagcatgaaaatggactaatatagtaaattggtaccagtggagtggggtgttgctgaaaagatatgaaagcaactttggaactggctaacaggcagtggttggaatagtttggaggactcagaagaagaaaggaaaatgtggaaaagtttggaacttcctagagacttgtcgaatcgctttgaccaaaagtctgatagcgatatggacaataaggtccaggctgaggtggtctcagatggagatgaggaacttgttgggaactggagcaaaggtgactcttactatgttttagcaaagagaccggtggcattttgccccgccctagagatttgtggaactttgaacttgagcgagatgatttagggtatctggcagaagaaatktctatgcagcaaagcattcaagagttgacttgggtgctgttaaaggcattcagatttataagggaagcagagcataaaagttcagaaaatttgcagcctgacaatgtgatagagaagaaaagcccatttttt

SEQ ID NO: 944996 - DNA, 577 bp, Homo sapiens
acacagtacctgtgaaacccaatacagcaaagcacagtataaggacatctgcctgcggtagagatttcagctcctagggccacagagtgcacctttggttgggaacagggtcattgcagatgtaactagttaggatgaggtcagactagaataaggtgggccctaatccaaaatgactggggttcttataagaagatgaccttgtgccgggcatgggggctcatgtctgtaatcccagcacttagggaagccgaggcaggcagattgcttaagctcaggagttcaagactagcctaggcaatatggtgagaccctgtccctaccaaaaatacaaacattagctgggcatagtggcatgcacctgtaggtccagtgaccagggaggctgaggtgggagaatcacttgagaggaggcagaagttgcagtgagctgagatcgtgccactgcaccctagcctaggcaacagagcaagactctgtctcaaaaacaaacaarcaaaaagaagatggccacgtgaagttggaggcacaggaaggacagccatgagataaagacggcagaaactggagccctgca

SEQ ID NO: 944997 - DNA, 632 bp, Homo sapiens
ggtaggtgcctgtaatcccagctactcgggaggctgaggaaggagaatcgcttggatctgggaggyggagattgcagtgagccgagatcgcaccactgcactccagcctggcaacagagtgagactctgtctcaaaaaaacaaaaacaaacaaaaaaacccacctgtgtgttagttccttttgcattgccataaaggagtacctggggctgggcagtgtataaagaagtttatttgggtcaccattttgcagaccatataagaagcacagtgccagcatcttccatttgtggtcgaaggtaaagggcgagcaggtgtgtcacatggtgagagagggagcaagagggaagggaggaggttcaggctctttaaacaacagctatcacatgaactagtggagtgagaactcactcactactatgaggaggtcaccaagccattcatggaggattcacccccatgacccaaacacctcccaccaggccccacttccaacatgaggggtcagatttcaacatgtgatttggaggggacaaaaatccaaactatattccattcctggtcccccaaattcatgtccttctcacattggaaaatacagtcatccctccccaatagtcttcaaaagttcta

SEQ ID NO: 944998 - DNA, 632 bp, Homo sapiens
ggtaggtgcctgtaatcccagctactcgggaggctgaggaaggagaatcgcttggatctgggaggtrgagattgcagtgagccgagatcgcaccactgcactccagcctggcaacagagtgagactctgtctcaaaaaaacaaaaacaaacaaaaaaacccacctgtgtgttagttccttttgcattgccataaaggagtacctggggctgggcagtgtataaagaagtttatttgggtcaccattttgcagaccatataagaagcacagtgccagcatcttccatttgtggtcgaaggtaaagggcgagcaggtgtgtcacatggtgagagagggagcaagagggaagggaggaggttcaggctctttaaacaacagctatcacatgaactagtggagtgagaactcactcactactatgaggaggtcaccaagccattcatggaggattcacccccatgacccaaacacctcccaccaggccccacttccaacatgaggggtcagatttcaacatgtgatttggaggggacaaaaatccaaactatattccattcctggtcccccaaattcatgtccttctcacattggaaaatacagtcatccctccccaatagtcttcaaaagttcta

SEQ ID NO: 944999 - DNA, 585 bp, Homo sapiens
ggttattttttgggggggcggggggtgttaatgaaaatgttttggaactagacagagatgatgattgcttaacattgtgaatgtatttaatgatactgaagtgtatggtttcatacagggacttgtatgttatgtgaattttgcctcattaaaaaaatactgctaggagcaatggctcatgcctgtaatcccagcactgtgtgaggccaaggtgggcagatcacctgaggctgggagttcgagacctgcctgggcagcatggtgaaaccctatctctattaaaaatacaaaaagttagccaggcgtggcggtgcacacctgtaaccccagctacttgggaggctgaggtaggaaaatgggttgaacccgggagacagaggtagcagtgagctgagatcgcaccactgcacttcagcctgggtgacagaacaagattccatctcaaaacaaaacaaaacaaaacaaaaacacacacacacacacacaaaaaccaaaaatactgatgcccatgtttcatccccaagrgattctgtaataattgatctgggctgcagagcccgggcactggggttttaaaatctcccc

SEQ ID NO: 945000 - DNA, 585 bp, Homo sapiens
ggttattttttgggggggcggggggtgttaatgaaaatgttttggaactagacagagatgatgattgcttaacattgtgaatgtatttaatgatactgaagtgtatggtttcatacagggacttgtatgttatgtgaattttgcctcattaaaaaaatactgctaggagcaatggctcatgcctgtaatcccagcactgtgtgaggccaaggtgggcagatcacctgaggctgggagttcgagacctgcctgggcagcatggtgaaaccctatctctattaaaaatacaaaaagttagccaggcgtggcggtgcacacctgtaaccccagctacttgggaggctgaggtaggaaaatgggttgaacccgggagacagaggtagcagtgagctgagatcgcaccactgcacttcagcctgggtgacagaacaagattccatctcaaaacaaaacaaaacaaaacaaaaacacacacacacacacacaaaaaccaaaaatactgatgcccatgtttcatccccaagggattctktaataattgatctgggctgcagagcccgggcactggggttttaaaatctcccc

SEQ ID NO: 945001 - DNA, 579 bp, Homo sapiens
gccctgtgtccaggtgttctcattgctcagttcccacctatgagtgagaacatgtggtgtttggttttctgtttctgtgttagtttgctgagaatgatggttttcagcttcatctgtgtccctgcaaaggacatgaactcatccttttttatagctgcatagtattccctggtgtatatgtgccacactttcttaatccagtctatcattgatggacatttgggttgattccaggtctttgctattgtgaatagtaccgcaataaacatacatgtgcatatgtctttatagtagcatgatttataatcctttgggtatatacccagcaatgggatcgctgagtcaaatggtatttctagttctggatccttgagaaatcaccacactatcttccacaatggttgaactaatttacattcccaccaacagtgtaaaagcgttcctatttctccacacctgtgatcccagcactctgggaggcygaggcaggaggatcgcttgagctcaggagtttgagaccagcctgggcaacatggcaaagctctgtttcttcaaaaagaaaaaaaattacctgggctt

SEQ ID NO: 945002 - DNA, 704 bp, Homo sapiens
tttctatggataataactccttcaaccaactgccaatcagaaaagcttaaatctacctataatctggaagcacccgccccacacctccacttcaaattgtcctgcatttctggactgaaccaatgtatagcttaaacatatttgattgatgtctcatgtccccctaaaatgtataaaaccaagttgcgggggcaggcgtggtgtctcacgcctgtaatcccagcactttgggaggccgaggcaggcggatcacgaggtcaggacatcaagaccatcctggttaacatggcgaaaccctgtctttactgaaaacacacaaaataattagccgggcgtggtggcgggcgcctgtagtcccagctacttgggaggctgaggcaggagaatcgcttgaacccgggaggtggagtctacagtgagccaggatcgcaccactgcactccagcctggttgacagagcaagactctgtctccaacagaagacaacaacaacaacaatcacaacaagctgtaccacgactaccttgtgatatagaagttaaaaaggaattatttaggcagagagtgtgggtaaggaagtcctggstaagtctttccttttaatgaaaatcagcccctatatcattttttttttttctaacaaagagcagcctgtaaaatcgagctgcagacataggcaagcaagctggaagcctgcacaggtg

SEQ ID NO: 945003 - DNA, 606 bp, Homo sapiens
caggtgatgatgggagctggaccaggtggaggcagaggatagaacaaaaatgaaaaaatgaaggccacgtgcagtggctcatgcctgtaatmccagcactttgggaggccaaggtgggtggaatgcttaagctcagaagttcaaaaccagcctggccaacatggtgaaaccccatctctacaaaaaatacaaaaatcagccagcatggtggcacgtgcctgtcattccagctactcgggaggctgaggcaggagaatcgcttgaacctgagacagaggctgtggtgagccaagattatgccactgcactccagcctgggagacagagcgaaaccctgcctcaaaaaaaaaaaaaaaaaaaaaaaaagaaagaaaaaaagggaaagcaagctggcctgtgtacagtactcagcgcacagtccggcacacagcaagtgctcagcatacattggcttgtattatttttagggtcttaggctctgtactctgaacctgaaacccgcttcccctggcaggacccaggagaagacagtgacccctgtgcctgggagcattttgtgtatggaaggggacacagttttcactctcatgtccctattggcctgtc

SEQ ID NO: 945004 - DNA, 558 bp, Homo sapiens
gctggcttgattttaaaaatcattccaaattacaaattttaagaagctgatgaatgccaccaaattcacagccacgaggccccacctggctggagctggcttgattttaaaaatcattccaaattacaaattttaagaagctgatgaatgccaccaaattcacagccacgaggccccacctggctggagctggcttctcctgaccgcgcctctctgggcgcgggctcccgctgctccttgggtgcctcaggcgcgccccccatcggtgcggctgacccccgagcttgcagtccgcgccgcggctgtgtctgcctgcttccccctgcgtggccggccctctcatttccatcagtgtctggcgtcgggtttcctgcaggaagagctggtacccctggatcgggcagcttgagacgagtttaacagagaggctatttacagaggtgtggacggagtcctgcagggacactgcagtggccagggctggaaaccgcgggagctagcccctragcctcggggagggggacggggacggggacgggaaagccactgtaccctgga

SEQ ID NO: 945005 - DNA, 632 bp, Homo sapiens
accatataaatgctttatctaatcataaaacaaaattaaattttaaaaagtaacctgtagtaattgaaagcaaatgaaacagctaaacctagccatatatcaagttcattaaataatcgaacatacgggaattctttcaaggggctttagaattgtaaacactaaataaataaaatgttaagcagtcctcagtaatcacattgctagaaatagtattggcattgttattctgaatagagagagcaaattgtattatattaatgtcattaagaaccaagatcttcagcaaaagggaaaagagatatgcaaatttcaaaaatcagagaagttaagattagatggaatgctaaatttgaattagaaatatcaatttgaactcatgatgtatttctcttaaagaaattaaaaggatatcctagctctctcccctgaaagggcccaccgcagcaagtgccccagccccagacttcggactttcaatgtcagtcctctttaaaatgagcccatgatcctagaagaaatgtctgattccaggacagkggcaggaaatacgcacaatgaacctggaacatcttgtcgtatgaggaagcaagaagttaccaaagacaaatgatattgtgcccaagggaccc

SEQ ID NO: 945006 - DNA, 732 bp, Homo sapiens
gactcttgaacagtacgggtttgaactgtgtgggtcacttacacgtggatttccttccatctctgccacccctgagatggcaagaccaacccctccccttcctcctcctcagtctactcaatgtgaagacgatgagggtgaaaacctttatgatggtccacttctacttaatgaatagtaaatatattttttctgccttaggattttcttaatatattcttttctctagcttactctactgtaagaatataacataaaatatatataacatatataatatgtgttcatcgactatcctgttggtgagccttctggtcaatagtaggctatgagtagttaagtctctggggagtaagaagttaccttggattttcaactgtaagggagtcagcgcccccagtccccacattgtttaggggcaaactgcattccatcttcttggactgctcttcccacaggtgttgcccccctcccttttcctctgtcaggtcccagagcatgggttaccaccacagagaggcctctgtggatgcctatgtaaagtggcaccatttacttcagccgagaggtgaaggctgccgtgaggcaggaccatatcactgcactcagtctgrgcaacagagtgaggccctggctcaaaaataataccaataataaaaaaaagtgctaccatcctcccagctcctcactcccaggaatcactcaggagcccatggttctgtcttattttgt

SEQ ID NO: 945007 - DNA, 562 bp, Homo sapiens
ttttgggggtgtcaaaagttgtatgtgaatttttaactgtgcaggaggtcagaaaccttaacccctgtgttgttcaagggtcaatggtaaattgattgattgtaactcaaaaaggtagattgctgaggccaaggaaatgaaaggatgcaaagagaaatggcaagagaaatagatgtatgcttcaggaatgaaagaaaacaagaattgttaccagtcttcaaaggcagaacaagtacttacaagacagatcaaggggataaaacttagctctatagaatctctatgttataatctatattatcttaactcttaaaaaggctgggtgtggtggctcacacctgtaatcccagcactttgggaggccgaggcaggctgatcacttgaggtagggagtttgagaccagcctggccaacagggggaaaccctgtctctaccaaaaaatacaaaatttaactgggtgtggtggtgcatgcmtgtaatcccagctactctggaggctgaggcatgaggatcacttgaacccaggaggtggaggttgcagtgagccgagatcgtgccact

SEQ ID NO: 945008 - DNA, 586 bp, Homo sapiens
tattgagctgagcactgtgttagaaaaagacctggatgctgccctcaggaaattcacagaccaaaagatgagatagatgaataaacagatcatgtcagtccagcatggtaaatgagatgttagaattacatacaaggtggaacttttcttttttgagacagagtctcgctctgttgccaggctagagtgcagtggcatgatcttggctcactgcaacctctgcctcccaggttcaagcaattatccagcctcagcctcccgagtagccgggactacaggtgcacgccaccacgcccagctaatttttgtatttttagtagagatgaggtttcaccatgttggccaggctggtcttgatcttttgaacttgtgatccacccacctcagcctcccaaagtgctgagattacaggcgtgagccacggcaccaggcccaaggtggaactttcaagcctctgccctcatggtctggagggagagcctgacttaatcagaaaatacamaaataaaagtagaatttaagccccaaccggtgtcgtagaagacaggcaggcagcacaatgagagctgaggggtagaggaggaca

SEQ ID NO: 945009 - DNA, 766 bp, Homo sapiens
gtacaagtaccctgaggcaggagcatccctacgtgagagaaaatggagtaaggaasgagtcccaggatttttctgactacctggaagagtatagttgctattattgaaaatggggaagatttgggtgctacaggtctgatgggacagccagaagttcatttttaaagaggttaagtttgagaaatctattagatattcaagaaatgtcaagtaggcagtccaatacagtctgggtttagaggacagaaagaatatgggcttggcattaaataaagtaaatgaggatggacaagcagtccaggaactgactgctcaacatttatagccagaagataaggagttagtagcatagaaactgagatggagcagccagtgaggcagaaagaaaacatgattgtggagtcctggattccaagggaagaaggcctctcaataaggagaagctgagcaggtttctcaaatgttgctggtaagtcacataagggaaggacttagaattgagcattgattatagcaatatggacaatatcagtgaccttgacaagataatttttattataatgattaaagcaaaaatttaattaggaatgattaagaatttttcccaaatcatacatctaagatttgttaaagaacaagtaattttccttatccttattgatcacatctaacagttctgtggaaatgttttaaaatgataaaatttctaaacaaaatatagaactcagtaaaaaaagaaaaagttgaaggacagggatgaatgtgc

SEQ ID NO: 945010 - DNA, 639 bp, Homo sapiens; identical to SEQ ID NO: 944642

SEQ ID NO: 945011 - DNA, 598 bp, Homo sapiens
aaataagctcttagaacatcaacatcagacaaggccactctgtgattgtggtgagtgaagacaaaaatgagaccagaccactgtataattatgtctgaacatagacaaaaacaagagctacaaaaatgaccaagcatccccgtatcttggctagaatgagtgacgataactgctttcccaattataaatctagccttattctactcttcctgcattctagataacaattaatttaccaattatagaattaccctcactttctgactgttgtaaatccagagcaaggttccactttcatactctccttaaaccacctaaactgaagcctgaatcccagtcctttgtaacaaccacttgccgagatgccacatagttttcagatgtgtcatctttcttgttgtcacaagtcaataaacccaaccttgtttaactataggtgtgctcctggtggtcctcatctagaggacatgaacatgargaatcaatgagttaattcatgtaaaccatctagaagggatctggtacctaggaagtgctcaatgaatactatctatatagggttttatatttttgtagatgaaaatatggaaacttagag

SEQ ID NO: 945012 - DNA, 598 bp, Homo sapiens
aaataagctcttagaacatcaacatcagacaaggccactctgtgattgtggtgagtgaagacaaaaatgagaccagaccactgtataattatgtctgaacatagacaaaaacaagagctacaaaaatgaccaagcatccccgtatcttggctagaatgagtgacgataactgctttcccaattataaatctagccttattctactcttcctgcattctagataacaattaatttaccaattatagaattaccctcactttctgactgttgtaaatccagagcaaggttccactttcatactctccttaaaccacctaaactgaagcctgaatcccagtcctttgtaacaaccacttgccgagatgccacatagttttcagatgtgtcatctttcttgttgtcacaagtcaataaacccaaccttgtttaactataggtgtgctcctggtggtcctcatctagaggacatgaacatgaggartcaatgagttaattcatgtaaaccatctagaagggatctggtacctaggaagtgctcaatgaatactatctatatagggttttatatttttgtagatgaaaatatggaaacttagag

SEQ ID NO: 945013 - DNA, 598 bp, Homo sapiens
aaataagctcttagaacatcaacatcagacaaggccactctgtgattgtggtgagtgaagacaaaaatgagaccagaccactgtataattatgtctgaacatagacaaaaacaagagctacaaaaatgaccaagcatccccgtatcttggctagaatgagtgacgataactgctttcccaattataaatctagccttattctactcttcctgcattctagataacaattaatttaccaattatagaattaccctcactttctgactgttgtaaatccagagcaaggttccactttcatactctccttaaaccacctaaactgaagcctgaatcccagtcctttgtaacaaccacttgccgagatgccacatagttttcagatgtgtcatctttcttgttgtcacaagtcaataaacccaaccttgtttaactataggtgtgctcctggtggtcctcatctagaggacatgaacatgaggaatcaatgagttaattcatgtaaaccatctagaagggatctggtacctaggaagtgctcaatgaataytatctatatagggttttatatttttgtagatgaaaatatggaaacttagag

SEQ ID NO: 945014 - DNA, 589 bp, Homo sapiens
ccccttgaacaaagcttcaaatccagcctagaaaagatcaaactctttctgagtaatttaattgcatctcatagcaaagtgcaaaaatatttaaagaaacacaaaaactccagcacccaagaaggtaaaactgacagtgtctagcatccaggcaaaaattaccaggtaagtgaaaaagcaggaaaagatggcccataatgaggagaaaaatcaatcaatagaaacagactcagaaatgacacagatgatataatttgtagacaagaatattaaaacagctattatactcccagtgttcaagaccatagagaagaatatgagcttgataaagataaacatggaagctataaaaatgacccaaattgaattttcagagatgaaaaacatgacgtctgggatgaaatgattatgtaggaatagaaaaattaattaggattttctgtccttaagggccaaaaacaatacagtagcacagacagacacattacctgccgagaccagctcrgtcagggagaccctaacccagcagtgctagaggaattaaagacacacacacagaaagacagaggtgtgaagtgggaaatcaggg

SEQ ID NO: 945015 - DNA, 460 bp, Homo sapiens
cccgggtgctctgttccagggagatgggggttttrtctgtaagtccctgactggggctgctgcctttttttcagagatgccctgcccagagagaaggaattagagaggcagtctggctgcaacggacttgctgagccacagtgggctccacccagttcaaactttacggtgactttttttacactgtgagggtaaaactgcctactcaagcttcagcaatggcggacgcccttcccaccaccaagcttgagcgtcccaggtcaacctcagactgatgtgttagcagcaagaatttcaagccagtggaccttagcttgctgggttccacgggggtgggacctgctgagccagactacttggctccttgtctttagccccatttccgggggagttaatggttctgtctcactggtgttccaggtgccactggagtatgaaaaacaaaacaaacaaacaaaaa

SEQ ID NO: 945016 - DNA, 622 bp, Homo sapiens
gtgcagtggctgacatctgtaatcccagcactttgggagaccgaggtgggtggatcacttgaggtcaggagttcgagatcagcctgggcaacatggtgaaactccatctctactaaaaatacaacaaattagccgggcgtggcagcgcacccctgtagtcccagctacttgggaggctgaggcaggagaatcacatgaactgggagatggaggttgcagtgacccgagataacgccactgcactccagcctgggcaacaatagcaaaactccatctcaaaaaataaaaaataataaagtaaactggctgggcaccgtggctcatgcctataatcccagcactttgggaggctgaaatgggaggattgcttgagcccaggaatttgagatcagcctgagcaacacagtgagatgccatctctacaaaagttagctgggcgtggtgacacgctcctgtagccccagctactcgggaggctgagatgggaggatcacttgagcccaggaagtcgaggctgcagtgagccatgattgcaccactgcattccagcctgggtgacagagcaagacctggtctcaaaaacaaggtaaaaaaaaacaaagyggagtatggacaaatacac

SEQ ID NO: 945017 - DNA, 681 bp, Homo sapiens
ttcactgtgaaaacctggtatagttccaggragtgagagccataaaattgtcctcctaatcccatacctgatccatctgctggagtgtttaactctgtgccttgtccacattgagccttcagcaattcatcagttacagttcagggtttttgactgtgtctggataaggtcagccggtggctaggatgcaaaagacaccccactgagtttctgggcctgggtttctgctcaggtaagacgtgctgctctgtatttacctgtgggtctctccaatttatgggggagttggctctgagaccttgcttctctgagcggtcgaaaagagtttttgatttttaagtttattcatctttctacttgttacaactgagtgacaaccacagcaggatgaggttggagtgaaatgggtaaaataagcctgtgggcattggggactgtagacatgtccttcctctgatcccctggtgagtcagtggagagagtgaaaccacctttgcaaagattacagcagcgagatggagctagtatggcagacttcatcttacctctagctggaggctggctgtccttgctcattcatgggcataggccaggttaaccatgggaggaatttagtttacagtgtaattttgaagcaagaatgataatatccccttactaaaataaactccctcctactca

SEQ ID NO: 945018 - DNA, 545 bp, Homo sapiens
tgttgaatcccagataggcccaatcccttgtgctagggatgttttgcctcttcctttcccaggaaggctgaatcccccagataccggggatgtctcgtctgtcctgtcctcaaggcttaatctctcacaccagaggtgtttcaccgattctctttccctgcgaggttaaccttcctccgtttcccttttggaggttccttacactcttcccgtttatgtccacgcactctgtccagcaacaagttggtaatcgtgcacacacactcagcctcccaaaagctgaccaccaaggaagtactttgctgccctcttgcggcttttcctaccttggcccatgcacggcgttgcctggttactgtggggagtcccgcaagcctgtctctttccccgcgttgctgagaattcaagtatattcctctcaccgggtaggtcccggctctcctcctggggctgccgcaacgggcggcagggcgcctccccacaagasagggccaaagactgtcccagaggggaatgttaatctcgctggggccttcaaattgttg

SEQ ID NO: 945019 - DNA, 600 bp, Homo sapiens
caaaggaccagtcttcaagttccaaaattctttcttctgcttggtccagtctatmaaaattttcaactgtattatgaaattctttaagtgagtattttaattccagaagctctaattgatttcttgttaagatgtttatctcttcctttagaagtttttttctgttgattttcaaccttatcttggatctcattgagctcccttccaatccatgatttagattctttatctgttatttctgagtttccattttggttagggaccattgctggagagctagtgcaatcctttggtgatgtcactacattcagatttttcatggtgtcagaattcttgcactgttccttctcatctgaagatacttgcccttctaattttcataatcattttcatgcaggtaagacttttcctttttttctttctctatatttttttccctttccctccctctgtagggagcggaactgtagagaatgctgtgtaggatcttttggctttgcttctatagctctgtgcacttctttcgccaggttttatattgggctgtgcagtctgacctacaagccagtagatggtgcttacagctaagagtggactatg

SEQ ID NO: 945020 - DNA, 761 bp, Homo sapiens
tatgtggttgctttatagggtctgtgaactatgtatttaagcgtatttttctctcaggaatgccaacagtttgtatgtttggtcactttacaaaatcccatatttctcaaagacttacatcactttttaaaaatattttttctttaattttatctgactgagttggtgcaaaggaccagtcttcaagttccaaaattctttcttctgcttggtccagtctatcaaaattttcaactgtattatgaaattctttaagtgagtattttaattccagaagctctaattgatttcttgttaagatgtttatctcttcctttagaagtttttttctgttgattttcaaccttatcttggatctcattgagctcccttccaatccatgatttagattctttatctgttatttctgagtttccattttggttagggaccattgctggagagctagtgcaatcctttggtgatgtcactacattcagatttttcatggtgtcagaattcttgcactgttccttctcatctgaagatacttgcccttctaattttcataatcattttcatgcaggtaagacttttcctttttttctttctctatatttttttccctttccctccctctgtagggagcggaactgtagagaatgctgtgtaggatcttttggctttgcttctatagctctgtgcacttctttcgccaggttttayattgggctgtgcagtctgacctacaagccagtagatggtgcttacagctaagagtg

SEQ ID NO: 945021 - DNA, 600 bp, Homo sapiens
caaaggaccagtcttcaagttccaaaattctttcttctgcttggtccagtctatcaaaattttcaactgtattatgaaattctttaagtgagtattttaattccagaagctctaattgatttcttgttaagatgtttatctcttcctttagaagtttttttctgttgattttcaaccttatcttggatctcattgagctcccttccaatccatgatttagattctttatctgttatttctgagtttccattttggttagggaccattgctggagagctagtgcaatcctttggtgatgtcactacattcagatttttcatggtgtcagaattcttgcactgttccttctcatctgaagatacttgcccttctaattttcataatcattttcatgcaggtaagacttttcctttttttctttctctatatttttttccctttccctccctctgtagggagcggaactgtagagaatgctgtgtaggatcttttggctttgcttctatagctctgtgcacttctttcgccaggttttatattgggctgtgcagtctgacctacaagccagtagatrgtgcttacagctaagagtggactatg

SEQ ID NO: 945022 - DNA, 618 bp, Homo sapiens
gcttctcacaggggagacagaattttcagcttgaatttagccaagttaattgcccaattgaaaaaaacattgtctgggtgtggtggctcacrcctgtaatcccagcactttgggaggcagaggcgggcagatcacgaggtcaggagatcgagaccagcctggctaacacggtgaaaccctgtctctactaaaaatacaaaaaattagccaggcgtggtggtggcctctgtagtcccagctactcagggggctgaggcaggagaatggcgtgaacccaggtggcagaggttgcagtgagccgagattgtgccactgcactgcactccagcctgggggacagagcaagactccatctcaaaaaaaaaaaaaaaaaaggaaaaaacacaaaaacacgaggaacctattagaagccagagttcctacaacacatcattaacaatgtccagcacacaatccaaaattactgacaatatgaataaacaagaaaatgccacctattctcaaaagaaaagggaatcagcagaaattgactttaagaggactcagatgtcatggctatcagacaataagtttaaagccacaattttacctatgctcaaagacagaaagaaaaatatg

SEQ ID NO: 945023 - DNA, 658 bp, Homo sapiens
aaattaggtcatttaatatccctacaacgttataaatgttcaagggaaaggaagagttgcacctccctcactttaaatcaaaagccagaaatgattaaacttagtgaggaaggcatgttgaaagctgagacaggctgaaagctaggcctcctgcaacagttagccaagttgtaaatgcagaggaaaagttcttaaaggaaacaaacgtgctactccagtgaacacacaaatgataagaaagtgaaacagccttatcactgatctggacagaagatcaaaccagccacaacatccccttaagccaaagcctaatccagagcaaggccctaactctctcatattttatgaaggctgagaaggtgaggaagttgcagaaaaaaaaagtgtgaagttagcagagtctagttcatggggtttaaaaaaagaagccatctccataacataaaagtgtaagatgaagcagcaggtactgacacagaagttgcaaaaagttatccagaatatctacataaaattattgatgaaggtggctacaccaaacaacagattttccaygtagacaacgtggaagatagaagaagatgccatgtaggaatttcatagctacagagaagttaatacctggcttcaaagtttcaaggacaggctgacacttttg

SEQ ID NO: 945024 - DNA, 614 bp, Homo sapiens
gcccagaccttttttccaaacctcagacttgtatccctacctgccgactccgttcctctcctgtctgaatagataataagtatcttgcacttagcaagacycatggcagaactcacagtcttcccagagtctttctcagcttggtaaatgctagcctcatccttctagcttctcaggccttattggacttatttctttttctcactctttgattacaatccatcagaaaatcctatgagctttaccttccaaacatgtcaagaatttgtctcttaccacctgcacactcagctcagcgctggccgccctcgcctccgtcctggatgatggcgacagcctcctgcaggagtctctgcctcaacccctatcatggcccggacctaacacggcattcaaacggccctctgaacagccaagtcggatcatgttcctgccctgctcaggaccctccacggcttccctgacttgcccagagtgagcgccaaagtcccataggccctgcgatctcacgcctccttcctccctaagctcacccccttcaccctcccctcctctccctcctcaccagccctccacagtgactcccttgctattcctccaacattccaagctca

SEQ ID NO: 945025 - DNA, 529 bp, Homo sapiens
aaacacacaaaaaatttcattaatagaaagaaattacctcaagataacagagaccatatatgaaaatcccacagctaacatcaaacttaatggtgaaaaactgaaarcttttcctttaagttcagaaacaagacagaggcccactcctgccacttctcgtcaacatagtactagaagtcctaacccaagcaattaggcaataaataaatggcatccaaattggagtaaaattatctctcttcacacagcaaaacaaataaaccaatcttaaaattgggcaaaggacttgaagaatagagacatctatgtaaagaagatatactataaatggctaacgagcatcatgaaaatatattcaacatgactaaacatcaagaaaacgctaatcaaaaaccataatcacttcatgcctgttaggatggccactatcaaaaccaaacaaaaacaaaaaacaaaacagaaaataccaagtgttggtgaagaggtgaagaaactggaacccttgtacactgctggggagaatataaaa

SEQ ID NO: 945026 - DNA, 723 bp, Homo sapiens
tttttaactcctccagtctttctctgtgtttcccccctgtatgcttccacagcatcctatgcatacttctatcactgtacrgagattgtcatttacggtcttccttacttgactatgaacttcctgaaagcggagactgttctcagtatctccagagcctgctacatagaaaggacaattaatggtgaatgactgcactgcagaggacctagacctgtgccaggaatatatactaaatggcccagagtagggtagtgttcaccatttatctcggaatccatttcagtatgttcagttccctttattcttgttgctactacagagcagtggagtctttggtgtgaaggtagcaggctttgagtgtcatttaggctccaaaagtaatactggtacccatattatccaaaggctgtgtctactccagaattattagtatttgttgagcacctacaatgtactaaagatgttccatggattttacaaaagttctctcattttgaaagtctttattcaatcctgagcagttagtgatactatttacattttgaacccacatctatctactaagcttactcttaagccccatgctgaaattcgctcggcctttccctaggaatactttcaatgaatcaggcttgaaaggttcaggtagctgcaacctagcagaactgttcaaaataatccaagtgttacagcttcaaaaaaaggccaatgctaaccacc

SEQ ID NO: 945027 - DNA, 588 bp, Homo sapiens
tacaggcatccgccgccatgcccggctcatttttttgtatttttagtagagacagggtttcaccgtgttagccaggatgatctcgatcgcctgaccctgtgatccrcctgcctcagcctcccaaagtgctgagattacaggcgtgagccaccgcacccggccccaaatccatattgttctttttcttcatcatcctgctgaagttataaacctcgtaaagacaatttttaaaaaattatttttacaaaggatttctagtaacttgaaaccatttgttttttctttttcaagatacaaggtcttggtatgttgcccaggctagacttaaactcctgggctcaagcaatcctcccatctcagccttccaagtggccaggactataggtacacatgactgtgcctggcctatgttctattttttagctcttcatagcactgaacagatttattcattgaggaaatatttactgagcaccgactatgtgccaaatacagtaaagtgggaaaccaatggacaaagtccttggccttctgcagttaacattctaattggagagatggacaataaaaaacaaacacataatataa

SEQ ID NO: 945028 - DNA, 592 bp, Homo sapiens
ggaggctgatcagagtttggaggtcaggaaarggaggagcaacaggccaagagaacacaaaatgtaagtagagtttcctggctgaggaagttgagggggtgcacccacaaaatattgaatggtcttgtctggctaacttgacgatgcttctcacccttccagttttgaggaaaataagggcaaagtaagtttaaaggagagaatcagaaaataaaggacttggaggaggagaataagggatggggccgttgctttgccaagggacgggcaggtggcactgatgtgtccccaagtattttgctctcttcaggaagtttaaatggaccccttcagagttgaatgcttcctctgaagagaaaaaatggagaaacaggctcttatactcttgggagactgcagatatattaatttttctgatttttgttcctcctggggagtctgatggttctagaagcagaaataaagaatacacatgcaagtgcttgagcacacattatgtttttcaaggactggttgcattgtgacctcccaggaacagaaccaagagcctgtgtggactcttcccctctattcaaagcggaaaaaaacccaa

SEQ ID NO: 945029 - DNA, 564 bp, Homo sapiens
tgaaccttatttagatccagactcaaaaaatgaactgtataaaggcatttatgagtcaactacagaaatctaaaccctgattggctatttgatgatatttaacaagtttgttaaaaaaattktagttataataatgaaactattgttatatttttaaaaaataacagtagccagctgggcgcagtggctcactcctgtaatcctggcactttgggatgctgaggcaggtggatcacgaggtcaggagattgagaccattctggccaacatggtgaaaccccgtctctactaaaaatacaaaaattagccaggcatggtggcatgagcctgtaatctcagctacttgggaggctgaggcaggagaatcgcttgaacccaggaggcggaggttgcagtgagccaagatcgcgccactgcacttcaacctccaacctggcgacagagcgagactccgtctcaaaaaaaaaaaaaagaaagaaaaagccaggcacagtggtatgtgcctgtagtctcagctactcagaaggctgaggtgggctgattgcttgagcccaggaactcaag

SEQ ID NO: 945030 - DNA, 605 bp, Homo sapiens
attttaactcattctatcttggttaacttatgaactttgaatatcatcatacccaactcacaggacctttatgggaattaaatgaaaaaatttatgttagagctattcgttaactgtattatacaaaatcaggttcacattagaagaatttagcaccagcagcagaattcactatgactgagtcttgaattggcaggatttctacacatggaaaaggtagagaagggcattgcagacatgaaaaactacaaataaggaggtttaaatgagaagtctgaagccaaaaatacttgtaaggaaacagaaaaaaaaaatagagaggtggtctatggaaaaacataaatatccagttaaaagtggtaactagcatcacttacctttcaacatgtcgatgtcatcacgttctatctcagccatccatttgggtggagaactagtaataggctgtcaaaaaataatatatccattcagamacataaaaagtgtgaggagaccctattattcttataagaagtgtagcctgggccggatgcggtggctgccaaggtgggcggattacttgaggtcaggagtcaggagttcgagacccgcctggccaacatggg

SEQ ID NO: 945031 - DNA, 646 bp, Homo sapiens
gttgcacagttaatctgataacagaatataaaattatgtaattatatgcattatatgtgtctctctmtatatatatttcttaatattctgcatttcctttgagtcatgtacagctttaagtgaccacaaagaaaacaatatttatctcttcttcaaagtggcccgtgtcctttgaaaaatctaatatgcttgagatgattcccaagctgaaatcctgtttttttgtgatgttccagatctatataacctttaaaagtgcgaagacttctcctattttaaagacaatttaaaataaaattaaggaaaaaatttcatttacattaacaccaaaaataaaatacttagtgataaacttagtaaaagaagcacatgacttatccaggaaaaactacaaaacatcattgaaaaaaagtgaaaaaaaaagtataaatagttgaaaagaaatcctgtgtttatgaatcagatgatttactattgctaagatagcaatatttcccacattgatctgcatacatattcaacacaatcccagtcaaaatctcagctggctccttcactgaaattgatcatctgatcctaaaatttatatggaaatataagggacccagaatagccaaaattttgaaagcaaagaataaagatggag

SEQ ID NO: 945032 - DNA, 618 bp, Homo sapiens
gtgaggagtaaacaaattgccttagtcctaggactagcatcgtttaagttgatactagctgtacaatgataaattctcacaacatatattttcaayacatatttagaaataaattataagttatttgtatgcaaatgcaaattttagtgcaaactgcttgaggtctttgtgaagaggtataattttaaaactttttagcctactgaaatcaagatgtgttcatcagcacaagttctgaatcagtattgccaaccatgctactgtctcatattttttaacatgaggaatgacataaggtctgagacttcaagtttattcctgagcctgtcactactttttgtgtttttctgagcaagttactaaattttttcctctattgaagtaggaaattaagaaaataacagaataatggcataagtaataatagtgaaaattatagtaacagaaaaataacaatagctcatagaatgaattgctgtattaaccaaggctgaaaagaatttaagttgcgcacccccacctccgccgaagttaaagttaaaagagaatactaactgtcccaagaaacattaaccatatctacttcccacatattctgtaagttctgtaagtccctgt

SEQ ID NO: 945033 - DNA, 597 bp, Homo sapiens
aggggaagctcacccccatgattcaatcacctcccaccaggaccctcccccaacatctggggattacaattagagatgagatttgttgggacacagagacaaaccatatcagtggggktttttttgttgttgtttttgttttttgagacagagtctcactctgtcgcccaggctggagtgcggtggtgtgattttggcttactgcagccttaacctccctggactcaggtgatcctcctgcctcagcctcctgactagctgggactacaggcacatgacaccatgcctggctaatttttgtatgtttgtagagacagggttttgccatgttgcccaggctggtcttgaactcctggcctcaagtgatccaccctccttgggctcccaaaatgctgggattatgggtgtcagccaccatgtccactttatacaaaaatggtgttttaactggacactacaaaacaaaagacaaaaagaactgaagattgaacataagcactgttttctagttggtaaatttgtttctcctgaggatatggtttaacaattctgaaactgctgaatatgtttactggaattgaacaagtaaataagttg

SEQ ID NO: 945034 - DNA, 581 bp, Homo sapiens
tttcaaatattggtgaaaatgagcttacttctgtttctgctggggcaggaagacctttaaccccaagggtagagcagcattctgccagaaaattctagctgccatccctaaagtaaattaaaatgtatatgtagtaaatttctagacccttcatatgttcttcccattattcttgtcagtagacacctgttgccctccaagagctagctgcgtgtgcaatacgcccatgtgagtggggattgctggcttaagcagggatggagtccccttagccttctttgaaagacattaacctctgtagagccttgagacctcagtagttgagataaacatttttcctaataagagcccagagggaatatgtcatatactttactgttttcagggtttaaactcagttgcaggcagaactttttctaaaggtttcaaaagaaaggcaagccaacatgtgcaggcatatcgccaagyttctataacctctctagattgtggacattgagacagagaaaagaaagcctgggaaaggagggatggagagctgaaaagaccagttctaagctgactagacttttctcccatgt

SEQ ID NO: 945035 - DNA, 748 bp, Homo sapiens
ggtggctggaacatcctgcacccagcgaatgtggaagggccggtttgcccggagctcttgagaaatctcactccccgtggacttgcaccctgtcgccactcccctsacctgccctgaggctggggtgcagcagggaattgcaacagccccccaccgccggccctggagagacctgggcagagctggaagctgatcagattaaaaatcagcatggatcggattcgggatagagccacaaactgggtgtcctgaaattacccatttttgtgttggtgggtttttttgtttgtttgtttgttttttggagatgatggctcactctgtcgcccaggctggagtgcagtggcaccaactcggctcactgcaacctccgcctcccaggttcaagcgattctcttgcctcagcctcccggagtagctgggattacaagcatgcgccaccacgcccggctaatttttgtatttttagtggagacagggttttgccatgttggccaggctggtctcgaactcctgacctcaggtgatccacctgcctgggcctcccaaagtgctgggatgacaggcgtgagccaccacgcccggcccatttttgtgttgttgaacttaaagcatgagcttgggcaaatcccttcttcttctgagccatagggtaaaggtgagaggagagtcttgtaagctccgtgatgagttccagaagtccagggtgaccagtcatgcttagatcatttccgtgtcatttatggac

SEQ ID NO: 945036 - DNA, 701 bp, Homo sapiens
tgaatagtgctgtaatgaacatcagaatgtggttatttcttcgatatatgaattttagttcctttggataaatacccagaagtggaattgctggatgatatggtggttctattttttcattttttcaggaacttttgtaccatttttcataatagctgtgctaacttacattcccaccaacagtgtaaaagggttcccttttctccatatcctcaccaacacagcaagtgtgaggtgataatctcactgtggttttaatttgcatttctctgatgattagagatgttaaatattatttcatacgcctgttggctgtttgtatctctttttttgagaaatgtcagttcaaatcctttgcccattttttaatgtttttttaccacaaaaatgtaagttggtgagctgaggatatgttaattagcttgactgaatctttctataatttatacatagataaaaacatcacattgtgccccataagtgtacacaattattatttatcaactaaaattaataaataaatcaatacacttaaaacatttaagaaaacactaaaaaacaaaaactaaccaamcaaacaaacaaaatacagcctcttagacttcactccagatctattaaacctacattccagggtgtggattatggaaataggtgtttgtaaatagctcccaagtaatttagaagtacctttcatggaa

SEQ ID NO: 945037 - DNA, 585 bp, Homo sapiens
tggaagaatcacttgaccccaggagattgaggctgtagtgagctaggactgcaccactgctctccagcctggttgacagagcgagaccctgtctctccaaaaawaaaaaataaaaaataaattaaaaaaaaaaaaggtatgtttatataatattgtagtctaagtgtacaaaagcactatgttttaaaaaaaagtataaaccttaatttaaaaatactttattttgctaaaacatacaaggatcatctgaccttcagaaaatcataatcttttttgctggtggagggtcttgcctcaatgttgacggctgctgactgatcaggatagtggttgctgaaggttgggctggctgtggcaatttcttaaaataagacgaacagtttgccgcattgacccctcctttcgaaaaagatttctcagtagcatgtaatgcgatgttatgatagcattttactcacagaagaatgtttttcaaaataggagttgatcatctcaaagccctcctctgctttatcaactacactgacgtactatgctaaatcctttgttgtcatttcaacaatattcattctctttaccaggagt

SEQ ID NO: 945038 - DNA, 392 bp, Homo sapiens
aagtacctgccactcctctcccagcccggtccctgtgggcaagtccctgtgagctcactagcttgtctcacggcagacygggactgtacacaccttatcccagccaccctgccaacatctccagtttattgataggacaactgtggcttcggaaggtgaggccaccttgctcaaagtcagagagccagggagtggctgagcccagctcagttctgaccccagagcctagcccctgctctgaatggcaaaagcaaaataggccaccagccatttaggggaccctggtcccccagggaaaaggtctgacctggccatcacgtcttactctgaattaacaccctggggagcgttaaatgcctttttgtgtaggcctctctcaagcaggggagtgt

SEQ ID NO: 945039 - DNA, 575 bp, Homo sapiens
cttgaaatcatgccaaatacacaattgttacctaaaccaagaaactagtgaacaggaagctctttccccttacagaaaatggtgtacaattcagggaagtgtgcttcatagcacattgctttgtcccagcaagttgttgacaaatcttgaatattctaaaataggcagacagacagataaggtgggttggctgccatgggatttttctccttggttaaataagccactgcctcctctattctttctgctgattctgctcttgctccaatctcatgagatactccctcaagagggatgcatttttaaagagtggatggaagagaagagattgttaaaaaaaaaaaaaagaaagaaagaaaggaaaaaaagaagtttttattactcctgttacttcattctacagtgtatctgcgtaaataacaccttaacacatgccaaaattaccagtyccttacactccacgtagcccttcacaggaatttatatgaggcaggagaaaacaggaagtcctactctgggtatatgatccctaaattagaggtggtttttgaggtatcccttcactaaaaggcttt

SEQ ID NO: 945040 - DNA, 565 bp, Homo sapiens
cacagtggctcacgcctgtaatcccagcactttgggaggtccaggagggcggatcatctgaggtcaggagtttgagaccagcctggccaacatggtgaaaccccatctctactaaaaatacaaaaattagccgggcgtggtggtgggcgcctgtattcccaactacttgggaggctgaggcaggaaaatcgcttgaacccaggagggcttgggttgcagtgagctgagatcgcgctgctgcactccagcctgggcgacaagtgcaaaactccatctcaaaaaaaaaaggtaaagcgtttgcttcaacagcatcatctttcattccacctcagaagtggagcctctctttcgttttatgatgactttgtttttgaatgaataaaacaattggcaatgagccaatttaaattattcctgttttaaaatgactgtagatttcattatttcatactctttgtcacttttttttcccaacactgtcttagctaatattatttcaaaaawatggtttagaggaagagatttgaaaacatagtctaataatctaacctttgagttcagaagg

SEQ ID NO: 945041 - DNA, 565 bp, Homo sapiens
cacagtggctcacgcctgtaatcccagcactttgggaggtccaggagggcggatcatctgaggtcaggagtttgagaccagcctggccaacatggtgaaaccccatctctactaaaaatacaaaaattagccgggcgtggtggtgggcgcctgtattcccaactacttgggaggctgaggcaggaaaatcgcttgaacccaggagggcttgggttgcagtgagctgagatcgcgctgctgcactccagcctgggcgacaagtgcaaaactccatctcaaaaaaaaaaggtaaagcgtttgcttcaacagcatcatctttcattccacctcagaagtggagcctctctttcgttttatgatgactttgtttttgaatgaataaaacaattggcaatgagccaatttaaattattcctgttttaaaatgactgtagatttcattatttcatactctttgtcacttttttttcccaacactgtcttagctaatattatttcaaaaaamtggtttagaggaagagatttgaaaacatagtctaataatctaacctttgagttcagaagg

SEQ ID NO: 945042 - DNA, 565 bp, Homo sapiens
cacagtggctcacgcctgtaatcccagcactttgggaggtccaggagggcggatcatctgaggtcaggagtttgagaccagcctggccaacatggtgaaaccccatctctactaaaaatacaaaaattagccgggcgtggtggtgggcgcctgtattcccaactacttgggaggctgaggcaggaaaatcgcttgaacccaggagggcttgggttgcagtgagctgagatcgcgctgctgcactccagcctgggcgacaagtgcaaaactccatctcaaaaaaaaaaggtaaagcgtttgcttcaacagcatcatctttcattccacctcagaagtggagcctctctttcgttttatgatgactttgtttttgaatgaataaaacaattggcaatgagccaatttaaattattcctgttttaaaatgactgtagatttcattatttcatactctttgtcacttttttttcccaacactgtcttagctaatattatttcaaaaaaatggtttagaggaagagatttgraaacatagtctaataatctaacctttgagttcagaagg

SEQ ID NO: 945043 - DNA, 604 bp, Homo sapiens
ccaaataaaaactttttcggacaaaaagaaaaagttaagaaaatttacttccagcagacatactacaagaaatgtctaaggaaattcttcaggaagaaggaatatgataacagacaaaattgaagatctccagaaatggtaaaaatcaagatacatataaaaaaactttttctattttaagtgctggaagagataattgaccgtttaaaacaaaaacagaaataatgtatcatgggatctataacatatgtaagagtaaaatgtatgacaataatagcacaaagaatgaagtggaggaattgaaaatatacaggtatgaggctttaatactatatttcaagttgtataatatcattggaaggtggacagtgataaatcaaaagcatatattgtaaacaataggaaaatgactttaaaaattcaagccaatagtggaaataagatttaaatcataaaaaataatctaagagtagatcaaaatagagaaaaagaaaacaaagaataaatgaaacaacagaaaayggctagaaagaaggtagataatatttcaaccctatcaataattacattaaatggcctaaattcaccaaataaaaagacagag

SEQ ID NO: 945044 - DNA, 604 bp, Homo sapiens
ctctcaaggggaaagcatttccctcatggggaaaattatggatgccccgatggaacctattgtctactctctgcataacactagctttggtgacctggtctctggggataaaattaaaattagtgccaggcacatacaaccctttcttcttccctgccatctttatagaaaccctcaatagagttctaatgcccacatttgacaatgatgtcttttgggaggtcaggaagcagagagagtaaaaaaaattctctcccaatgtggttttacaaatgggcattagccacaggctgttccagctcaagggtgaagagtagcacaaactcttttctttctctgcaataaaaagaatgaaattacttctttctatagcagtgctaagatatgaataactgaactggaaaaaaatattagctgtctgtctactgttgctgcataatacaaaatatatatcattccagcatctgcccagtgaaaaattacaagaacactagcaaacatgtgctacaaagtatctttgatttgcttgtcctcattattgatgcaatcaaaatggggttatcaatctggttctttsaaatcaactattttagtatccatttat

SEQ ID NO: 945045 - DNA, 568 bp, Homo sapiens
aacagaccagtaacaagtagagagactgaaatggtaatagcaacaattaccaacaacaaaaaaagtcaaggaccaaacgaattcacagcagaattctaagagacgttcaaagaagaattggtaccaatcctattcatgctattccacaagacagagaaagaggggaccctcccctcaaatcattctatgaagccagcataaccctaataccaaaaccaggaaaagacataacagaaaaagaaaatgagaggtgacagtgtgctggcagtgctcacagccctcacttgctctgggcgcctcctctgcctgggctcccactttggcggcacttgaggagcccttcagcctcccgctgcactgtgggagcccctttctgggctggccaaggctggagctggctccctcaacttgcggggaggtgtggagggagaggcgcgtgtgggaactggggctgcgcccggtgcttgtgggccagcgcgagttccaggtgggcatggactcagcggaccccgcactcggagccgccggccggccccaccggcccccrgcagtgaggggcttagcacct

SEQ ID NO: 945046 - DNA, 559 bp, Homo sapiens
atccagctcactggccatccctagcaagcaggggcagcttcaagggctttttctctttctttcttggaggctttcttttcagcaatgaagtagagtagaccaatttcttgcctgtgatttggtgcctgatgaatgaggggccttgatcaggaatgatcctgagtgatgggcaggaaatggatccccccttgtgaaaacaaaatattgacttctaaagagttttttttcttttttttaattggaaaaggtatcttttatttttattattattctttaagttctgagatacatgtgcagagcgtgcaggtttgttacataggtatacatgtgccatggtggtttgctgcacccatcaactcgtcatctacattaggtatttgtcctaatgctctccctccccttgcctgccatccaccgacaggccccagtgtgtgatgttcccctccctgtttccatgtgtactcattgttcaactcccacttaygagtgagagcatgcagtgtttggttttctgttcctgtgttagtttgctgagagtgatggcttccagcttcatcca

SEQ ID NO: 945047 - DNA, 745 bp, Homo sapiens
gttgtgattttaatttttatcattggtactttgcaaataaaaaaaaattttgactttcagtccaacatgtaaagactttaaactcatcaatcccatcctcataaccaaagaaagctgaacaaattgaaagttaacaatgctactgaattccatcagagaattaaagtcctgaagaaaacgaggaatacagagagtcacaatttggcaggaacagaagcagtcagaagacatgatctggtaggaacacttacagggaattgacaaactgttgaagactgacatggactggctcaaggggtaaaacctcctggggccagccttgaagaagctgtcatatgttctggaggttctggagtgtttacctccaggggcccaccaggttctcagcgtgaagatcacaggaaatactatcaagattctggcagaggaaaaggaaaagcaaccatttttaaacatccccatagtcttctgttcttcctaacaaagtcctgctctattttatcagaacttaaacaatttgggtttttccagagactgaaggaccttggggaagggaaatacccagttccagccttctctagccttcctgtctcacctaaagaggaaaacaaggctgacaagcacctttgaaggtcagggaccaagggcagaagcccactaaaatattaatcacaggagtgtagaacacttcccctcctcccacacatttccaattagactactgaayagtaataagggattacag

SEQ ID NO: 945048 - DNA, 621 bp, Homo sapiens
ggaaactccctggatttctctgaatatttgcatcatgtttgctgcattattataccctctgtcacagattgtcaccatttgtttccatctttggcttccctattgtactgcggacgcttccagaaacctcaaggtgttctgttcgtcttagtgtacccaaagcgtagggccaagtccctggaacttagggaattatgtacaagtttattaattatgatgctgctgaaacacctattgcattggtgtgtgtgttgggggacctaggggaggtaggctacaatttgaaatgaataaccatttatgaaaatcatccttttctgagctcctccctttaaataattcatcttgggctaaaatactaatgtgcttcctaaggttaataagtgattttaaatgaagtatattttcattaagagatgtaaaaggagaaagtttttacaaggtattagaagtgtagagaaaatgtgaggaagtatttatatctgacctgagaatagctcagctacttaatgaggaaaaycccttaatcacattgtgtgtgtgcctcttgtgttaagcagtccctccctagttcagcacctctttaggacacagttaaacaacagatccactttattccat

SEQ ID NO: 945049 - DNA, 661 bp, Homo sapiens
gcttctgcccccaatcactcctgacccagccctgaccattcaggggcatgaccgtgtccagctctgtcycctccagactgggggcccctcccacactgaggtcagaggggagggaggctggggcccgggagaatcaggagtgtgaaaggggctgggtgcagtggctcatgcctgcagtcccagcactttgagaggtgggaggatcacttgaggtcaggagtttgagaccagcctggacaacatggtgaaaccctgtctctactaaaaatacaaaaattagccgggtgtggtggtgcgcccctgtaatcccagctactcaggaagctgaggtgggagaattgcttgaacccgggaggtaaagaccgcaccactgcactccagcctgggcaatggagcaagaccctatctcaaaaaaaaaaaaaaaaaaatagccaggcatggtagtgcattcctgtagtcctagctacttgggaggcagaggtgggaagatccctcgagcctgataggtagaggctgcagtgagccaagatcacgccactgcactccagcctgggcgacagagcaagaccctgtctcaaaaaaacaaaaacaaaaaaagagtaaggctagttcttgggggggctgagatggggccctccatcctgtccccaactccaaaacc

SEQ ID NO: 945050 - DNA, 572 bp, Homo sapiens
agccccggctgcctgcatccgaaacacatattcaaacccattgcattccaccgcctctaccattgcaagatctcagacttggaagagccaccttaggaagtcaacaagctcaatctcctatttgtagggaaagctgtgctgagaattctcccagcccagctcaaatgtttctgggagtaagaagtcaacttttacatgggacagcccatctgtgattggacagcactgattgctggggaacttattattattattttttttctgaatgagcccaataagtcagcctctccccatctccaggcccctctctagagctgcctatatccctctcctgaagaagtgccgctttgcctgtgggagaattgggtcaaatcccctggacctgcccaaggttttgcagtgggaatggggagctgaggaagttgcaccattctcgggaagagaggcacaaatgttctgggtctttcatcttaagtggtttctgatctgtctgactgaatgagtgccyggagccacccctgttgaacatacattcatgtagattctgggctgggctattgcaggagtaaatc

SEQ ID NO: 945051 - DNA, 605 bp, Homo sapiens
ccttatctgggaggctgcccagtttattttaattgcttattttttmaatttttgagacagggtctcgatctgtctcccaggctagagtgcagcgacacaatcaaggctcactgcagcctccacctcctgggctcaagtgatcctcccacctcagcctcctgagtagctgggacttcaggcacaggcacacaccaccacgcccggctatttttttttttttttttttgagatggagtctagctctgttgcccaagctggagtgcaatggcacgatcttggctcactgcaacctccgtctcctgggttcaagcaattctcctgtctcagcctcccaagtagctgggattacaggcatgtgtcaccattcctggctaatttttgtatttttagtagagacagggtttcaccatgttggacatgctggtattgaactcctgacctcaggcaatccgcctgcctcagcctcccaaagtgctgggattacaggcgtgagcctaatttttgtatttttttgtagagatggggttttgccatgttgcccaggctggtcttgaactcctgggctcaagcagtcctccctgacaggcgtgagccaccctgtctgg

SEQ ID NO: 945052 - DNA, 653 bp, Homo sapiens
aacgcccggctaatttttttgtatttttagtagagacggggtttcaccgtgttagccaggatggtctccatctcctgacctcgtgatccgcccgcctcggcctcccaaagtgctgggattacaggcgtgagccaccgcgccctgccaggtctataaacatttttaagtgtacagttcagtggcattaagtatattcacattgttgtgtagtgattaccaccatctgtctccagaactgttatcatcttacaaacctgaaactctttatcagttaaataactccccattagccccgtcctggcccctggcaaccagcagtttcttttctgtctttatgaatttgactactctaagtgcctcgtataggaggaatcatatagtgtctgtctttttgggtctggcttctttcactcagcataatgtcctccatgttcatccatgttatagcgtgtcagaattccattcctttttaagactaaacaatattatacataggaaagccggttagttttacatttatctttagtattcagcaatttaccacattgctttgacatagtaagtacaatcaggatttgtttcattaaatkgggttaatctacttgaagggctggggtggagaatggggtctaggaagaattctgtggtactca

SEQ ID NO: 945053 - DNA, 598 bp, Homo sapiens
caggcaagtcacctggcctctctaaacctgtttcctcacatataaaatgggagcaataatatgtagcttgtagcttgtaaacttgaaaggctgattaagtatgattctgcaagtaaatcccttagcatgaaataatggcttaataaatgacatctgctcttgtcatggtggctgtcgaggtagtgctgatgaaagtggtagcagtagcagcaactgccaatttaaagccacactgttagttggtagtttcgcttggtatcctgcccaggaacccctagtggcctgcttctgcttggggcaagaggttgcatcttctccacttatgtttcaaagacttctgtaccctacctatttgtatttctcctcttttcattctttggtgtaaaaaaaaaatatgaaatactttgaatctatagaaaaccccaaatcataatagtacgtcttttctttctttcgttttttgktgttgttgttgtttttgagattaagtttcactcttgtcgtgcaggctggagtgcaatggcgtgatcttggctcactgcaacctccgcctcctgggttcaagcaattctcccacctcagcctccggagtagctgg

SEQ ID NO: 945054 - DNA, 623 bp, Homo sapiens
tgctgtggaagtgagagagcagctcttcaccttgtctataggacgggtcaggaaaggaaggcttccttggattagtctaaaacataacggatggctccaaggtagccaggtaaagagaaaaatgaaaggaagcttccagcaggagaaagagcaagtgtgatggactagagatgagaatgaccacgaggccaggagaaactgcagaagactgatggagaacgaaaccaagaagagaaatcggggaactgagcctgcagggcagtcaacaaagatctttgaccaaatgttgaagactttggggtatatcctgaaggcgatgaggagccatggaaggagtttcagcaataatcagatttacatgttaatcacatacctttggctacagtgtgagggacagcaggtgtgagtgtggaaagtctagttagggtgctgtattagttgtcattgccatgtgaggaattattccaaaacgtagtgccttagaacagcagcatttattgtctgtctcacggcttctatgggtcaggaatccgggggcaaatttcctggatcctccggctcagtcaccctcaaggctgccaagtgtcatccaggactgcrgtcacctcaaggctccactggaa

SEQ ID NO: 945055 - DNA, 735 bp, Homo sapiens
acgctctgtcctgctctgcgttgcccgtgaggagcacgtactgtgatatgaaattgtaaagtcagggaaatacttgcagaggacagaccatcaaagsggaaccctgagtgatgaagaggagggagtcccttcttcacagtggccttggccaaatagccaacccctctaagcctcagtctcacctgctgttcaatgaagatcataaaggtaccaaccctgtgggccgggcgtggtggctcacgcctgtaatcccagcactttgggaggccgaggcgggcggatcacgaggtcaggagagcgagaccatcctggctaacacactgaaaccccgtctcttctaaaaatacaaaaaattagccgggcgtggtggcaggcgcctgtagtcccagccactcgggtggctgaggcaggagaatggcatgaacctgggaggtggagcttggagtgagcggagatctcgccactgtactccagcctgggcaacagagcgagactccatctcaaaacaaacaaacaaaaaagatgataccaaccttgtggcagtgatttttaaggactggctgagatcagggatgcaaagtgctcattcaagacagccttctggccgggcacggtggctcaggcctgtaatctcagcactttgggaggctgaggtgggcagttcacctgaggtcaggagttcaagaccagcctggccaacatggtaaaaccccgtctctaccaaaaacacaaaaa

SEQ ID NO: 945056 - DNA, 432 bp, Homo sapiens
cctgggattcacccctctctgttgacctcgaccccaacatcttatcaatcaccaaaccctggtgctttagtcctgaggtatttctggactttgttttcccatcttcactgcctccagttttgtccctgccacattcgtctctcacccggacaatcacaattatctcctgctgagatttattcccttttatccactctccacacagcagccagagtaagctttcagaaatgctattgggaccaggcgcggtggctcacacctgtaatctcagcagtttggaaaggtaaggtaggaggatcacttgagctcagaagttcaagaccagcctgggcaacaaaacaaaacctcctctctcctgaaaaaaaaaataataataataaaaaytagctgggtgaggtggtcctgtagttctagctactgggaggctgaggc

SEQ ID NO: 945057 - DNA, 873 bp, Homo sapiens
aaatgctggccttagaacctcaactatcttcctttacacaactattattttattccacactgttattttattatctggtcaaaataaacaagaacagccttgatggaaaaaaaaaaggagaaggggcgctttcacacccctgcagagtacattccctcgaaggctacatgtggccacagggaggcctcccagcacctggccacagctcgctcacctgcctgctgcctgctgagccacagaagtaccctgtcgccaggccccacagggaaaaacaaaaggtgcttcaaattagatgaggggagcccctgaatccctcacacttcagggatggtgtccctgagagcagtccttagagatgatgatggcgtcaccctacagcagggctgtcctctttcatctgcaaaggcccagaaagtaaatagcctaggctctgcagcaaacacatggttgtccctcacaactgaactctgctgttgttgcaccagccactgacaaagcatgaacacaaacagcatctgtgttcccacgcgatccacgatacatgatttataaaaacacattgggggcctgctcggcctgcaggctgtggctggccaatccatgccctatgggactctaaacaacccaggatgcggcacagtgtaggctgcacaggacatggctagggagagaaatctgcctgctgggggggaactaaaagggaaggggagacgacctgtggtgtgtgtttctatgcaggtgtgtgtgtgtgwgagagagagagagagagagagaatgtggcaatgtgaagggcattgcaaatattttaacaaaaggtaaaggatggggtggtagagagaaatcattgcatgatctgaaaggcttatagtcttg

SEQ ID NO: 945058 - DNA, 592 bp, Homo sapiens
gggcggatttcttatgaatgacttagcaccaccgccttggtattgtcctcgagatagtgagtgagtgcttgtgagatctggttgtttaaaaktgtgtcacctcctccctcactcttttgctcctgctctggtcttgtgacatgcctgctcactctttatcttctgccataattgtaagtttcctgaggtctccccagaagccacacagatgccagcatcatgtttcctgtacagcctgaggaactgtgagtcaattaaacatcttttatttataaattacccagtctcaggtatttctttatagccataggagaacagactaatacacttcataagaaagcaagccagcactctccaaacaggttttgagcaagagcttccgacgttgtcaatgtacactttcctcttcctaggtatagggtaatgggtatcgtctggggatacccagaccttgatgtagccttgcttaaggacaatagacaggggtctcagctcattgattagagaggctgtatacttgaactcctcatttccgttagcccccctggacttctctgttggcctgccctgcacagcctgggacaccccaaat

SEQ ID NO: 945059 - DNA, 592 bp, Homo sapiens
gggcggatttcttatgaatgacttagcaccaccgccttggtattgtcctcgagatagtgagtgagtgcttgtgagatctggttgtttaaaattgtgtcacctcctccctcactcttttgctcctgctctggtcttgtgacatgcctgctcactctttatcttctgccataattgtaagtttcctgaggtctccccagaagccacacagatgccagcatcatgtttcctgtacagcctgaggaactgtgagtcaattaaacatcttttatttataaattacccagtctcaggtatttctttatagccataggagaacagactaatacacttcataagaaagcaagccagcactctccaaacaggttttgagcaagagcttccgacgttgtcaatgtacactttcctcttcctaggtatagggtaatgggtatcgtctggggatacccagaccttgatgtagccttgcttaaggacaatagacaggggtytcagctcattgattagagaggctgtatacttgaactcctcatttccgttagcccccctggacttctctgttggcctgccctgcacagcctgggacaccccaaat

SEQ ID NO: 945060 - DNA, 585 bp, Homo sapiens
gttggccatagtgggagtacttacaccacagaaattggcacatgctacaaatcggggtttastttattgctttgtggacacattagacttaagaagataatggaggaaatgttaataaagcagatttaacttaacagtatgctgtgtcaatatctataacattgcgaatagcacaaaataggacatattcttccaatattgaaaagtattatctgattcaacaaagaagctgcccacatctctgaagaacaagtaaagtcctcatatttctttgttgttccacttttgttttactcattaatacaaaggaaaatagcagcaatattgatgttagaactatactaatttgtcagttgcaaccatagatttgctaaagatatgagagttcagcaaaaatcaatgaaatcattctatgagaaggaactgactatatggaatttataatgaagagtactgcatatttcattattatttgtaaattatgtactatacaacttttataccagtaacatttataataaagttgtgtgtgtatatatgtgtgtgtgtgtatatatatatatatatatatatatatatatatac

SEQ ID NO: 945061 - DNA, 632 bp, Homo sapiens
aaaaaaaatacatggtatgaggtaaaaaaaatttaatttaaaaaataacaccaatactaatctctcccagaaaatacaagaggtcttcaaaaagttcatgaaaaatgcgtactatgaaaaaatatgcatgaatttaaataaagtttgcatcataataaacttgtattaacttgttataacatgtctgagcaggatctagtttaagccacaaagaaggataggacttccgtttgaaaagactcccgattagagcaacatgaattcactaaaattgaagcaagaacaaacatcagatttatggtgaagcttgggtggaagaataatgaaatcattgacactttatgaaaagtttatgaggacaatgcctcaaagaaataagtagtgtacaaatgaataacttgttttaagaagggataagatgatgttggagataaagcctgtagtgacaggctatccatatcattttataagaaacaaattagtcctgttcataccgtaattgaacagggccaatgattaacagcagatacamtaggaaataccatagacatcccagatggttcagcttacacaattctgactaaaaaattaaagttgagcaaatttctgctcaatgggtgccaaattgcacc

SEQ ID NO: 945062 - DNA, 583 bp, Homo sapiens
ttgctcaccatggaaacttgctcagcacccacatagacacaattcagaagtgtggggtagttcacgtctgtgtgctgaaactttgaccagagggaggtgaggataaaaaaataaatgttcccccatcaccactcctccaactagctcccctcagacacaatatatatgacttcttggagaactggatttaagaaatcagttgcaattaataacagccaattcaataatgcaccctcaaattggctcttcatcctttctggcttcactctcctggcccctcatttgtttcctaggattgcacttcctaatatattagtggtataaaagccctttgacatattttttctttttcgagacagggtctcactctgtcacccaggctggtgtgcagtagcacaatcatgacacactgtagcctctatctccccaggctgaaacaattctcctatctcagcctcccaagtagctaggactataggctaattgtttttctattttgtagagacggggttttgycatcttgctcaggctggtcttgaactcttgggctcaagcaatccatccgcctcagcctcccaaagtg

SEQ ID NO: 945063 - DNA, 601 bp, Homo sapiens
tctcctgggagatgggatggatggtggggccgtgggtgagatggggtcatgcagagaggacagaccaaggccccagtggaccctgggggaccctgtggctgtcttcagagcagcccccgaggtatcagtgctcacagcaacttgcggatacagcctagaaggccccatgcctcaaaaattcttagagtctgaggagctcaagaggctcacatcagcttcgggaagctctgtagggcggccaccaagctggactgagggatgggcggaagcagctaaggcctaaattggtggaggttggccggacacagtggctcatgcctgtaatcccagcactttgggaggccgaggcgaggattgcttgaactcaggagttcgagatcagcctgggcaacatagtgagaccaccccccacccccgccaacttatacaaaaatttcaaaaattcaggccggcacggtgctcatgccggtaatcccagcactttgggaggttgaggttggtggatcacctgaggtcaggagttcaagaccagcctgaccaacatggtraaaccttgtctctactaaagatacaaaattagctgggcctgatagctcatgcc

SEQ ID NO: 945064 - DNA, 740 bp, Homo sapiens
tgccttccaacagttccccaaagtcttaactcattccagcattaacccaaaagtccaagtccaaagtttcatctgagacaaggcaagtcccttccacctataagcctgtaaaatcaaaagcaagcttagttacttcctagatataatgggtgtacaggcactgggtaaatacacccattccaaatgggagaaactggccaaaacaaaggggctacaggccccatgcaagcccaaaatccagcagggcagccaaatcttaatgctctgaaatgatctcctttgtatccatgtctcacatccaggtcacactgatgcaagagctgaactcccatagccttgggctccacccctgtggctttgcagggtacagccccactcctggctgctttcataggctggcgttgagtgtctgcagcttttctaggtgcatggtgcaagctgttagtggatctaccattctggggtctggaggattgtggtcttcttctcacagctccattaggcagtgccccagtagggactctgtgtcggggttccaaccccacatttcccttcaacacttccctagcagaggttctccatgagggctctgcttctgcagcaaacttycacctggacatccaagcattttcatacatcctctgaaatctaggcgaaggttcccaaacctcaatccttgacttctgtgcacctgcaggctcaacaccacatggaagctgccaaggtttggggcttgcacc

SEQ ID NO: 945065 - DNA, 746 bp, Homo sapiens
cccctgatccagctgtcatacctttttagtctcccttaatctggaacagttcctctgcctctttttgtctatcatggggttgacgccgaagaacagttcaggtcagtccttgaaggtccctccatctgtgtttgtctgatgtttcctccagggaccggaatgctacagaagcaatgctgtgttctcagtgtatcacatcaagaaacacttggcacccatttgtcctattcctggtgttgttaactttgttcagctcattaagggaggacctgctgggtttctctactgttaagttaccactttttctctttgcaattaataaaccatatgagtggaagtgctatgagacaatgaaaacatactttaccttcctaaattttcactcagtgatgattcttccttgaataaactattatgatcatgtttgcaaatggagttttctattattccctctgtatttattcattggcattctactgtaagaaagtcttcttccttcttccctgcctccgtccctccctccctctctccctccctccctctcttcttctttcttttcttccttcccttttctttctttctatagctataggttcccattttattcaatagactataatctaccattatcattattwatttggatgctcacatcatcctagatttggccagtggaagccccttgaagttgattgatgtgtcctttgacatgtccctgtcattttttaaatgcttccttgctttct

SEQ ID NO: 945066 - DNA, 610 bp, Homo sapiens
ggtgcaaggtcctcaacccagaggttccctaggccccacttgccccagctcatgagagcctggktctgagctctgccaggaccggggctcagcactgcccatgaaaacaggcgtggcagggaagaaaatcataaccaaatatttgtagtcattccagaacctcccttctggaaagggaggttcccaggtttgtgggctctttgcctcctggacattattgtgtagtgaagggagaaaggttgagatgcagagttggagaaactaagagaggccgaactggtccatttgaggaaagatgactgatcccagaaggggaggaggggacaccctggggaagcagggggcttcccagatggtccaagaaggggagggcgggatatagaaagtcagagcatggttttgagttttggagacaacaagagaaaagagggagggatttggacaactatggagaggactgggctgtggagagaaatgtttagagatttggaagatggtgtgtcatgcgatgtattgtgaaaaccccttcttcatatccctaaaagaccaccgctgatggtgattcatggtacaattgatgattgtatcatgatataattcagtgcttttg

SEQ ID NO: 945067 - DNA, 540 bp, Homo sapiens
tacctaatatacatgaagctggagtactggaagaagaggggaaagagaagggacatttctttttaagaaataatggtgggctggcatggtagctcatgcctgtgatcccagtactttgagaggctaaggcgggtggatcacttgagcccaggagttttgaggccagcctgggtaacatgacaaaaccctgcttctacaaaaaatacaaaaaaattagccaagagtggtgacgcatgcctgtagttccagctacttgggaggctaaggtggaaggattgcttgagcctgtagtcagaggttacagtgagctgagatctcaccactgcactccagcctaggctacagagtgagactctatcttaaaagaaagaaagaaagaaaaggaataattgtcaaaaattttctgaatttgatgaaagctataaacccacagatccaagaagttccrtgaaccccaagcaaaagatagaaacaaaaaacctacattaagtcacaagtataataaaaatacataaaactagtgttaaagagaaaatctaa

SEQ ID NO: 945068 - DNA, 577 bp, Homo sapiens
cgggtggagcctgaagtgagccaagattgcaccactgcactccagcctgggcgacagcgagactccgtctcaaaaaaaaaaaaaaaaaagaaaagaaacagaaataaaagaaaaagaaatctacccgcagcacagggaactacaaatggtcaatggcacaggacacattgttcaatctctttagtaagcagagagatacaccctaaagcaatgacaagggtccactacccacctattagttttcaaatgttgtaacataaagtgctggtcagggcgtggagagacggccacttctctcctcacttgcggtgggagtatatacatgggtacaggctttttgaaggacaatctgtcagtatctgatgaaagtttaaacagcttggctctgtttaaagggagagaggaggacaaggattgttcccctcaccttccaatctcctgcctgtgcccmactttggtggacaccagttgcaatggagccgggaaacccagtggaccaggctcggcctccctggcagccttccctgccaggaagaagggagcaagggcagggaacagatgtgacaataaacccaca

SEQ ID NO: 945069 - DNA, 610 bp, Homo sapiens
tgatttgactaataaaggctggtctgttatcagactgtatagaggtgggaaggctaaactgaggaattatgtctgacagaagggaagaaatgactgtggtggccttctcagagcctgtaggaaaggcctttacttattcagtgagagtgtctatttagactaagaggtattttagtttcctgactcgggacatgttgagtaaagctaatttgccagtcctgggtgggggcaaatcctcgagcttgatgtgtagggaagggagggggcctgaataatccctgaggagtagtagaatagcagatggaacactgagaagttatttccttgaggatagatttccacgatggaaaggaaatgagaggttctgagaggcgggatagtggcttgtactatagcatagcctgcctttgctggtgtgtggcgattaggcctgatggaactgccatcaagcgtgatcagggtgaggaacaggaaagaaggaaatrtggggaaatggggtgaatatcaggtggatcagagagctacagtcatgggggtcaggtgtggtatcaggaataaagtgggaagccagattgaagtctgggccaggaacagtggtaattgtgggact

SEQ ID NO: 945070 - DNA, 458 bp, Homo sapiens
ggcttccgcaacccaagcatctacgataacagcacagaaaatttgttgaaaatgacagagcctatattttggtattggaatgagaactatatacataactcactatgaagacaattcaagcaaaattacaccacaaagtataaatgacacatggtgacttctgatataaatttctcagtctccaccaagaattgtaaaaatctctgctctggtctgatctgccctgtccttctagaattcctctgtctcttcagagctcttctgtttctacttctcctgtccccaagctggtctctttcttttttcttttcttttttttttttttgagatggagttttgctcttgttgcccaggctggaatgcactggtatgatctcggctcactgcaacctytgccttccgggttcaagcgattctcctgcctcagcctcccaagtagctggggttacaggcatgtg

SEQ ID NO: 945071 - DNA, 602 bp, Homo sapiens
aggccaaggtgggcggatcacaaggtcaggagttcgagaccagcctggccagcatggcgaaaccccgtctctactaaaaatacaaaaattagctgggtatggtggtgtgcgcctgtratcccagctacttgggaggctgaagtaggagaattgcttgaccctgggaggcggaggttgcagtgagctgagatcgcgccactgcactccagcctgggcgccagagtgagactccgtctcaaaaaaaaaaaaaacgaaagaggacaaagaaagttcttaagcccagtgggttgacacactcatcccagtgactcaggggagggctgaggtgggaggatctcttgagcccaggagtacaaagctgcagtgagctatgattctgctactgcacactacagcctggacaacagagcaagatcctgtctctaaaaaaagaaagagttctcaaagcccattgaaagagccaggcacagtggtcgtgcctgtaatcccagcactttgggaggctgaggggggcaaattgcttaagctcaggagttcaaaaccagcctgggtgacatggcgaaacccctctctacaaaaaagctgggcatggtggcatgtat

SEQ ID NO: 945072 - DNA, 547 bp, Homo sapiens
gtgctgctataacaaaatgcctgagactcggtgatttattaagcccagaaacattttctcacagttctgaaggcygggaagtccaagatcaaagtacctgccagtttggttgcctggtgagggccgctccgtaattccaaaatgatgccttgttgctgcatcctccagagaagaggaatcgtgtgtcctcacatggcagaagacagaagggcaagggagccacatgaagcctcttttataagagccttcatttataagaaagaagcttcatggcctattcacctcttaaaggccctatctctaatactatcacattagccattaagtttcaacacctgaattctggagtggactcattcaaaccatagtcatctgagagaatgaagtcatcatggaaaaaggagaagcgacaaaaggcctggagaattctgccaccatcatctctagtacagttgcaactgcccaagaggtttgccttgcccactgcctagacagagccaattcatcaagacaggggaattgcaatagagaaagagtaattcactca

SEQ ID NO: 945073 - DNA, 578 bp, Homo sapiens
tagataaagttgaaagtggagcaaaaccctaaaattagatttaatggtgatgtcataatttgattaattcatttgttcagtaaacatgaattatgtgccagtacaactcagttcattgtagataccctttggctcactgaatgcaatgcattaagtgtagtgtcctttaaattcatgcttcagtgttttggtaaacacatttctatagaaatattaaaaagaaaaataatcatattgatttttaactaaaataactgcatctcaagggccctagcaaaactttttttctgatcactaagcaaaatcaagttactaccacctattggttgctatatactggttttgaacttgtctctggattattagaattctaaaattgaacatttataatgataaaaagtcatggtggagaagatttaacctgttgggtgacaagtgtccatgaacctcttatatttctgcacactcttctgagcaaaggaataaactttttttttccagactctcattwctagtactttcatatttaaaaaaaaaaaaaaaaaaaaaaaaactgccttgggagagaaagagatttt

SEQ ID NO: 945074 - DNA, 583 bp, Homo sapiens
ctagtgctatttaatgtgaaagcacccataaacaatatataaaccaataagcatgagtatgttctaatcaaactttatagaaactaaagtttgaatttcacacaattttcaagtgtcataaaatattattcatcatttgattttcttattatttaaaaatgtaaaagaaatttttaaattttggatcacataaaaagaggcaatggggcaggttttgctaagctctgaattaaagactaaatgtacgatcaatgggattcaattgacctacttatatctggtcaatttattttcaacaaatacaagacaatatagtggaaaattgttagacttttcaataaataaggctggagcaactgtgcattaagcctgaccaacatggtgaaactctgtctttactaaaaatacaaaaattagccagccgtgatggagcatgcctgtaatcccagctactcaggaggctgaggccggagaatcgcttgaacctgggaggcggaggttgcagtgagccrggatcgcaccattgcactccagcctgggcgacagagcgagtctctgtctcaagcaaacagacaaacaaaaa

SEQ ID NO: 945075 - DNA, 498 bp, Homo sapiens
aggcctaataatagggtcgaacattacatacgaccttgacatctggtaaattggggaagcccttgaatagcctgcttacaagttttccttcccattctgctcctggggataaagccctctagccaaaaaattctttatcggctaagtgcggtggttcatgcctgtaatcctagcactttgggaggctgaggcaggtggatcacctgaggtcgggagttcgagaccagcctggccaacatggcaaaaacccatctctactaaaaatacaaaaattagccgggtgtggtggcgggttcctgtgatcacagctactcgggaggttgaggcaggagaatcgcttcaacccaggaggcggaggttgcagtgagtcragatcacaccactgcactccagcctgggcgacagagtaagactccatctcagaaaaaatgtaaaaagaaaaaacaaaaaactctttatcaagaggacgaggcacagttcccgcttatccctgagaag

SEQ ID NO: 945076 - DNA, 730 bp, Homo sapiens
aagaggagcccattggtttttccctggtctcttttaatttaatgggtgcaggtatgaagtatgtagagctgggttttaccaggattgtggttgcaccaactgagtatgacatagtgaggtagaggccagtacatcaggagctgatgcaagggtatgatgatcatgaaggagcatggcactcaaattgggtaagagaagagaccgtgtgcatggtccagggccaatgggaaggagccaaggtcaagagattggagctcccagcaggatcaaaggactgttgtagtcagggtatgagagagagtgagctggaaagatgggagtagtggtcagagaaggaggtgcataaaattggacaatgaggttggtggttgttgggaatgcaaggtctggaaatggccatgggaggggctgcttatgatcgggaggaggacaagatcactggaggacaaagatacagagaacccagaggccaagttattggaagggtcattcacatgtctttggaaataaccacatattagaagtaatgttggggagagccacagtgagttgggaggcaaaatcatacacacgcaagggtagcaccatctgtacaggatgcagcagtgagagtggatgatgtcctttgatgacaggagattcaaactggaggctttttgatgtggatctagagcagcamggaggaacaaggaggccacctgccccagctccaggcttaggagaaggctgt

SEQ ID NO: 945077 - DNA, 549 bp, Homo sapiens
cttaagaaattacctcggctgggcgcggtggctcacgcctataatcccagcactttgggaggctgaggcgggcggattacaaggtcaggagattgagaccatcctggctaacacggtgaaaccctgtctctactaaaaatacaaaacaaaattagccgggcgtggtggccggtgcctgtagtcccagctactcgggaggctgaggcaggagaatggcgtgaacccgggaggcggagcttgcagtgagccgagatcgcaccactgcacgccagcctgagcgacagagtgagactccgtctcaaaaaaagaaattaccttgttaaacccaacactgcccctcttttgtccattcacttctagttgccttcattcatgcctgatgtgctggacttgggttttatcaagttgcttggcacgtccttaaagaatttaaatctccacagtgcctcctggacaatgactgcagggtgaccccygtctctcctctacacgatgactcttcaaacagttgacgattgcagtttttctttccttccttctttcagtggc

SEQ ID NO: 945078 - DNA, 647 bp, Homo sapiens
gtgctgtggagaattgctcctggtccaaactgcctagtcttgctggcactggcagcaggaaaaatggccaaatggagccacagtgatggtggccacccctccctgccccmccagaacttggtcttcttaagcagtctccagcttgctgtgctggtcaggggggattccaagccagtgagttttagcttgtggagttccttgggagtggggcctgctgaatggggacacttggctccctggtttcagcctccttcccaggggtgtggacagatctcctgtgtcactggagttcccagagccagaatatgcagactcctgtgtctcagtgcctgactgagtggctgcccactcaagcaactgccatgagtctgcacagctctgtgcttgggacccaagttcctggtggtgttgggctcatgaagagacctcctgatccaaaggttacaaagctctgtggggaaagcaaggttttcagggtggagtagcacaatccctcactacctgtcttggctgtgggagggagtttctgttgccccttgcagctcctgggtaagccctcactccactccgcttttcctcattctccatgggttgcaccaactgcctggtcagtccccatgagagaacctgggtacctcaattgaaga

SEQ ID NO: 945079 - DNA, 564 bp, Homo sapiens
cttaaaaaaacaaaaaacaagagacaagtgttagtggggatgtggagaatttctttgcacatggctggtggaaatgcaaaaaggtgctgttgctaygaaaaacagtacagaatttccttgacaaattaaaaaatggaactaccttgtgatctagcaaccccactcctggaaatatacccaacagcattgaaatcaggatctcaaagacatatctgcactcctctgctcactgcagtactattcaccatagccaagatatggaagcaacctaaatgcccatcaacaaatgaatggattaaaaacaaaaaaaaacatggtctatacatacaatggaatactatgcagccttaaaaggaaggatattctacaatatgcaacagcatggatgaaccttgagaaccttatgttaagtgaaataagccaggtacagaaagacaaattctgtatgattccacttacaggaggtatctaaagtagctaaattcatacgaccaaaaagtaaagtggtggtttccaggggataggggaagggaaaatggggatttatgagtcagcaggcataaa

SEQ ID NO: 945080 - DNA, 626 bp, Homo sapiens
gccgaggatatagttttcttggaatatgtactgtgggctcttgaaaggaatgagcattctgctgttgagtggagtggtctctaagtgttgattagatcctgttggataatggtgttattgagttcttacatattcttgccaattttctgtctagttattctatctgttgacagaatagtgttaaactctccaattctaattatggatttacttatgtctcctttcagttctatcatattttgttttgtataacttgcagttctgttgtttagtgcacacacttctgttgattgtttattcagtttggtatctctctggttcttggtatgatgaatgatttttttattgaaagctggacgagtatggtggctcatacctataatcccagcactctgggaggccaaggcaactgggtcacttgaggtcgggagtttgagaccagcatggccaacgtggtgaaaccccatgtctactaaaaatacggtggcacgtgcctgtagtcccagctacttgggaggttaaggtttgagartcacttgaacccaggaggcagaggttgcagtgagccaagatggcatcactgcacttcagcctgggtgacggagtgagactccatctcaaaaaaa

SEQ ID NO: 945081 - DNA, 597 bp, Homo sapiens
aaaattgcttcatctttctgagtctgcacctccgtacctgtaaatttttgagaagatatttttcatttctaatattccaggactcctgcatatgtgctgagacacaatgcatctgtgctaagacagtcccttccacctctgtcaaagttggtgcccctttaattgagtcatctctgtaccttttatgaacctattaccactcaatcatatacatttttgaacacaaaagtctgcatattgcctttttcagcttaatattccttgtagatcatttgatatctacacctacagctttagctcaattctgcacctcccccatgactgcttaatcgtatatgctattataccatcatttatatagccagttttaggcccacaactttatttttattgattttttaatgtttttatttagaaacaatttcagacatatataaaagaataacggtgcagataattcctgtatacccttcgaattttccaaattttaacattttaacacatttggtttatcattttctatctttttgcttcttttagtctctgtctctctttttcattacrtataatatatacacaaatatacacatacataca

SEQ ID NO: 945082 - DNA, 604 bp, Homo sapiens
gcccctgtgggagccacagtagcctcccagcacctgtgagtgggaccccactctacctcctactttgctttccacttatacttctggttcctctgaaaagccagaggcctcacaattaattattgtagcagttgctccttttgcaaagatatctctgattccttccatttctgctacccatagccagtctccctgagtcttggatgacaccagacatccagtaaaaagagctctcttccaaacagtaatcttcagatgcaggaggtggtggccaccactggcagtgtccccacagacagaaccactatatcacaaagggaattatgtaaccatacaaagattaacctcccccttctagtcacaattcaccagtccctctaacaactggctggggatcttgggggtctaaaggctgcatcccaagggaatggtgtggttttgcttccctgaaagtgacaagaggaatgttttctctttatctacctcaagaggtgcctaccaggcaaggcctcagtggttcaggacatttcaggcaaagaagaggctggagccagacggcagtcwtctttggggaagatggggaactacagggctcgctcctaag

SEQ ID NO: 945083 - DNA, 685 bp, Homo sapiens
tatttatattttgatattgagttgtgagagttgtttatatgttgtggatcctagtccttgatgaaatgtgtaatttcaaatattttctcccattctacaggttgtgtttgccattgctattattagctaactttccagatgttgttattttcagcataaagttttaaatttttgttaatcgcaatgaacctattttttctttagtagtttgtgcttttattgtcatattaacaaggctttacctaagccaaggttgtaaagctgtattcctatgtcttctaaggcttttcgagttttagctcttccgtttaggtctatgatccatttcgagttcatttttatctatggtggaaggagatccaacttcattctcttgtgtgcagttatccagttctgacatcatttgttgaaaagattattctcttgcccttgaatgccctttatgccctcgtcaaaaatcacttattcgtaaataaaaggatttatttatggactctcagttctagtccattaatctgtatatataagttcttaggctagtaccatactaycttcatcactgtagctttgtagaaatattttaaattgggaagtgtgagtctccaactttgttcttagttttcaagattgttttgattattctgaatcccttgtatttctcagtgaatttcagagtcagcttgtc

SEQ ID NO: 945084 - DNA, 563 bp, Homo sapiens
gtttgctggaggtccattccagaccctgtttgcctgggtatcagcagcagaggctgcagaacagcgaatatttctgaacagcaaatgttgctgcccgatcattcctttggaagcttcgtctcagaggggcacccgactgcatgagatgtcagtctgcccctactgtgggggtgcctcccagttaggctactcgggggtcaggaacgtacttgaggaggcagactgtccattctcagatgtcaaactccatgctgggagaactagtactctcttcaaagctgtcagacagggacatttaagtctgcagaggtttctgctaccttttgtttggctatgccgtgcccccagaggtggagtctacagaggcaggcaggcctccttgagctgtggtgggctccacacagttggagcttcccatctgctttgtttacctactcaagcctcagcaatggcaggcgcccctcccccagcctcgctgccgtcttgcagttygatctcagacggctgtgctagcaatgagtgaggctttgtgggcgtgggaccctctgagccaggcatgggat

SEQ ID NO: 945085 - DNA, 598 bp, Homo sapiens
tgagtcacatttgaagccagcacatctcagagtctcacccaaagcccatggcgtatagtacctggctaccgctgktgattattcagggctcacgggctcctgattcagcaagtgtttagtcctgccaggactcagtccctcccttcaaggcagcaggtttccagaaggcccagagtgtgtctagaaatgttatctgggatctagggcctggaaaggggcctgacaactctgcctattctaactctgggattggaggaggtgtggcacaagcgctttcttggccagggtggtgtctcactagatcacgtgccccctcaccaagtctactggctctgagcccagcacagcaccaggacttgcctagaagttgcggtcattgtggtatagactacctttcaagtttatttagaatctcagagcactttggcctgcagtggtgaggcttgctggatctcaagttccaactactgggatggccaattcccctctgcctagggctggtctacatgctccctttgtcaacagtggttgagttctgtccagtgttgctttcagctatgacagggcaacactgagttccaatgtaaagtcccacaat

SEQ ID NO: 945086 - DNA, 531 bp, Homo sapiens
ggcatgtgccaccatggctggctgatgtttcttttttgtaaattttggtagagatgaggttttgctttgttgcccaggctggtctcaaactcccggcctcaagcagtcctcctgcctcagccttccaaagcactggggttgcatgcatgagtcatcatgtcccgcctccccttgttctctaacctcctttatcaggtataactggattcagttgcttctaggagaaactccaaataacagtaaattaaggtgaagtttatctttctctaatgtaaaaaagatccagaaacaggtaggctttgattagtgtggtagctcgatgaaggtattgggagcccatctctctccttccaaatccgttatgcatccatggctcctgttctcgtggtacaaaatagcccctggagatccagccatcgcttacatgttccaggtggtatgatkaataaaggagcaaagaaggctgtatctcctgtctttaagattttccagagatctcacatcatacttacactcatatatagttggtca

SEQ ID NO: 945087 - DNA, 448 bp, Homo sapiens
tattgttagtagagatggggtttcaccaagttgctcaggctggtctcaaactcctgacctcaggccatctacccgccccggcctcccatagtgctgggattacaggcrtgagccatcgcgtccagactgttgaaatttttattgagtcaattgtacattcacaggcagttctgatcagaaactatgtacactttacccagtttctcccagtgtcaacattttgcaaaactatggtacaatatcttaagatatcgaatcattccattactgtaagtgtccctttcatacccacattcacctccctctcacccctgcctcctgtcacgtgttaccactgattcgttgtctgtatctaaaatgttgtcattcctaaaatgttatatacatagaatcacatagtaggcagtcttttaggatgggctttttttcacttagcataattccctga

SEQ ID NO: 945088 - DNA, 448 bp, Homo sapiens
tattgttagtagagatggggtttcaccaagttgctcaggctggtctcaaactcctgacctcaggccatctacccgccccggcctcccatagtgctgggattacaggcgtgagccatcgcgyccagactgttgaaatttttattgagtcaattgtacattcacaggcagttctgatcagaaactatgtacactttacccagtttctcccagtgtcaacattttgcaaaactatggtacaatatcttaagatatcgaatcattccattactgtaagtgtccctttcatacccacattcacctccctctcacccctgcctcctgtcacgtgttaccactgattcgttgtctgtatctaaaatgttgtcattcctaaaatgttatatacatagaatcacatagtaggcagtcttttaggatgggctttttttcacttagcataattccctga

SEQ ID NO: 945089 - DNA, 577 bp, Homo sapiens
aaaaaaaacaaaaaagaaaaattcgccgggcatggtgatgtactcttgtggtctcagctacttgggaggctgaagtaggaggatcacttgagtccaggaggtcgaggctgcagtgagctctgatcgcaccactgcattccagcctaggcaacacagcaagaccctgtctcgacaaagaaacaaacccccaaaccctagctctctatgtgaactcagagcgagaactcactcatcaccaaggggatggtgttaatccattcatgagggatccatccccatgattcaacacctgccatctccaacactgggatcacattttgacttgagagctgagatgtaaaggggacaaacatctaaaccatatagggatggacggaaggaagggaagaagaaaaagggacacaaggagatgtggcaaggagggtgtctcagctatggatagcccttgttcacccccttgtcttgctggagcaaggctaacacactggaagttcctgcccagctcagggcagaggagagcccaggcacagcaygtacttctgaatggtcaccatctccctgctggacccagaaccca

SEQ ID NO: 945090 - DNA, 609 bp, Homo sapiens
aatacaggcatgtgccaccatggctggctgatgtttcttttttgtaaattttggtagagatgaggttttgctttgttgcccaggctggtctcaaactcccggcctcaagcagtcctcctgcstcagccttccaaagcactggggttgcatgcatgagtcatcatgtcccgcctccccttgttctctaacctcctttatcaggtataactggattcagttgcttctaggagaaactccaaataacagtaaattaaggtgaagtttatctttctctaatgtaaaaaagatccagaaacaggtaggctttgattagtgtggtagctcgatgaaggtattgggagcccatctctctccttccaaatccgttatgcatccatggctcctgttctcgtggtacaaaatagcccctggagatccagccatcgcttacatgttccaggtggtatgatgaataaaggagcaaagaaggctgtatctcctgtctttaagattttccagagatctcacatcatacttacactcatatatagttggtcaaaacatagtcacattcactctttatacctacatccttggcaagatccacttctcatcaagcctgagctatta

SEQ ID NO: 945091 - DNA, 554 bp, Homo sapiens
acagcgagacccagagaggctggcggtggctctgaattccaagcatagttctcatagttgggaaagtgccactcccggctcgataaaccgaccaggagccgccgccgccagggccatcttctcaccagcagggagagagcatgcagccggtggaggcttctgagagctggccggggcggcctgcgtaaaaggacaggaatgtcaagaatgcacccggcctggcagagacagggactttaccgagcggctcctgggcctggcggccagagaggcgagggagcgggagctaccgagggttcctccatcggcagggaaggtcctgagtcccccagaccctgttaaaagaggctgatcaggttgggtgcggtggctcgtgcctgtaatcccagcactttgggaggctgagtcaggagaattgcttgasgccaggagttcaaagccagcctggggcaacacagtgagaccctgtctctaaaataaaaaaataaaaataaatgttcttggggaagcgaagccgaatttcaggagaacataatgagggtgcagtgagctgg

SEQ ID NO: 945092 - DNA, 673 bp, Homo sapiens
gaggaaactaacaagaaccagcaggtggctacaaaactgatccctggctgccctcattgctcattggtgtaagacacacactagtgctataacagtttacaaatgtcacggcagccatctggcagtcaccaccccctttccatggcaacaacccagaagttactgcccctttcccataaagttctaaacaacttgctcctcaatttgaattgacccaccccttaatttgcatgtaattgaaagtgggcttaggtgaatataaatgcagttgccacagtccgtaggtgctaactctgggtgcactgcctgtgagttagccctgctccatatggagtagctcgggttcaataaaagattgctgtttaaaatcaacttgaattcttttctgggaaaagccaagaacccttatggattaagccccaactttgaggcttgcctgtcctgcatcagtttctctaattgaggtgcaaaataatcataaggatttctgagaagagatgggaatttcttggaattggggtgctacccagttttagaccmagcatgggtatacctggaatggtcatggcactggtgggtgtgtggtttagtataataaagagcgtataattgagtctggggtaaaacttgggtcagaccaatttcacccacatcctgtttgtcagggtgttat

SEQ ID NO: 945093 - DNA, 600 bp, Homo sapiens
gttttttttttctcctgtaaacaggacgtctcagcataaagaggtcccctctacactgacccttacaaaaaacgaaataaaataaatgaactgaagtccttgtccccaccttacaaacccactgttctgctatttcccagtgggtttcaagaccaaataagtatatttacaatagtgataatgacatcagtgactaaagttttggtcagtctctcaaaattaagaagatgaccaaaagtggggaattgtttaatcaggtttagcctaaaggtgcctccttacatattttaagttcagcctaaaggtttctctgtacatagtgagctataataattggaggtgtaataagactgtagcctacacttgtgccaatcatcgagttttggccaatgaaatgtagccaactgttcaaaccatgtgcaaataaggcaaacaccaagctgtaaccaatccggctgtttctgtacctcrcttccatttcctgtacattactttccattttctgtccataaatcttccaccatgtggctgcgatggactctctgagtatactttggctcagaaggctgccccattggtgaatagttcaatgcttaatta

SEQ ID NO: 945094 - DNA, 595 bp, Homo sapiens
ctgggtgctgacaacaagctcagcagctgcagcaataggtattttaatgaaagggggtctggatggcacwccacaatgatcacaaagatgactgcagccaccattgtgccttacacaatgcatgtgcttacacaactgttagctacttcaaagcagcggtggggggggggagaataagaataattgttaaatgaaagagtagaattgattttttaaaaaatcccaagatttgaggctagcaatgtatacaaattccacatctgcctcctactttgactttaaacaagttaccgagcttctctgtaacttcccttcactcccctgagatgatagcaaatatgctccatgcatgtctgtccctaatatttgtgtgacccagagaaagaatacaaatgaggttcccaccccacgtttgtgtgtagcttctcaacccacatgcccaagtcctgttcacgctctttccccagcacgcctcttaatagcagctccttggatcactctgccaaacagacctggaaaagaggccctcgcagtctttggaaatggggttgaggccatttgcttagggaacctaataccccagtgtctgaagtgg

SEQ ID NO: 945095 - DNA, 595 bp, Homo sapiens
ctgggtgctgacaacaagctcagcagctgcagcaataggtattttaatgaaagggggtctggatggcacaccacaatgatcacaaagatgactgcagccaccattgtgccttacacaatgcatgtgcttacacaactgttagctacttcaaagcagcggtggggggggggagaataagaataattgttaaatgaaagagtagaattgattttttaaaaaatcccaagatttgaggctagcaatgtatacaaattccacatctgcctcctactttgactttaaacaagttaccgagcttctctgtaacttcccttcactcccctgagatgatagcaaatatgctccatgcatgtctgtccctaatatttgtgtgacccagagaaagaatacaaatgaggttcccaccccacgtttgtgtgtagcttctcaacccacatgcccaagtcctgttcacgctctttccccagcackcctcttaatagcagctccttggatcactctgccaaacagacctggaaaagaggccctcgcagtctttggaaatggggttgaggccatttgcttagggaacctaataccccagtgtctgaagtgg

SEQ ID NO: 945096 - DNA, 700 bp, Homo sapiens
agtgggtgggttctgggcctgtcttgaaggcagaactcacaagattttctgagacgctgtggggtgaaggggagtgagaggaggggagggtcctggaagggcggrtgcaacctcaacccagcggaggaccctgctgacctgcttagttgtttatggagggtcattgccgtgctctaccacgtaacacacgtacacacacacacacaggtgcacgtttacaccacgtgggtgcgcacgatgaggcacacacaggcaggcgcgcacacacacgcgtgctcacataggaacacgaagaggcaggagccgggcgtgcccgagccccgtggcgccctgggcatcccaaacaccgcctgcccagaacaggtgcgcagtgagtgcctgctgagccagtgagtggaatgaagctctacaatagtccagatgacagacatgactgctgtggctgctgccgatccaagtcccaccgttcttttctctagagacaaggtctcactccaccatccaggctggcgcgatcacagctcactgacggtggagaagggtgatcagagaatggtgggaatgaggcggccctgacctcctggggttagcgatcctcccacctcagccccctaaagcaccgggagggcaggtgtgagccacggtgccagccccaagttcccgacattctttcctaaaacacatcctccggctgcagatg

SEQ ID NO: 945097 - DNA, 633 bp, Homo sapiens
tccccatgaaataatacattttagagggaagaagaaagaccatakacttagagataggagattaaatctgactatggtaaaaaatgtttgaaaaattcgttatctctgtttgttcacaacactcactccagttacacccgtcaccccagagcagcagacttttgccttcttaacttgtcagagccagtgcccagttctcctggggcgttttagatgctgatctcaagctcgccaggtggtgtgagtgggcagccaggtctctcatccacatgagtgatctcagcatctgttctgcctgtgccatgaagctccgcaggggcccttccaaccctgggaatgtgttgccaacaagatcccttctgtccctgtcaggcagaggtggcagagcactctttggcagtaagctttgtacccgaaccatttcttttttcacagtctttagataaggcagtttgagttcatttcaatagctggtacttcccgggttctgccaactgcctgtgtgctgtgaggagaggagagagcttttgtgaaattaagatgaatttcctccatggtttcacctttgtttacacattaataatacactccccacacctgaccgcacgggctgcattgcagccttcactactg

SEQ ID NO: 945098 - DNA, 513 bp, Homo sapiens
ttggttaccaagaacgaaacagggaggatggattctaagggagaagtaacagcctctgccacaatcaggattcttctctsagatccaggctgggcctggagtccctgggaggatagaaattggaggtctgggctgggcgcagtggctcacacctggaatcccagcactttgggaggccaaggccagtggatcacctgaggtgaggagtttgagaccagcctggccaacatggtgaaaccccatctctcctgaaaatacataaactacccaggcgtggtgctgcatgcctatagtcccagctactcaggaggctgaggcaggagaatcacttgaacccaggaggcagaggttgcagtagccaagattgccccatggcccttcagcctaggtgacagagtgagactctgtctcaaaaaaaaaaaaaaaaaaaattagccaggcatggtggcacacgcttgtaatcccagctactcaggagggtgaggcaggagaattgaactcaggagatggagg

SEQ ID NO: 945099 - DNA, 629 bp, Homo sapiens
tccttcttctacccattcattcattcaacaaacatttatcgagtgcctctgtttgcctgagctcagtttatacactaacatttgatgttagcgtataaattagtgttctgtgtcaaagaagtgcagaacgtactcttggcagaaaggatttaatacaggaaattaagtgcttttaaaaatgtgggaaaggccaggcacagtggctcatgcttgtaatcctggcattttgggaggccgaggcgggaggatcacttgaggccaggagttcaagaagcatagcagacgccatctcaactaaaaatcaaaaaaattagccaggcatcatgttatgtacctgtggtcccagctactcgaaagaccgaggtgggagaatcacttgagcccaggaggttgaggctacagggagctgtgttcccgccactgcactccattctgggtgacagagcaaaaccctgtctcaataaatcaataaataaaatattaatagtaatttaaaaaatcaggccaggcrcagtggcttacgcttgtaatcccagcactttgggaggcagaggtgggcggatcacttgaggtcaggaatttgagacctgcctggccaatatggtgaaaccccgtctctactaaaaata

SEQ ID NO: 945100 - DNA, 641 bp, Homo sapiens
tggtcttccatgtaaataaaaaaaaacccacaaagagataccatttcccacacacaaggatgaatacattaaaaaagctggacaataaaaaatattggtgaagacgtggagacactggcacctcatacattgctggtgagaatgcagaactgcagagccactttgaaaagcagtttcacagttcctctaaaagttaaacaaagagttgccatttgacccagcaagtccactcccaggtgtctacccaagagaactgaaaacatatgtccgtggaaaaacttgtacgtgaatgctcacaaagccattattcatagtagccaagaagtagaaacacatcggggatggtggctcacacctataatcgcaggaatttggtaggttgaggcaggattatcacttgagcccaggagttcaagaccaggctgggcaacacagggagacctcgtctatacaaaaaataaaaaaattagccaggcatagtggtgcgcctgtcgtcctagctacttgggaagtgggaggattgtttgaggtacggtctgcagtgagcagagatcatgccattgcactctagcctgaatgaaagagtaagaccctgtctcaaaaaaaaaaaaaaaaaaaraaagaaagaaacgaaacaagcc

SEQ ID NO: 945101 - DNA, 568 bp, Homo sapiens
ttacttgttatcatctactagcctcctaggcaagtcttcttgttcgatgaagatatcagcacctaattcagtcttcctttctacttccaccaccactggaggtgacatgatgtccaagtgggcttggacttctcaggttcttgagctgctcaactccaacgacctcctcttccttccacctctaccactcttaacttggttacaccacctactgtatcaacatctggaattgctcttcttctgaggtattaaatgaagacatcctgctcttggatgtccatttcctacaatttccagcctgcttgttctttgttcatctgctcctgggatacctgtttctcaaccttctcaagaactctagtgcactgattctgcttcccctgtatcaactcttccgactgttcctgtccttccctctgaattccagattaggttccatagaccatcttctcatcactctcttgccaatattgtaaactaccttgtcsctttgtcctttactctagccaccaggcaaaattctaatcctagaagaactccattggcctcccttgggccatgcactccc

SEQ ID NO: 945102 - DNA, 436 bp, Homo sapiens
tttacagtcgtaagccatcaygcccagcctagggccacccatttttaatgatctcagataaccaaaccaacctttggagcattctctgtcctacttctgactttacttgtagtgtgaccatgttcactgtaatctcaaaggagaaaaaaaaaccttgttaaaaaaaaaaaaaaaagacaacaggaaaacaatcttattctgagcattccagtaacttttctgtgtatgtacttagtttgtatgagatggttaaaaaggctaaagagaaaaggtttctttttttttccttttttgtctatgaagttgctgtgtttttgtttttttgtggtgttttttttttctaattttacaaaaattagccaggcgagctggcgtgcacctgtaatcccagctactcgggaggctgaggcaggggaattgctcgaacccaggaggc

SEQ ID NO: 945103 - DNA, 436 bp, Homo sapiens
tttacagtcgtaagccatcatgcccagcctagggccacccatttttaatgatctcagataaccaaaccaacctttggagcrttctctgtcctacttctgactttacttgtagtgtgaccatgttcactgtaatctcaaaggagaaaaaaaaaccttgttaaaaaaaaaaaaaaaagacaacaggaaaacaatcttattctgagcattccagtaacttttctgtgtatgtacttagtttgtatgagatggttaaaaaggctaaagagaaaaggtttctttttttttccttttttgtctatgaagttgctgtgtttttgtttttttgtggtgttttttttttctaattttacaaaaattagccaggcgagctggcgtgcacctgtaatcccagctactcgggaggctgaggcaggggaattgctcgaacccaggaggc

SEQ ID NO: 945104 - DNA, 436 bp, Homo sapiens
tttacagtcgtaagccatcatgcccagcctagggccacccatttttaatgatctcagataaccaaaccaacctttggagcattctctgtcctacttctgactttacttgtagtgtgaccatgttcactgtaatctcaaaggagaaaaaaaaaccttgttaaaaaaaaaaaaaaaagacaacaggaaaacaatcttattctgagcattccagtaacttttctgtgtatgtacttagtttgtatgagatggttaaaaaggctaaagagaaaaggtttctttttttttccttttttgtctatgaagttgctgtgtttttgtttttttgtggtgttttttttttctaattttacaaaaattagccaggcgagstggcgtgcacctgtaatcccagctactcgggaggctgaggcaggggaattgctcgaacccaggaggc

SEQ ID NO: 945105 - DNA, 584 bp, Homo sapiens
ctgttggagtttgctggaggtccactccagaccctgtttgcctgtgtatcagcagcggaggctgtagaacagcgaatgttgccgaacagcaaatattgctgcctgatcsttcctctggaagctttgtctcagagggatacccggccatgtgggtgtcaaggctgcccctacgaggcggtgcctcccagttaggctacttgggggtcagggacccacataaggaggcagtctgcccgttctcagatctcaaactccatgctgggagaaccactgctctcttcaaggctgtcagacagggacatttaagtctgcagaggtttctactaccttttgtttggccatgccctgcccccagaggtggagtctacagaggaaggcaggcctccttgagctgcggtgggctccacccagttcgagcttctgggctgctttgtttacctactcaagcctcagcaattgtgggcacccatcccccaggctcgctgccaccttgtagttccatctcagactgctgtgctagcaatgagcgaggctccgtgggcgtgggaccctccaagccaggtgcaggatataatctcctggtg

SEQ ID NO: 945106 - DNA, 595 bp, Homo sapiens
ggtttgaaatattttcattttctctagcaagtgcatgttcccctctgaaatattatttaaactaccaatttgcataacattttactcacacttaaagatcaacctcaattcagcaaagtcatacattctgaatggattgtgttatcacttacaatctcatctttttactctgattatgagagtcacaaggaaagaaaatgaacatcatcagtggaccagcaaagcctagaattcaaatctgccactctagctcaagattctatcatttttactttaattttagttccattttgaaagccatgaaaactaccaatttgattaggttgttttagatatttgagggttgtggggagagggcagaaacactcctaagagctcagtcattttaaacagtaagtatttcaaagcaattttcagagtgacccaaactggtacacaagtaagcgaccttggctggatagtcgcttacagtggctcacacctgtaatccgagcactttaggaggccragggggatggatccctgaacccaggagttcgagaccagcctgggcaacatggcaaaaccctgtctctacaaaaaacaccaaaaaaaa

SEQ ID NO: 945107 - DNA, 638 bp, Homo sapiens; identical to SEQ ID NO: 944963

SEQ ID NO: 945108 - DNA, 633 bp, Homo sapiens
ttgcccaaagccatggggccccacctcttgcatcagcgtgacctggatgtgagacacgaagacaaaggagattcattttggaactttaaggctcataggyggaagggacttgcctcatgtcagatgtgaccttggacttggagttttaggttaatgctggaatgagttaagactttggggaactgttggaaaggcatgattgtgttttgaaatgtgaggacatgaaattgtggagggtctggggtgaaatgatatggtttggctgtgttcccacccagatctcatcttgaattgtagttcccataatccccacatgtagtgggagggatgcagtgggaaataattgaatcacgggtgcagttaccccctgctggtgttcttaggacagtgagtgagatctcacaagatctgacggttttataaggggcctttccccctttgcttggcatttctttctcttaccaccatgtgaagaaggatgtgttgcttccccttccattctgattctaagtttcctgaggcctccccagccctgtggaattgtgagtcaattaaacctctttcctttgtaaattacccagtctcagatgtttcttcattgcagcatgagaacatactaatacacctgctaca

SEQ ID NO: 945109 - DNA, 605 bp, Homo sapiens
gcatggtggcgcatgcctgtaatcccagctactcaggaggctgaggcaggagaatcacttgaacccgggaggcggaggttgcagtgagctgagatcaygccattgcactccaacctaggccacaagaatgaaactccatctcaaaacaaaacaaaaccccaaggctatcagtaacatcaacttttagtgcctcagttttatcgtctgtaaaatgagactaataattactacctacctcattggagtgccatgcagaccaaaatactgtttagcagtaggcacggtgttcagcacatgctgggtcctgaatgcttgcatgcctctggatctcccaaaaacacagtgggaggaaagaataaaaaaaaaaaaacacaaaatacaggaaccaggcttccaaatattcacagtcatgtacttcgacttaacaaaatgattaaattagatagtttttaaaccaaaaggttaatttgaaaatttattttcaaggaaagttccctgtggcttacttataatataatgggggagtatgagaaaaagttaatagctttgtaattataccaattttccattgtaaaaatattattctcatttattagtctgtcaag

SEQ ID NO: 945110 - DNA, 605 bp, Homo sapiens
gcatggtggcgcatgcctgtaatcccagctactcaggaggctgaggcaggagaatcacttgaacccgggaggcggaggttgcagtgagctgagatcatgccattgcactccaacctaggccacaagaatgaaactccatctcaaaacaaaacaaaaccccaaggctatcagtaacatcaacttttagtgcctcagttttatcgtctgtaaaatgagactaataattactacctacctcattggagtgccatgcagaccaaaatactgtttagcagtaggcacggtgttcagcacatgctgggtcctgaatgcttgcatgcctctggatctcccaaaaacacagtgggaggaaagaataaaaaaaaaaaaacacaaaatacaggaaccaggcttccaaatattcacagtcatgtacttcgacttaacaaaatgattaaattagatagtttttaaaccaaaaggttaatttgaaaatttattttcaaggaaagttccctgtggcttacttataatataatgggggagtatgagaaaaagttaatagctttgtaattataccaattttccattgtaaaaatatkattctcatttattagtctgtcaag

SEQ ID NO: 945111 - DNA, 610 bp, Homo sapiens
agtggcctctgagactttggtggccctgggtggagaagggagggcagggctggtcccaggaggaaggacaaggagagggcatttccacgggactggacctgccccaccctgccctaygcacaccccccagcacctgccaggggatgtttcctgaaagatttagcacaacccatgccctgagaaggcaccacatcatggcagattcggggctcactcagcccttagacacctccggcccccatggcctcctcccaagcctgttctgctcaccctgccgccacagttctgggctcccagcctttgctctggcctccacactctccctgcctccatcccatcaagcaccccacgaagttttatccagcccagtcaccatctctccttctccttcctctgggctcctgcacactttgcacctccagatccagcccccatcccagccttccttgagttcttgctctttgcatgtctctcactgtctggaatggcatcagagattcttgggggacagaagtcatgagacaggtctagcttatcactgagccctccttggagcccagcccagccacagcatgccccagggaagcaggtgtgggaagcaggtgtggga

SEQ ID NO: 945112 - DNA, 659 bp, Homo sapiens
aaaggcctgaaagacgtcaaactcttgattgtctggtgaatgtctttctcttccaaagccagttagtagagactggaagaggagactgctttttcaaagacagaaatgcaacacttcaaggaacaagaagaattaagaaaacatgacaccaccaaaggaacaaaataaagctcctgtggctgatcccaaagaaattgagacctatgaattgcctgataaataattcaaaataagtgacttaagctcactgaggtacaggagaacacagacaactaaacaaaatcaggagaacaatacaagaacaaaatgagaaattcaaccaaaagatagaaatcataaaaaagaactaaacagaaattctggagctgtagaatatgatgaatgaactgaaaaattcaatagagagcttcaacaggggactcaagcagaagaaagaagcagtggactcaaagacagatcatttgaaattatccaatcagagcaacaataagaagaaaggatgaaaaaggcctgtgtaacttatgggacaacatgaaacaaaacaacatttgcattatgagttgatgttctagcacattcaaagtgctgaaacaacaaaaacmactgctaaccaagaatattctacataggaaatctatttttaagaaaggaaggagaga

SEQ ID NO: 945113 - DNA, 606 bp, Homo sapiens
acttctaggtctataccaaaaagaattgaattgagagcagggtctcaaagagacatttgtatccatgttcacagctgcattatccacaatagctaaaaagtggaagctgtccaagtgtccattggcagatgaatggatacacgaaatgtggtatacaatagaatcttattctgccttagaaaggaagaaaattcttaaggctgggtgtgatggttcacatttgtaatcctagcactttgagaggccaaagtggtagaatcgcttgaggctaggagtttgagaccaacctgggcaatatagtgagcctcccttctctacaaaaaataaaaaaattatctaggcatggtggtgtgcacttgttagtcccagctactagggaggcaagagaatcgttgagtctaggagtttgaggctgcagtgatttccacattgcactgtagcctgggtgacagagtgagatgctgtcttaaaaaataaacaggaaggaaactcttgcacaagctacaacatggatgaascttgaggatattatgctaactaaagtaaccagttacaaaaagacaaatactatatgatttcacttatatgaggtatataaagtagtca

SEQ ID NO: 945114 - DNA, 664 bp, Homo sapiens
actgcaatgttttgccgcagccttccagtgacaagggaacaaggagatttgttctgagttyagggattacttgggggcaaggccacaatctgcagaaaacagctcttaatgtgaacaagcaaatccttccatttggcctctcactgttgctgttgccataaagacattacgtgctcctctgccatgccaagagggcagtgaacaaccggtgcaggtccctctgtgactcgcacactggggctgccaggactgcttcatgtctgtgagaatcaggcttgcttttctcagagctgctgagagccaccctgaggagggctgaaaacctgcaaacaaaggaatgaaagccagtgccgggagacccaataagactgtcaggggtctgatcccctttttcctttaagtgccctccctactccaggctgaccataagggctgatactactgcttcagagagcatctcacaggggcgtccgtgccataaacagcctggacaaaattcacccaccattgtctatgaggcaccaaggggtgcactgaaaagacgtcgccaagcaaatcatgagcttttcagatttcctctaaccccagtcaatgcgtttgctctgatgtcaaaaccagaaacagccagtgacagactatttttaaaaatttcagaaaatgtatc

SEQ ID NO: 945115 - DNA, 569 bp, Homo sapiens
gcatgaatatttgtttcttggttttgctcgctgtgtgatgattatgtcagaagtgaacattagacaaagttgggtaaaggatgtgtgrgaattctctgtactgttattgcaactcttctgtaagtctaagagtatctcaagatagaaagttttacaatgagaacacaggactacaaagaagggaacaacagaaacaggggcctacttgagagtggagggtgggaggaaggagaggataaaaagtttacccatcaggtagcaggcctattacctgggtgatgaaacaatctgtatcccaaagccctgtggcacacaattaacaaatataacaacactgcacatgtacccctgaacctgaaacaaacattatatattttattatattataatatagcatataataatataatatggcatatattataatattattatattatattatatattctgtatatatatataatttttaagtggtaatatgttatcaagatagaggggtcactcatataattcaagatcatagatgtatttgagcctcaggcttatgttagtgccagtgacttttg

SEQ ID NO: 945116 - DNA, 569 bp, Homo sapiens
gcatgaatatttgtttcttggttttgctcgctgtgtgatgattatgtcagaagtgaacattagacaaagttgggtaaaggatgtgtgggaattctctgtactrttattgcaactcttctgtaagtctaagagtatctcaagatagaaagttttacaatgagaacacaggactacaaagaagggaacaacagaaacaggggcctacttgagagtggagggtgggaggaaggagaggataaaaagtttacccatcaggtagcaggcctattacctgggtgatgaaacaatctgtatcccaaagccctgtggcacacaattaacaaatataacaacactgcacatgtacccctgaacctgaaacaaacattatatattttattatattataatatagcatataataatataatatggcatatattataatattattatattatattatatattctgtatatatatataatttttaagtggtaatatgttatcaagatagaggggtcactcatataattcaagatcatagatgtatttgagcctcaggcttatgttagtgccagtgacttttg

SEQ ID NO: 945117 - DNA, 553 bp, Homo sapiens
ctaatgattgactggtggctggcagcccctaggtagcttcaggatggggctggtcactcaaaccaagacaggattagagggttcggactttcagccccacctcatgactctagggaagggagaggggctgaaggttaagttgatcaccaatggccaatgatctagttaatcatgcctatgtattgaagtctccataaaaattcaacaggactgggttcggggggcttccagaaagcttaacaagtggaggcacctggagagtggcacccaggaaaggcgtggaagctccatgtcccttccccatgcctcgccccatgcatctcttcatctgtaccctttgtgatagcccttacaatacactggcaaatgtaagtgtttccctgagttctgtgagccactccagccaattaatcagacctaaggaggaggctgaggaaaccccaatgtatagccggtggktcagaagcacaggtaaaccaacctggggcttgggtttggcattggaaatgggggctggctaaaccccacccttaagcctggaactttggcccta

SEQ ID NO: 945118 - DNA, 592 bp, Homo sapiens
tagcaaccttaattccatctactgccttaattcccctttgtcatgtactgtaacatattcacaaattccaggattagaacgggaccattattctgccaatcacatttctcttcaactatgccttgtgatatagtttggctctgtccccactccaatctcatcttgaattatagtccccataatccctatctgtcatgggagggacgcaggaggaggtaatggaattattggggcaggtctttcctgggctgttctcatgatagtattcaagtctcacgagatctgatggttttataaaggggaattcccctacccaagctctcttgcctggcaccatataagacgtgactttgctccttatttgccttcagccatgattgtgtggcctccccagtcatgtagaactgtgagtcagttaaacctctttcctttatgaattactcagtctcaggtatgtcttttttttttttttgagacagtctcacactgtcacctaggctggagtgcagtggcgsaatctcggctcactgcaacctctgcctcccaggttcaagcggttctcctgcctcagcctcccaaggagctgggatta

SEQ ID NO: 945119 - DNA, 584 bp, Homo sapiens
gccagaacttccaatactatgttgaataggagtggtgagagagggcgtccttgtcttgtgctggttttcaaagagaatgtttcygcttttgcccattcagtatgatattggctacgggtttgtcataaatagctgttattattttgagatatgttgcataaatacctagttcattgactgtttttagcatgaaggggtgttgaactttattgaaggcattttctgcatctcttgagataatcatgtggtttttgtgactggttctgtttatatgatggattacatttattgatttgcatatgttgaacctgccttgcatcccggggatgaagccaagttgatcatggtggataaactttttgatgtgctgctggattccgtttgccagtattttattgaggatttttgcatcaatgttcatcaggaatattggcctgaaattttctttttttattgtgtctctgccaggttttggtatcaggatgatgctggcctcataaaatgagttagggaggagtccctctttttctattgtttggaatagtttcagaatgaatggtaccagctcccctttgtacttctgg

SEQ ID NO: 945120 - DNA, 645 bp, Homo sapiens
tcccagctactccgaaggctgaggcaggagaatcgtgcgaacctgggaggcaaatgttgcagtgagccgagattgcgccattgcackccagtctgggcggcagagcaagactccatctcaaaaaaaaaaaaaaaaaaaaaaaaagaatcacgggggggtgtacacaccattcgatattgggagtaatatcatcccctttccccctaaatattaggaacaatatcacaggaagcgtgtacatcccctgcgatattgggagtaatatcacactttcttctcctaggtattactaacaatatcacagggggagtgtacatcccctgcgatattgaaagtaatatcatcctctttcttcatggatattaggaacaatatcataaaggtggtgtacaccccctgtgatattgggagtaatatcgtcctctccccccatcgatattaggaacaataacacagggttggtgtacaccccttgtgatatttggagaaatatcataatctccccaacctggatattaggaacaatatcacagaggggaggacaccccctggaatattcacagtaacatcatcgtttcctttcctggatattgggaataatattatcctctccaccctggatattaggaacaatatcacaagagg

SEQ ID NO: 945121 - DNA, 739 bp, Homo sapiens
cttcaaccacataagggatacacccccagagcggccgtccataggcctcccctaggaatgcgttcccttcccagtgatatttctcctactcattttctgcaataagaaaaatgtgactctgttctgcccagccccacaggcagtcagaccttatgcttatctcccttgttcgctgaacatcgctcttatcctgttctttttcagggtgcccagatttcatattgttcaaatacacatgttttataaacaatttgtggagttaatgcaatcatcacagggtcctgaggcgacatacatcctcagctcacaaagatgatgagattaagagattaaagtaaagacaggcataggaaattataaaagtattgattggggaagtgataaatgtccatgaaatcttcacaatttatgttcagagattgcagtaaaggcaggcataagaaattataaaagtattaatttggggataatatccctgtaatatccctggatattacaaactttaccacaaaggggtgtacaccccctgagatatggggataattacaccttccctccccccttgattttacgatccatactacaagggggtgtacactccctgcaatatggggagtaatagcaccttytcccctgctggatattacgaaccacaggggggtgtacaccccccttgatatggggagtcatagtgtagcaggaggagtcgcggacaaaaccccacagacaccgaggtagt

SEQ ID NO: 945122 - DNA, 625 bp, Homo sapiens
agtagacatgaggtttcaccatgttggtcaggcttgtctcgaactgctgacctcaggtgatccacccgcctcggcctcccraaggactgcgattataggcatgaaccactgcacccagccttacaaaaaaatattttaaaaagtagtcaggccgggtgcagtggctcacacctgcaatcccagcactttgggaggccgagatgggcagatcacgaggtcaggagatcgagaccatcctggttaatatggtgaaaccccgtctctactaaaaatacaaaaaaaaaatccgggcatggtggcgggtgcctgtagtcccagctacttgggaggctgaggtgggagaatggcgtgaacccgggaggtggaggttgcagtgagctgagatcatgccactgcactccagcctgggcaacagagtgagactccgtctcaaaaaaaaaaaaaaaatagtagtggtagtgtgctcttgtagtcccagctactcgggaggctgagacagaaggatcacttgagcccaggagttgaggcttcaaggagttaccctgggtgacaactgtctcttaaaaaacaaaaattttaaaaaaaaaaagtctgttgtgaagaagccagacttacaggacagaat

SEQ ID NO: 945123 - DNA, 589 bp, Homo sapiens
tagttggtgagttcttatccattctgcagttctgtatctttcaagtggaacatttaggccatttacagtcaatgttagtattgagatgtgaggtaccattgcattcattgtgctatttgttgcttgcatamctcggttttttttttgtttttgctttttaacttgcatttttgttttataggttctgtgtgatttacgctttaaagagtttctgtttgtatgtgtttccaggatttgtttgaagatttagagctccttttagcagttcttatagtggtggcttggtagtggcgaattctctcagcatttgtttgtctgaaaaagactgcatctttccttcatatatgttgcttagttttgctggatacaaaattcttggctgataattgttttgtttgaggaggctgaagatagggccccaatcccttctagctttgcagggtttctgctgggaaatctgctgttaatctgataggtttcctttataggttacctgagtgtttttgtctcacagctcttaaaattattttctttgtcttaactttagataacctgatgacaatatgcctagatgatgatcgttttgcga

SEQ ID NO: 945124 - DNA, 589 bp, Homo sapiens
tagttggtgagttcttatccattctgcagttctgtatctttcaagtggaacatttaggccatttacagtcaatgttagtattgagatgtgaggtaccattgcattcattgtgctatttgttgcttgcatacctcggttttttttttgtttttgctttttaacttgcatttttgttttataggttctgtgtgatttacgctttaaagagtttctgtttgtatgtgtttccaggatttgtttgaagatttagagctccttttagcagttcttatagtggtggcttggtagtggcgaattctctcagcatttgtttgtctgaaaaagactgcatctttccttcatatatgttgcttagttttgctggatacaaaattcttggctgataattgttttgtttgaggaggctgaagatagggccccaatcccttctagctttgcagggtttctgctgggaaatctgctgttaatctgataggtttcctttataggttacctgagtgtttttgtctcacagctcttaaaattattttctttgtcttaactttagataacctgatgacaatatgcctrgatgatgatcgttttgcga

SEQ ID NO: 945125 - DNA, 599 bp, Homo sapiens
ataggtttgtagccttggaaccataggttataccatacagccttaggtgtatagtaggatccgccatctaggttttggaattacactctgtgatttttgtacaatgacaaaatcacctagaatcacatttctcacaacattcccatcgttaagaaacacctggccgggcgcggtggctcaagcctgtaatcccaacactttgggaggccgaggcgggtggatcacgaggtcaggagatcaagaccatcctggctaacacggtgaaaccccgtctctactaaaaatacaaaaaaattagccaggtgtggtggcgggtgcctgtagtcccagctactcgggaggctgaggcaggagaatggcgtgaacccgggaggaggaacttgcagtgagccgaaatcgaaccactgtactccagcctgggcaacagagtgagactccatctcaaagaaaaaaaaaaaaaaaaaaaaargaaacacctgactgtattaaactgttttaataatattgtctgatccatgaagatctgcatattttaatatgctaccaaatgagatatccagtgatacttgccccagccaaaataaagtatgtgtataaga

SEQ ID NO: 945126 - DNA, 737 bp, Homo sapiens
atacgggaggctgaggcaggagaatagcttgaaccacctgggaggcagaggttgcagtgagccaagatcctgccattgcactccagcctgggaaacaatgagactccatctgaaaaaaaaaaaaaagaaaggaaggaaggaaggaaggcaggaagggaaagaaaagaaaatcagttttcaaactcagagcttcctggagatgtgaataggtatggatttgtgcactgcactgcaaaaatctatcgataagattaagtccctttgccataaaacaaagtgtcagtgacattgcatggaacgctctcaggtggaacactaataacatgatatagacgtagtcagtcttttctaacttctaattagtatactacgttaagagtatcaatgaaaccccaacaaaaatacacggcaacaaaacacatataatttcccaaaatatttctgagccttttataacaaattaacttggcacaaagatgaataaaagattgtctataataatgaacagaactgcattccactatatcatgaaaagtcaaaccacatgatttctctttttcaatttcttgaggcctttctttatctcctcgggtcttccaaaatgactagttgctccgtagaaatgaactcaaggatttgttcaccagacacctttgttaggaaagctctttgagattccaaaatactcttcygccatttccttctccatcttccttcaaaaagccttcctctaatta

SEQ ID NO: 945127 - DNA, 537 bp, Homo sapiens
ttgaacttgggccttgtgacttctaccctgtcacttcctcacttggccatccataarcttgtatagaaaaaagattcatgaacaccacagcccactaaaacagcctattgccccactaaaaactcattttattatagacaaactttttaaagagcaaaggaatgagagtcaatccttgattttttacataatgcagtcctgcctttcatgcagggcctcaaaggggcctaagagagtgctcagaaacagaccccacacatgtggagactggacacaggacagaggtggccccatatgccacagggaagggggtctttgcaagaaatggagtaggaaaaattgcacgtgtgttttttaaaacgtgaaatgggatttctacctcacaccagacacaaaaattgacccacatccattcataaaagatatcaaaaagaggccaggtgcagtggctcatgcttgtaatcttagcactttgggaggccaaggcgagcggatcacctgagatcaggagattgagaccaacctggccaacatggt

SEQ ID NO: 945128 - DNA, 601 bp, Homo sapiens
aaggtaatttccgggcattgccatgccatctgtaaactgtcttggtgctggcaggagtgccttttagcaagctaatgaaatataatttgtggataacaaacaatgaggacaactagaggttgctttctttgccgtcttcgttttagcttgtttattttctgcatttgaaacaggagttttcccttttcctcttcacagggcaagtgataggggtgtggctcacttcttcagtgctcccctgctcaaacccatagggagagcgtgcagatgggcatgtcatggagctcaaaccccatggcggtgtctagggtttagtgtttacagctcctgaagccctagtgggtgtgtgttaccttgtgctctcttagttttgccatctgcaggtggcttgtgttaatcggttcaattagaccccctgccttactgcaaggacagagagctttctgtaccctgggttcttgccttggtgtatcagaaaaatcggatcacatgtggkcttcaagaatgggtgtaaggttttactgaatggaggcgggtctcagcgaggtggatggggaggtcagaagggggatggagtgggaagctggtcctcccctggagc

SEQ ID NO: 945129 - DNA, 734 bp, Homo sapiens
ctcaggaggctgagacaggagcatcacttgaggccagcagttcaagaccaacctaggcaacatagcaagatctcatcactacaaaaaatatgtatttttaaaatagctaggcatggtggcacacacctttggtcctagctactctggaggctgtgtcaggaggatgacatgagcccaggaattcaaggttacagttatgttcacaccgctgctgtactctagcctgggtgatagagtgagactctgtctcaaaaagaaaaaaaaaaaaagaaaacccaaacaacacaatcttaaaataagcaaaggatttgaacagatatttctctagagaagataaacaaatgaccaatgaacatgtgaaaagatgctcaacatcacaagccatttggaaaaatgcaagttaaaacagcaatgacgtatgaactcataccaactaggatgactacagttaaaacaaaaataaaatccagaaaataacaagctttggcaaggatgtgaagaaaatggggccctcataccttgctggtggtgatgtaaaatggtacagccactgtggaaaacaatttggccattcctaaaaaagcaaagtgtaaagtttgcatgtgacccagcaattccaagcctaagtatatacccaagagaactgaaaatatgtgctcacacaaaaacctgtacatgaatgttcatascggtattattcataagagcaaaaaagaaaaaccaacccgaatgtc

SEQ ID NO: 945130 - DNA, 510 bp, Homo sapiens
ttgctcagggtttgtttacgtaagagagagtttctcagaaaatgatttttatatactaaagactttaccccacctgagaggtctttattaaacattatctttttttaaagtaagcataatwatctcagatctattacttcatatgacttttgaagctcctgccaaaaagaaagaaatatgcatcataagaatctgaatgttttgtagttaatttcccactacattctcttaggaagggaataagtctgtagacatctggcttttgaaatcatcacaacaaaataacatgctttcttggcttatctcttaattaatagcatcttgcctttattgcagaccagttcattctacctgatttacaaacttaactggcacacacctgatattaaaaaatcttatcaatatttctcacaactctgagagatcagatgcaatgagactcagcacagcatgaagaagatgccattgagcaaaataccagagaaaaaaatgagatttaacaaaatacag

SEQ ID NO: 945131 - DNA, 860 bp, Homo sapiens
taaactctatgtgcctgtttcctctcctttaaaacaggaatcaaaacggcaccaacctcatagaaccactctgtgagaattacatgagttgatttaagcaattagaatacccaatactcaataaatgcttgttctcattattattatcatttttgcatcaatactgggcttatggtgaagacgaagttgacaattaagtactttcatgtcctattctttctaatcaaagggggaacaaaaagatcttgtatctctctgcatgagttctgtgtacaaccttcacatctgtgaaccctcaagtccctgcccttattcccaaacctgtggattcaggcagattcacaagtactggattctctatttgcctgcatacaccatccccaaggatccacagatttctaaatgcaccaggaaaacataaactggtaaaaatgttttcatgcctttgaatattaacaaaaactcattttccacccaccttcccacacccggaagtcaaaatctactttaggaatcaaaagctagtgaaacaacatattcttgcttttttagtattttagatgattctttttaagagctcacaggtataaagagtccttacgtgctgggaatattttttctgtagtcgacaacaatatctgatgaagatggtaatccagaaaggaaatcatatcacccactgttttcgtcatccatctaacatctaacccaaaagctttaagatttcttttccagtaatttttttccctcaaactttctattttcttctcgagatccattttattgactaactccaaacatgacctctaaggcattccctctattcaggggtccatctgacrgtattcatcagtgcccaa

SEQ ID NO: 945132 - DNA, 593 bp, Homo sapiens
gtgggtctctcaaaatctacggaataggtaacagaacaggtaagaacaaatatgggtaggtgtcaggtaacagtttcactcatcaagtgccagcttggagatgaagttcgagawaaagactgttcaagtccatccaagccctgggatgtgggtgtcctgctggccggaccaagctacctgcatgggggctgaatgaggcaggaagaagatcataagagaggagcactgttctaccctctaaaatttccagccatcaccaaccactgtgtcttctttctaggctggtcccttttgaggtcctgaaattgcctctctgtctctggctacaatatccccagcctccttcatttactcactccctgctctcgctcccagctgaagaatttcccacatggaagcccgactgcttgccctggagctctgggcccaggaacccagccttccatataaggcccacatcacctgtgtcccaaagggaacctattatatcttgccacagtatctctcttgccccttcccctatttgttccctgtgacttagtagttgcaagaaaataaaatccctgccaggcacggtggctcacatctgtaat

SEQ ID NO: 945133 - DNA, 593 bp, Homo sapiens
gtgggtctctcaaaatctacggaataggtaacagaacaggtaagaacaaatatgggtaggtgtcaggtaacagtttcactcatcaagtgccagcttggagatgaagttcgagataaagactgttcaagtccatccaagccctgggatgtgggtgtcctgctggccggaccaagctacctgcatgggggctgaatgaggcaggaagaagatcataagagaggagcactgttctaccctctaaaatttccagccatcaccaaccactgtgtcttctttctaggctggtcccttttgaggtcctgaaattgcctctctgtctctggctacaatatccccagcctccttcatttactcactccctgctctcgctcccagctgaagaatttcccacatggaagcccgactgcttgccctggagctctgggcccaggaacccagccttccatataaggcccacatcacctgtgtcccaaagggarcctattatatcttgccacagtatctctcttgccccttcccctatttgttccctgtgacttagtagttgcaagaaaataaaatccctgccaggcacggtggctcacatctgtaat

SEQ ID NO: 945134 - DNA, 616 bp, Homo sapiens
tcaagtgattctcctgcctcagcctcccaagtagctgggattgcaggtgtgtgccaccatgccccagctaattttggtatttttagtagagayggggtttcgccatgttgggcaggctggtcttgagctcctgacctcaggtgctgggattacaggcatgagccgccgctcccagccacaaacacgcctctttattattattattattattttttgagacggagtctcactctgtcgccaggttggagtgcagtggcgcgatctctgctcactgcaagctctgcctcctgggttcatgccattctcctgcctcagcctcctgagtagctgggactacaggcgcccgccaccacacccagctaattttttgtatatttagtagagacggggtttcaccgtgttagccaggatggtctcgatctcctgaccttgtgatccacccgccatggcctcccagagtgttgggattacaggtgtgagccaccatgcccagcctccgagacccttcttagcagaagtgatctgggagcaggaagccccagaaggggtgtgtccccaaagcaaccctgaagcaagcgtgcaggcaacctgagaagggctgtgggtctgggcaagg

SEQ ID NO: 945135 - DNA, 433 bp, Homo sapiens
acaaacacgcctctttattattattattattattttttgagacggagtctcactctgtcgccaggttggagtgcagtggcgcgatctctgctcactgcaagctctgcctcctgggttcatgccattctcctgcctcagcctcctgagtagctgggactacaggcgcccgccaccacacccagctaattttttgtatatttagtagagacggggtttcaccgtgttagccaggatggtctcgatctcctgaccttgtgatccacccgccatggcctcccagagtgttgggattacaggtgtgagccaccatgcccagcctccgagacccttcttagcagaagtgatctgggagcaggaagccccagaaggggtgtgtccccaaagcaaccctgaagcaagygtgcaggcaacctgagaagggctgtgggtctgg

SEQ ID NO: 945136 - DNA, 639 bp, Homo sapiens
cctgggccgctgctctcagggacaggtgcccggcataggcggggaggcgctctctctcggtttacttttctacagcatacatttctggattggtgaartattatctttgtctttagagggaacaataaagctattttcagcttgggaacaaatgcgtccaatggtaaataaacccccaatgccggtgctgggcaggcgggtgctgtcgtcacagtggaggccgccagccttccttcccaggaagggcttggtctcagggtgggggcacagaaaggatgtacggagcccaggagcagaggggcaggaggggaaaggagacagggagcatcctggaatcacgaggctggacagacccgcaggttttacggatccagacactgaggcccagagagggtgagcaccctgccccaggacacacagcctgcaggtgcctggtcccacttcctggagctctgccgggcaccacggctccagggagtgctccggtgttttcccagcacttggcaacagatggctccaactctcacccacggacgccaaacattttccctggttaccctgctaatttgctcacagcctcctcttgtaaatagagagtacaaaggctcctccgagtagtgtgtatgccgggcagacgct

SEQ ID NO: 945137 - DNA, 444 bp, Homo sapiens
acaataacgagagtcagcgtgcatttggaagcttcgaagacagacactgacttctctttagctatccaagtcctagattgtatcttcttccaagagaaggctgtttgcctacactgaaaatctgttgtgtagtgccatcaccttcattgattgtcttagctagatcttctggataacttgctgcagcttccaacaaagcatttgctgcttcaccttgcacttttgtgttatggagatgaattctttccttaaacatcatgaaccaacctccgctagcttccaacttttcttctgtagcttccccacctccctaagccttcatagaattgaagagagtcagggccttggcttgagaggattaagccccaattaagagaattaggctttggcttaagaaaatgttgtcgctggtttgatctkctatccagaccatcgaaactttct

SEQ ID NO: 945138 - DNA, 628 bp, Homo sapiens
gtgccatcaccttcattgattgtcttagctagatcttctggataacttgctgcagcttccaacaaagcatttgctgcttcaccttgcacttttgtgttatggagatgaattctttccttaaacatcatgaaccaacctccgctagcttccaacttttcttctgtagcttccccacctccctaagccttcatagaattgaagagagtcagggccttggcttgagaggattaagccccaattaagagaattaggctttggcttaagaaaatgttgtcgctggtttgatctgctatccagaccatcgaaactttctccctatcagaaataaggcttttttaaaatcactcatgtgttcactggagcagcacttttcatttccttcgtgaacttgtcctttccattcacaacttggctaactggtgcaaaaaagtctagcttttaacctatctcagcttttaacgtgccttcctcgctgagcttaatcatttctagcttttgacttaaagtgagagacatgtgactgytcctttcacttgattacttaaacaggccattgtaggattattaattcacctaatttcagtattgctgtgtctcaagaaatagggaaacccaaagacaggaagag

SEQ ID NO: 945139 - DNA, 587 bp, Homo sapiens
gtcacctccaccaccgcagaaggcccaagagcctgcagacatacatgctgggtgagaaggaagttmcccagcaagggtccagggcagcaggctgtgttagggtccctggaaagcctccctgtatcctccagccagaatgcatcatcctgtccccagagtgcctggcctgctccacagtcacctgtctggccccaaacccaaagaagacccagacaacctctccctactcccagcaggacactggcctattttgcttgtgggcatctagaaaccaaactaaccgaactagttgctcacacgcagcactcaataagtattcatttacaaggagaaggaaagaggcagggggaagttcagctaagaatgttttacataaccagttccataaggcaaagaatagataaagcatctaagacgagatacaggccctcaaagtgtgtgcaatctcatagaagagtgggctggaaagaggggaaaagataacaatgcaataacaagaaaacaagcaccctgattagaaaatgggctaaggtggccaggtgtggtggctcacacctgtaatcccagcactttgggaggccaaggaa

SEQ ID NO: 945140 - DNA, 587 bp, Homo sapiens
gtcacctccaccaccgcagaaggcccaagagcctgcagacatacatgctgggtgagaaggaagttacccagcaagggtccagggcagcaggctgtgttagggtcsctggaaagcctccctgtatcctccagccagaatgcatcatcctgtccccagagtgcctggcctgctccacagtcacctgtctggccccaaacccaaagaagacccagacaacctctccctactcccagcaggacactggcctattttgcttgtgggcatctagaaaccaaactaaccgaactagttgctcacacgcagcactcaataagtattcatttacaaggagaaggaaagaggcagggggaagttcagctaagaatgttttacataaccagttccataaggcaaagaatagataaagcatctaagacgagatacaggccctcaaagtgtgtgcaatctcatagaagagtgggctggaaagaggggaaaagataacaatgcaataacaagaaaacaagcaccctgattagaaaatgggctaaggtggccaggtgtggtggctcacacctgtaatcccagcactttgggaggccaaggaa

SEQ ID NO: 945141 - DNA, 716 bp, Homo sapiens
ccataaggcaaagaatagataaagcatctaagacgagatacaggccctcaaagtgtgtgcaatctcatagaagagtgggctggaaagaggggaaaagataacaatgcaataacaagaaaacaagcaccctgattagaaaatgggctaaggtggccaggtgtggtggctcacacctgtaatcccagcactttgggaggccaaggaaggtggctcacttgaggtcaggagttcgagaccagcctggccaacctggtgaaaccccgtctctactaaaaatacaaaaattagcctggtgtggtggcacacacctgtaatcccagctacttgggaggctgaggtaggagaatcactaaaacccgggaggtggaggttgcagtgagccaagattgcgccactgcacctcatctctccagcctgggcaacagagcaagactccatctcaaaaaacaaaaaagaaaaaaaaaaggaaaatggatttcaaaaggatttcaaaagaagacatataatgcttggcacagtggctcacacctgtaatctcaaaaatttggggaggcctagacaggaggatcacttgaggccaggagttcaaggctacagtgagccatgatcaccccactgccaccactgtcacctccaccaccacagaaggcccaagarcctgcagacagacatgctgggtgagaaggaagttccccagcaagggtggcttacacctg

SEQ ID NO: 945142 - DNA, 586 bp, Homo sapiens
tgaaaccctgtctctactaagaatacaaaaattagccgggcgtggtggtgcacgcctgtaatctcagctactcaggaggctgaggcaggagaattgcttgaacccaggaggcagaggttgcagtgagctgagatcacaccactgcactccaccctgggcgacagaaaaaaaagttcttctgacataccagggtgtaaatgtatcactagagcttaaatgaacagttattgtataggctaaggcttttggggttctaactttttaatgtaagccactagccttttgtcaaaacttatcaatctctgacacaaaaatgtatgaggggaaacaagagggggaaaaaggaagaaagaaaggcagtgtgcaaacttgcttggcaacctgatgcttcagaataggatttggagcccacgggtagccacctctggtagtggggataaaagtctagcaattgtgtcaatcagtaggtcattatctactgttccyactcctttcaaaaaatgaagaagaaagtaagaaagaaaaagagagacaaaattagattctgttttcacatacattttataagaaactgtgttgtattttt

SEQ ID NO: 945143 - DNA, 632 bp, Homo sapiens
aaatataattattttgagaaaagattcccttcaactcagctccactgagatgcacatgaccctgttttgggcagagtgtaagacaagctcataattcttcaaattatcttattttatttttgcttyctgtctgtttagtaactaaagtaacagatattaactataatttagaaaataatcagaaaatcttaacattcattcatttgtcaagaggcctatgttacataatgtatcctacaagtcatcctcttatctctgggcaatatacaactctgaaattcataatgtgattagcaggcagacatggtggatgagagtgacgggcatgttgggtgcatgaaggagttaccatccactgtcatctgccatgattttatagcaggtaatatatgcatccataacatttctccagtagaaaggaagctggtgaaagtaagccatcacttggtttattagaacattgataattcataatcttcctatgtaaaatgaagtaaaatgaaaatagaagttcaaaagtgacactgaaagtggcagagattttaaagtgataagactgaaaaattgcagccaggtgagtcttcaggggttgacagtagattagtataaaacagctcatgtctcaagatacc

SEQ ID NO: 945144 - DNA, 757 bp, Homo sapiens
tgagctggtggttatcttcatgtttttctccctgtggtcacctttttggaaatattgtacttcctaagctaactgcacttacgaggtaatgattggtgtgagtttatagtctcttttttgtttgtttgttttttgagacagagtctcattctgtcacccaggctggagtgcagtggcacaatcttggctcactgcaacctctgcctcccgggttcaagcgattctcctacctcagcctcctgagtagctgggatgacaggcacccgccaccatgcccagctaatttttgtatttttagtagacaaggtctcaccatgttggccaggctggtcctgaactcctgacctcaagtgatccacccgcctcggcctctcaaaatgctgggattacaggcgtgagccactgcgccccggctcgctcccttttattttattttttttttttttgagacagagtctcactctgttgcccaggatagagtgcagtggtgcgattttggctcactgcaacctttgcctcccggattcaagtgattctcctgcctcagcctcctgagtagctgtgattacaggtgcccaccaccatgcctagctaatttttgtatttttagtggacggggtctcaccgtgttagccaggctggtcttgaactcctgagctcaagagatccgcccacctcggcctcccaaagtgctgagattacaggygtgagccaccacgctgggccctgcagtctcttttcactgggtactgcggtt

SEQ ID NO: 945145 - DNA, 639 bp, Homo sapiens
cttttgtatttttttagtagacatggggtttcaccatgttggccagactggtcttgaactcctggcctcaagtgatccacccacctcagcctcccaaagtgctgggattacaggcgtgagccactgtacctggccaggtatgtccattttaaagttatataaatacagccaaactggctgcatcgaggctgtgcttatctgcatctcactggcaagtagatgtatgagggcccattgccctcctctctcactgttgaaaaatttcttgatatctgccgatctgaaaggtaaaaaatggtatttcattgtggtgctgatttgcattttaattttacttgtagatttttaaaataacacagttacaagattcaaaatttgaagagtacaagagtagagacaaacccccatccatgtgtctccccagtgcccagttcctgtccccaaacaaaatcaggcctccatttgcctccatttctccctcctatgcctatggtcaaaacctgggccacaccattatccttagctgctccatctctgaaatattaaattcaaacattctactctgatctcgccactgtcctattaactaccaagcacctgaccctctcttgaygccccacctgccctttaccttacctt

SEQ ID NO: 945146 - DNA, 587 bp, Homo sapiens
ttttcctaacttttatgctctgctttccttatgaaactgaatgcctttaatagtacccaagtcaacccttgaacactttgctgctgagaagtttcatctgccagagaccctaaatcatctttctcaagttcaaakttccacaaatctctagggcaggagcaaaatgctaccagtctctttgctaaaacttaacaagagtcatctttactccagttcccaacaagttcctcatctccatttgagaccacctcagcctggaccctattgttcatattgccatcagcattttgggcaaagtcattcatcaaatctctaggaagttccacactttcccacatttttctgtcttcttctgagccctccaaactgttccaacttctgcctgttacccagttccaaagtcacttccacattttcgggtgtcttttcagcaacacctcactcctggtaccagtttactgtattagtctgttttcatgctgctgataaagacatacctgagactgggaagaaaaatacatttaattggagttatagttccagatggctggggaggcctcagaaccatggcaggaggcaaaaggcac

SEQ ID NO: 945147 - DNA, 587 bp, Homo sapiens
ttttcctaacttttatgctctgctttccttatgaaactgaatgcctttaatagtacccaagtcaacccttgaacactttgctgctgagaagtttcatctgccagagaccctaaatcatctttctcaagttcaaagttccacaaatctctagggcaggagcaaaatgctaccagtctctttgctaaaacttaacaagagtcatctttactccagttcccaacaagttcctcatctccatttgagaccacctcagcctggaccctattgttcatattgccatcagcattttgggcaaagtcattcatcaaatctctaggaagttccacactttcccacatttttctgtcttcttctgagccctccaaactgttccaacttctgcctgttacccagttccaaagtcacttccacattttcgggtgtcttttcagcaacacctcactcctggtaccagtttactgtattagtctgttttcatgctgctkataaagacatacctgagactgggaagaaaaatacatttaattggagttatagttccagatggctggggaggcctcagaaccatggcaggaggcaaaaggcac

SEQ ID NO: 945148 - DNA, 570 bp, Homo sapiens
actttcctggactgagtcctgattccaacacatcctttgagttggagacgtcatagtacagaagacgctgtggggccttcccctcctggtgtaggtaccagtggatgtagaaggcatttattacagtaaggtcacaagtgatttcagcagatgacctagtcggcctcgtgactgacttcgttcccccttccaagttggaagatttctgactggctgcaatgggaacaacacaaaatttaatgaggtattcctttgtatggcacccctttcaaaagaagtaaacaaaacaaaacccaacctgtgagcctctctgtaggcagcgtactcaccaggagacaggaaagctagaagcaccagtagggcccaccgcatgccttcctctcgggggccttggaaggaaagggaccagatgaggaggagcagaagatcctcttaaaactccggccccactcaacaaggaagtgatccctagcacagaagayagtaggaggagctggtcttcctgagtcacaggcagagagaagtgactgaagatgtgtcttaggggactcccaagccttcctcccagaa

SEQ ID NO: 945149 - DNA, 602 bp, Homo sapiens
agatggctgcttgaagtaggtagtattaaagcccaatgttgagagatggatggaaaagtgaaaggtagaaggaaaggaaaaaagggcagttaattaagagtgacattttgcaagaatagagcagtgaaaacacaagatatatttggggaacagtgaggagtacgagttagcctgagtatacaggagttagagcctaagcctactttctgcacacctctaaggcaggtgtcctggggccaaaaggtgttcagacttcgttactgttgtagtcttttctgaaaacaaatctttagcaacaatgggtataagaattaacacaatattgaaatgcttttttcaatcctttttcccgtaatttaactcttagctaccaaagcttgtattttcatctgcaagtatagtaagaactatacagaacatctatctctatccattagcatcttttgagttcttgttctgtgtaaattatggtaggaagaaaaaaggacttacataaatatgcaaaaacattcactgtkgtgcaagtccctatcgtgttccaattctggaggtggggggaggaggcagagacaggggaaatattaataagataaagctcactc

SEQ ID NO: 945150 - DNA, 811 bp, Homo sapiens
cattttcattttttgtgcaattatgtcctcaggtaattacattacatatggtacaaatgacaatttctaaatataacaaggtataaactcttgtttatatctttagggacaattttaccaatgatcagaaataaacaagactttatataagaatgtggttattggcaatcctgattccctatacttataagtgaaatttgtttctttacaaatgattttttcattgcattgctaactatcctcaaactcatccagtctccaatacttcttgcaacagtatatccaaagagcaatttaggagggcaagcacatttccaggagacctcaagaagctgaaaaaaagatgctgggacaaagaagatatcaagtgaaatcagaaccttaaagagactgattataaaaagccaccttaaaccacacacaatccaaagttatgtaacgttaataagctatatccaagaaaaactccacaggagaccaggcagataaactacaaaccatttagattgggtaagaatctgcatgagacacacagacaaagcattttgtaagtggtaaacatgcatcgatcaagtgaagggtattttggttttcccaatttccattagcgatttgaggcaaaatattaaattgatcaaataaaaatttaaatcttttaggaatggttgtcatttattttattaaaattctagccagttctggaaatggtttaatagtttcctaagatttccaagcagaagtacgatgataaaatatgactattcctaatcacaaggcttgaataagcattkctaaacaggcaaatttaatt

SEQ ID NO: 945151 - DNA, 588 bp, Homo sapiens
atttggaacatttgtttctcttcccatctgtgactaagtactacacatrtatgttttgatatttatgaaaccattgagtacatagttacactatgaatagttacgactggaaggtattgagaaaaatgacaaaattccttgttattgataattaacaaaggaactaatcctttcaagggtaaagctacttagacctggctcacagcacttatgctctaactgattttctttaaagaaaactcctgaagagttttctaagaacaagtgaagcaagattggaccctgagtacggaaagtgggcagctaaagcttctttcctcaataacaagtttaagtgccttatttatttttgtattattaagtgacacttgtgaaaatactttgttgagtaatgatgctgtggcaaaactaaagtttatttaggacactgctccgcccaaggtgagcaattaaagcaggtatgtaaacctgctcccctgggctcctccactcaaccacttaagtaagtagtgctagaaatgaaaaagggtgtggggcaagatacatggcatggctgggggtgagaagaagttggaaggggaagaggag

SEQ ID NO: 945152 - DNA, 593 bp, Homo sapiens
gtaaagatttttgccaataaatcaaatgtaagtacctctctgctcataataattcagactcaaggaaaagcaaaaacttcagaaaaatagccagcatttcatatccccctaatgttttctcttgccccggttgtggtgagaggcctggcactggttctggagtcatcagtaaccatactaaaagcttcacttcccagaaattaaagacaaatcacagctcttcctcttctgaaccaagtcaatgaactggaaaggcacagacatgaagtaaagacctggaggaaaattgggatagtgatatggctccgagatcagaaacacagtcttgatttgccaggtcctttatcttcagcaagatttttaataaaaatggaatagcttcttacacgtttaactgagccttcgcttgtacaaggccctttctcatcgatcatattttaaactccatggcctgtgtggtagcatggtttgtttcgtctgtttgttgcagatgaggaawctggggcacagagtggtcaagtgccatgattgttggtcacagctggttagaggcaggtggaggaatggaggcctggccttctattaatatcagc

SEQ ID NO: 945153 - DNA, 585 bp, Homo sapiens
aaagggttgaagcgggatcccagttcagaggctaatacagtaatccagaggagagaggatagggctatacaaggctagtagcaattgtagaaatgttggatgctggttatgtttaaaatgtagacagggcagcatatgctggtgaatgtatgtgggatatcaaagaaagaaggaaatcaaagatgactgcaaaaatgttgcccaagcatctggaagaatgagtggcaatttattgggatgggaaaaacaatagaaggatagggctttgcttcagagataggaagttcaattttaggcatgtcgtgattcaaattttaataaatatccaagaaggtactattgagtaggtagttggaaatacaaatctggagttcagaggaaaggtccgggaatagatatatacatttgggagtagctgatgggtagatgtgttaaagacggaagaccacacaagtaaatgcagacaaagaagaggccaggaagatgtgaaggaccagcaaaggagaagaggtaggtaatgaggwaaaaagggaaccaaaagagaagagtctgaaggcaagtgaaatcagtgtgtcacggtgggaa

SEQ ID NO: 945154 - DNA, 585 bp, Homo sapiens
aaagggttgaagcgggatcccagttcagaggctaatacagtaatccagaggagagaggatagggctatacaaggctagtagcaattgtagaaatgttggatgctggttatgtttaaaatgtagacagggcagcatatgctggtgaatgtatgtgggatatcaaagaaagaaggaaatcaaagatgactgcaaaaatgttgcccaagcatctggaagaatgagtggcaatttattgggatgggaaaaacaatagaaggatagggctttgcttcagagataggaagttcaattttaggcatgtcgtgattcaaattttaataaatatccaagaaggtactattgagtaggtagttggaaatacaaatctggagttcagaggaaaggtccgggaatagatatatacatttgggagtagctgatgggtagatgtgttaaagacggaagaccacacaagtaaatgcagacaaagaagaggccaggaagatgtgaaggaccagcaaaggagaagaggtaggtaatgaggtaaaaagggaaccaaaagagaakagtctgaaggcaagtgaaatcagtgtgtcacggtgggaa

SEQ ID NO: 945155 - DNA, 429 bp, Homo sapiens
cctattgaaggcatttttaaagaaactcaagattatattgctacagaaaataatggcaggccagtttacattaggttctagttgtgaaaaaaattagagtctggaatgtctattttattcacaagtgccattttcaccatgtattgcaaataaactaaagcttaatgtatcatcatactataacataaatactagtaaaaatctccattttagatttaatatatttctaaattttagaattcctcatgtactctaaaagctatttgatgtaacttttgctggcaaactggactaaataattttgtgactaacagagattrtgcttctccttttatcctaaatttataagcaacaatttttattcatttccagatcagttaactaaaatgtttgttttcaaatccacaggaaaggaaaagaaaaaaataa

SEQ ID NO: 945156 - DNA, 609 bp, Homo sapiens
cgctggaagttttaggattgacatttttggctcaagaactcatttgcgactcataatggccaccacaagataggaacattttaaattatttgattcaatgtttttacattacaattaagtaaactgaatcctgacatatttagatggcacgtctgggacactacatccacagaatgaagtggaaaatccatctcttcagctctcttctcctgggcttctcattcaaacacctcctcctgtaaattagctactttttctatctgttgaatagggcccagtttaagagtttaatacctgtttgtccaatccattctctgacttaggtgttctccttagtgaatagagctgaggacattttaattaatttattatgtcccttcaattaggggacccaattaataattgaaatgggtttttaattggtttatatcctctagggtatcatattaataacataaataaactaacaggtttgcattgaattaggcttcatctatatgcatatctgctgcctcccaatacattatctattctyaacctccaaaattgagtgcaactttttaaacaaagacattctgatgaactagtttttgttgtggttgttgttcc

SEQ ID NO: 945157 - DNA, 596 bp, Homo sapiens
tattaacatataagctccgaggcaatacagctttctttttcttttcttttcctttctttctttctttctttttctttctttgtttctttctttctttctttttctttmttctttcattattttctttcttcttctttcttttttttttttttgacagggtctcgctgtcttgccctgattggagtgaagtgatataatcatagatcactgcagcctcaaacttctgggctcaagcaatcctcccaccttagcttcccaagtagctggggctacaggtacgtgccactgtgcttgcctaattttcgaatatttttgtagagacggaagtctcaccatgttgcccaggctggtcttgacccctggcctcaagtgatcctcctgcctcagcatcccaaagtgctgggattaaaggaatgagccagcatacctggctacaatatagtgtaaaccaaaaataaaaatttaagcccctcaaccatctgaatggaccccagttcatggcccaggaaattccaaaatttacctggaaaactagttcaagcaatgataagaagggggagttggacatgcttcattattccctcttcccttctaca

SEQ ID NO: 945158 - DNA, 524 bp, Homo sapiens
aattaaagctgtgatgagagggaaagtcatagcattaaatgcatacatttgaaaagaggaaaagtctcaattaattatctaagctcccacctcaagaacctagaaaaagargagaaaaataaactaaaagcaagcgcaaggaaggaaataataaatataaaagcagaaatcaatgaaattgaaaacagaataataatgaagaaaacaatgtgaaatagtgaaacaaagagctggttctttgaaaatataaatgacagtgaaagatcgaatgctttcccctgaactggaaatactaaatctcactgcttactctacacagtgctcaaagttttaaccagcacaataaggcaagaaaaaaaaataaaggaaaggaagaaataaaactgtctctgtttgtaggtagcatgattatctacatagaaaatctcaaggaatctatgaatacaaacaaacaaataagcaagcaaactctgagaactaatgaatgagttttgaaagattggaagctacaagataaacataca

SEQ ID NO: 945159 - DNA, 576 bp, Homo sapiens
gagggtgcaagccataaatctcagcagcatccacttggtgctaagtctgtaggctcctagaatgcaagagcrgtggaagctgccaagcctgtagatttcagaggatgtattggaaagcctgggtgcccaggcagaagccttctgcagggaaggagctcctacagggagcctctactagggcagtgcccaggggagctgtgggaacaggagcaccacacttcagacaccagaattatatagccactggcaatgagccacactagcatggaaatgctgcaggtattagattccaaactgtaaaagcagcaatgtgggctgcacccagaaaaactgtgggggcagggctttccaaggacttgggagcccacttctcatatcagtatgcccaggatgcaggacatgggtcaaagaagattattttggagctttaagatttaatgtctgccctgctgggttttagacttccatgaagactgcttacccctttcttttggccaatttttgtctttgtgaacgagaatgtttacctaatgcctatacaaacattgcatattataagtagatgaattgcttttg

SEQ ID NO: 945160 - DNA, 606 bp, Homo sapiens
ccttgtcccgttgtgttaaagacatagtaggatttgccatcatgttttttataatattctttgcttatgcccagttaggatttcttgtttttggatcacaagttgatgacttttccacttttcagaattccatgtaagctcttagtataaatgtaattatatcttctatattttcttacaaaaaaaattggaaaggtctaaccttctatgataagtagtaatataagctttaatatatttaaacttagtttgatattttctttttctttttatttttctggagacagggtctcatagctcactgaagcctcaaacttctggactcaagctatcctcagcctcccaagtagctaggactacaggtgtgcaccaccacgcttggttgattacatttttattattttttggtctcaccatgttggccagggtggttttaaacttctgggttcaagtgaacctcctgcctcggcctcccaaaatgctgggattacaggcatgagccaccagcctggctgatattttcactgatggctaaatatctgtcacattcaaattaggatttgayattgaaggagccaaatgggtgacggtgtccatttttaaggt

SEQ ID NO: 945161 - DNA, 714 bp, Homo sapiens
gagtgcagtggtgcgatcttggctcactgcaacctccacctcccagcttcaagtgattctcctgcctcagcctcccgagtagctgggattacaggcatgcaccaccacgcccgggtaattttttgtatttttagtagagacggggtttctccatgttgaccaggctggtctccagctcctggccttaggtgatccgcctgcctcagcttcccaaagtgctgggattacagacatgagccacctcacccagcccagataatccttttacacactgtttaaaattttcaattttcctggagatagggtctcctgtcgcccagcgggtaaatgcagtggtgcgattatagctcactgcagcctcagacacctgggctgaagcctgattcttgagcctcccaagtagctgggactataggtgtgagccatcatgctttgcccttttttttttttttttttttttttgaggcagagtctcactctgtcacctaggctggaatgtagtagtggcacgatcatagctcattataacctcaaactcctggtttcaagcaatcttcccgagtagtcaggactacaggcatgccctgccatgcccaactaattaaaaaaaaawttttttttatacacatagggtctcactatgttactcaagctagtctccaattcctggccttaagagattttcccaaagcattaggattataggcatgagcc

SEQ ID NO: 945162 - DNA, 631 bp, Homo sapiens
aagcagtactaaggctgggtgtggtggctcatgcctataatcctgtagggaggcaaaagcgggaggattgctggagcccaggagttcaagaccagcctgggcaacacggcaaracctggttctccacaaaaaggaaaaaaaaatgctaagaggcaagtatatagcaataaactcctacatcaaaaaagtagaaacatttcaaataagagattgggggcagtggctcatgcctgtaatcctagcacttttggaggccgaggtgggtagattgcttgagaccaggagttcgagaccagcatgggcaacatagcgagaccctgtctctacaaaaaatcagaaaattagccaggcgtggtggtgcaagcctgtagccccagctactcgggaggctagggtgggaggattgattgagcctttgaggtagaggttgcagtgagctgagattgtgccattgcattccagcctgggtgacagagctagaccctgtctcaaaaaaagaaagagagaaagaaagagaaataaataaagagagaaagaaagaaaagaaagaaaacaaacaaggaaggaagaaagaaaaagaaagagaaagaaagaaagaaaaagaaaaagaaagaaagaaagacttcaataa

SEQ ID NO: 945163 - DNA, 644 bp, Homo sapiens
aatgtccccgcctagtttckacaataagagtatttttaacaggttgaattaaaacaaaggtttaacgctgtgagatgaatttacacatcacaaagcattttcacagatagcttcttcctagtttctattttgtgatattcagtttctcactacaggcctcagtgggttaaggaatgtcactttgttgtttccagagaaagagtgtttttaaccccttgaatcaaagcgaaggtttaactctgtgagatgaatctacaaatcagaaagggttttcacacgtagcttgtttctagtttttatccggggatatttggtttttcacaataggcctcaacgaactcagaaatgtccctttgtagattctacaagaagaggacttctaatttggtaaatccaaactcaggttccatttggtgagatgcatttacacatcacaaaacattttcacagatatcttgtttctagtttttatcatggcatattcggttttatattgtaggcctcaatagactcagaaatattttttcacagattctacagaaaaagtgtttactaactgttgaattaaaacaaaggttcaacactgtgagatggatctgcacatggcaaaacatttttacagttagcttgtttctaatttttaa

SEQ ID NO: 945164 - DNA, 561 bp, Homo sapiens
tttctttataatttaatcttcgtaggttttatgtgtccaggaatgtttccatttcttctagggtatcaaatttgttggtgcataatagttcctaattgtctcttataatcctgtgtatttgtgtggtatcakttgttacgactcctttttcagctttgattttattagcttggtgcaaaagtaattgcagttttgtaccatgaattaaaatgatttaaaaatcattataactatgctcaaacacatctttagtaatcaaaatgggaaccattacaattaacacatttttgccaacaaaaaataagtttgtttatttctgtagtaaaaaatttgtgctttggaattccacgaactcttggaaagcattttctacatgctgctggttttagaagcgttttccctgcaaaaggtagttgagattcttgaagaagtggttgtcagttggtgagaggtcaggtgaatatagcagatgaggcaaaacttcatagcccaattcattcaacttttgaagcattggttgtgcagtgtgcggtcacgtgttgtcatgaagaagaatggggc

SEQ ID NO: 945165 - DNA, 843 bp, Homo sapiens
cttttaaagatcaaatggaaactgcacacagcctactgaccacagagttcagggaaggcggaatggatgaaccagacactcaaacagctactraaaatgttttgccaggaaactcacttacgatgggatcaggtcttgcccatggtcctcctccaggtcaggtgtacacttacagaacaaattgggtattcaccctatgaaatattatttggaaggccacccccaatcattaatcaaattagagggtagttaaaggagttaggagagctaacccttagaagacagatgcaggctttaggagtggcaatgcaggaggtgcaaggctgggtaagtgaaaggatacctttaagtctaacagacccagtgcatccacataaaccggggattctgtctgggttaaaatgtggaatccaggctgggcctggtggctcacacctgtaatcccagcactctgggaggccggcgggggggagatcacgagatcaggagaatgagaccatcctggctaacacggtgaaaccccgtctctactaaaaatacgaaaacaaaaaattagccaggcatggtggtgggtacctgtagtcccagctacttgggaggctgaggcaggagaatggcatgaacccgggaggcacagcttgcagtgagccgagattgcgccactgcactccagcctgggcaacagagcgagactccatctcaaaaaaaaaaaaaaaaaaggtggaatccaacaaccctggggcccttataggatgggctccatattgtgatcatgtctactcccactgctgttaaagttgcaggtgtcacaccttggattcaccatagctggctaaaaccagc

SEQ ID NO: 945166 - DNA, 563 bp, Homo sapiens
tatttgaatggctatttctcatggataacccaaaaatcagcagcttggaaaaatttgagccccaaagtcacaacccactgtggaagaaatagcttgaatatgactctcttcaatcactagtctaagcattgtcgatgattaagagctttatctccccttcaagcaagagaaaaagaacgtgacaagttggaagaatgtagcaagatgtcagttgccattctgaatgctctggtttgggttatgactggtcattaattttgttgttgcctgaagatacatctgctaaagtgttattttcagaaaatcactgttctcatctccaattctttattccccagggcaatttaagtatttttaaagaatatatttgtaccaagaagagagaaaaaagcaaccatagaatagggtcgttgtttcagtttgggggaccagagcttccctaagtggatggaggtgtttaaaggactctgcacatttccaattatcaygctgctgataaagacatacctgagattgggcaatttacaaaagaaagaggtttaattgtattcacagttccacgt

SEQ ID NO: 945167 - DNA, 604 bp, Homo sapiens
acccatccctctttgtttggttttaatatatgtcttctaataactccgtttgtctcttctcaccttcaggccatcaaactccaagcgatcatgcaaccagagtctcaaacaatggccccttttaacagagacccttaaataggctttcgagagagttatgactgccatatttccaaaacagtgccccctaagagcaggaagcagttaagatcagtcttcgtccctattctaactgcagtacctcttgtgtaccactttagagggaagaataatagaagtaggaggcaaatgcctaggcagataaaggagggtccacagagaacctctgacccactcaggttattgagcacaggggggcttgcctaagcatggtcacagagaaaaattctgtcccttaacacatgctcagtagggaaataaatcaatgtgtagtggctcagactaagggcccacatgtgcactggaatgattrggcagagccaccaaaaatttgtgctttatgcaggggaggagcctgacctcttcagctcatgtgtggtggcctggtattcaatttgtgaggtgaaaacctgtgtgcaggacccctctcttttctgagcacttt

SEQ ID NO: 945168 - DNA, 594 bp, Homo sapiens
actgtgctcagaagtacctgctctcactgcctggcttctcctygctcctggcacccactgtgatttccgagcaaagttgtggctgagcctgtgtcacaacctggccagatgtgcatgcacttggggtgacactgacacatcagccccctgtcacctcagccccctccagattttgggtgccaatgagcacggcagggaagccaaggggccactgaggatggctcggcataggcccgcaggtgcccctttgcatgaacagctaaaaacccgagactcagtcagactcaggcagatgacggggtgactgcctgtggagaagaactacccactgtggatctcctctccactgagagctgcaaatatcaggatgatctgactgtggagaggagctatccactgtaagtctcttcttagctgagagttgagcagattttgggacaacctgccagtagataggagctaccccgtttgggtgtcctgagagctgtactgtcactcaatagagcacctcttcaccttactcaccctccagttatctgcacacctcattcttcccagatacgggccaagaactcaggaccagcttaagcaaca

SEQ ID NO: 945169 - DNA, 668 bp, Homo sapiens
atagttcccataatccccacgtcatgggagtgacctggtgggaggtaattgaatcatgggagcagttactcccatgctgttctcatgatagtgagagagttcatgagatctcatggttttataagggccttttccccctttgctcagcacatctctctcctgccaccatgtgaagaaggatgtgtttgcttccccttctaccatgattgtaagtttacagaggcattcccagtcatgtagctctgtgagtcaattaaacctatttcctttataaattacccagtcttggatatttctttatagcaggatgagaatggactaatacattttctgaacaagtacagacttatttttcatgtcattctctaaacaatgcagtacaatagcaatttacatagcatttacattgtattaggtatcataaataatctagagatgtttaaaggatacaggaagatgtgcatagtttatatgcgaataacacaccattttacatcaggaacttgagtttccatgaattttggtatatgcaggggstcctggaaccaatgcatggctactgactaacaactgtacagccttctgtagaaccttgcccaaatcctgcaaggtattaccatctagataacaatgtaactgagtcttcaaaaagtcattccccagttcta

SEQ ID NO: 945170 - DNA, 668 bp, Homo sapiens
atagttcccataatccccacgtcatgggagtgacctggtgggaggtaattgaatcatgggagcagttactcccatgctgttctcatgatagtgagagagttcatgagatctcatggttttataagggccttttccccctttgctcagcacatctctctcctgccaccatgtgaagaaggatgtgtttgcttccccttctaccatgattgtaagtttacagaggcattcccagtcatgtagctctgtgagtcaattaaacctatttcctttataaattacccagtcttggatatttctttatagcaggatgagaatggactaatacattttctgaacaagtacagacttatttttcatgtcattctctaaacaatgcagtacaatagcaatttacatagcatttacattgtattaggtatcataaataatctagagatgtttaaaggatacaggaagatgtgcatagtttatatgcgaataacacaccattttacatcaggaacttgagtttccatgaattttggtatatgcagggggtcctggaaccaatgcatggctactgactwacaactgtacagccttctgtagaaccttgcccaaatcctgcaaggtattaccatctagataacaatgtaactgagtcttcaaaaagtcattccccagttcta

SEQ ID NO: 945171 - DNA, 541 bp, Homo sapiens
tctggagagttcttgcgcagaggtagattgtttggcacacgagatgtcggcgtgggtcggaaagcatgcggaagtcctgctttgctacgtgatggatttgcaggtcaggctggggagcctgggtctgtgggaggagtccagtgtctgagtcagtttgaggtccccctggggaccagggttgtctcagtgggagagctgggaaggggaaactcatggttcactacagctagtaggccacctcagcccagctagttgagatggtcccattgaatccctcctctttctccttgatcaggcaggtggaggaactcagccatcccagttactggtggcaggatgatttcctttcatcccaacctttatttccacagtgaaatcatcatgaaggagcactgtgttggcatcctcggtaaggaatgcctcccagcatggtagggaagctggwgtgtgggagggtaggactggcatgaaccttcctgactcctctcccttaaggctacagggtgtctcattccactgcagtccagcggttctgggatca

SEQ ID NO: 945172 - DNA, 541 bp, Homo sapiens
tctggagagttcttgcgcagaggtagattgtttggcacacgagatgtcggcgtgggtcggaaagcatgcggaagtcctgctttgctacgtgatggatttgcaggtcaggctggggagcctgggtctgtgggaggagtccagtgtctgagtcagtttgaggtccccctggggaccagggttgtctcagtgggagagctgggaaggggaaactcatggttcactacagctagtaggccacctcagcccagctagttgagatggtcccattgaatccctcctctttctccttgatcaggcaggtggaggaactcagccatcccagttactggtggcaggatgatttcctttcatcccaacctttatttccacagtgaaatcatcatgaaggagcactgtgttggcatcctcggtaaggaatgcctcccagcatggtagggaagctggagtgtgggagggtrggactggcatgaaccttcctgactcctctcccttaaggctacagggtgtctcattccactgcagtccagcggttctgggatca

SEQ ID NO: 945173 - DNA, 579 bp, Homo sapiens
aggactttctcatggtttctgagctccttgctctcaccagaaagaatcagaacttttaaagtgttctttatgccaacttaaatttttcatttttactacctcatgttttggatgaggcatgtatttttaaatttattttcacccttattgtacctctatgataaactgcttgcttacattcataccgtaattatctctcaggttacttgtctgttcctaaagattcactgaaacgaagaattctatatatgcttgtatctttcagcaaccgtatgtcagataacactgcacattactgcagacatcgcatatacaggtccaaaggtagaggaagaagaagaaagcaagcgttaaactctattcattcctaaaagcatatcagaaactcacaaataacagtgaaatcaaagaatgatcacagccaattccattacatacctagactgaaatacgaaacttcaaagaaaagaaacattagaactttgggtttgtaaaaattttcctatatagataaaattrttggtaactgtgtctcactagaaaacgtaaacaaaaatccatgtttttcatatttgtaaa

SEQ ID NO: 945174 - DNA, 597 bp, Homo sapiens
aaagcttatgattctaatgtcagagatcctgtctrtaggaacaatgggaatgcaaatggtcagtatgtagtgctaggtgacttttagcaacaaggaagtgggccaaagtacagcctgattaatgcttaattataactatatttctgcctagaacttggcatgaaatttttgtcaacacagtggggatggtttcaatagaaagttttcaagtagtgctcaatatttttatatatttttattttctgtaaagcgttttgttttttttaattccttattttttacttttttttttttaacggagtcttgctctgtcacccaggctggagtgcactggtgtgatctcagcttattgcaacctccacccctgggttccagcgattctcctgcctcagcctcccaagtagttgggattacaggcgcccgccaacacgcctggctaatttttgtattttcagtagagatggagtttcaccatgttggccaggtgggtcttgaagtactgacctcaagtgatccacccgccctggcctcccaaattgctgggattacgggcgtgaaccaccgcgcccggctggttttaaatttctcattgtaaaa

SEQ ID NO: 945175 - DNA, 583 bp, Homo sapiens
tttgctaacacagcaagttacaaaactttctgaactttgccaattagaaaaaaaatgtaatgtagttcaaacagttttggcaagccagctctgtgccagcctggtgagccgaagctctgcctaggtctagatgaggtgtgagcagcatacttcagtactgccatacctgcaaccacacagaatggtacaaggggcagaggtaaagccagggaggcctaggcaggggcttgaacaatctggtggcagatctgctggtggcaataggggcatcagaacaggatattaaatgacaacttccccagtgatgttcctgctggattggggctataaaatttaagtttgttcaagactcaggggtttcagtttaggccagtagctgttctgcaaagcacttcagtgagtcaagagaaataaaaacagtccaggcgcagtggctcatgcttataatmccagcatttcgagagacggaggcaggtggatcacttgaggccaggagttcaagaccagcctgagcaacatggcaaaacctcgtctctactgaaaatacaaaaattagctgggcatggtggcacacgcctgtagt

SEQ ID NO: 945176 - DNA, 583 bp, Homo sapiens
tttgctaacacagcaagttacaaaactttctgaactttgccaattagaaaaaaaatgtaatgtagttcaaacagttttggcaagccagctctgtgccagcctggtgagccgaagctctgcctaggtctagatgaggtgtgagcagcatacttcagtactgccatacctgcaaccacacagaatggtacaaggggcagaggtaaagccagggaggcctaggcaggggcttgaacaatctggtggcagatctgctggtggcaataggggcatcagaacaggatattaaatgacaacttccccagtgatgttcctgctggattggggctataaaatttaagtttgttcaagactcaggggtttcagtttaggccagtagctgttctgcaaagcacttcagtgagtcaagagaaataaaaacagtccaggcgcagtggctcatgcttataatcccagcatttcgagagacggaggcaggtggatcacttgaggccaggagttcaagaccascctgagcaacatggcaaaacctcgtctctactgaaaatacaaaaattagctgggcatggtggcacacgcctgtagt

SEQ ID NO: 945177 - DNA, 671 bp, Homo sapiens
ccagcatgtcagttttctgctgccacgtgacaaatcaccgcagaattaatggcttaaaacaacaacactttattatctcacagtttcacagttggctgaaagtccaggcccaacctagttgggtcctctgctttgagtctcaaaagctgcaatcaaagtgttagttgcactagagtcctcacctcaggcttggaatcctcttccaagcccattagagcttttggcagaatttgatcccttgcagttgcaggactgaggtcaccattttcctgctaggtgttgaccagggatggcttttatcttctagaggccacctgcatttccttgccatatggtccccaaagcagttcaggacacgagcgctctttttcttccacgccagcaagagtgtgcctctatcactttctctacctcccacctctacgttccttctaaaagcccacctaattagtcaagtccacctgtttgtaattagccagactgattcaatacctttattccctctgtggaaatctcttttcctaatcaacagagtgactaccccatcatatttgaaggttctacgcaccctgaaggggagaaaactgaacaagatgtgcacacctaggggcgatcataytggcatcttggaggctgttttgaacttcagcctcccacgcagttccctccat

SEQ ID NO: 945178 - DNA, 720 bp, Homo sapiens
gcccctctgtgaagaagcttcaagaggaaggatcaggcagcaatctttgctgttctgcagcctccgctggtgatacccaggcaaacagrgtctggagcggacctccagcaaactccagcagacctgcagcagagggacctaactgttagaatgaaaactaacaaacagaaaggaataacattaatatcaacaaaaacaacatccacacagaaaccccatccaaagttcaccaacatcaaagaccaaaggtagataaatccatgaagatgaggaaaaaacagcacaaaaaggctgaaaattccaaaaaccagaatgcctcttcttctccaaaggatcacaactcctcaccagcaatggaacaaaactggatgcagaatgagtttgacaaactgacagaagtgggcttcagaaagtgggtaataacaaacttttccgagctaatggggcatgttctaacacaatgcaaggaagctaagaaccttgaaaaaacattagaggaattgctaactagaataaccagtttagacaagaacataaataacctgataaagctgaaaaacacagcatgagaacttcgttaagcatacacaagtatcaacagtcaaattgatcaagtggaagaaaggatatcagaaattgaagatcaacttaatgaaaaaagcataaagacaagattagagaaaaaaagaatgaaaacatatgaacaaagcctccaagaaa

SEQ ID NO: 945179 - DNA, 533 bp, Homo sapiens
ctccagcatggagttagacctggatcgacgcgctggctcagggaaaagggagtggtgggagaaattgctgggggttaggggcaagacaggacatgggatagagggttttggagtaaacttttatcctctaaagctatccatgcgtcttagcaacatctctgttgacccagctatacatgggttagatagagttgtatagagcagttccctctggtcctttgacccgtgattttagcaaatgtgtgaggctgaggactatagagatctttgaaactgataacagtgtcaaacaatgtaactggcctggttttccaggagagatgaactatttcagacattctattgccatagccagaccacatatcctgattttgagttcagaaaatatggttattaacacatcaaataaccagttgatttagtaaggtcctcacttttctattatcatacttttccctgtagacatagagctgtatgggatgtaaaaaycctgctcagtagtttaattggccatcataacggccgatgtctca

SEQ ID NO: 945180 - DNA, 635 bp, Homo sapiens
ataaaaagcattttgcaaaattcaacactctttcatgttaaaacacttaacaagttaagaataaaagacaacttccttaatcaaataaaaagcatatacaaaattacagagctacattatatttaatggtaaaacatgaaatattttccctgagatcagataccaaaaaaagacttccattatcaccacttacattcaacattgtaccagaggctctggtcagagaagttaggcaagaaaaataaataaaatacattcatattggaaaaagtaaaattatctctattttcagatcacatgatcttgaatattgaagaagtctaaggaatccacaagaaactgtgataactactgagttcaacaagttttcagaatacaagatcaatatacaaaaatcaactggatttctacaaattagcaatgaacaatcacaaataaaattaagaaaacaattctatttataatagcatcaaaaagaataaaataataagaaatgcatttaataaaacatgagcacgacttgttcactgaaaaatataaaacattgtgaaataaattttcaaaaaccaaaataaatggaaggacatgacccatgttcatggatcagaaaatktaatgtttttaaaatggaaata

SEQ ID NO: 945181 - DNA, 633 bp, Homo sapiens
tgacctcttgatatggtttggctctgtgttcccacccaaatctcatctcgaatcctaatccccatgtgtcgagggagggacctggcaggaggtgattggatcatgggggcagtttcccctatgctattctcgtgatagtgagggagttctcactatcatgatggtttttaagtgtgatggtttaagctgatggttttaagtgtggcacctccttgctcttttgctctctctctctctctctctctcctgctgacttgtgaagaaggtgcctgcttcctcttcacgttccaccatgattgtaagtttcctaaggccccccagccaagcagaactgtgagtcaattaaacgtcttttccttataaattacccagtctcaggtattctttatagcagtgtgggaactgactaatatacctctgaagcccatccacctctaatactctccatttctttgattcagtgaatttcactaactgggctcaaagtatgtttaggatgtgaaaagtcaagtggttcaggagactttaaatgtttcaaacaactttatattggaaatatggggaaaatgcaaaatcttgatcagaccattaaaccrtgatattgactttacggcattttatttgattgtatca

SEQ ID NO: 945182 - DNA, 569 bp, Homo sapiens
cacagtttctatgcatcagaaatctaggtgtgagctagctgggtccttcctctgcttcagggcctctcataggcttcagttaaggtgtcactcaggctacactcatctgaagggaaggatacactttcaagttcatgtagttattggtaagattcagctccgtgtaggctgttggacctcagtttctcactggctgttggacagagtctgccctcaattcctcgccatgcaggtctcacgaacatggcagtttgcatcctcagagcacacaaaccaaaaggcaaatagagagagcctgccagcaagacagaagtcacaatcatttgcaacctagtcagaaaggtagcaaccctcaacattgccatattctattggttggcagcaagttactcaagcaaaggggatttcacaaggccatgaataccaagaggtgaggatcagaggaggccatctcagaaggtactgaccatagctgctragcaggaacccaggagcccaagctcccagtgatgatgctggagccaccaccaatgctgttggagcccacggtactgcccgctgctgccact

SEQ ID NO: 945183 - DNA, 631 bp, Homo sapiens
aagacaaggcaagtcccttctgcctataaacctgtaaaatcaaaaacaagttagttacttcctagatacaataggggtacaggaattgggtaaatacagcaattccaaatgggagaaactgacgaaaacaaaggagctacaggcccccaagaagggacaggccctgcaagtccaaactccagcagggcagtcaaatcttaaagctccaaaatgatctccttgaatccacgtctcacatccagatcaccctgatgcaagaggagggttcccatggtcctgggcagctctatccctatggctttgcagggtacagcctcccttctggctgtcttcaagccctggcattgagtgtctgtggcttttccaggcacacggtgcaaactgttggtggatctaccattctgggatctgaaggatggtggccatcttctcacagctctactaggcagtgctgcagcagggactctgtgtgggggctctgactccacatttcccttctgtactgccctakcaaaggttctccatgagggccccacccctgcagcaaacttctgcctgggcattcacgtgtttccatacatcttctgaaatctaggtggaggttcccaaacctcaattcttgacttttgtg

SEQ ID NO: 945184 - DNA, 477 bp, Homo sapiens
gctgggactacaggcgcacgccaccacgcccgaataatttttgtattcttagtggagacagggtttcaccatggtggccaggatggtctcgatctcctgacctcatgatccaccaacctcagtctcccaaagtgccgggattacaggcgtgagccaccgcaccaaccacagctcttctctttaacaagcacttaatcctaccccgcagtagccctcctgggagcaaacggggtgtcccacctgatgtgggttcgaagatgcttgtctgtgcatctcaacccaagctacaaccgtcccgtcctccctgatcgcaaacacatcccttcccagaaacaaacctgtcactttyttctctgttaaaaggcaatctgcaacttgaggcaacaacggaagtcttgcgaagataacggcggagcgtgccagtgggtttcctaatatggagggactgccctgtagagaggtaggaggcgtggaaat

SEQ ID NO: 945185 - DNA, 505 bp, Homo sapiens
aaagagaatattgcctgaagagtgtgcaatawcttactagatacatgttaatacttaggtaaatagtattcattcatttgttcattcattcaaccaatattgagtgccttgtatgcactagacgtggttggatatgttagggatacagcagtgaatgaaacaaaaatccttgccctcatagaattattagtaatgatggcagtggagaaagctctgggccttcctttcggggctatctgccctctgctgacacctgctgggagtctagacaataaataataggagttgctactaccaccctgctatttataactaatttgtagtgcaatccgtttgattgatatgaataccaaccatcgtgggctccagcttaaaggagagcagaggtatgggggacagaagtggggtagagggccaatgggtgacagcctccagctcaccctggctctcccaattccccacagggggtcgatgctggaggttccggggccccaagccagtgtgg

SEQ ID NO: 945186 - DNA, 548 bp, Homo sapiens
agacaaaggatgatataaaaaactcatgaatcaatgagaaaaaaagataaacaactcagtgtaaagtgaatcaaggacccaattaggaaaatcacaaaagaaaaaaatttatttaaatactatatacrtaaatttaatatgcaaaataaagcatattcgtatataccccattgttataaccccatcacagacgagttatgtcaaatcaacaagctatatcctttttgcttattcgatggcttatcaaagatcatatattcatgttacctttgtgaggaagcagacgtactttgcgtttgaaagtgaaaactggtagaatctttttggaagataatttggaaatatgtaccaaaaagcttaaacttgtgcatcttcattgatccagaaattagttttgttaaaatttatcaaagagaagtaattgtgatcatacttaagggtttagatataaagagaataactgccttctcatttgtaatgtgaaactttggttataactgtagttcagataatagaaaattattccattcatccaaggaaatactttt

SEQ ID NO: 945187 - DNA, 604 bp, Homo sapiens
aacggaaacctacaaaatgggagaaaatattcacaaactatgcatccaacaaagggctaatatccagaatctataaggaacttaaacagttgacagaaaaaacaaacaactccattaaaaaatgagcaaaaacataaacagacacttctcaaaagaagacatataaatggctaacaaacatgaaaaaatgctcaacattactaatcatcagaaagatgcaaatcataaccacaatgaaatatcatctcacaccactcagaatggctattattaaaaagtcaaaaacaatgaatactggcgagggtgtggagaaaagggtatgcttaaacactgttggtgggaatataaattagttcagccactgtggaaagcagtttgaagatttctcaaagaacacaaatcagagctaccattcacttcagcaatcccattagtgggtattcatccaaaagaagatgaatttttctattaagaaggcacatgcatttgcatgttcatcacaggactattcaygatagcaaagacatggaatcaacccaggtgcccatcaatggtggattggataaagaaaatgtggtacatacataccatggtatactatgca

SEQ ID NO: 945188 - DNA, 785 bp, Homo sapiens
gagccctagggccttgaatgaacataggcggtacccagggagtggttacagcaagccttgggtgagatccagcactttgctggcttcagatctgtccaaacacagtactagtggtggtggccacagggattcttgtgtcactctacacccagcttcagatgggtcagaacagagaaagacactccgtttgtttgggagaaagtaagggaagagaacaagagtctctgcctggtgacccagagaattctggatcttctccaagactaccaaggcagtaaatctatgagtctgcaaggaccacagcattagtgggctttagatagacccctcacaacacccaagtcctttagaatatatggaatgccttcctttccaagaaggatgagtacaaacaagttcagactgtgaagactataataaatacctaactcctcaatgcccagacacagacaaaaaatcgataagtatcaagacaatccaggaaagcaagacctcacctaaagaactaaataaggcatcagggaccaatcctggagaaacagagataagtgacctctcagagaattcaaaatagctattttgagaaaactcaaattcaagataacacagaaaaggaattcagaactctatcagacaaatttaacaaagagattgaaataattacaaataattaagcagaaattaagcacaccycaccttcagtattggacagatcttccagacaaaaagtcaacaaagaaacatcagacttaatctgcactatagatcaaatggacttaatagat

SEQ ID NO: 945189 - DNA, 785 bp, Homo sapiens
gagccctagggccttgaatgaacataggcggtacccagggagtggttacagcaagccttgggtgagatccagcactttgctggcttcagatctgtccaaacacagtactagtggtggtggccacagggattcttgtgtcactctacacccagcttcagatgggtcagaacagagaaagacactccgtttgtttgggagaaagtaagggaagagaacaagagtctctgcctggtgacccagagaattctggatcttctccaagactaccaaggcagtaaatctatgagtctgcaaggaccacagcattagtgggctttagatagacccctcacaacacccaagtcctttagaatatatggaatgccttcctttccaagaaggatgagtacaaacaagttcagactgtgaagactataataaatacctaactcctcaatgcccagacacagacaaaaaatcgataagtatcaagacaatccaggaaagcaagacctcacctaaagaactaaataaggcatcagggaccaatcctggagaaacagagataagtgacctctcagagaattcaaaatagctattttgagaaaactcaaattcaagataacacagaaaaggaattcagaactctatcagacaaatttaacaaagagattgaaataattacaaataattaagcagaaattaagcacaccccacyttcagtattggacagatcttccagacaaaaagtcaacaaagaaacatcagacttaatctgcactatagatcaaatggacttaatagat

SEQ ID NO: 945190 - DNA, 640 bp, Homo sapiens
gggttcccagctctgggtggttaaactactgatggggctccagaccatgtccctctgtgtagaactgcgcttagcctatgtgaactgtgaggatccccggatggctcatctcatcctcgggctggcacaaggcagcaccagtgacacggtgacatgtggcaagaagcaacagttaaaaatggatttctaaacttcattaggctttacttttttttttttgagatggagttttggtcttgagtgctagagtgcagtggcaggatcttggctcagtgcaacctccacctcctgggttcaagtgattctcctgcctcagcctcccgagtagctgggattacaggtgcacaccaccatgcccagctaatttttgtatttttagtaaagacggcttcaccacattggccacgctggtctcgaactcctgacctcaggtgatctgcccgcctcagcctcccaaagtgctgggattacaggagtgagccactgggcccggccaggctttactttcaaawttcttttttttttttttttttaagacagggtctccctctatcgcacaggtggaatacagtggtgcgatcttggctcactgcagcctcgacctcccagactcaactgatcttcccacctcagccttctg

SEQ ID NO: 945191 - DNA, 634 bp, Homo sapiens
tctttgttgagtctcccacaattactattgttcctggcccaracttcaatccggcctcccacattattccggataccacacctgaccctcatgaccacatctctctgatccacctgacattcacccgatttccccatatttgcttcttccctggtcctcacactgatcacactgagtttactgatggcagttccaactttcctacacatcaagctcaaggatttgcacctgcccaggactggcaaattgactttactcacatgccccaagtcagaaaacaaaaatacctcttagtgtaggtagacactttcactggatatgtagaggcctttcttacagggtctgaaaaggccaccacagtcatttcttcccttctgtcacacataattccttggtttagccttcccacctctatacagtctgataacacaccagcctttactagtcaaatcacccaagcagtttctcaggctcttagtattcagtagaaccttcatatccattaccgtcctcaatcttcaggaaaggtagaacggactaatagtctttaaagacaaacgtcaccaagctcagcctccaacttaaaaaagattagacagtacttttacctcttgcccttctcagaattcaggcc

SEQ ID NO: 945192 - DNA, 634 bp, Homo sapiens
tctttgttgagtctcccacaattactattgttcctggcccagacttcaatccggcctcccacattattccggatrccacacctgaccctcatgaccacatctctctgatccacctgacattcacccgatttccccatatttgcttcttccctggtcctcacactgatcacactgagtttactgatggcagttccaactttcctacacatcaagctcaaggatttgcacctgcccaggactggcaaattgactttactcacatgccccaagtcagaaaacaaaaatacctcttagtgtaggtagacactttcactggatatgtagaggcctttcttacagggtctgaaaaggccaccacagtcatttcttcccttctgtcacacataattccttggtttagccttcccacctctatacagtctgataacacaccagcctttactagtcaaatcacccaagcagtttctcaggctcttagtattcagtagaaccttcatatccattaccgtcctcaatcttcaggaaaggtagaacggactaatagtctttaaagacaaacgtcaccaagctcagcctccaacttaaaaaagattagacagtacttttacctcttgcccttctcagaattcaggcc

SEQ ID NO: 945193 - DNA, 634 bp, Homo sapiens
tctttgttgagtctcccacaattactattgttcctggcccagacttcaatccggcctcccacattattccggataccacacctgaccctcatgaccacatctctctgatccacctgacattcacccsatttccccatatttgcttcttccctggtcctcacactgatcacactgagtttactgatggcagttccaactttcctacacatcaagctcaaggatttgcacctgcccaggactggcaaattgactttactcacatgccccaagtcagaaaacaaaaatacctcttagtgtaggtagacactttcactggatatgtagaggcctttcttacagggtctgaaaaggccaccacagtcatttcttcccttctgtcacacataattccttggtttagccttcccacctctatacagtctgataacacaccagcctttactagtcaaatcacccaagcagtttctcaggctcttagtattcagtagaaccttcatatccattaccgtcctcaatcttcaggaaaggtagaacggactaatagtctttaaagacaaacgtcaccaagctcagcctccaacttaaaaaagattagacagtacttttacctcttgcccttctcagaattcaggcc

SEQ ID NO: 945194 - DNA, 558 bp, Homo sapiens
accccttccccagccaggctgccacctcacagttcgatctcagactgctgtactagcagtgagcaaggctgcatgggcatgggacctgctgagccaggcatgggatataatcttccagtgtgctgtttgccaagatcgttggaaaagtgcagtatttggatgggagtgccctgattttccaggtacagtctgtcatggcttcccttggctaggaaagttaaatcctccaaccctttgtgcttcccaggtgaggcaatgccctgtcctgtttcggctcaccctccctgggctgcattcactgtccaaccagtcccagtgagatgaaccaggcacctcaattggaaatgcagaaatcacccgtcttctgcgtcgatcatgctgggagctacaggccagatctgttcctattcagccatcttggaacrgagccattattgtttgttttaagaaaattttcaatttccttttcaatttcttcattgacccactggtcattcagaagcacattgtttaatttccacgtatttgtacagttcccaatattccggcagctgggcc

SEQ ID NO: 945195 - DNA, 630 bp, Homo sapiens
agagaaaactatgaataactgcatgaatcaattagataacttagataaagtgaataaattccaaaaaagacacaaattactaaaactgactcaaaaagtaatataaaacttaaatagattcataataagyaaagagaatgaattggtaattttaatgacccacaaagagaagcccaggcccagattaattcactggtaaattctaccaaacatttaaaccaatccttcacaacctcctccaaaaaacggaagaggaggaaacatttcccaactcattctatgaggccaatatgatcctaataccaaaaccagatatagacatcacaaaaaacctacagaccagtatcccttatcaatatagatgcaaaaatcctcaacaaaatactagcaaaccaaaccaagcagcatattaaaagattatataacatgaccaagggggatttattccaggattgcaaggttggtgtaacatccaaaaatcaattaatgtaacagaacttttttttttttttttctgagacaaagtctcactcttttgcccaagctggagtgcagtggtacgatctcggctcactgcaacatccacctcccgggttcaaacaattctactgcctcagcctcctgagtagc

SEQ ID NO: 945196 - DNA, 643 bp, Homo sapiens
aagatactacaagcctcagagagtgataatggtacctgccttatagggttaccataaagactaaatgcattaattcatataaagcatttagaatagcacttggcaaatattaaattttcactatgcttaagctctcatcatcatcatcattatgctgattcttctctttctctcacaaccaatccaccatgtcaatattactttaaaaactaactgaaatccactgacttctgtcagtcatatcaccacaaccaatccatttcaagccactatctagattaatgtgaaaacttccagactagtcctcccgcttccattccttttttatcctccaaaatggctttcaagcagcagccacagtcatctatttaaaacataaatcagatcatatcactcacttattcaaaatcatccaatgtctttcaactacattaggctaaaaaaaaatcaaactctttaccctgggactctacctcaaagtctcacagagtctacacctagccattgcagcctcacatggtagcactctaccrtagctcactatgctctagctacactggcctttttgattctaaaaaaaaaggccaagattcctccctttgggggcctttgcattagtgacttttcctgcctggaatgcagt

SEQ ID NO: 945197 - DNA, 549 bp, Homo sapiens
ccagatggacttctgggttgggtggggacttggagaacttttctgtcttataagaggattgtaaaatgcaccaatcagcactctgtagctaggattgtaaaatgcaccaatcagctctctgtggctagctagaggtttgtaaaatgcgccagtgctctgtaaaaatgcaccaatcagtgctctgtggctagctagaggtttgtaaaatggaccaatcagcactctgtaaaatggaccaatcagtgctctgtaaaatggaccaatcagcgttctgtaaaatggactaatcagcactctgtataatggaccaatcagcaggacatgggtgggggataaataagggaataaaagctggccccctcagtctgcaggggtaacctgctcagttcccttcaccctgtgaaagctttgttctttctctcttcacaataaatcttgctgctgctcactytttgggtctgtgccatctttaagagctgtaaagctcaccgcaaaggtccatggctcccttcttgaagtcagcaagatcaggaacccaccggaaggaac

SEQ ID NO: 945198 - DNA, 770 bp, Homo sapiens
caaaaagctttattccatttagtccagggcttgggagagggcttcagsgtggttaaaaaaatacattcttttaaataaatggaaatagtttttttttttaagtcatgacacttataagaaattttttttttttttttttgagacgtaagtcttaatgccacccaggctggagtgcagtggtgcgatctcagcttactgcaacctctgctccctgggttcaagcaattctcctgcctcagcctcccaaggagctgggattacaggcatgtgccaccacgcctggctaatttttgtattttttagtagaggcagggttttgccatgttggccaggctggtttcaaactcctgacctcaggtgatccacccaccttagcctcccaaagtgctgggattacaggcgtgagccaccacacccggctaattttttatgtttttagtagagacggggtttcaccgtgttagccaggatggtctcgatctcctgacctcgtgatctgccctgctcggcctcccaaagtgctgggattacaggcatgagccaccgcgcccggccaagaaatttttatgatgcacacttttcttgttaccttgccccttagaaataactcataatggtttggtgtacgtttttctaaacatgtgttttgcttatataaacattttattatgtataaatatatgcaaataagtagatatgtatatatgtgcatttagtaaataggatcataccatccattttcccacagagttatctttgccacaaatcat

SEQ ID NO: 945199 - DNA, 661 bp, Homo sapiens
acttaacttccacgcttcctaggcaaactcaactactcactgtagcttttttttttcttttttttttcaagacatagtctcactctgttccccaagctggagtgcagtggtacaatctcagctcactgcaacctccgcttcccgggttcaaacaattctctacctcagcctcccaagtagctgggattacaggcacccgccaccccgcctggctaatttttatatattttttttagtagagacggggtttcaccatcttggctagggtggtcttgaactcctgacctcatgatccacctgccttggcctcccaaagtgctgggattacaggcgtgaaccactgcacccagcctcactgtagcatttatagccgctgggcttttgcttaaaagatggccattccctcttcccagtttccaaggaaccaaacatacccaacccccaaggcccagctcaattggagctgcagccccaaagttttcctgattccctgcagagcagagcacccagctcctccagcacctcatcactcccccagcacmgaatctgtgcctcgctcgttcccgaagcttatccaccttgcttcagttacggacacgtcctctctccctctggccaccagccgagtagcaacaggaatctttcctgatccgtctgtgtc

SEQ ID NO: 945200 - DNA, 627 bp, Homo sapiens
ttctgtggctgtttagaaatgctattttacagtaatgatataaaagacactgtccctgctcttgatcctaaatagggagaagaatatgtaggtgagtatattaggaaagtgctataaaggaggtggcattgccacatcatcaccaacatcatggggctttaaaatcatagcccaaggttgaattctggctctgctcattaatagctctgagacctgagcaagttggtacttaatgcatgatagtatgaaataaaatattatttcatctccttctcctcttcttctttgcccccatcctttttatctgttgaataatgtttgttatgggacccagagggagataaatactttgagagaagaggctctggagttctttacaggagagacatttatgctggaggggtatggtcatgaaggataaataaaaatttagtagatgaggaggtgcatttagggaacagagagtattctgggccaaagcaaagggtatatgccaaggaaaatgaaacttccctcagggaagagttttaagggttggtaatagttggtgtggcattcaagggcaagaatacagtrcagttcaaaccatggggttgtcagagaacagagtgacttgcaaagcaggta

SEQ ID NO: 945201 - DNA, 645 bp, Homo sapiens
taggatcattaaaaggaaacataattaacattatttccaattcaacctatcttttctctgtgttttcagaatactagcactgttgttggctgttttgtaggatccttttcttgctgcataacaaaggattcaatttgttcatttagtcaatgaacagttactgagcatctgctatctttcaggcccatgctaagtcttggtgacagaaatattgaaaagatatggtctcacctcccatctctctttatgtaatcagatttgatgtaagaaaacaaaaggaaggaatgaaatgagaaaaggaagttatacaatgagaagaaaaggaaaggaaagatggcaaaataatacaaatgaaatcaacggggtttggagatgcagaggggaaaaaatgagaagagatgaaggagaaaaaaggcaagtacaagaatgggagcagaaaaagacataaaaatttagaaatatggtagtattgaaatttatatactgctatgctcatatgcatgcatataattttatgtattttctagaactcaaataacttggtaaaaagccctctcttcagttccactgatgtcagcaaaaacatttaatcttgccacttatcagattttctrtctcttccagtttaagtcaaagactttcccc

SEQ ID NO: 945202 - DNA, 596 bp, Homo sapiens
gccatatgagatgccagctccacctttgccttcgaccatgattgaaacctccctgagatttcaccagaagctgaatagatgccatcactgtgcttcccttaaagcctgcagaaccatgagccaattaaacctcaaacctcttttctttataaattacccagccttaggtatttatttttgttttgttttgtgtttgtttgtttttgagacggagtctcactctgtcaccaggctggagtgcagtggcacaatcttggctcactgcacctcctccccctgggttcaagtgattctcctgcctcagcctcccaagtagctgggactacaggtgcacaccaccacgcccagctaatttttgtatttttagtacagacgggatttcaccatgttggccggatggtcttgatctcttgacctcatgatcctcccacctcggcttcccaaagtgctgggattacaggcatgagccaccacgcccagcctggtatttctttatagcaatgtaagaacagcctaacacacacacattttatctctctctytctttctctctctctctcacacacacacacacacacgagtagattttattcact

SEQ ID NO: 945203 - DNA, 661 bp, Homo sapiens
cgccagcaacggaacaaagctggatggagaatgactttgatgagttaagagaagaaggcttcagacgattggtaataacaaacttttccgagctaaaggaggatgttcgaacccatcgcaaagaagctaaaaactttgaaaaaaggttagaagaatggctaactagaataaacagtgtagagaagactttaaatgacctgatggagctgaaaaccatggcaccacaactacgtgacgcatgcacaagcttcagtagccgatttgatcaaatggaagaaagggtatcagtgattgaagatcaaatgaatgaaaagaagcgagaagtttagagaaaaaagagtaaaaagaaatgaacaaagcctccaagaattatgggactatgtgaaaagaccaaatctatgtctgattgctgtacctgaaagtgatggagagaatggaaccaagttggaaaacactctgcagtatattatccaggagaacttccccaaccaagcaaggcagaccaacatttaaattcaggaaatacagagaatgccacaaagatacccctcgagaagagcaacacataattgtcagattcaccaaagttgaaatgaaggaaaaaatgttaagggcagccagaragacaggttgggttacccataaatggaagcccatccag

SEQ ID NO: 945204 - DNA, 569 bp, Homo sapiens
tcctatgctcatggattgaagaatcaatattgttaaaattaccacaatgcccaaagcaatctacagatgcaatgtaattcctatcaaattaccaatgtcatttttcacagaattggaaaaaacaaccctaaaattcacatagaatcaaaaaggagtctgaagagccaaagcaatcctaaacaaaaaggatgcaagaggcatcaccttacctgacttcaaattatgctacaaagcaatagtaagcaaaacaccatgatactggtgtaaaaatacacacacagaccaatggaacagaatagataatccagaaataaagccccagatttaaagccaactaatctttgacaaagctgacaagaacttacactggggaaaggacaccctctgcaataaatggtgctgggaaaattgaatagccacatgcagaagaatgaaactggacccatatctctcaccatatacaaaaatcaactcaaaatggattrgacttaaacatgaggccccaaactacaaaaattctagaagaaaacctatggaaaactctcctggatattggtctaaaaagaatt

SEQ ID NO: 945205 - DNA, 638 bp, Homo sapiens
cctatttgttttctggttagaatgggcttttctgtggctattacaaaagtaaaaaaaacaaaacaaaacaaaaacccaamagatgctggcgaagttgtggagaaaaaggaatgcgtttaccctgttggtgggagtgtaaattagttcaaccattgtggaagacagtgtggcatttcctcaaagacctagaggcagaaacggcattcgacccagcaatcccattactgggtatatacccaaaggaacataaatctttctattattgatacacacatatgttcactgcagcagtattcacaataacaaagacatggaatcaacctaatagcccatcaatgatagactggataaagaaaatgtggtacatatacaccatggaatactatgcagccataaaaaggaatgagaatcatgtcctttgcagggatgtggatggagctggaagccattatcctcagcaaactaatgcaggaacagaaaaccaaataccatatgttctcacttataagtgggagctgaacaatgagaacacatggacacacaaggggggaacaacacacactggggcttgttggaaagtggggagtgggaggagggaaagcatcaggaagaatagctaatggatgctgggcttagta

SEQ ID NO: 945206 - DNA, 804 bp, Homo sapiens
aaacaattcaggcccctccagtgagttaggttcctaacctccaggggccacagaataaagctggggcccatactggccccctagagttagagcacacagttcaggagttatgasctgagccctggccccctaaagtccttcaaaaatgaaaccagtcaactgaacccaccttatgccataatcaaccccccaaggacatcaaataggatagaagaaaaagaaatccaaaggtcatcaacttcaaaaactgaagcaacatcagcccacgaagatgagaaagaaccagcacaagagctctggcagctcaaaaagccaaagtggcttcttacctccaaatgaccacactagttccccagcaacagttcctaactaggctgagatggctgaaatgatagaaataaaattcagaatatagataggaatgaagattactgacatataggagaaagtcaaaacccaattcaaggaatctaaggtttacaataaaacagtataggaactgatagacaaaatggacattatatgaacaaactgatctgatagagcttaaaaacatggtagaagaatttcataatgcaatcacaagtattaacaacaggattgaccaagctgaggaaaaaaagtcacagcttgaagactggctctccaaaataactcagtcaaagaaaaaggaaaataaaaaaccacaaggaaaataaataaagcctctgagaaagatgggattctggaaagagacccagtctatgacttattggcatgcctgagagacagggagagaaaccaagcaacttggaaaacatattt

SEQ ID NO: 945207 - DNA, 673 bp, Homo sapiens
cattgctgctgggaatataaactagttcaaatattgtgaagggctgtttggtgatttttcaaggaacttaaaatagatctactatttgacccagcaatcccattattcagtatatacccaaagaaatataaactgttctaccataaagagacacatatgcatatgtttatcacagcactattcacaatagcaaagacatggaatcaacataaatgcccatcaatggtagactgaataaagaaaatgtgatacctatataccatggaataccatgcagccataaaaaaatgagatcatatcttttgcagtaccatggatagagtgggaggccattatcctaaacaaactaacacaggaacagaaaaccaaatactgcattttctcatgtataagtggaggctaaacattgagtatgtggacacaaagaagggaacaacacacattgaggcctacttgagggtagaggttgggaaaaggatgaagatcaaaaaactacttattgggtgctatgcttattacctgggtgatgaagtaatttgtaaaccaaactcctgtgacatgcaatttacctatatagaagccyccacatgtacccctgagcctaaaataagtttttttaaaaaggaatagaatgtgtgtttgtgtgcatgcatgcatgggtacatatttgtta

SEQ ID NO: 945208 - DNA, 598 bp, Homo sapiens
taggacccagagaccctaaagcccagacttccttcgggctctcttcctctctgcttcccactccacccctccacactgacttccccttctcagacagcttcctccagaggcttaagtcacgaaccccagcaatgctcagactcccatcttcccaattccaccaccaggctggacagagacacctttcttctaattccaattctgattggctcagctttcatcccagacccaggaccaatcactgtggccagcgttctggatattattttattttagagacagggtctcactctgttgcccaggctggactgcagtggtgcagtcaccgctcactgcagccttgaattcctgggctcaaatgatcttcgcacttcagcctcctgagtagctgggaccacgggcatgcaccaccatacttggctaatttatatatttatatctatatatatagatatatttgtagagacaaaaaaagccgggtgtgggrgggtgcacatgtagtcccagctactcgggagtctgaggtgagaggatcacttgagtctgggaggtggaggctgcagtgagctatgattgcatcactgcgctccagcctggg

SEQ ID NO: 945209 - DNA, 632 bp, Homo sapiens
caaatatccaaaaccatagattatacaacataaagaatggagcctcatatacgctatggactttgggtgataacgatgtgtccatgtaagttcatcaagtrtaagaaatatgtcactctgttagggatgttgataatgggaaagtctgtgcatgtgtgagggcaggggataaatggaaaatctttgtacctttcactcaattttgctgtgaacttaaaactgctctaaagtaataagtctttaaaaaaaaaggtgagggggagtgacacaagcatgatggcagaataggagttttcagcactcattcacccacaggaacactgattttgagaaccccccacagatgagagtccatttgtgagagcctgggagtccagcagagaggtcccagcacctcactggagcaaaaaatctgaaaatagatgcactgaaaagggtaagaagaacaatttcactttactcatgtcaccacacccccaaagcagcacagctcagtgccaagagaactccttggcctgcagtttctgccacaggggaaagtgaaagcatagtgagtgcctgttttccccaaccatgtgggatgctgtccaagaggtccacttcttttttgtcttatccagaacacgaagcag

SEQ ID NO: 945210 - DNA, 674 bp, Homo sapiens
cgtggagaacctttatgtctagctcagggattgtaaacacaccaatcagcaccctgtgtttagctcaaggtttgtgagtgcaccaatcaacactctgtatctagctgctctggtggggccttggagaacctttatgtctagctcagggattgtaaatacaccaatcggcactctgtatctagctcagggattgtaaacgcgccaatcagcgccctgtcaaaacaggccactcggctctaccaatcagcaggatgtgggtggggccagataagagaataaaagctggctgcccgagccagtattggcaaccacctcgggtcgtcttccatagtggggagtgtttgttcttttgctctttgcaataaattttgctactgttcactctttgggtccacgctgcttttatgagctgttacactcaccgcgaagatctgcagtttcattcctgagtccagcgagaccacgagcacgttgggaagaacgaacaactccagacgcgccgctttaagagttgtaacactcaccgtgaaggtctgcagcttcactcctgagccagcgagaccacgaacccaccaaggaagaaactcygaacacatctgaacatcagaaggaacaaactccagacgcgccaccttaagagctgtaacactcaccgcgagggtctgcggcttcat

SEQ ID NO: 945211 - DNA, 624 bp, Homo sapiens
aaactttcagtcatgatggaaggtgaaggggaagcaggcacgtcttacatggctggagcaggaggaagagaagagagaggggaggtgttacacagttttagacaaccagatctcgtgagaactcactcactatacagtaccaaggggggatgatgataaactattcatgagaactctgcccctaggatccaatcacctcccaccaggccccgagtccaacacagtccaacactggggattacaatttgacatgagatttgggcagagatacagatccaaaccatatcaccagccatggtggctcagatctgtattctcagcgactccagaggctgagacaggagagctgcttgagcccaggagttcaagaccagtctgggtaacacagcaaatcccagtctctaaaaaaaaaaaaattaaaaattagttaggtgtggtggtgtgcacctgtagtcccagctactcaggaggctgaggttggaggatcgcttaagcccaggagttagaggctgccgtaagctatgattgcatcgctgcatacwtcagccttggcaacagagtgagactctgtctctcaaaaaaaaaaaaaaaagaaaagaaaagaaaaaaataagaattgctgct

SEQ ID NO: 945212 - DNA, 624 bp, Homo sapiens
aaactttcagtcatgatggaaggtgaaggggaagcaggcacgtcttacatggctggagcaggaggaagagaagagagaggggaggtgttacacagttttagacaaccagatctcgtgagaactcactcactatacagtaccaaggggggatgatgataaactattcatgagaactctgcccctaggatccaatcacctcccaccaggccccgagtccaacacagtccaacactggggattacaatttgacatgagatttgggcagagatacagatccaaaccatatcaccagccatggtggctcagatctgtattctcagcgactccagaggctgagacaggagagctgcttgagcccaggagttcaagaccagtctgggtaacacagcaaatcccagtctctaaaaaaaaaaaaattaaaaattagttaggtgtggtggtgtgcacctgtagtcccagctactcaggaggctgaggttggaggatcgcttaagcccaggagttagaggctgccgtaagctatgattgcatcgctgcatacttcagcctyggcaacagagtgagactctgtctctcaaaaaaaaaaaaaaaagaaaagaaaagaaaaaaataagaattgctgct

SEQ ID NO: 945213 - DNA, 593 bp, Homo sapiens
aaagacggccatcaacatgctgggctattttttattttttgtagagatgtgttggttatgttgcctatgctggtctcaaactcctggtctcaagccatcctccctccttgacttcccaaagtgctgatattatagatgtgagccaccatgcccagccgtggctcttcattaaaaaaaaaaaaagaaagaaagaaaagaaaagaagccatgcagatatgcctctcagatctctttccaagaatgaatttgggctgggcgcagtggctctcacctataatcccagcactttgggaggccgaagcaggcagatcacgaggccaagagatggagaccatctcatgaaaccccatctctactaaaaatacaaaaattagctgggtgtggtgatgcatgcctgtaatcccagctactcaggaggctgaggcaggagaatcacttgaacccgggaggcggaggttgtagtgagccgagatcacaccactgcactccagcctggtgacagagtgagactccatctccaaaaaaaaaaaaaaaragagagaaagaatgaacgaatttgccattcaactacaaagagtgcagttagacatcgg

SEQ ID NO: 945214 - DNA, 593 bp, Homo sapiens
aaagacggccatcaacatgctgggctattttttattttttgtagagatgtgttggttatgttgcctatgctggtctcaaactcctggtctcaagccatcctccctccttgacttcccaaagtgctgatattatagatgtgagccaccatgcccagccgtggctcttcattaaaaaaaaaaaaagaaagaaagaaaagaaaagaagccatgcagatatgcctctcagatctctttccaagaatgaatttgggctgggcgcagtggctctcacctataatcccagcactttgggaggccgaagcaggcagatcacgaggccaagagatggagaccatctcatgaaaccccatctctactaaaaatacaaaaattagctgggtgtggtgatgcatgcctgtaatcccagctactcaggaggctgaggcaggagaatcacttgaacccgggaggcggaggttgtagtgagccgagatcacaccactgcactccagcctggtgacagagtgagactccatctccaaaaaaaaaaaaaaagaragagaaagaatgaacgaatttgccattcaactacaaagagtgcagttagacatcgg

SEQ ID NO: 945215 - DNA, 616 bp, Homo sapiens
gttttgtgctattattgtaaaataaatacatttctatatgtgtagacccaacaatacaattttaaacacayacacacacacacacacacacacacacacacagagcccacaattgcttttaaaattagttaagtaaagaaagaagaagaaatatgcatttacactattgtttttataattacaaaattatctacattggtgctctttaaattttgtttgtgggtttaagttactgtctaggccatttgctttcagcctaaagaatttattttgctattttttgtgaggtggcatgccagcaaggaattctcttagtttttgtttatctaagaatggttttattttactttcatttttaaaaaaacaatattgctggatataagattcttgcttgacagttttttttctttcagcactttaaatatgttatctcagtgcctctggcctccattatttctgatgaaaagtcaattgttaatctcattggggttcccttgtatgtgactagtatttttctctcggtgatttcaatattttctttatgtctttggctttcaacatttttaagatgatgtgtctgggttaaatctgtttttgtttctcctaattgaagctt

SEQ ID NO: 945216 - DNA, 683 bp, Homo sapiens
catcagggcaccaggacacctcrccagagctctcagagggcagcttcagagagccctgagaccaagtcagagggaccaaaatgctcagggaacagtctccacttaccatggtcccggggcacgagctcctctaggccagttgcacagcatgcctggggagagggtcaaggcgggggcaacccaaggggtgtgtgtgcgcatgtgtgtccccggggatgggtgtgtgcatgttatcatgcatgggtgcatgtgtacgagtgtgtcaatgtggggggttgtcctgagtatgtgtgtgcatgccatatgtatgcaaaggtgtgtgcatgtgtgcatatgggaggtatgtgcacacatgtagaggtgcttgggggggtgtgtgtgcgcacacgtggagacaggaatatgcatgcatgtttgtggtcagaaagaaagaagaggtagacatttagaaacgcttattttggccaggaaacaattgtctgaaaccaatttggccaaaagcaaattggccaatgtgatctttttttttcaaaaattaatattcccagtctcaagtttttcaagtttctttgccttcattcctccaaaagtggagctcaagacaaaacttacacacagtttatttgggatgtgaccttgggggtgcaggagtggagaatcaagaagaaagaccaatactagga

SEQ ID NO: 945217 - DNA, 683 bp, Homo sapiens
catcagggcaccaggacacctcaccagagctctcagagggcagcttcagagagccctgagaccaagtcagagggaccaaaatgctcagggaacagtctccacttaccatggycccggggcacgagctcctctaggccagttgcacagcatgcctggggagagggtcaaggcgggggcaacccaaggggtgtgtgtgcgcatgtgtgtccccggggatgggtgtgtgcatgttatcatgcatgggtgcatgtgtacgagtgtgtcaatgtggggggttgtcctgagtatgtgtgtgcatgccatatgtatgcaaaggtgtgtgcatgtgtgcatatgggaggtatgtgcacacatgtagaggtgcttgggggggtgtgtgtgcgcacacgtggagacaggaatatgcatgcatgtttgtggtcagaaagaaagaagaggtagacatttagaaacgcttattttggccaggaaacaattgtctgaaaccaatttggccaaaagcaaattggccaatgtgatctttttttttcaaaaattaatattcccagtctcaagtttttcaagtttctttgccttcattcctccaaaagtggagctcaagacaaaacttacacacagtttatttgggatgtgaccttgggggtgcaggagtggagaatcaagaagaaagaccaatactagga

SEQ ID NO: 945218 - DNA, 598 bp, Homo sapiens
taaatgcacaagtaggagagaggaaaggaaggaaacagaatcatcttcggtcctctaaaaagtcaattaccattggaaaatgcraaacagaatatgtagagattctcttctattccactgagcatgcataaatgctttcttgatgcttatcaaccatgcaggaatcaacactgaacgcaaacgagagtatttgtcttcctatagtaaatatgtatacacatgattttgtttctcaaaaactattatgtcaggtctatctggttctaaaggaaataaaaactactataaagagcctgctgtattacatcctattgccacaaaaagaaaacaaaaataggctgattgccttactgactctgggccaagggccaatgtccttgaatgtgtttgaccttgagaaaatcccttaccctttctaagctgcaatttattcataacatggaaatagcaacagtgcagtagacagctcacaaaaatattatacatggatttaaaactgtgcaaccttaaacaaaggtgataaactttagggattccaaaaggcgtatttttttcacatcttaacatctctgaaatcagggtgtcttatagtcctgca

SEQ ID NO: 945219 - DNA, 597 bp, Homo sapiens
gcccatgaccacacctggctaatttttgtagttttagtagagcagggtttcaccatgttggccaggctggtctcgaactcctgacttcagataatctkcccaccttggcctcccaaagtgctgggattacaggcatgagccaccatgcctcccccggcctgttttttttaaaaaaaatttcttcaaattggtttttacctttctctgttacctccttgagtagctggataatcaactgtctgcattctttatctggcaatttagagattcttcttggtttggatccattgctggagagctagtgtgatcttttgagtgtgtgatagaaccttgttttgtaatattaccagacttacttttctgtttctttttcatttgggcagactgtttcagtggaaagatctggaactcaagggctgctgttcaggttcttttgtcccacagggtaattccttgatgtggtgctctcccccttcccctaggaatggggcttcctgagagctagactgcagtgattgttattgcccttctgagccctgggctggtgctaggcaatgtctgcaaagagtcctgtgatatgatccatcttcaagtctc

SEQ ID NO: 945220 - DNA, 727 bp, Homo sapiens
cttgcatcacccctcccctaactccaggcaacatagctataaytctgggagtgactccttctgcttgagggaagaagagggaagagtaatgagacctctgtattataacttgaatgtcagctcagccacagtaaaataaagcaccaagcagggtcctgaggccctcattttagatcatagctgccagatatttctagactcaccctgggcccagaagaaacctgaaggcaaggactcagtcctggcagaatttatcacttgccaactaaaaagttcttgggccttgaataaacattagcagtagcaaggcagtagttgctacaggcctgacatggtggtggtcacaggcagaggcatctgcttgaggaaaggagaggaaaaagtaaagggactttgttttgtaccttgggtaccagctcagccacagtaaaatgaagcaacaaacaaattcctaaagctccgaattccagaccgtagctcctggatggcaattctacacccatcctggatgagaagggaacctactcccctgaagggaaagacctaatcctggcaggattcactgcctgctgaccgagagcccattgggccttgaataaacattggcagtatacagatagtagtcaccatggaccttgggtgaaacccagtaccatgctagcttcaggtgtgacccagcatagtcccagtggcggtggccacagaagtacttacatcacccctcttc

SEQ ID NO: 945221 - DNA, 727 bp, Homo sapiens
cttgcatcacccctcccctaactccaggcaacatagctataattctgggagtgactccttctgcttgagggaagaagagggaagagtaatgagacctytgtattataacttgaatgtcagctcagccacagtaaaataaagcaccaagcagggtcctgaggccctcattttagatcatagctgccagatatttctagactcaccctgggcccagaagaaacctgaaggcaaggactcagtcctggcagaatttatcacttgccaactaaaaagttcttgggccttgaataaacattagcagtagcaaggcagtagttgctacaggcctgacatggtggtggtcacaggcagaggcatctgcttgaggaaaggagaggaaaaagtaaagggactttgttttgtaccttgggtaccagctcagccacagtaaaatgaagcaacaaacaaattcctaaagctccgaattccagaccgtagctcctggatggcaattctacacccatcctggatgagaagggaacctactcccctgaagggaaagacctaatcctggcaggattcactgcctgctgaccgagagcccattgggccttgaataaacattggcagtatacagatagtagtcaccatggaccttgggtgaaacccagtaccatgctagcttcaggtgtgacccagcatagtcccagtggcggtggccacagaagtacttacatcacccctcttc

SEQ ID NO: 945222 - DNA, 509 bp, Homo sapiens
gtaacctacatatagcacctctattgggaggcagagtgcaccgtgattatctttttccctaacttgggctggcaatgtcaataaaggacatcacctaggtatgcagtagaccttaaatatgtgtatttcttgtctaagaaaccatcatgataaaactgtcaccaatttcaaagccagggacagaagccagttgcagagggttgcaaagtgagtgtgagatgacaaagtaagggtggaggatgtggacagctttatcaagaagcttggtgtgaagaggagatgtgagtgagggcttggctggaggaggagggggacccaggcagggagggcacctcttttaaaagatgagagtgactcggcatgtccctgtgctaatgggaagttcctgcaccttggatcccactgtacccgggcctctgtkaaatgggaatatcggatttatctcacagggttgctgtgaggctcaaatgagataaaattgtgtaaagttactcccccaaaggctcaat

SEQ ID NO: 945223 - DNA, 602 bp, Homo sapiens
gcctgggtatccaggcatttccatacatcttctgaaatctaggcagaggtttccaaacttcagttcttgacttctgtgtactcacaggctcaayaccacatggaatttgtcaaggcttgaggcttgcaccctctgaagccacagcctgagctctatgttggcccctttcagccacagctggagcagctgggacacaggacaccaagtccctaggctgcacataacagaaggaccctgagcctggctcacacaaccatttctttctcctaaacctccaggcctgtgatgggaggggctgccgtgaagacccttgacatgccctggagacattttcccctttgtcttggggattaatattgggctcctcattacttatgcaaatttctgtagccagcttgaatttctcctcagaaaatggattttttttttctatttcattgtcaggctgcaaattttccaaactgttatgctctgcttcccttataaaactgaatgcctttaacagcacccaagtcacttcttgaatgctttgctgcttagaaattttttccaccagataccctaaatcatctctctcaagttcaacattccacaaatctcta

SEQ ID NO: 945224 - DNA, 612 bp, Homo sapiens
ggttgcaagaataggttctttcgcccagtgsgggtggggaaaaaaggattacgatataaagtgttttgcaaagtttgcagagttgaattttgttattacaagaggtaatgagtgtggaggtgctttgagtctttgaaagccctttgctgatgtgagagttggagccataagagcggagtgtggagagatgagcagaggactaaggactgggtcttattgccaaatccccactgcctagcaggggctcagggaacttttggggaggaactaaatgaatgagtagaatcaaggctctgagtgtttcaaggagcgcatggctaatactgtcatacgttggttgagcagcaggaccacccacgggtggccactggatttggcaagaaggaagaaattagtccctatgaaaaagtagcatctgaggaaggatggctaagagctgaggggaacgggtagaggggaggatcatgtatttgaggagcttttcagtaaacgttaaggaatggagttagacattgctagataggccctttgatgatttaaaggaattgtctcgaagaccctctgttatgtttcaccaggaaggtgaagggaaaggaggccaaggagtttcaa

SEQ ID NO: 945225 - DNA, 708 bp, Homo sapiens
gaggagttttccaagaacagaaggagggcttgagcttcgcttgttccaggtccccagaatgaacacttaccaagtgcatgcccgtcagggtcaggcactgtgaagggctgggatcataccctgtcccagggctcaggcgcttagcatggccaggcagttaggcacctgttggtaggtttctttcaccttacagtactctccaaagccctctcttctctccagcacctgtgggcctcctggggagctcacactttggcgaatattctctaaatatttgacaaataaaagaagaggcaaaggctgtgtgcatggcaaatggagaagccgggccaccagaggcagcctctcctctcttgtccttagcagctcagttctggccccggacctgcaccccacctcttgaccaaactgaacttgtcttccttagaagcccatgtattgccattactgtccgtgccttgggccacgtgtctcacctcactcccaccacaaacagcttattagtagggtgactttatcatttatcagccaagcaagggcgcttttgagagggaaaagtgtaataatcattacagtgggaccttgatgcgaactggactattccatgaaagccaggtcctatttctcaaagttctctgcctgagtgacactagtaaacctttctatgttcctgstaatgacttagtgtgattagagactggagcccgg

SEQ ID NO: 945226 - DNA, 586 bp, Homo sapiens
ttactggctctgtgaacttggacaagtcactcaaccattttgaggctttttcatctgtaaacatggggatggtaataatacccatctcataaggttgttatggagactaaatgagataattaacgtgaaagtgcctggtaaaggtaggtccaggtgtcatctccagaaattagtcccaggtattggtattttgttttattttaaagctcctcgggccattctaatgtcagagtttataacaattgcagtaatgtattccagttctctttccataactcatagtgttgccagtggtcaagcctgagtgttggtagagcatcagtttctcattccaaaaagaaaataatgcagaccaaagaaccttatgagacttgtgaaattacagaattgaatggccatccagttcaatctcctatctgatggttgaatgctccctgcagtattcttgaccagtggtrgtttaggtcggtgtttctcaagctccagcagacattggagttactaaaactgagagtgctgaacctcaatcccagagtttctgaattagtaggtctgggacgggtcttgagaaatttcatttctagta

SEQ ID NO: 945227 - DNA, 627 bp, Homo sapiens
taatgtctcctttttcatgtctgattttgtttatttgggtcttctttcttttttcttagtttggttaaaggtttgtcaattttgtttatcttttcaaaaaaccaacttttcatttcattgatcttttgtattattttctttattacaaattcatttatttctgctctgatctttactatttctttccttctactaattttgggtttgatttgctcttgcttttctagttcttcaacatgaattgttagatcgtttcttagaagttttttttttacttttttgatgcgtgcttacagctataaagttccctcttagtactgcttttgctgtatctgataggtttggatatgttgtgtttccgtcatcatttgtttcaagaaattttccagtctccttcttaacttcttcattgactcactagtcattcaggagcatattgtttaatttccatgtgtttttatagtttccaaaattcctcctgtgattgatttctagttttattccattgtggtcagagaagatacttgatattatttcaatattttgaacttttttaagacttgttttgtggcctaacatatggtctagcctcaagaatgatccawgtgctgaggagaataatgtgta

SEQ ID NO: 945228 - DNA, 580 bp, Homo sapiens
tcaaatgatacatcatttgtttaaacatcaaatgatatattatgaacaatactcctgtggctggtggaataatggcccycaagataggagattctaatgtctggaacttataaatgtcaccttatttggtaaaaggggccttacagatatgattaagttaaggatcttgagatggggcattagtctggattatctgggtggaccctaaatgcaatcacgattgtccctataagagagaggcaaagggaaatttgaccagaagaggagtagacaatgtgaccacagaggatggattgatgcatccagaaatcaaggaatgctgccagccaccaaaaagtgaaaaaggcaagggacagatttccccctagagcctctggagggagtacagccttgctgacagcttgatttcggcccagtgacaccgatttcagacttctggcctctagaactgtgagacaataaatttctgttgtttatagccaccaagtttttagtaatttgctaaagcaattataggaaactgatgcaatacccaagcactggagagaatacagaaaaatggaaaacgttaaggataatg

SEQ ID NO: 945229 - DNA, 707 bp, Homo sapiens
tcaacatataaaaatcaacctctcttatacactaagtcagtaaaatgaggcaaaaaccacatgactatttcaatagatgtggaaagggcatttgacaaaatccaacagcatttcattataaaaacactaaaaaaattaggaataggatggaaattcctcaacctgatgaagagaatttacaaaaagaaacacagctaaatcatatgtaatggtaagagattaaaagcttttcctctaagatcaggaataagacaggcatgtccactcttgccacttgtatttgacattgtatgggaagttctggtcagggcaattaggcaagaaaagaaagaaaaggcatgcaaagtaggcaaaagttgatattgcagttttgagtgtgaaaattgtagggcaggcaagcaggcaaaatacagacagaatttctgcataactgtcttgaggcaaaattccttcttctcagggaaacctccatttttgctctgaaggccttcaccgattggatgaggatgactcacattatgcagggttatctctttttcttaaagccaatcaagtgtagatgttaaccacatctacaaaataccttcacaaatgactgggttccatagcctagccaagtgacacataatatttaaccatcataacaagggtaccaagacaattcaatgtggaaagamtagtcttctcaacaaatgggctgggacaac

SEQ ID NO: 945230 - DNA, 572 bp, Homo sapiens
gtgtggtagactgaggacttgcagtctgctgtttcaagataaatgaatccagcataagtaacattgcaaatgaaaagaaaakaaaatctatgaagttggcagggcgcggtggctcaagcctgtaatcgcggtactttgggaggccgagacgggcagatcacgaggtcagaagatcgacaccatcctggctaacacaatgaaacccggtctctactaaaaatacaaaaaaaaaaaaaaaaaaaattagctgggcgtggtggcacgcacctgtagtcccagctactggggaggttgaagcaggagaatggcgtaaacccgggaggcggagcttgcagtgagccgagattgcgccactgcactccagcctgggcgacaaagtaagcctccctctcaatcaatcaatcaatcaatcaataaaaataaaaaaatgtgaagtcatcgctacaactattccaggcaaaaaacctttgcactttttgagaaatacctttttactttgtattgaaaatgaaggttttatgtgcatgcaagattgctgtaaggaaggcatacctatgactctaatacaattt

SEQ ID NO: 945231 - DNA, 395 bp, Homo sapiens
ttaagcaacgggaaggtgaaggatctaatgttagataatttagtgccagcaaaggatggtttgatgattttagaaaaatgtttggtttagaaaatattaagataacagaagtagcagcttctgcttaacaaaagggcagcgagttcacagacaccattaagaaaatcgttgaggagaaaggatatcttcctgagcaggtttttaatgcagataaaaataccctattctggtgggaaaaaaaaatgtcacaaaggacatttattagtaaggaagagacatragcatcaagatgtaagtcaggaaagaataggctaactgctcttttgtgcaaatgcagttgggtttataatcaggacttcccgcataaagctgttaacctctgagccttaaaagga

SEQ ID NO: 945232 - DNA, 395 bp, Homo sapiens
ttaagcaacgggaaggtgaaggatctaatgttagataatttagtgccagcaaaggatggtttgatgattttagaaaaatgtttggtttagaaaatattaagataacagaagtagcagcttctgcttaacaaaagggcagcgagttcacagacaccattaagaaaatcgttgaggagaaaggatatcttcctgagcaggtttttaatgcagataaaaataccctattctggtgggaaaaaaaaatgtcacaaaggacatttattagtaaggaagagacataagcatcaagatgtaagtcaggaaagaataggctaactgctcttttgtgcaaatgcagttgggtttataatcaggacttcccscataaagctgttaacctctgagccttaaaagga

SEQ ID NO: 945233 - DNA, 567 bp, Homo sapiens
tgtgatgttttgatttgttttttaaaaaactcattataaaacattttatgtcatttcaacacgagctagaaggcattaacagtcctcaaggtacagagccatmgcatttccttctggaacattcaaaatttccttgaaaaattaaggcaattacttgtttaaaatattttcagaagatactcccacaaaagcaatgatatgccatttgctttagcctcacaaactttctggcatcatattacagtgtatttatcaaattcagacatccacttatatatcaatatcaaatttaaaaactaaattatcataatcagaaactgaggtcagtgtgcccgaattagcactgaggctcacttataacctgtgttaccttgagcaagtatttattctgtctatttctgatttcctttgtgatgaacagcattagtcatttctatttctgtgtacattgtgaagattagatgtaaattgttttgtgctgtgcctggcactgattacgtctgtaattcatgggagcagtgttgttgtcaatgttgctgctgatggtgctgataaaatttatcttca

SEQ ID NO: 945234 - DNA, 604 bp, Homo sapiens
aagtgtggaaaagtttggaactttacctagagacttgttgaatggctttgcccaaaatgctgatagcgacatagacaataaaaccaggctgaggtggtctcagatggagatgaggaacttgtagggaactggagcaaaggtgactcttgttatgttttagcaaagagactggtggcattttgcccctgtcctagagatttgtggaactttgaacttgagagagatgatttaggttacctggcggaagaaatttctaaacagcaaagcattcaagaggtgacttgggtactgttaaaggcattcagttttaaaagggaaacagagcataaaagttcagaaaatttgcagcctgactatgcaacagaaaagaaaaaccaattttctggggagaaattcaagccaactgcagaaatttgcataagtaaggagcaaggagcctaatgttaatccccaagaccatggggaaaatgtctccaagccatgtcagagaccttcacagcagcccctyccatcacaggcccagaggcccaggaggaaaaagcagtttcgtgggctgggcccagggtcctcatgctgtgtgcagccgagggacttggtgccgtgg

SEQ ID NO: 945235 - DNA, 567 bp, Homo sapiens
ctcgacttctcaccgggccttagctgcctctcagcagagcagggctcgggacctgcagcccgccatgcctgagcctccccaccccgcygtgggctcctgcgcggcccgagcctccctgacaagcaccgccccctgctccacggcgcccagtcccatcgaccacccaagggctgaggagtgcgggcgcacagcacgggactggcaagcagctccacctgcggcccccatacaggattcactgggtgaagccaactgggctcctgagtctggtggagaacctttatgtcaagctaagggattgtaaatacaccaatcggcactctgtatctagctcaaggtttgtaaacacaccaatcagcgccctgtgtctagctcaggatttctgaatgcaccaatcgacactctgtatctagctactctggtggggccttggagaacctttgtgtccacactctctatctagctaatctagtggggatgtagagaacttttgtgtctagctcagggattgtaaacacaccaatcagccctgtcaaaacggaccaatcagctctctgtaaaatggac

SEQ ID NO: 945236 - DNA, 509 bp, Homo sapiens
tggagccaccccactcttcctgtgcatagatcattgtgcagtggggtccactccgctccatgcccaggcaaatcttcaggcattcaaaggactggcttgccctacaattcctgtgcakagatcctggatccagggtggggtgagggtccctctcttcttcatgcccttgcagatctccagacattcagagtacctgctcacctggataagcagccccacccttccagtgcacagatcattgtgcagtttggtccaatctgcttcatgcccaggcagatctttgggtattcaaaggaccagcttgccccacaattcctgtgcagagatcctggcgccagggttgggagaggggccttctcttcttcacgcccttgcagatctccaggcattcagagcacctgctcacaagattcacagcctgagctgcgctacctttcctgcatagaaactgcggtgcaccagggccttttctactccatgcccaggcagatctctagtgattcagagca

SEQ ID NO: 945237 - DNA, 745 bp, Homo sapiens
tcctcggtgggggcccttcccatctcttggcatctcctcggggctcagcagtggaggccatggtgggagggcctgagactgattttatgttctgccaaacaaggaaggaaagcgtactmcaatcgcctgatggcaccggagctgctctccacacctgcacaccaagaatcccagctcggcatggaaaggagccggcagtggccagcttcaaggctaagaaggaagctcttggctcagagcttacaaagtttacaacaagttacagggaaactcaagaaaagcgttcataagaggatgctcccaagtccactgatgatgccctgggcttggcagtgccgggcatgagagaggaggcctcgaggaccccacctcagtctccccagatagcagctcctggcagccctgaccctgctctaggctccgctgtggggtgtgggctgctctcctggggttaggctcacacaaaccccttcaaaataagcaaggaaacagaagttcagggcaccaaaatacttagggaccaaccccagcaagggcccttctcccatctccctattctcttcctgaagcaacaataaacaacattcaagtagtattcatttctgtgttttctccaaatgtttgaggaaatctacattctactaccaccttttgggggccaagaaagatgttcgcttgcaaaggacagaactgacccaagcaccctcttctcaaacgtatatggcactccagatgccgttttctg

SEQ ID NO: 945238 - DNA, 629 bp, Homo sapiens
tacttgagtccagcaggtcaaggctgcagtgagccacattcatgccattctgtgcctgggcggcagagtgagaccctgtctcaaaacaaaacaaaactaaactaaaaactgcaaggctgttttccaaacgggctattccattttacattcctattaatatccatgatataggctgggcacggtggctcacgcctgtaatcccagcactttgggaggctgaggtgggcggatcacctgaggtcaggagttcgagactagcctggccatcatggcgaaaccccgtctctactaaaaaaatttaaaactaggccgggcgcagtggctaacacctgtaatctcagcactttggaaggccaaggcgagcagatcacaaggtcaaaagatcaagaccatttggccaacatggtgaaaccccatctctactaaaaatacaaaaattagctgtgcgtggtggcgggtgcctgcaatcccagctactagggaggctgaggtaggagaatcgcttgaacccaggaggtggaggttgcagtaagccgagattgcgccacatcaccccagtctggtgacagagcgagactctgtctgtaaataaataaataaataaataaayaaataagccaggtgtggtg

SEQ ID NO: 945239 - DNA, 636 bp, Homo sapiens
ggtcttcctaaccctcagctccctctgatttttggaattcagatttggattttggatgtacatcaagaggctggctccaygcattttaattaagttgtcttttttcatttattactaatacactcctcttaactatgatttattggttaaacaaagcaccataagccgtcacttattcatcttaatttcaacaaaattaaagtagtcgctgttagattgcacctaattgcacttgcaatgaaaagaacggagatgttaatcaaaataaattgaagataaacaataaaatcattacatctttgcggtggtaagtgtaactaatcagttttgactcgaagtgaccgagcaggaataatgaatgtgtcaccgaaggcacgctcattaagggaggctgccgggacctggtcctcagggcagcaaacagccaccctgcccatgtggctctgagggttcctgcctcctgggctgggcagagggaccccaaggagtaaagtgattcaggaggaggctcagagaatggaagcgagtcatggatgggggtctctgaggctgccctgctacaaaggggtcctctcactctgatgggaaagaggtcccaggctcgttactggacagcccaggaaaccaaggatgggg

SEQ ID NO: 945240 - DNA, 566 bp, Homo sapiens
tcatttaatttgtacccccacactctctggtaggctatatatgtgtgtatatgtatgtgtatatatatatatatatatatatatatatatatatatatwgttgtttgtttgtttgttttgagacagagtctcactctgtcgcctaagctggagtacagtagcgtgatctcggctcactgcaacctctgcctcccatgttcaagtgattctcctgcctcagcttcctgagtagctgggactacaggtgcgtgccaccatacctggctaatttttgtatttttaatagagacggggtttcactatgttggccaggctggtctccaactcctggccttgtgatccgccagccttggcctcccaaactgttgggattacaggcgtgagccactgcgcctggcctcaggtagacaatattaacctcattatatggatgaaggcatcaagccacggagaagttagcccagggtaacacagtgaacatgtgatacagccatgatttgaatcctaacaatctggcttcaaggccctctgtgaaagatgaggttggattaattttctaaaaaagg

SEQ ID NO: 945241 - DNA, 550 bp, Homo sapiens
ttaaggaagggatccagtttcagctttctacctatggctagccagttttcccagcaccatttattaaatagggaatcctttccccatttcttgtttttgtcaggtttgtcaaagatcagagggtggtagatatgcagcattatttctgagggctctgttctgttccattggtctatatctctgttttggtaccagtaccatgctgttttgtttactgtagccttgtagtatagtttgaagtcaggtagcatctcactgatatttctttaaaaataaatgagtactgcactcatttatttttaagttacaacattcacaagaaatataacaatgaaactgtcattagtgttgtgactatacttaataaaaagctaggcaaaaaaagttttgaaaagacttctgacactaaaaaagttgcaagtacaaaatttcagaataaagaacagtactttttttaaaatttcaaataagtaatcaaaggcacataaattaaaatgtaatatcttkgtctaatactgaattagtaaataccaaatttgacatttaaaag

SEQ ID NO: 945242 - DNA, 524 bp, Homo sapiens
gttttgctcttgttgcccaggcgggagtgcagtggcaccatctcagttcactgaaacctccccctcccgggttcaagctattctcccacctcagcctcttgattagctgggattataggcacctgccatgacacccagctaaattttgtatttttagtagagaaggggtttcaccatgttggccaggctggtctcgaactcctgatctcaggtgatccagccgcctcagcctcccaaagtgctgggattacaagggtgatccaccgcgctcggccttagagttggtattttataaagaatagaagtttacatagctcacaattttagattatggaagtccaagagcacgccattgacatctgatgagaatcagatttccacatcacaaaatggccaaaggcatgaggaygacagaaggtgaacataagagagcttacttttataatagacccaatttcctgccagctaacccactctggaaacaatgacattaattcattcatgagagtagattccctcaaaac

SEQ ID NO: 945243 - DNA, 513 bp, Homo sapiens
gacagtttctagaccacggctcctgattggataaggtttcaggccccasccttcatgccctgagtgagggaatatttgatcagacactgggctgagcgaagcaaaaataacagcctaggctgcagccttcacaggcagggcttcttccttgatctgagccaggccaacttcagaggatatttgcatttaaccttgtgtataatgtcatatgcatttataaatgatatataatatttattcataaattgaaataatgacaattattttaaaatttaggattttatgcccttccttgctgcggatcctttgcagtgatatggtgtgactttctggctccacccaaatctaatctcaaattgtaattcccgtccatgtgcggtggctcacacctataatcccagcactttgggaggccgaggcgggcaggtcactagttcaggagttcgagacaggcctggcaaatacggtgaaaccccgtcaatactaaaaatacaaaaattagccaggcgtggc

SEQ ID NO: 945244 - DNA, 558 bp, Homo sapiens
gtcaaacctaattcttaataaaaccttatagacaaatctatctagtcttaatcagtttgacaataaggtaagattcctataacccttttataatactttacaatttttgtgaaagagcagagtagtgctctaargaaaaccagttgtacttttattccagtgttcaatttataaaaaactgaatacccctttaactttagccaatatgttaacacacagaatttcttttaccagatgtaaatttttacgaacttttcacaacttggttaatccttcagctctgttttatctaatttaaaacaatcctttgaccctttaatttaggacaaaagtaatctacattcccatgacttcttgtaatcttttactgaaaacacatttgactttttttacatacctagcatgtaaaactgtttttatttcccaatgattactaaagtgatgtaaactaaaatacaccatggtttctatttttctgataaaatatttgatttgagctcttattatttttaaaccaattaatcaaatctccttcatattacacacacaacacatata

SEQ ID NO: 945245 - DNA, 605 bp, Homo sapiens
gccttccaaagtgctgggattacaggtgtgagcctccgcacctggcaaatttggctgtctaatttccatattgcttaacatgtttacwttgattttatattaccttatcatcagaaaaaatgtgtgacaaagaactaaaatagattattttgtgtctgatcaagcaaagctactttgtgggggtttattaaactatctcatgtaataatattttaagacaaatcgattctttttttattctttcatattccaaaatatcaatagccacagggcagtgaacacaaagtccacctgaaatatctatgaaatatataatgtacagagctaagattcagcagtggcatgcagtccctccaatatatgctcaagggcaccactgttcacttgcactgataagaaggatttttacctttaccctccccaacactattggccatgcccttttactaagttatatgaactgagtctatcagataatgatgctctgcaagccactgatgaaaaactacagacaggccaatgctatgtgctaaactttctgaaaatagaaacccggcaccactctcccacccttttctagtcacacactgaaaattcccttggag

SEQ ID NO: 945246 - DNA, 507 bp, Homo sapiens
agactgctagctagattaacaaagaaggatacgtacaagtgtaaccagaaatgacaaagatggatttacagaatatctcaaagaaatataaaaaaagatcctcagagattattttgaaaacctctgtatatgctacatagaaaatctggaggaaatggataaattactgggagcacacaacctcccaagattgaaccaggcaggaagtgaaaacctgaacagaccagtaacaaatgctgaaattgaatcagtaatttaaaaattactaaccaaaaagagccctgaaatagcagcttcttagctcagcatttatagctgaattctaccagatgtacaaagaagaaccggtaccaatcctcctgaaactatttttaaaaatcttccctaactcatcctacaaagccagcatyatcctgataccaaaatctggaagagacacaatgaaataagaaatcaatatccctaatgaatatagtcacaaactcctcaatacaatactaccaaaca

SEQ ID NO: 945247 - DNA, 568 bp, Homo sapiens
gtgaatgtaattaatgccactgaactgtacacttaaaaatggttaaaatggcaaattttgttatatatattataccacagtaaaaaacagttttgcaaaactctmttcctaacctaattttaatttgactatatctggaatgtttaaacaaataggagttgtgtatactaacataatgagaagtctaggagggtgctgtggcactggttcagggtcatcctctcctcgaatctcttggctgaccatccacaggcctttcctgagtgcttattatttagcaataacctcctacaatttagaaggaatagagtatatgatggaggaacaagggtcaagtcactgtaacccaagtattctcaatgggaagactggttttggggagaccaaaaatatcttaaatattaaatggtttgtggccctccaaggctcatccctacccaacaaatcttttcccttagtatttaattctctcataagagagtatttaaattaaattcttttttcttttttggagaagagtaatgaaaaaaaattgagaaatacttttgtagcctaaggaagaaggtgg

SEQ ID NO: 945248 - DNA, 599 bp, Homo sapiens
aatattttttaattggattttcaaaatcatggtaaaattttgatatgttttgatggctattccaaatactgctattataacattgaattggattttaaaacttgatgtgtactgagagttagattgtcgaaaccaatacttttcaataataactcttccagaatttcaaatattttaacatggaagtatggaaattgagtcacataagtttacttaaaagacttttcattctattttaaaaatatatttgatccaccgcatattctcactcataggtgggaattgaacaatgagatcacatggacacaggaaggggaatatcacactctggggactgtggtggggtcgggggagggggtagggatagcattgggagatatacctaatgctagatgacacattagtgggtgcagcgcaccagcatggcacatgtatacatatgtaactaacctgcacaatatgcacatgtaccctaaaacttagagtataataaaaaaaaaaaaaaaaaaaagacagcaatgcaaaaaaaaaaaaaaaawatatatatatatatatatatatatatatatatatatatatatatatatatttgatcataa

SEQ ID NO: 945249 - DNA, 475 bp, Homo sapiens
gaaatggaggcaacaataactttgacaaatgccattgagaggttacttaggatgagtgcagaggatagacatttggattcaagaacatgatcattggcaacctgatgagggcaatttggtagaacttaataaaattaggtatgcctatgcggtgtggccaagcaattctacctctgtgtatataacccagagaaactcttgcagagtcacatgaagatatttattaggatttttaccgtaacaaagcttatgggaacaaggacttggaagaggtctagcaacaggaaattgggtgaagtatgctttatgcatagggtagaataatatgcagcagtcagaaataatggactcaattatagacaacactttggatagatttttaaaataatattgagtgaaaataaygaaaaagttttaaaaagtaagaaacatttatagcatgttactactattgtacacatttttaaatgataaa

SEQ ID NO: 945250 - DNA, 263 bp, Homo sapiens
gtattgtactttttaataaaggaaactgtcagatatgctataatacagaggaaaacgtttatatactctttcattataatttttccacaacttccaaaatgaagaaaaagacatggaaacattaagytcatagaataattgtggcagacaattccctcatcctaaaagttcaattaccccaacacaggcataatttcttactaactcaaaaggaactgaattcacatataaagacaagcatgggattctgttgagttctgttg

SEQ ID NO: 945251 - DNA, 298 bp, Homo sapiens
ttcatcaagtctctccctaatgtattgtactttttaataaaggaaactgtcagatatgctataatacagaggaaaacgtttatatactctttcattataatttttccacaacttccaaaatgaagaaaaagacatggaaacattaagctcatagaataattgtggcagacaattccctcatcctaaaagttcaattaccccaacacaggcataatttcttactaactcaaaaggaactgaattcacatataaagacaagcrtgggattctgttgagttctgttggacacaagacacaa

SEQ ID NO: 945252 - DNA, 624 bp, Homo sapiens
acaagtgacaacttacatatagaggaagagcagtttgaatgattgtgaatttctcatcagaaactacagaaccaaagactgtagaacaacatctttaaagagccaaaggaaaagactggccacctagaattttatattcaatgaaatatatatatgctaaaagaagctcttcaggctgtagaaaagaaaaagaagaaaacctggaacttcaagaataaacatgggaaaatataacaaacaatttttcttatcttaagatctttaaaacatatactgttattgaaagcaaaattttaaaaatttcagggaatgtcagtgtatgcagatgtaatatattttttaaatgtaatataaatgggggagggtaaaaggacctatatagctgcaatacttctacattttacttgaagtggtgcaatattaactctaagttgactgtgtagggatttaataatctctagggcaaccagtaaaaaataatataaagagttatagcaaaaaaagagatagataagttgaagtagaataytaatattatttaaatgtccctatagaattcaggaagggaaagagagaggaacaaaggaggaaataataacatagtagaaataaatccaaatatct

SEQ ID NO: 945253 - DNA, 607 bp, Homo sapiens
gtggcacaaagaggttctctaatatgcccaaagtcattgctcggaaggggtggagctgggatttgaacacagtctattgtggatgttgagcagagaactgtactrtacaggaatcctgaaggcaaggacagtcctagagaggataatcaggtaacagcagagctatttccatccgagacctccactcctttcagccacacaaataagcatgctgtaaggtagaacaatgaggaagctgctgacatgtttcaaagcctgtgtccccttctctatgttggggaaactatttgacccaatcgcttcccataggtgccacacaaaaaagaggtggtcagagccatcagctttatgacagttcctggccctcacccaacatatttacctttctctcctcagtttaatgtgtgctgtgttggagaacatcttacctaggaagtcctatttgaacataattgtgcagcagcaaatgtgaacttgaagtaaaatcttgtattacgtgagccctgaaatgcaaatctagacttatttattccaaattctcaagccaaagtgattagagaagcacacaccttgcaggttagatcccaggggaccctactgaaaaaag

SEQ ID NO: 945254 - DNA, 598 bp, Homo sapiens
atggctggagtaggagcaagagagaatgggaaggagctgcatacttaaaaatttttatttaatgtactttacrttctgggatacatgtgcagaacatgcaggtttgttacataggtatacatttgccatggtggtctgctgcacccatcaacctgtcatctaggttttaaggtatttgtcccaatgctctccctccacttgcctccccaacccccgacaggcccccatgtgtgatgttcccctccctgtgtccatgtgttctcattgttcaactcccacttatgagtgagaacatgcagtgttcggttttctgttcctgtgttagtttcctgagaatgatggtttccagcttcatccatgtccctacaaaggacatgaactcatactttttatggctgcatagtattccatggtatatatgggccacactttctttatccagtctatcactgatgggcatttgggttggttccaagtctttgctattgtgaacagtgctgtaataaacatatatatgcatgtgtctttatagcagaataatttataatcctttgggtatatacccagtaatgggattgctgggtcaaatggtatttct

SEQ ID NO: 945255 - DNA, 568 bp, Homo sapiens
gccacttcaactgcagaggccaagccgaaattttctcagggcaagctattggaccagaggtggtggccagtggaggaccagcccargggcagaaaggaggctggctggggcgggggcgggggcagtgtccccaaatgtttccagcatgatgatttttcatcctgagatttcagccaaactcagcttgtgttctttgctggttctgcgtctcaagatgcagtttatacctaaatgtcactctttagtattgaacacgcgcactttggagtgaatttttttttttttttttttttgagatggagtctcgctctgttgcccaggctggagtacaatggcgcaatctccgctcactgcaagctccacctcccgggttcacgccgttctcctgcctcagcctcccgagtagctgggactacaggcgcccgccaccacgcccggctaatttttgtatttttagtagagacggggtttcactgtgttagccaggatggtctcgatctcctgatctcgtgatctgcctgcctcggcctcccaaagtgctgggattacaggcgtgagccaccgtgcc

SEQ ID NO: 945256 - DNA, 626 bp, Homo sapiens
ctatctagtggcctctaagtcaaaccatacagcccaatataaagcctgctgacagaagtgcatagagctatagaagcaaatccaaargattctatgcaacgtactctatggtcacactcccctagggagagggaaaagggaaagaaatatacaggggaagaaaaaaatcaatattcatatgaaaataattacaaaaagtaggagtattagcatcgccagatgagagtaaaacaacacaagaattctggcactatgaaatatcatgacaggatcaaacctcccctatcaatattaactttgaatgtagatggtctcaacaccccacttaaaaggcacagagtggcaagttggataaaaaataaaaaaaaaatttaaaaaaaaaacaaagatccaaccacctgctgtcttcaagagactcatctcacatgtaatgacaccaatagactcacattcaagggttggagaaagatctatcatgcaaatggaaaacaaaaaagagcaagggtagctattcttatattggacaaaacagactttaaaccaacaaaagtaaaaaaaggacaaagaatggcattacaaaaccacaatgagataccatctcacattaattagagtagctattatta

SEQ ID NO: 945257 - DNA, 463 bp, Homo sapiens
caaccaataatctatattttgtctatggatttaccttgtctggacatttcatgtgagtggaatcatacaaaatgtggccttttatatctggctgttttcacttttgttttcaaygttcacccccattgtagcacgtgtcagtactttatgcctttgatggctaaataacattccactgtatgaacataccacattgtgcttatccatccatccatggatgacatttagattgtttccaccttttagataagatgaaaaatcctgctatgaacattcatttacaagtttttatgtatttgtaaaatttttcaaaaacatactcaaaaacttttttttcaaatagaaagctttagctttaataactattgcctctgggaataattttggtcttattgcctgtcttgtcaaggctgaacaatgatcctttattactctttttttttttttttttttgagacggagt

SEQ ID NO: 945258 - DNA, 545 bp, Homo sapiens
tgaagaggctgagtcactttccaaggacatccagtgtgtgagtggcatggctgaaccctacttaatataaagcctgaaartggctccgagtaggaaagatcaggttcctcaaaagactattctgggggtctcgcagcgtgggaaggatgctatgcctatttctgtagagccccaccggatctggggcgctcttcactgtggctttttttttttttttttttgagacagagtttcgctcttgttgcccaggctggagtgcaatggtgcaatcttggctcaccgaaacctccgcctcccaggttcaagcaattcttctgcctcagcctctggaatagctgggattacaggcatgtgccaccaagcccggctaatttttttgtatttttagtagagacgaggtttctccatgttggtcaggctggtcttgaactcccaatctcgggtgatctgcctgcctcggcctcccaaagtgctgggattacagatgtgagccaccgcgcccggcttcattccggctttgctgagctaagagggcccaacgctta

SEQ ID NO: 945259 - DNA, 545 bp, Homo sapiens
tgaagaggctgagtcactttccaaggacatccagtgtgtgagtggcatggctgaaccctacttaatataaagcctgaaagtggctccgagwaggaaagatcaggttcctcaaaagactattctgggggtctcgcagcgtgggaaggatgctatgcctatttctgtagagccccaccggatctggggcgctcttcactgtggctttttttttttttttttttgagacagagtttcgctcttgttgcccaggctggagtgcaatggtgcaatcttggctcaccgaaacctccgcctcccaggttcaagcaattcttctgcctcagcctctggaatagctgggattacaggcatgtgccaccaagcccggctaatttttttgtatttttagtagagacgaggtttctccatgttggtcaggctggtcttgaactcccaatctcgggtgatctgcctgcctcggcctcccaaagtgctgggattacagatgtgagccaccgcgcccggcttcattccggctttgctgagctaagagggcccaacgctta

SEQ ID NO: 945260 - DNA, 644 bp, Homo sapiens
tgtccaatgttttgtgtagttgcctcaaaggaatctatgtctgctggtgatcagaaaacacaaatatgggtgtgaagaacaggattaggactaaaaaccatttaccaagatgtgaaccttaaaaaaattatttcagtagtttttggggaaaaggtggggtttggttacatggataagttctatagtggtgatttctgagattttggtgcatccatcaccagagcagtatacactgaacccaacatgtagtcttttattctcctccccctcctatccttcctcccttagtccctaaaatccattgtatcattcttatgcctttgcatcctcatagcttagctcccacttatgggaacacatgacatttggtttttcatttctgagtgacttcatttataataatggcctccagctccatccaagttgctgcaaaggccattatttaattctgttttatagctgagtagtattccatgggttatacataccatattttctttatctactcattggttgatgrgcatttatgttggtttcatatttttgcaattgcaaattgtgctgctataaacacgtgtgtgcatgtgtctttttcatataatgacttcttttcctttgggtagatacccagtagtgggattgct

SEQ ID NO: 945261 - DNA, 604 bp, Homo sapiens
tttctcccctcatatcttgtattattcattgatttccataaattggactttacatttctatggtacctacttgattagtttaataattgactttctaaatttttttttagacactacatggatttcttcttggtttggattcattgctggtaaacttgcatgatttttgggtggtgctaaagaacattgttttttcatattaccagaattgtttttctggttctttctcatttgggtagactgtgtgagaggggagatctgggggcttaaggctgctgtatagattcttttgtcccacagggtgctccctcgatgtaataccctaaccctttttctagggatgtagcttcctaagagctgaactatagtgattgttatttctcttctggacgcaggtctattagtctctgggctggtacttgagggtgtctgcacagagtcctgtgatgtgaatcatcttcaggtctctcagccatggacaccagcacctgytgtggtggaagttgcagaggagtgaaattgactctgttgcatccttaattgtaattgtttaatgaactagttttttgctggttggcctcctgccaagaggtggcaccttcaa

SEQ ID NO: 945262 - DNA, 530 bp, Homo sapiens
ccaaataaagatgtgggtattatccagtgttcaatctaagtttccaatgaatacatgaataccaaagcatgaattattaaaccttacacaaaaggtaggtctttacttcaattttctgtggaagaaattaggtatacaatgaaaaaccttcccgtggtatcctcagtaccctggaaactcccttactggatattatacagctattaaggtagaagtacaacaattatatcgaaattatcctacataacaagactaatactcatgttgacaatgaccactgccactatctctcgatgttctgggataagaacattcagttcttatccatgaagaggaaaaggcagaagctcccagcactctgcatttggtgcattcaatgcattctgcattcagtcttttacctctgggtgagstgatgatgctgcattgacctgaggatctgcaagagcagatttaagtgtcacgagaaggagatacctgctccttccaaggtgagtagcagttcaatagaatttgttctgctcaacagt

SEQ ID NO: 945263 - DNA, 530 bp, Homo sapiens
ccaaataaagatgtgggtattatccagtgttcaatctaagtttccaatgaatacatgaataccaaagcatgaattattaaaccttacacaaaaggtaggtctttacttcaattttctgtggaagaaattaggtatacaatgaaaaaccttcccgtggtatcctcagtaccctggaaactcccttactggatattatacagctattaaggtagaagtacaacaattatatcgaaattatcctacataacaagactaatactcatgttgacaatgaccactgccactatctctcgatgttctgggataagaacattcagttcttatccatgaagaggaaaaggcagaagctcccagcactctgcatttggtgcattcaatgcattctgcattcagtcttttacctctgggtgagctgatgatgctgcattgacctgagratctgcaagagcagatttaagtgtcacgagaaggagatacctgctccttccaaggtgagtagcagttcaatagaatttgttctgctcaacagt

SEQ ID NO: 945264 - DNA, 446 bp, Homo sapiens
cacagaaaaaggctaagggaaaattgaaggtgcatcccaacagagtccttcggtcataactgagacttattggttcaaagtattgggccaagaaggaaatatctactaaatcatcgactaccaagataaccatgcagaggcttcagtggccgcacatgaagtgtagagatcatggcattagagaactcacttaacagccagcaacaagtcctgcaagtcaggcaggggaatctctaactccagagttgtcaattatttcagttatacagtgtaacaaaaagtgaggcatgaaaagaaatggcaaagtatggccgataacacaggttctaagtagttgatagaccctgtccctgagcaagccagaacagctggactkcctagccaaactcagttgttttagatacctacaaagtaaagaaaaccatgtcaaaaggaactgaagaaat

SEQ ID NO: 945265 - DNA, 578 bp, Homo sapiens
aaagacctctgggcccatttggataaacacttgtacgaacctccagaatcactcagatacacgaacaaggcttagcatagaaatacctctgtcccatgggcaaagacttcatgactaccaccaatagcaatggcaacaaatgccccaattgacaaatgggatctaattaaactgaagagcttctacacaggtaaagaaactatctgaacagacaatctacagaatgggagcaaatttttggagtctagccatctgacaaagggcttatgtccagaatctacaaggaacttaaatttacaagaaaaccccatcaagaagtaggtgaaggatatgaacagatacttctcaaaagacatttatgcagccaacaagcatgaaaagaagctcatctctggtcattagagaaatgcaaatcaaaactgcaatgagataccatctcaagccagctacaatggcgaacattaaaaagtcaggaagcaacagatgctggagaggatgtggagaaatacgaaygcttttacactgttggtaggagtgtaaattagttcaaccattgtggaagacagtgtggcgattcc

SEQ ID NO: 945266 - DNA, 725 bp, Homo sapiens
ctgaacaacatctatagaaaccagtggcaaagacagaagcaagacgactggtttggtggagagrtctgataacaaagttaggaaatacgtaaaataacaacatggggtagaggttatgcttgtgtttctccaggccaaaaccagcagccaacttggataccatcaaggtacctgaaaccttatgagccagatgctgaggaagagatttgggaaggaacccgaggacccccgattgcagccatgtcgagactgacagtaaggaagacaccagtcccggcaagcaacactcaccaggcacagccactcacctggggccacatcaagaagttgacaaagatgggagaagaaaatctgaaggtggcggaatgaccagctatgatgaataatctaataatagctatgacggctgtgctcaccattgctatgagtactccccccaccccccccccccccagtaactgctgaaacaattatattgggcatatattccttttctaccacttctacggccagtaatatgcttagagcccctagtggaggtatacactaatgatagcttttggatgcctttttctacagatagaggcgtgtctcacccccaagaggagggaacaattataaatatcttgttgggatttgagcatttacctatttgcttagggaaagccaatgggcgtttacctcccaatcttggctggggatagtgcctgaacatatctctgcgg

SEQ ID NO: 945267 - DNA, 725 bp, Homo sapiens
ctgaacaacatctatagaaaccagtggcaaagacagaagcaagacgactggtttggtggagagatctgataacaaagttaggaaatasgtaaaataacaacatggggtagaggttatgcttgtgtttctccaggccaaaaccagcagccaacttggataccatcaaggtacctgaaaccttatgagccagatgctgaggaagagatttgggaaggaacccgaggacccccgattgcagccatgtcgagactgacagtaaggaagacaccagtcccggcaagcaacactcaccaggcacagccactcacctggggccacatcaagaagttgacaaagatgggagaagaaaatctgaaggtggcggaatgaccagctatgatgaataatctaataatagctatgacggctgtgctcaccattgctatgagtactccccccaccccccccccccccagtaactgctgaaacaattatattgggcatatattccttttctaccacttctacggccagtaatatgcttagagcccctagtggaggtatacactaatgatagcttttggatgcctttttctacagatagaggcgtgtctcacccccaagaggagggaacaattataaatatcttgttgggatttgagcatttacctatttgcttagggaaagccaatgggcgtttacctcccaatcttggctggggatagtgcctgaacatatctctgcgg

SEQ ID NO: 945268 - DNA, 604 bp, Homo sapiens
aaaacatggcgactgtaggcatcatacaatattcatcgtcatcatgatgcaacaggagggaagaaccaaagttttggtgagtattaacacacacatccakgtcactaaataaaagttgtctaagtgttaaagaaaatgctatgttggtgctgatatgtactatggagtcagaccttggatagttacatctgtactgaccacatgcaaattttttccttgtcatttcctaaatactacagtataacaactacatacagagcatgtacatttagtaggtattataatatcaagatgagcttaagtatacaacaggatatgcatagattatatacaaacactatgacactttacataagggactagagcatccactgatttgatatcagcctgtaatcctggaaccagtcccccatggaaaccaaaggttgactctactcttgttttccacctgtagcatcaagcctccaagacctcagaaacaatctcccaagagaattatcactggaacactggcttataattatggcttatctctacagcatgctccctagatcagctaccactgtagactctcctggattaggcagcacagggaagatgagca

SEQ ID NO: 945269 - DNA, 628 bp, Homo sapiens
tgatttggataccatcgagacacctgaaaccttatgagccagatgctgaggaagagactttgggaggaacscaaggactgcagccatgtctagactgacaataaggaagacaccagtcctggcgagcaacacttatggtggcacagccacccatctgaggtcagatcaaaaagttgacacagatggcagaaaaaaatctgaaggtgggacaaccagttacaatgagtaacctaatggtagctgtgatggctgtgctcaccattgccatattcccccagtaactgctgaaacaaaaaacaattaagcttattgggcaaatattccaccacttctacagccagtaacatggttagaccccccagcagaggtatacactaatgatagtttttggatgcctggttctacagataatagaggcccatctcacacccaagaggaaggaacaattaagaaaatctcattgggatttgatcatctacccatttgcatgggaaaagccaatgggtgtttacctcccagtcttcaatcttggcaggcaacagtaccttaacgtaacatctttgtggcacaatcacatatgctttctggtcttagtatttattacaatgattgtgctcctgtagccaaa

SEQ ID NO: 945270 - DNA, 563 bp, Homo sapiens
gagacacctgaaaccttatgagccagatgctgaggaagagactttgggaggaacccaaggactgcagccatgtctagactgacartaaggaagacaccagtcctggcgagcaacacttatggtggcacagccacccatctgaggtcagatcaaaaagttgacacagatggcagaaaaaaatctgaaggtgggacaaccagttacaatgagtaacctaatggtagctgtgatggctgtgctcaccattgccatattcccccagtaactgctgaaacaaaaaacaattaagcttattgggcaaatattccaccacttctacagccagtaacatggttagaccccccagcagaggtatacactaatgatagtttttggatgcctggttctacagataatagaggcccatctcacacccaagaggaaggaacaattaagaaaatctcattgggatttgatcatctacccatttgcatgggaaaagccaatgggtgtttacctcccagtcttcaatcttggcaggcaacagtaccttaacgtaacatctttgtggcacaatcacatat

SEQ ID NO: 945271 - DNA, 518 bp, Homo sapiens
cacccagcctttagtaatcttttcaagatttcttgtaaggcaggtctggtagtaaacaaactccctccctcaacatttgcttatctggaaaaaaatcttatttctcctttgcttagaaagtttaatttggctagatatgaaattcttgtttgaaggttttttctgtaagaatatttgtttcgtttttcgtttttttgagacggagtctcactctgtcactaggctggagtgcagtggcccaatctcggctcactgcaacctccgcctcctgggttcaagtgattcctctgcctcagcctctcgagtagctgggactacaggtgtgcaccatcacacctggataattttttgtatttttggtagagatggggtttcaccatgttggccaggatggtcttgatctcctgacctcatgatcttcccgcctcagcctcccaaagtgctgggattacaggcatgaggcaccaygcctggcctctgtaagaatattgaatacaggccccgaatatcttctggct

SEQ ID NO: 945272 - DNA, 663 bp, Homo sapiens
atgaggactgtagaccgtggtattttggctgatgttagtttcttgctttctagagctaaaactgtggctgctgccagtgctctaagacaggttggccaccctttgactgagttgctgagttgtttagagaggtaggctacaggagcaaaggaagagggattttgtttttgttgtcctgagacaccaagggctattccttggtttttggcagtatagagagtgaaaggttgggatatactaggtaaggacagagctggtgcagtgataagattggtttagagtttgtggaagttggggagtatgttatgtgaggagtttaggtgtttgttgaggggtctttggctgctttacaaagggggcaagctaggagggcaaagttgggaatccatatttttagaaagcctgttatccctaggaaagaaaggattttgcttttttaggaaggtagagataggctgactattaaggctgctgatgccagggtcatggcttgggacctgggggagagttgaagtcctaagcaggtcaccataggggtggaaagcwgtgctttggagggggagaccctatggcctttattagtaaggaaattgagaagggtggcagcatgagtttgggagatttttaaggaggggctacagaggaggaggtcatctacatatt

SEQ ID NO: 945273 - DNA, 583 bp, Homo sapiens
cgaacatcaagtacttcacaaggtaatagaatatcacaaggcaaatggaggcagggcgagatcacaggaccacaggaccgtggtgaaattaaaattgctaatgaagttttgggcaccattgtcattgataacatcttattaggagaaagggttttgagagcaaccggtctgactaaaatttattagacaggaatttcctcttcccaataagcctgggagcactatgggagactggggtctatttcacccctgtagtctacagaccataaaagaggggcacgcacaggggggccatctatagacttatacccctgggtgcatattctctttcccagggatgttccttgctgagaaaaagaattcagcaatatttctcctatttgcttttgaaagaagagaaatatggctctgttccatctggctcaccagcagtcagagtttaaggttatctctcttattcyctgaacaattgctcttatcgtgttcttttttcaaggtgcccagatttcatatttgttcaaacacacatgctctacagtttgtgcaggtaacacaattatcacattgtcctgaggcaacatac

SEQ ID NO: 945274 - DNA, 476 bp, Homo sapiens
accagctgttctgaggggcccagcagaaagctgattcatggaagaatgcagtttccacatcctgattattattattattattattattattattttgagacagtgtctcactctgttgcccaggctggagtgcaacggcgcaatctcggctcactgcaacctcctgctcctgggttcaagtgattctcctgcctcagcctcctgagtaactggatctataggcatgcgccaccatgcccagctaacttttgtatttttagtagagatggggtttcaccatgtagtccaggcaggtcttgaactcctgacctcaggtgatctgcctgcctcagcctcccaaagtgctgggactataggcgtaagccactgcacygggtcaacacattctgattatttcgttcactttactccaaccaatcaatgaccccagttttctagcccttcaccctccatgatccccttaaaaacctttgccc

SEQ ID NO: 945275 - DNA, 476 bp, Homo sapiens
accagctgttctgaggggcccagcagaaagctgattcatggaagaatgcagtttccacatcctgattattattattattattattattattattttgagacagtgtctcactctgttgcccaggctggagtgcaacggcgcaatctcggctcactgcaacctcctgctcctgggttcaagtgattctcctgcctcagcctcctgagtaactggatctataggcatgcgccaccatgcccagctaacttttgtatttttagtagagatggggtttcaccatgtagtccaggcaggtcttgaactcctgacctcaggtgatctgcctgcctcagcctcccaaagtgctgggactataggcgtaagccactgcactgggtcaacacattctgattatttcrttcactttactccaaccaatcaatgaccccagttttctagcccttcaccctccatgatccccttaaaaacctttgccc

SEQ ID NO: 945276 - DNA, 654 bp, Homo sapiens
cagagcagagctagatttgcccggtggctaatgaagcttcagggctcttcatatgcacaggctccttcaaaggttctgcacgttgttttgctttcttttttctttccttccttccttccttccttccktccttccttccttccttccttccttccttccttctttccttccttctttccttccttccttccttctttccttcctttcttccttcctttctttctttttttttttgagatggagtctcagtctgtcgcccaggctggagtgcagtgggacgagctcagctcactgcaacctctacctcctgggttcaagcgattctcctgcctcagcctcccaagtagtgggactataggcccgtgccaccatacctggctaatttttgtatttttagcagggacgggttttcaccatgttggtcaggctggtttcgaactcctgacctcgtgattcgcccgcctcagcctcccaaagtgctgagattacaggcatgagccattgtgcccagcctattttgctttctttttcttaaagcgaatcccctaccctcccaaactgtgtaatccttaggctctaaaaataatttgcacccacccttggtctagagaaatgataactgaggaataaatgcatctctatgtgtgcaatatt

SEQ ID NO: 945277 - DNA, 654 bp, Homo sapiens
cagagcagagctagatttgcccggtggctaatgaagcttcagggctcttcatatgcacaggctccttcaaaggttctgcacgttgttttgctttcttttttctttccttccttccttccttccttccgtccttccttccttccttccttccttccttccttctttccttccttctttccttccttccttccttctttccttcctttcttccttcctttctttctttttttttttgagatggagtctcagtctgtcgcccaggctggagtgcagtgggacgagctcagctcactgcaacctctacctcctgggttcaagcgattctcctgcctcagcctcccaagtagtgggactataggcccgtgccaccatacctggctaatttttgtatttttagcagggacgggttttcaccatgttggtcaggctggtttcgaactcctgacctcgtgattcgcccgcctcagcctcccaaagtgctgagattacaggcatgagccattgtgcccagcctattttgctttctttttcttaaagcgaatcccctaccctcccaaaytgtgtaatccttaggctctaaaaataatttgcacccacccttggtctagagaaatgataactgaggaataaatgcatctctatgtgtgcaatatt

SEQ ID NO: 945278 - DNA, 577 bp, Homo sapiens
tgttccttggaagttaggaattccctttctctccatattgctgcgtggtcatggaggactaggtaagcatattagtgtctgtatatatatttaccctttttccttctaattctagtgcctgaatgaggtctgttagttctgccagctgagcgctagttcctggagtgagggggttactttgaagtattccattatcactgagcactgcgtaccctgcttttcgaagtcctttttctacaaaggaacttccatcagtatacaagttgaggtcgggatcagtcaagggaacctctagaaggtccccttaagcggcgtaggtgtgagcaatcacctgttgacagttatgttcttttttttattgtctggaagaaatgtggctggattaagagttgcacaagtgcacagttgcagcactggctctttaatagagcctgatatttaagcaaatggttgtctgacagccacaagtctcttttagcagtgagtatgctgtttacattatgagatgtccacacagtaagatctcttccctgtrttattttaactgcttcagatcctaagactgctactgctgcca

SEQ ID NO: 945279 - DNA, 588 bp, Homo sapiens
gactgacgctgcccgattgcctcggaagctccgtagaccatcacggatgccgagcttcgggtaactctcacagtggaagttaagtctgtccccttagtcaatacagaggttmcccactccacattaccttcttttcaagggcctgtttcccttgcctccataactgttgtgggtattgacggccaggcttctaaacccctgaaaactcccccactctggtgccaactaggacaacactcttatgcactcttttttagttatccccacctgcccagttcccttattaggccaagatattttaaccaaattatctgcttccctgactattcctgggctacagccacatctcattgctgcccctctccccaacccaaagcctccttcgcgtcttcctctcatatccccccaccttaacccacaagtatgggacatctctacttccctggcaaccgatcacatggccgttaccatctcattaaaacctaatcacccttaccccgctcaacgccaatatcccatcccacagcacgctttaaaaggattaaagcctgttatcactcgcctgctacagcatgggcttctaaaacc

SEQ ID NO: 945280 - DNA, 574 bp, Homo sapiens
tgcccaaggtcataatggtggagctgagattttaatgtgtgtattttcttttcttttttcttttttttgaaacagagtttcacacctatctccctggctggaatgcagtggcatgatctaggctgattgcagcctctgcctcctgggttcaatcaagtgattcttctgactcagcttcccgaatagctgagaccacaggcatgcaccaccacgcccggctaatgtttgtatttttttgtagagattggattttgccatgttggccaggctggtcttgaacttctggcctcaagtgatccacccgcctaggcctcccaaaatgctgggactacaggtgtgagcaacctctcacggcctattgttttttgattgtttgttttttgagacagcgtctttctctgtcgctcaggctggagtgcagtggcacaatcacagctcgctgcagcctcaacyatcaggctcaattgattctccctcctcagcttcccaagcagctgggactacaggcaagcaccactgtgtccagctaatttgttttattttttgtagagatgggaatttgctatgttgccca

SEQ ID NO: 945281 - DNA, 709 bp, Homo sapiens
ggtgagtggacactctcagcaatccacttgccttttacaacagatgaaaacttaacatacccctaatataattcttgatttctacttcctaaaacctgctctccttcatactaatttgttatggctaccctaaaaaaatgccccacaagtggcttaaacaacagaaatttactttctcatagttctggagcttgaagtacaagattaaggtgtcaacaggtttggtgtcttctgaggccctgtctccttcacttctagatggccggttcttgctgtatcttcacatggggttttatctgtagacgtgcatccctggtacccctctgtggtctgtgctaatgttcttttcttatgaggacaggtgtcagatgggattagcaccaaccctatcagcttcattttaacctaatcacctctttaaaggccatgctgcaaatagagtcacattcagtggtatcgggggtaagggattcaacatgagagtttggagggaacacaatttagctgataacacctcacaatcttttctcagttcatgacatttgtttcactcaaccattcaaaaacataagtgtcactcttgattgtttagtctcctccgtgtactgcccttagcaaatccaattggttctaccttcaaaagatatcccatatatgatcagtttcataatctctatcagaaggycctgagtcaagccatgattctccc

SEQ ID NO: 945282 - DNA, 560 bp, Homo sapiens
attctcatcttattctgagatagatgagaagagatgagaactagggaagaaggtggtggcctaggagggcagttttggaaacagttttctccacccatgtacaatccyttccttgcactctgttgtaaaaacctaagattttgattgcctgaatctgtgactattgcttcatggagtttaatgaggctcaccctgtactaagaagctgtggggcttctctgatggttgttaacagggagtggcttcttggatcatagcaatttatttaatccttcccctgccaacaagtgtctggcaggatgtgtctgcactttacatttctagatctgacaacgctagctggttttgttcaaaccaagagattgacttcagacagtgttctccacaagtagtcaatttaaatcttagttctgcctagtgtcatataaagatcaaggaaaagtggcagctacttgacaaagagtgcacctagttactggttctaaaggtggctaaaggatctggatgttcctttcagtaatggaaggctctttccccatgaatgagaaggattactgctc

SEQ ID NO: 945283 - DNA, 643 bp, Homo sapiens
ccctccgagccatgtgtggggtataatctcctggtgtgccgtttgataatcctgttggaaaagggcagtattagggtgggggtgacccgattttccaggtgccgtttgtaatcccttcctttgactaggaaagggaattccctgaccccttgcacttcccaggtaaggtgatgcctcaccctgctttggctcatgcacggtgcgctgcacccactgtccggcactcccaagtgagatgaacccggtacctcagttggaaatgcagaaatcacccatcttctgcatcgctcacgctgggagctctagactggagctgttcctattcggccatcttggctccaccctctgggtttaccaattttataattgattttaaaaaaccagtttctggttttgttggtttttttctactgtaagtttgactttctcttttgttgatttcagctctcttttgttattctttcctttacattttcaatgtttgatatacagttattttttaaacttattgagtggaagcttagataattgatttttcatatttcttcatttctgaaatttgcatttaaggcttcccatttcctcctaaacacwgctttaggtgaatcacacaaggttgtttttttttgagacatagtctcac

SEQ ID NO: 945284 - DNA, 632 bp, Homo sapiens
tttggcaatattgctttttcctggttttcctcctccctctctaaccaagtattttcagccatccttagaatttcctcttttcagcagagctttccagaccttttccaaagcatatgcaccctggatgctgatgttccacaggctccactcttttctctcttccttttcactctccatattctccctggacaacctcacttcctcaaggcccttctccagcttctgatactatcaatatatatatactgttaactctcagatagatatgtacagcccagatttattttccaagtaccagatcttttaagtgtgcctatccactgggcattccacctgcaggcacattcactgtgtctaaacccaccttcacgatggaactcctaggcaggtttgttcctcctcatctgtgtcccttctctgtcaatggcaccaccatccttccagccatccatgctacaaccctcagaatcactgttgcttttgttttctcctttattcctttcacgtttgattgctcaccaagtcctcttgcttctgcctcccaaattctgtctcaratatgtcactcctctctactccctctgctactgactcagtccaatcctcatcttctcttaccttaaccactgcaa

SEQ ID NO: 945285 - DNA, 668 bp, Homo sapiens
tcatagccgttattgaccattccctccttgcttaaaactttccttagttttggcaatattgctttttcctggttttcctcctccctctctaaccaagtattttcagccatccttagaatttcctcttttcagcagagctttccagaccttttccaaagcatatgcaccctggatgctgatgttccacaggctccactcttttctctcttccttttcactctccatattctccctggacaacctcacttcctcaaggcccttctccagcttctgatactatcaatatatatatactgttaactctcagatagatatgtacagcccagatttattttccaagtaccagatcttttaagtgtgcctatccactgggcattccacctgcaggcacattcactgtgtctaaacccaccttcacgatggaactcctaggcaggtttgttcctcctcatctgtgtcccttctctgtcaatggcaccaccatccttccagccatccatgctacaaccctcagaatcactgttgcttttgttttctcctttattcctttcacgtttgattgctcaccaagtcctcttgcttctgcctcccaaattctgtctcagatatgtcactcctctctactccctctgctactgacycagtccaatcctcatcttctcttacct

SEQ ID NO: 945286 - DNA, 541 bp, Homo sapiens
caccttgttgagagtgaccagggtggaagacttcagaaaggcatgggaagtcaataaactgaaagatggggacatgattttctcagctctaggacamactggagaccccgagcctaaagtagccaagtctttgctactaggattcaggtgataagatttccaacccaatcttttcaaacccagaccaaacatcctccttgcttctcaaattgggttatgtatagtcacaggataagccatcccatgtctttctcaagcttcagttgtatttgaagacttggcgagtagagacattttattatgaaaacatacaggaataatgaaaagttctggctttttaaggtagatgagattatataatcactttgggctgtgccatcaaattttttctctttcctccccagccaaacacatacccactcgatctcacatacccatttgctctctgccactaaggctactttggaaaagtttgagaagcaggactctatgataaagattatatccgttgccgttgatcctgctctgtctcagggttggg

SEQ ID NO: 945287 - DNA, 729 bp, Homo sapiens
gtgtttttagtagagatggggtttcactgggctagccaggatggtcttgatctcctgacctcacgatccacccacctcagcctcccaaagtgctgggattacaggmgtgagccaccatgcctggcccattgtttttatttatttgtttgtttatttattttttatagaggagggatctcactatgttgcccagactggtctcgaactcccgggctaaagtgatcctcctgcctctgcctcccaaaatgctgggattacaggcgtgagccactgtgcccagcctctcccttgtttttttaaaaactgtgacgaaattcatataagataaaattaaccattttaaagcgtacaatgcaatggcatttagtacattcaaagtgctgtacgaccaccacctctatctagttccaaaacatttgcatcacccaaaagaaacccctgtgctcattaccgctcgctccccattcccccttcctcccagcccctggcaaccaccaatttgtgttctgcctctatggaattacctactcggaaaatttcatataaatggaatcataccatatgtggtttttgtctggcttttttcacttagcatggtgttttcaaggtttatccacattgtagcaggtatcagtattttgttcctctttatggctgaataatattccactgtctggacataccacattttgtttacccattcatcagttgacggacatttgggttgct

SEQ ID NO: 945288 - DNA, 764 bp, Homo sapiens
acttttcagtgtcactgcaatgggtgggtctttatctggccttcctgagctcttggccttccccatcctgccrcagacaatgcttttttctctctcatttccctttcctatcttttctgtttctcagggcaaccatcctgccagagaccacatatggaaaaatgtccttgggagcttgaccttgtaaacatgtggtggtacttcctcctggtctctgctatccagggacaggaattttggggttcatagctccaaaaattatcttgagtagttaaaagtcttcgaaagctcaatattggctgttctagactccttctggggagagcaatggaaactgccccaatgtcgtaactcaggagttaaggctttgccattttacaatggtggctcatgttcaatcctggcttagagagtgagtcctttctggtttgatatctgtgtaaccttgatcatttggttattctcttcccctccacaaaccattttgaatttttctttctctgagcacagaaatattggctttttggcctggctaatgctgggcaataagaaatttaaaaggactttttaaaaagaacactatgcactatggtgaaaagtcagcttaatgaaaagtggatattcacactctgacagtctgggactccttggcaaaaacaggagacatcacagaccccgttttaggaaaaaactcagttttcctcatgaaaccccaggattgaaagcagataaatccctctcaaaatctaaggctctgttctgtt

SEQ ID NO: 945289 - DNA, 566 bp, Homo sapiens
ctgggtaacatggcatgaccccatctctacaaaaaaaaaattaaaaacattagctggcctggtggcacatgcctgtagtcccagctactcaggaggctraggtgggaggatcacttgagcctgggaggtataggctacagtgagctgtaattgtgccactgcacttcaacctgggcaacacagtgaaaccctgactcaaaaaaaaaaaaaagtctctgagcccagaacccaactgacacagtgagaccctatcccccccaaaataaataagtaaataaaaataacaaaataaaaaaaatctctgagctcagagcccaaccccatgacacatgtaagtaccaagtattgtttgcatggttttaagagctactgaaatttccaggaacgcaactaccagtaaatcaagagcagattgtgctttgttttgctctgcacttcactaaaagttttcatcattttagaaaacctggcgtcagtagcaacagcatttgtattatttaagtctccagtattatactctggatcactttacatatgtagttgtctcacttagctatgcttaggtg

SEQ ID NO: 945290 - DNA, 733 bp, Homo sapiens
tctcaaaatgctaggattacaggtgtgagacacctcgcctgtgcttggctgytcccaagcatatctcagaagccaggaaacaggccctgaatggatggagctcggggtcactgggccagccacagccctcagaggaccccatctctgtgccctctaacctgggctcctggcccacacccacccaggctgcctgtcaggatctgctccttctccagccctcagagctgccctatgtggagggttgggggtcccagaaaacctgggagaaacgggtcctggaaacagggtcggggggaagggcagagtgctggggatgctgggcccacgacctccctgtccctggggcttccccatgtcagaggtgaggctcagagaggtaagggcgcaccctttgtctgccccctccccagcatggccaagtcgctcccagggtgcaggcgatggcaggccatttgtctccctcctgggtgagtctctggacatggattctcacattttttatttaagaatcagagagatataagaatgtcaaggaaaaatcctctcatggacaatgcagccccagtaaatgactgtcagccggcgtgtccagggcttcaaggccccaggaagtggccatgctggggctgccaggcctctggctccagggtcactggggctgaactgtctgcccaggcccggagacaccctgcccctgaggagcccaccggcttggccagtccatcttcttggc

SEQ ID NO: 945291 - DNA, 733 bp, Homo sapiens
tctcaaaatgctaggattacaggtgtgagacacctcgcctgtgcttggctgttcccragcatatctcagaagccaggaaacaggccctgaatggatggagctcggggtcactgggccagccacagccctcagaggaccccatctctgtgccctctaacctgggctcctggcccacacccacccaggctgcctgtcaggatctgctccttctccagccctcagagctgccctatgtggagggttgggggtcccagaaaacctgggagaaacgggtcctggaaacagggtcggggggaagggcagagtgctggggatgctgggcccacgacctccctgtccctggggcttccccatgtcagaggtgaggctcagagaggtaagggcgcaccctttgtctgccccctccccagcatggccaagtcgctcccagggtgcaggcgatggcaggccatttgtctccctcctgggtgagtctctggacatggattctcacattttttatttaagaatcagagagatataagaatgtcaaggaaaaatcctctcatggacaatgcagccccagtaaatgactgtcagccggcgtgtccagggcttcaaggccccaggaagtggccatgctggggctgccaggcctctggctccagggtcactggggctgaactgtctgcccaggcccggagacaccctgcccctgaggagcccaccggcttggccagtccatcttcttggc

SEQ ID NO: 945292 - DNA, 546 bp, Homo sapiens
tggggtgggctgggtgaagctgccactcctggcctggatatatggagccctgggcagtcctgcctgtcccatggctttgctggacacaacaagaactgccagatgtcatttgtgtgggaatcattttgctgtttgagcgaagttggatttgttagtgtgctcaccagtgtggatggatgaggtctgaccaggaggctgcctgttgtctgtctttcacagagggccctccacacccagggtagagctggggagaaggagtcctggggaaatactgagttaaacaaggctgatgtatcctctgcaggacttctcagtgcctttagcatggcgggtgtaggtgagtctaagagatggccaggtagcctaggtgtggatatcaccaggctagggctgctgtctgtctcctctgctcacgctcctgtgcagggagggacttgagggtgggcctggggaaactgtggaaagtaggagtctctgtccccagacactgtctctgaactggggccaagattcagtcattkcatgtccccactaggcagtgcttac

SEQ ID NO: 945293 - DNA, 642 bp, Homo sapiens
accccgcacgcaggggccatcaggtctttggggattgatagaattaagcccatggaaygtgcatttgcttgctgtgaagccgcaacaatctcgctgccacagggcagaggacgttctgaactgagtgtcccctcggctccctcaccggcctcctgcaccagcagatggtgcctgatttggtggctggcactggtgccccttgccctctgagcagcggtaccatcaaaacccatcttcccagcagctcaggatcaccgcggtggagtttccagtcgcagatgcccttggcaggggctgtgggactgcaggggagacggaggtctgggccctaccatgtgggggcagcatgcaggaggggcccattcctgccccccggcaatacaagaagcctacgggggtgcccaggggtcagggacctgagagatgtgctcactgagacctagcatgctcacccccagctgccagagggggtagttcccaaagaggggcaggccctcagagtgagctcctgtcctgagatgggcaagggaatattcctgggacactgcagaactgttaccaagccaggcacagatggggccaggcccctcggcctctaagacaaggccggcccatggatggagcacgatggccctgaccttg

SEQ ID NO: 945294 - DNA, 649 bp, Homo sapiens
tttaggccttgggtgagggtctggcagggagcagtgcagtgatggagggtgtggtgtgtgtgtggcgtgttggatggatacttctggtcccacctagggaagagcttccttttggaagcagaggtctcctgtgtccccacagaaggattcaggtctgctggcctttcccaagcaccttgaaagtcaccagtcttcgtgtcacctgtccgtcatgctatgtgtgtgtgagagagagagacagagaaaattgttcaggtgggggtacccagtctctgtagctgctgaaaggccctgggacacatgctgcatgctgccaagtgtttgttttttcctcagcacatgtcaccatctgtaccctggtgcaggctgctgtgagcaccaggctctgtgctaggggagcagtgaggggacttgaagagactcagggtcccatgttgaggctgagctggcacatagtaaggaagacagaatgctcctggcacaggtgctgcttggcctctgggtgtggacatcaggagggcttcttggaggaggagggagggcttgctgaggaggakgctgccactcccagggtgagttctgatcatgctgcctgatccctttcctcatcccatactctgcttctaacctggatgggggcccacagggc

SEQ ID NO: 945295 - DNA, 577 bp, Homo sapiens
tttagtaaaattcaacagaattttcacagatctgcttttctagccaactttctggcagaagaaaaagaaatttctgttttaagcaaggtattcaaaatatttcagttaccactttgagtatatatgtaatttcattttatatatcagtaactatgttaatacatgcagtaagatcagattttaaaaattatatcaaatattaaggtaaaaattacttaatttttttgaaattattgagtgcaggttgagcattaaactttcaggttttaagaaatgttgctaacaacattcagtcttaccagtgaactccaaataaagataccaaagccacttagtgaaatgttactattaaatgtataacatgttttcaccagagggcttcaaaacttgagtgttttttttttctcaacaagcatgttcttaaaaatagtaagcaatgttcattcattatttgatgatattaactttgtgtgataaaacagaaatctgagattgtatgkgttatgtttgttattgttacttgcctcttggtttaaaatggcactgaattaccttctccttggttttagttaaagtt

SEQ ID NO: 945296 - DNA, 624 bp, Homo sapiens
gctggctcatctcagtaactcagcacagggacgcagtatccccagagtcccaggtcagaccagggcagcaccaatttaccttgaaagaatacacttctcattagtggccatacggttacagaacatatktttggagtgaattttcaaaattttaaatcaacctaagactaggttaaataatatatttatacttgtattaggagtgcataggaaagcatcatttttggcagaaaatttacaagaaattacaataaagttgtagaatgtggggctgtcagaaatttcagttagtctcaaaggaatttgatgagtgtaaaagtatttagtgttataataacaatgtctctgtcagtgtgaagttgcttcttttttgaaatgatataaaaagaatttatcagaagcatctttaataaattcaatagaatttactaacaaacttaagacattgttcctaggagtaaaaggaaaaacaattctctgaagatgcacaaagatgataactgtgtcacacatagatctgccattatccagagctatgggtctctttaagacccaggggctaaatgggctgcaccttattcttggcgtgatgatccccatattctatcccctttcctgcctttg

SEQ ID NO: 945297 - DNA, 634 bp, Homo sapiens
accaagtcctgaaactgcacaaagcagcaaggccctggacctggcccatgaaaccattttttcctcctaggcctctgggcctttgatgggaggggctgccataaagacctctgacatccttgcagacattttcccattgtcatggtgattaacatttggctcattacttatgcaaatttgtgcagttgacttgaatttctcttcagaaatgggtttttcttttctgtctcatcctcaggctgcaaatgttccaaactgttatgctctgcttcccttttaaacaattccaaaccatatctttgtgaatgcataaaactgaatgcttttaagagcacccaagtcacctcttagaatgctttactgcttagaaatttcttccaccagatactataaatcatctctctcaagttcaaaattccacagatctctatctatagaggacatggacaaaacgtcaccagtctctttgctacagcacaagaagagtgacctttactccagtttccaacaasttcctcatctccgcctgagaccacctcagcctgcacttcattgtccatatcactatcagcattgtgatcaaagctatgccacaagtctctatgaagctccaaaccttcccacatcttcctgt

SEQ ID NO: 945298 - DNA, 595 bp, Homo sapiens
atgcagggcaccaagtcctgaaactgcacaaagcagcaaggccctggacctggcccatgaaaccattttttcctcctaggcctctgggcctttgatgggaggggctgccataaagacctctgacatccttgcagacattttcccattgtcatggtgattaacatttggctcattacttatgcaaatttgtgcagttgacttgaatttctcttcagaaatgggtttttcttttctgtctcatcctcaggctgcaaatgttccaaactgttatgctctgcttcccttttaaacaattccaaaccatatctttgtgaatgcataaaactgaatgcttttaagagcacccaagtcacctcttagaatgctttactgcttagaaatttcttccaccagatactataaatcatctctctcaagttcaaaattccacagatctctatctatagaggacatggacaaaacgtcaccagtctctttgctacagcacaagaagagtgacctttactccagtttccaacaagttcctcatctccrcctgagaccacctcagcctgcacttcattgtccatatcactatcagcattgtgatcaaagc

SEQ ID NO: 945299 - DNA, 576 bp, Homo sapiens
aaaaaattagcctaacctaaatctgtaaatatgtaaaatttatctttagctttgttatatttttcttcataaacccatttctcacctctgatttgattatcttatataacatttccgtaaggcaaaactcttagattttttagagctaggtggaatcttagggattagatatatccaaacccacattacactgcaaagtgtactttttaccatttactttctaagctacctgttattgacttcagcaatgagagtaagaatgataggaaagaaaaagaaatagctaataagtagtttgggggacaggagagagataataatgtacattgttcagctccatgtctgccactaggaaaaacagagcaagctgaagcactatatttcacaaacgggaagaaccacaagaatgagtcatttgatgaagaccgatatggttattcagtgagagaactagattccaggattcctaacaagtggtccactgtttattccrcaatgttctgctgatttatacactagttcccccttacctgcaattttgcttcctgcggtttcagctacccacggtcaaccgtg

SEQ ID NO: 945300 - DNA, 585 bp, Homo sapiens
tccaggaggtgaggggcgcctctgtccrgccgcccctactgggaggtgaggagcccctctgcccggccagccgccccgtctgggagggaggtgggggggtcagccccccgcctggccagccgcctcatccgggaggtgaggggtgcctctgcccggccgcccctactgggaagtgaggagcccctctgcccggccaccaccccgtctggggggtgtgcccatcagctcattgagaacgggccaggatgacaatggcggctttgtggaatagaaaggggggaaaggtggggaaaagattgagaaatcggatggttgccgcgtctgtgtagaaagaagtagacatgggagacttttcattttgttctgtactaagaaaaattcttctgccttgggatcctgttgatctgtgaccttacccccaaccctgtgctctctgaaacatgtgctgtgtccactcagagttaaatggattaagggcggtgcaagatgtgctttgttaaacagatgcttgaaggcagcatgctccttaagagtcatcaccactccctaatctcaagtacccagggacacaaacgctgcggaagg

SEQ ID NO: 945301 - DNA, 393 bp, Homo sapiens
agaatggctactatcaaaaagtcaaaaaaaaaaaaaaaaaaaratcctggtaaggcagtggagaaaagggaatgtttatacattgttggtgggagtgtaaattagttcatctactgtgaaaatcagtttggagatttctaaaagaatctgtaacagaagtatattttcaccgaacaatcccattactgggcttgtatcccaaagaaaacaaattgttctaccaaaaagacacatgcacttgcatgttcattgcagcagtattcacaacaacaaagaatagaatcaacctcagtgctcatcagtggtggactggataaagaaaatgtgatacataagcaccatgcaatactacacaccacagaagagaacaaaatcatgtcctctgcagcagca

SEQ ID NO: 945302 - DNA, 687 bp, Homo sapiens
cagaagatgaaatgctttgctttgagtcagattcttatgaatatctgcttttccctgactttgagttaggtagctttggaagtagcattaattcagataaactgccatcatgctgcgttatgccatttctaaagacactcaacttgtacttttaaaaaaatagaaaaaataagcatttcaatctaagtggaaatttgactcattgacttacatttctaagttaaaatttccctttatgaagtgtgccttaggttaccaaattgtagaggctttcgttggtggtggtaagtggtagcggtagtgagtgtatagaggcagggaaatatatttataataaattctatgtcatgaattacatattgaaataaataggtgaatatacaaatttatatttgtgatgctcaattgttggtccttctttcaaagtggcctcaaacccaatatttcaaattgaataaggtacaattaaattataatctctcaaacttatttgaaaaatttcccacaatagtctacagttttattgcatatcacacctatatatgatataaataggtataacaaaatatgtaatttataatatgtcaagttataatatcaacattatatttaggtttataaatattacatatatggatttgttayttaacattataatttatttcaattcccccatctctctttcta

SEQ ID NO: 945303 - DNA, 554 bp, Homo sapiens
tagctgggattacaggtgtgcaccaccacgcctggttaatttttgtacttttagtagagacagggtttcaccgtgttggccaggctggtcttgaaatccygacctcaagtgatctgcctggctcggcctcccaaagtgctgggattataggaatgagccaccgggcccagcctgtttccttctttttgattgtatgtcatctttacagtacagttgtaaagagacaaaccttttatttttagtattctactttcaaaaacttaggatgaggggcatttaaaaataagttactatattttttctctttacaaaataatctttgtttactgcaggaaaaaaaaatggaaactcacataagttctttagaaaaaaagcaaagaacaattattctgaatttgaccaccgttaacattttggtatagtttctcctaatccttgcatgcatgtgtgtgcttgtgggtgtaaataaaacgagatgtactgtacattttgtgacctgagttttctactcaataattattgtgaacagggagccatacttagcctggcgtttt

SEQ ID NO: 945304 - DNA, 615 bp, Homo sapiens
tctttggaaataaaataaaaaattaggattttagccataacagaatttagccatatttaaayaacttgtaagagttaaatatttttaatcaagaaaaaaaagtgacatacttgagaaggcttttaatgtctaaatccatttagaagctatggtttattttgtttaggttttggaaacgaggaagtccatgacttacaatgaaaacaaagaaagttttgaaacaaaagtaaacttatctaattataagtgctgtgtgactacaaccttaactgtagctgagtctggggggattattaacagtacatcgttaaatacaactcttggtgtggcaagatttgtgacacactgcgcgaaaaacaatgggctatgaaacgcacatagagcactgttctccctccaacagggagacagactgacagatgcatacccgtgcacactcacagtgctatacgaaaagagggtcatcagagcagtcacagcacttgggggcagggaaagatgatagattattttacttttttcttggcacttttctgctatgagtcaagattttataataaacatgtattagttttccaaagacaagaaagcgatcaaagttataatttaatcata

SEQ ID NO: 945305 - DNA, 556 bp, Homo sapiens
cagcttcagcagacttaaatgtccctacctggcagctctgaagagaacagcagatctamcagcacagtgttgaagctctgataagggacagagtgcctcctcaagtgggtccctgacccccgtgtatcctgactaggagacacctcccagtaggggccgacagacacctcatacaggagagctctgagcggcatctcgtggttgcccctctggtatgaagcttccagaggaaggaacaggcagcaatctttgctggtctgctgtctccgctggtgatacccaggcaaacaaggtctggagcggacctccagaaaactacagcagacctgcagcagaggggccagactgttagaaggaaaactaacaaacagaaaggaatagcacatccactcaaagaccccatctgaaggtcaccaacatcaaagaccaaaggtagataaatccataaagatggggagaaaccagcgcaaaaagcctgaaaattccaaaaccagaatgtctcttctcctccaaaggatcataattcctcgccagcaagggaacaaaattgattgga

SEQ ID NO: 945306 - DNA, 603 bp, Homo sapiens
ggtatattccctcataattatggcaygctgctcccatgggtgttaatgtttatagaaggctagttaaccttgcacaggctctgggatcttggggccatgtgtgccatttagctgcagaattgaagaatgcatttccatgtttgcaacatgtgtactgatgcagaggggacaatcgtggcttgttctcagggccagggcaaggtcgctggacctggcatgcatggcctccagtgccttgattgctcgaccaaggcttcactttccctgaacagccccaatttaatggactgtgattattgagtttacactgtaactctggtgttacttgagcaaatgatgtagttatacatttgttcgtagcttttcaagaccccttaagaaagaagggtccattgtaaacctttgaaacagaacccagacatgctgagagccttggtgattgtttcaagtaatatgaaactgcttttcatcacgcactcaagggacagcagagaagggtaagacatggtgcttttgttccgaaagtttacagtctatcttttttggatagacaaggcaggcatacatgaaaaattcaataaagtacaagagagtatgtgctaa

SEQ ID NO: 945307 - DNA, 442 bp, Homo sapiens
caggaaacccaagcccatacctgacatggrataaagtcctacttgacctactctttctcccggagaagagcagcaactgagagattgttgtttcatcattcaacatcgaggaatttccaaatttataataaattatatctgggggagaaatgaggcatgagggtgcagttaatgccaacattcaacaaacagcaaaagaattatactgtggcctgtatcctcaaccctttatattcatgtaggacgttgagaagaatcaaacagacactgagaccagggctgctcccaaatatctctagtgctaggcccattgtcatctttttctctaacttcatgtggcaataggcgaggagggacctccatctttttgtttctaattaaggcgaaattcagctaacatcaaattaacaattttaaagcatatgattcagtggcatttagg

SEQ ID NO: 945308 - DNA, 620 bp, Homo sapiens
gaagttgagtcactggagccmgggactgtgtttaacactactattccccctggcacctgagacagtggctagcaatagagattcccagtaaaaatggtgaaatgaataaatgtttacttcactgaaacatgaatttatatgtcttcaaagcagtagcaaatttataaatcatttgtaaaaatgtataattttttaaaaaaatgatctttaaagatcgtgaaaactacctcacaagtatcccctatactgcagttaattgcaacaaaggaaaagaattcttggccagtaagtccacctcattcacagctttcaacagttaacaaggtacagttcaattccattttgcctccaactccttctcattaagcttggctcaaattcaagcccctgagaccctcccactgtccctgaatggtcccgatgtttcacttcactaaagaagagattaatttgtagaaaggcttcagcacattcctgagttgctcaagtgcacttcttttcatagaacaggcttttgattttgcactttaaatcaaaggcagagagagcaaaaattccaagtatgtatgggcttccgacctttaaaaaaacaggattgttcagatggaatttgacacaga

SEQ ID NO: 945309 - DNA, 707 bp, Homo sapiens
cattcattatgattgctatgtttgtaaaaacctggctccagtgaaatccatggcacaaagaaaggtcttctttggactccactgcttttgcacatccataattttttgtatgttgtgtttcattttcatttgtctcgagatatttttaaatatttcttttgattttgtctttgactctatcattgttcaagagactgtaattcggtttccacatatttgtgaattttcccatttctgtactgttaaagcattctagtttcatttcattgttcttggtaaagatacttggtataattttgatcttcttgaatgtgttaagatttgttttgtgacttttagtcagagttttccagggagacagaattgataggctatcaacagagagctataaaagggaattcattagggaagttggctcacttgactctgtaagctcagaagtcccatgataggctgtgtgtaagctacacaaccagaaaagccagtagcaaggctcagtccaaatccatgagcctcagaaacaaggaagccaataacgtaattctcaccaccagttcaaagccaaagacctgagaaccaggaaaccgctagtgtgagtcccagagtctaaaggcaaaagatcctgkagttctaatgtccaagggccagagaagagcatcctggctctaggagtgagagggcaaggatttgcccttcttctacctttt

SEQ ID NO: 945310 - DNA, 707 bp, Homo sapiens
cattcattatgattgctatgtttgtaaaaacctggctccagtgaaatccatggcacaaagaaaggtcttctttggactccactgcttttgcacatccataattttttgtatgttgtgtttcattttcatttgtctcgagatatttttaaatatttcttttgattttgtctttgactctatcattgttcaagagactgtaattcggtttccacatatttgtgaattttcccatttctgtactgttaaagcattctagtttcatttcattgttcttggtaaagatacttggtataattttgatcttcttgaatgtgttaagatttgttttgtgacttttagtcagagttttccagggagacagaattgataggctatcaacagagagctataaaagggaattcattagggaagttggctcacttgactctgtaagctcagaagtcccatgataggctgtgtgtaagctacacaaccagaaaagccagtagcaaggctcagtccaaatccatgagcctcagaaacaaggaagccaataacgtaattctcaccaccagttcaaagccaaagacctgagaaccaggaaaccgctagtgtgagtcccagagtctaaaggcaaaagatcctggagttctaatgtccaagggccagagaagagcatcctrgctctaggagtgagagggcaaggatttgcccttcttctacctttt

SEQ ID NO: 945311 - DNA, 810 bp, Homo sapiens
aagtgctcccatatgtgatagcaaacttaatcaacaaatgcatgtactctgactgctctgccaatgggcccttctgccatctgtctcctgttccttggatgtccctatttcctgagacacaatactgagaataggccaattaataaccctacattggtctgttagtgttcaagttaaaggaagggccactcatctcttactttaaatcaaaagctagaagtgattcagcttagtgaggaaggcaggtcgaaagccaagagaggccaaaagctaagtctcttgtgccaagcagtaagccaagttgtaaattcaaagggaaaattcttgaaggaaattaaaagtactactccagtgaaaacacaaatgataagaaagcaaaacagccttattgctgatatggagaaggttttagtggtttggatagaaaatcaaaccagacacaacatttcccaaagacaaaacctagtccagagcaagaccctaactctttgaattttctgaaatctgggagaggtgacaaagctgcagaagaatcatttgaaactagaagaggttggttcatgaggtttaagtaaagaagccatcttcataacataaatgcaaagtgaggcagcaagtgctgatggagaagctgcagcaagtaattctgaagatctaactaagataattggtgaaatggctacaccaaacaacagattttcaatgtaggaaaamtagccttctattgaaagaagatgccattcatgacatttttagctagagaatagaagtcaatgcctggcttcaaaggacaggccaactctctcgtta

SEQ ID NO: 945312 - DNA, 655 bp, Homo sapiens
ggattatttaggccttgggtgagggtctggcagggagcagtgcagtgatggagggtgtggtgtgtgtgtggcgtgttggatggatacttctggtcccacctagggaagagcttccttttggaagcagaggtctcctgtgtccccacagaaggattcaggtctgctggcctttcccaagcaccttgaaagtcaccagtcttcgtgtcacctgtccgtcatgctatgtgtgtgtgagagagagagacagagaaaattgttcaggtgggggtacccagtctctgtagctgctgaaaggccctgggacacatgctgcatgctgccaagtgtttgttttttcctcagcacatgtcaccatctgtaccctggtgcaggctgctgtgagcaccaggctctgtgctaggggagcagtgaggggacttgaagagactcagggtcccatgttgaggctgagctggcacatagtaaggaagacagaatgctcctggcacaggtgctgcttggcctctgggtgtggacatcaggagggcttcttggaggaggagggagggcttgctgaggaggakgctgccactcccagggtgagttctgatcatgctgcctgatccctttcctcatcccatactctgcttctaacctggatgggggcccacagggc

SEQ ID NO: 945313 - DNA, 831 bp, Homo sapiens
ccctaagattgggaacaagacaaggatggccatgttcagcaggtctatgcagccttggttctgaccaggatgattaggcgattgatatataaaaggatccagattagaaaggaaaaagtaaaactgtcttactcccaaatgtcatgatcttgtatacagaaaatcctaaggtatccagtttaaaaaaaaaacaaaactagaactagttcagcaagttcacaaaatcagcatacaaaaatcaattgtatttctgtacactagcaatgagaaatccaaaaatgaaattcagaaaattattccattcacaatagcatcccaaagaataaagtactcactgtggaaagaaactaaaaaagaactaaataaatgaaagatattccatgttcatggatcagaagactaaatattattgtcagtactcatcaaattagtctacaggatcaacctgattcctatcaaaatcccagctaccttttctgcagaaattgacaaggtgatcctaaaattcatatggatatgcaaaggacacagaataagcaaaataatcctgaaaaagaagaacaagattggaggacttatcttcctaatttcaaaacttgctacaaagtaatcaagagggtatggtactgtcttaaggacagatgtataggtcactggaatatagttgaaagctcaggctgggcactcatgcctgtaattgcagcactttgggaggctgaggttgggggatcctttgaggtcaggaattcaagaccagcttgggcaacayagacagtgagacctgtctaaaaaaataaaaattaaagacaaatttgattagccaggcatggt

SEQ ID NO: 945314 - DNA, 621 bp, Homo sapiens
tattcaatcatgtcatctgcaaacagagacaattctacttcctcttttcctaattgaataycctatacttctctctcttgcctgattgccctagccagaccttccaacactatgttgaataggagtggtgagagagggcctccttgtcttgtgccagttttcaaaaggaatgcttccagtttttgcccattcagtatgatattggctgtgggtttgtcataaatagctcttattattttgagatacgttccatcagtacctagtttattgagagtttttagcatgaagtgctgttgaattttgttgaaggccttttctgcatctattgagataatcatgtggtttttgtcattgtttctgtttatgtgatggattacgtttattgatttgcatatgttgaaccagccttgcatcccagggatgaagctgtcttgatcgtggtggataagctttttgatgtgctgctggattcggtttgccagtattttattgaggattttcacattgatgctcatcagggatactggcctaaaattctctttttttgttgtgtctctaccaggctttggtatcaggatgatgctcataaaatgcgttagggaggattccctctttttctat

SEQ ID NO: 945315 - DNA, 611 bp, Homo sapiens
aattttctcctcagaaaattggatattcttttccattgcattgtcaggctgcaaattttccaaacttttattctgtttcccttttgaatggaaatgctttaacagcaccaagtcacttcttgaataccttgctgcttaaaaatgtcttctgccagatatcctaaatcatctctcaagttcaaagttccacaagtctctagggcagggacaaaaacccgccagtctcttttgtaaaacataacaagagtcacctttgttccagttcccaagaagttcctcatctccatctaagaccacctcagcctggatttcattgtccatatcattatcaacattttggtcaaagcaattcaacaggtctctatggagttccaaacatttccatatttttctgtcttctaagccctccaagctgttccaacctctgcctattacccagtcccaaagtcgctttcacattttcaggtatcttttcaggagagcccccacyctctctactggtaccagtttactgtattagtccattttcatgctgctgataaagacatacccaagactgggaagcaaaagaggtttaatggacttacagttccatgtggctaggaggcctc

SEQ ID NO: 945316 - DNA, 556 bp, Homo sapiens
ggtttatctaaatgtggatatttacaccttaggtcattacatattaagaatttgaatctatatggtgacaggattttttcaggtttatctcaccccgatgttgggggaaaaaaatctccagaactcyatagtctcttgaaatgattgtccactgaagttccacgtattcataaagtgctcccacaacttgctgacaagcataggtattttacatcctgccatgagtttcaagacattaactcctttagctatcaaaaatggataaaaaccacaggtgactgacaagactttcacaagtgcagacaaaggtttggattcaaagcctggtcatatggtttggctgtgtccccacccaaatctcatcttgaattcccacatgttgcaggagggaatcagtgggaggtaattgaatcatgggggcaggtctttcccatgctgttctcgtgacagtgaataagtcttatgagatttgatggtttcataagggggagtttccctgcacaagctctcttctcttgtctgctgccatgtgagacatgcctttcaccttctgcca

SEQ ID NO: 945317 - DNA, 655 bp, Homo sapiens
tgttttgtaattcttgtggtagagayatttcacttccctggttagctgtattcctaggtattttattctttttgtggctattgtgaatggcattgcattcttgatttgtctctcagcttggatgttgttggtgtatagaaatgctactgattaggccaggcgtggtggctcatgcctgtaatcccagcacttagggaggccaaaatgggtggattacctgaggtcaggagtttgagaccagcctggcccacatggtgaaaccccgtctctactaaaaatacaaaaaattagctgggcatggtggcagatgcctgtaatcccagctacttgggaggctgaggcaggagaatcgcttgaacctgggaggtggaagttgcagtgagctgagatcgtgccactgccctccagcctgggcaacaagagtgaaactccatgtcaaaaaaaaaaaaaaaaaaaaccactgatttttgtacatggattttgtattctgaaacattgctgaaattgttcatcagatctaggagcttttgggagagaccatggggttttctagacatagaatgacatcatctacaaatggaaagagtatgacttcctttctttctatttggatgcctttttttttttcctcctgcctcatgattgctctggctag

SEQ ID NO: 945318 - DNA, 617 bp, Homo sapiens
ctctctttctttctctctctcwctctttcctatcaaaaactcatgctgatatgagttggctgtgtccccacccaaatctcatcttgaattcccacatgttgtgggaaggacccagtgggaggtaatcaaatcatggggcaaatccttcccgtgctgttctcatgatagtgaataagtctcacaagatctgatggttttaaaaagaggagttcccctgcacaagctctctctcactttgcctgctgccatccatgtaagacctgacgttctcctccttgccttccaccatgattgtgaggcttccccagcagtgtggaactgtaagtccagttaaacctctttttttgtaaattgcccagtttcgtgtatgtcttcatcagcagtgtgaaataaactaatacacatgcttagcactttttctttttttgtttgtttttttgagacagagtcttgctctgtcatccaggctggagtgcagtggcatgatcatggttcactgcagtctcagactcctatgctcaagcaaacctcctgcctcaacctctagagtagctgggactacaagtatgcatcacaatgcccaactaatttacatttttttttgagacaggtcttat

SEQ ID NO: 945319 - DNA, 316 bp, Homo sapiens
cctcccaaagtgctgggattacaggcatgagccaccgtgcccagcctggtatttctttatagcagtgtaagaatggactaatacagtgggacagacataagatagacattyccattccaagggggagaaataggcaagaagaaaggggtcccaagtaagtccaaaacccaacaaagaaaaccacattaagtcttaaaggtatagaataatctcctttgattccatgtcctgcatcttgggcacaccaagacacgggctgagcccccaaggcctcaggcagccctgcccctatctatggctttgttgggctcagcac

SEQ ID NO: 945320 - DNA, 540 bp, Homo sapiens
gccccccacttcagatgctaatcacaagccctaggttgtgatttgtgcttctgaccaattatcaatcagggattctcacaatccccccttgagtttgattaatttgccagaacagctcatataactcagggaaatgtttatgttcacctatttattgcaaaggatattacagaggatagagataaacagccagatgggagacgggcgtgaggccaggcatgtgggaaggggaggggagcttctgcactctctccgggctcaccaccctccaggaaccccaatgtgtcccgctatccagaaggcccctgaaccctgtcctttaaggttttcatggaggcttcatgacataggcatgattgattacatcattggccaccaatgatcaactcaaccttcaacccctctcccctgtctggaggtcgagggttgggctgaaagttccaaccttctaaacacgtggttgtttcycctggcaaccagccccatcctgaggctgtgcaggagccagcagccaccagtcatcatattagcctacaaaaa

SEQ ID NO: 945321 - DNA, 635 bp, Homo sapiens
acaagtccatgaaagggtctttataagaaccttgcctgaggctgggcacagtggcttacgcctgtaatcccagcattttgggaggccgaggcgggcagatcgcaaggtcaggagatcgagaccatcctggctaacatggtgaaaacccgtgttcatttgaagactgccaggttagcacggataggggattattgtttctctaggagaggcatagaaaggcctaaatggaagcaaagcagtacccaggtagggttatagcttagagtcaagaggtaaaggtatgttactgagggactagaaccagagacatggtagcctactcaaggcatctgtaactggaaatgccagaaacaatataaatccaaaattccttaggtgagcagagttaaaccctgggaattaggtgcaaacgacaagtccaaacaatcagagacaggattggattgatgatgaagttgaaactttagaattaaatgaagaaaagttggaaggatttcaagttttcaaacatgaaaaaaattcagtacaattgctaaacatcagtctcctcatttattaaccagtggaaataataactacctacaagggtggccaagaagtttcactyggaataataaacataaaacacatactag

SEQ ID NO: 945322 - DNA, 734 bp, Homo sapiens
ttccaaaagccctaccttccaaccgggcaggtgcagccacccagacgagggggaggraccctggaggaatagctatttcttttttttttttgtcgagacggagtcttgttctgtcaccctggctggagtgcagtgccgtgatcttggctcactgcaacctccacctcccaggttcaagcaattctcctgcttcagcctcccgagtagctgggattacagacacctgccaccacgcctggctaatttttgtatttttagtacagacagggtttcaccatgttggccaggcttgtcttgatctcctgacaagtgatccacacaccttggcctcccaaagtgctgagattacaggcgtgagccactgcgcccagcaggaatatctatttttaaatggaactgtgttttcatagtacacggtgaggagaaagttgctttgaaatctttatcctaataaaccaaataatatgaaaatttgcctattttaattatatgtaacaaagtttagttactgctataattgcaaatatgtataaattccttaccaaaaaaaaaagaatcaagtgggagccagagaataatttttctgacagaattaaataacatgctatagctgcttgagttcatactcaatagtcatttctgcagagttaccgagggcctcatcagcgtcagcaggagcccctcgccttctgacgctctcacatccttctctcctgcagccccgtcctgccact

SEQ ID NO: 945323 - DNA, 626 bp, Homo sapiens
ctacccaccctggtagctgaagacaaaggtcatagtctcttagtagcactatggccctgcccaccacctgagaaacctgaatacttayccaaaggcaatgttgggcaagtttgtatcctccctgtacaatcacagatgatgtgctcttgaaagtgccacctcctagatggaggccaaccaacacaaaaccagagcacttaacaaaaacacaaccaaggatcttcacagagtccacttcactcccttgctgcctccaccagagcaggtgctggtatccatggctgagagacctgaagatggatcacatcacagaactctttgtggacactccccagtaccagcctggagcctggtaactccgctgggtggctagatccagaagagaaataacaatcactgcagtctggctctcaggaagccccattcctaggggaaagggaagagcatcatatcaagggagaacccctgtgggacaaaagtatctgggcagcagccttgagtctcagatcttccctttgacatagtctacccaaatgagaagaaaccagaaaaacaattctggtaatatgacaaaacgaggctctttaacgcccccagaggatcacaatagcccaccaacaatgaat

SEQ ID NO: 945324 - DNA, 568 bp, Homo sapiens
tggttttctgttcctgagttagctaaggataatggcctccagctccatccatgtccctccaatggacatgcaatggacatctcatcttttatatggctgcatagtattccatggtgtatatgtaccacattttctttatccagtctgaaaagatactcttttcaataagtagtgttggaacagttagatatttagatgcaaaaaaagtaagccttaacatgaaacttcatgctttataaaaaaattactaaagggaatatagatctaaatgaacaatataaaatataaccttcttagaagaaaacatagaaaaccttatgatttgggtttgggtaaagagttcttagacatgacaccaaatgcatgacccacaaaataaaaaagtggtaaactgaaattcgtcaaaattaaaaaacttttgttctgagaaatcaactgttaaaagaatgaactagctacagtgagaamatatttgcaaaccacatatctaacaatggacttgtatctatagcggaacagctctgcagcggctgacaaccttgcataggccacataagcaaggcttgaa

SEQ ID NO: 945325 - DNA, 597 bp, Homo sapiens
ggccattctctgccctttaaatctggccctggctgtgtgacttgctttggtcaatgcgacatcagccgatgggatgcaaagagaggcttgagaagagcttgatcatctgtgcctgctgcttctagaacytcatcaccatgggagccagcctagggtgcctccaaagggtatgaggccacaaggagagagaccctgatgtcccagccggggcctcagacacacagccatccggcccttgctgagccagtccagccaacacacagaaatgtaggaaagactaaatattccattccattccattggagcccttccccttctctttccagcccaggttggagtgcaatggcatgatcttggctcactgcagcctccacctcccaggttcaagtgattctcctgcctcagcctcccaagtagctgggactacagatgcgcaccactacggctggctaatttttgtatgtttagtggagacaaggtttcaccacgttggccaggctggtctccaactcctgacctcaggtgatccgcctgccttggcttcccaaagtgctgggattgcaggcgtgagccaccacacccagcctcatttcaggg

SEQ ID NO: 945326 - DNA, 431 bp, Homo sapiens
taacaacatattgattcagtattcaaaaatatccccaggaataaaaacctaggaccagatggcttcccttgtgtgttctattacacatttaaagaagatttaatgtcaactctcaaactctttmaaaaaaattcaagagaagggaatgctcccaagcttattttatatggccagtgttaccctgactccaaaatcagattagtacactaaaagaaatgagattaaaagtcaatattactgataaacttaggtgtaaaacttctcaaaaaataatgtcaaaccaaatttaatgatgaccattagacagtacaccataatcaagtgggatttatccctgggatgcaaggataattcaatatatgcaaatcaataaatgtgccatactacattaacacaatgaaggataatctgatcatcacaatatatgaaga

SEQ ID NO: 945327 - DNA, 431 bp, Homo sapiens
taacaacatattgattcagtattcaaaaatatccccaggaataaaaacctaggaccagatggcttcccttgtgtgttctattacacatttaaagaagatttaatgtcaactctcaaactctttcaaaaaaattcaagagaagggaatgctcccaagcttattttatatggccagtgttaccctgactccaaaatcagattagtacactaaaagaaatgagattaaaagtcaatattactgataaacttaggtgtaaaacttctcaaaaaataatgtcaaaccaaatttaatgatgaccattagacagtacaccataatcaagtgggatttatccctgggatgcaaggataattcaatatatgcaaatcaataaatgtrccatactacattaacacaatgaaggataatctgatcatcacaatatatgaaga

SEQ ID NO: 945328 - DNA, 600 bp, Homo sapiens
tctttattttgaatttatttacaaagggcatatttttcctttgaaaaaactagaattatctggaaagatttaggtttatggaaggttgttttacatgtcagggggtcctaataacttattcctgccccgcccagcgccgcccagcaccgcccccaccccaaccaaccaaaagcatagctggagagaagggtttgtatgtagttacttttgctaagagattcccaagaactggaggggatgaatgaaaagagttcaacagggaaagtgggaaagccaacccaagagcatgatattgagctggtcaccactgtggacaactgtgaactgatcacactgtagaccttctaaggacctgtgtataagacacatccaaattgtctgccaaagggataaagtactattcatttgaatagctctattcattgaataggctattcatttgaatattcactaactctcattcacagtcagtcaagttgcttcacagagtataaatttmcttgcagtctctgattggtgtctgtgtcagaatggcagaacaagttcttgcacacatctgacatgctggtggcagagaaactctggggcagaaagtgagca

SEQ ID NO: 945329 - DNA, 600 bp, Homo sapiens
tctttattttgaatttatttacaaagggcatatttttcctttgaaaaaactagaattatctggaaagatttaggtttatggaaggttgttttacatgtcagggggtcctaataacttattcctgccccgcccagcgccgcccagcaccgcccccaccccaaccaaccaaaagcatagctggagagaagggtttgtatgtagttacttttgctaagagattcccaagaactggaggggatgaatgaaaagagttcaacagggaaagtgggaaagccaacccaagagcatgatattgagctggtcaccactgtggacaactgtgaactgatcacactgtagaccttctaaggacctgtgtataagacacatccaaattgtctgccaaagggataaagtactattcatttgaatagctctattcattgaataggctattcatttgaatattcactaactctcattcacagtcagtcaagttgcttcacagagtataaatttccttgcagtctctgattggtgtctgygtcagaatggcagaacaagttcttgcacacatctgacatgctggtggcagagaaactctggggcagaaagtgagca

SEQ ID NO: 945330 - DNA, 736 bp, Homo sapiens
cccattagtctaaatctttaamacattttctgtgttaagattttatatattgctgtaccatttatttgctccttcctgctggaaattaccttattctaatttgctctgctctggaaaatgtggatcctgggttctttgtacacacctgatccagtaacgcttggtgtcagtgatggctccttttgtcatcataggcctgacagcatttcagcgttttagcatgatgaccaggtgctcttatggtggaatctgctagctttccacccaaatccatctgcccttctatatttttcagactcctctgaaaatggttgtcgctatggacaaagttctctacaatggaatctgagcagaagtaaactgcatcacttccaggcttgtccataaaactcttccatacaggctcctgtatgtgctttctctttttgggatgactgagatgtccacatccaggcaacactgaaaggcaagttttaaggactgcaaagctgttgtcacccgagtctctaaatgacttcttagaggacagccaccccaccaacctggacgcctggctgggaacacaaaagaaaaacttctattgatttaagtcatagacttgtgggtgtctctgtcccataacctagcctagcctatcctacccagtgtggggaaggctttaagaagaggctaaatgacttaggattctagctataatgttggaagtgggttgaagtctaacaatcccatagacaac

SEQ ID NO: 945331 - DNA, 594 bp, Homo sapiens
tgtgtttttcaattattaakttggcattttaatatatacctctgtctctggtgagttggtttggatcaacttgttcatgaggatctcatctatcccaggcctgtggtgacagcaccttgtgaggtcctggatggtaaccattgaccttttccacttcaatactgttccatgctcaaatttctacactttctttttacaatttagaactttggagatatagagtaggaggaagggcacagaaatgaaaattgagaaagtggagagaatgagggaaaatgaggcaagagagattgtgaagggagtgctagaaagtgtccaaaaagaactaacaataatatgtgtgctgaaatgttaaggactaggtgtgctgatgagagcaagttgcactgaaatgcataaataagacagtttgatagagaaacaatagatacgtgttaaaccgaagatagtaaaatattcactatagaatctagtttttgagttatatgggtgtttactatataattatttcaacttttttgtatgtttgcaatttttcattataagatattagggggagaaagaactgaagatttatcttccttacattgcccc

SEQ ID NO: 945332 - DNA, 597 bp, Homo sapiens
gtaaatgacagggcccgtgttagttgtctattgctgctataacaaattacgacaaacttggtggygtaaaacaacacaaatgtgttatagttcttgaggtcagaagtctaaaatgattctcagtagactaaaatcaaggtgtggacaaggctgtgttcctttctggaggttccggggagaatcattttcttacctttttcagattctagagcccacctactttccttggctcatggtccccttcttctatcttcaaatccagcaacatctggccaagcccttctcacctccttccacatttaaggatcctcgtgattacactgggcccacacagataatccagaatgacctcatttccagatcagttgaacagcatccatcagcaacgttaattcccctttgccataggaggtaatatattcacaggttctggggattaggaagtggggaatcccatttgtggggggcccttattctgattaccacaagaccctactggatctagtcccccattatctctctgaccacatcttctgtttttccccttagtcattctgctgtcaccataatgacctcctcaatgtttcttgaataggc

SEQ ID NO: 945333 - DNA, 606 bp, Homo sapiens
cctaacaagaaagtcagtctgtcctttgaagacttgctgctagacattgacttctcctctctacctatgaaagtcctagatggcatcttcttttaatagaaggttgtttcatttacatagaaaatctgttgcttagtgtagctaccttcatcaattaacttagcaagatctggaaaacgtgttgcagcttccatctatattagcacttactgcttcaccttgtacttttatgtcatggagatggcttctttccgtaaacctcatgaaccaacctgtgctagcttcaaatttgtcttctgcagcttcctcacctctctcaggcttcaaagaattaaagagagttagggccttgctctggattaggctttgtcttaaggaaatgttgtggctggtttgatctcttatccagaccactaaaactttctccatatcagcagtaaggctgtttcactttattatcattcatgagttcaccaaaatagcacttttaattttcttcaggatcttttcctttgcatccacaacttgactgttttgggcaagaggcctaggttttggcctatttcagcttttcamatgctactctcactaagcggaatcatttct

SEQ ID NO: 945334 - DNA, 607 bp, Homo sapiens
taaaaatcataaccacatgtacacttcattactttaagaawtgttacttttgaaagaaaaaatagtcatatccattgactctcaaatattcttatgagttatttatactaaatgaatgaaaaaggcagagaatacaactatgtataaaatatgagcccaattttttaagacacacttatgtatagataggcatagagagacagatgggttaagagatattaagagaggaatgatgagagaatagaaaaaaactttaggggctgggtgtggtggctcacgcctgtattcccagctctttgggaggccaaggagggtggatcacttgaggtcaggacttcgagaccagcctgaacgatatagtaaaaccctgtctctactaaaaatacaaaattatctgggtgtggtggcatgcatctgtagtcccagctgctggggaggctgagacagcagaattgcttgaacccaggacgtggaggctgcagtgagctgagattgtgccactgcactccagcctgggcaacagagtgagactctgtctcaaacaaaaaaaaaaaaaaaaaaaaagaaaaagaaaaaaatctttaaggagatatgcataaatatttca

SEQ ID NO: 945335 - DNA, 455 bp, Homo sapiens
tcaggggtgggtccaggaatctgtgctttacaagctccttggatgagtttgctatatgctgaatatacctatactagagacatccctgagggaagcttatttcccaggccaggccaacaataataagaccatattactatagtaatattataatacatattacagttttgagtcagaagttttgagatcctgtccaggtcagttcttgaatgcctgggtcccctgagggacagggaggtactcagagctctcatatacctctgggcagaagagctaatggcatctggatagcttcttctgtttttgtttttgtttttgtttttgagacagtctcgctctgtcgcccacgctggagtgcagtggcaccatctcggctcactgcaatctctgcctyctggattcaagcaattctcgtgcctcagccttctgagtagctgggattacaggtgcccacc

SEQ ID NO: 945336 - DNA, 582 bp, Homo sapiens
cattctccgtccagttttattcccttgctggtgaggagttgtgatcctttggaggggaagaagagttctggtttttggaattttcagcctttttgtgctgattttttcctcatcttcgtggatttatctacctttggtctttgatgttggtgaccttcagatggggtttctttgtggacatccttttcattgatgttgatgctgttcctttctgttgggtagttttccttctaatagtcaggcctctctgctgcaggtctgctggagtttgctggtggtctactccagaccctgtttgcctgggtatcaccagtggagactgtagaacagcaaagattgctgcctgttccttcctcctaaagcttcgtcccagaggggcacccgccagatgccagccagagctctcctttatgaagtgtctgttggctcctactgggaggtgtcttccagtcaggaggcacacgggtcagggacccccttgaggaagcagtctgtcccttggcagagcttgagcactgttctgggagayccgctgctctcttcagagctggcaggcaggaacatttaagtctgctgaagctg

SEQ ID NO: 945337 - DNA, 546 bp, Homo sapiens
gagagttagcatgtcctttcaaagcagatgttgtcttctctctagttatgaaagtcctagacggcaccttcttccaatggaaggctgtttcctctacactgacaatctgtttagtcayctgcatcaatgatcttagctagatcttctgggtaacttgcagcagcttctacatcagcacttgctgcttcattctgcactcatggagatggcttctttccctaaaccacaggaaccaacctctgctagcttccaatttttcttctgcagcttcatcacctctcttaggcttcacagaattgaaacgagggccttgctctggattaggctttagcctaaggaaatgttgtggttgctttgatcttctattcagaccattcaaactttctccctagcagcaataaagctgtttcactttcttattcatatgcttagtggagtagcactttgatttttcttcaagaacttttcctttgcattcacaacttggcctactgtttgccttaagaggcctattttagctttcagcatgccttcctcactaaactt

SEQ ID NO: 945338 - DNA, 611 bp, Homo sapiens
ttcctagagtggctataccattatacattcccaccaacaatatatgagatccaatttttccacatcctcgccagaatttggtgtgatttactttttaattttagccatttctatgtaatatctcatttactcacacattatttagatgtgtattagttttcaaatgttgaaaaatttgcctatctttttgaactgatttctaatgtgacttaagagcatactatggatatttatctgagagcatgctatggatgatttcaattatttttacattttttgactgggtgtggtggctcacgcctgtaatcccagcactttgggaagctgaggtgagcagatctcttgagcacaggtgttcaagaccagactgggcaatgtggcaaaactctgtctctacaaaagtacaaaaaaaaattactcgagcatagtggcctgcacctgtagtcctagctcctcaggaggctgaagtgggaggatcacttgagcctggcakgttgaggctgcagtgagccatgatcatgccactgcacaccctcctgggtgacaggttgggaccctgtctcaaaaaaaataaattattgaagatatgatctacattattaaatattgtg

SEQ ID NO: 945339 - DNA, 563 bp, Homo sapiens
gcatagcttaaagtgtactatgatcgtgcctttgaatggcaactgcactccagsttgggaaacatagcaagaccccatctcttaaaacaaaaaaagagtatcgtttcacttcttttaaatttgttgagacttgttttgtgaactaacatgtggtctatcctagaaaatgttttgtattctcttaccaaattggttatgttattattatatagtgacctagtctctttctacagtttttttatttaaagtttgtttttttctgatataattactactggttgcttttgacttttgtttgcatggaatatctttttccattccttcactttcaatctatatgtgtctatgcaggtaaagtgagtttttttgtaggcagcatatagttggatcatgtaaaaaatctattcagccagtctatatcttttaagtggggaatttaatccatttacattcaaggttgttattgataggtgaggatttattcttatcattttctatattgttttctgattgttttgtacatcctttgttcctttcttcctcttatttttattgcagtttgg

SEQ ID NO: 945340 - DNA, 791 bp, Homo sapiens
ttataatggagataaattcctattgggtaggaactgtcataacatcatagtgcaatacgttactcaggtgttcatgatgacataaacctactgcactgtcagtttataaaagtatagtatggccgggtgcagtggctcacgcatgtaatctcagcactctgggaggcagaggtgggtggatcacctgaggtcaggagttcgagaccagcctggccaacatggtgaaaccctgtctctaccaaaaatataaaaattagttgggcacggtggcagacgcctgtaagcccagctactcaggaggctgaggcaggagaatcacttgaacccaggaggcggaggaggttgcagtgagccgagatcatgccattgcactccagcctaagcgacagagtgagactctgtctccaaaaaaaaaaaaaaaaaaaaaaaaaaaagtgtagtacatataattgtgtacggtatctgataataaacaactgagttactggtttgtgtatttagtatactttttattgttattttagagtgtattccacttgtttaaaaaaaaaaaaaaaagtaaaacaccctcaggtagatttcagaaggtattccagaaaaagcactgttatcataggagaggacagctccataggtgttgctgctaaagatctcctagtggaagaagacatggagttagaacaaagtgaaactgatgatctttacactgtataggctaatgtgtgcatttgtgtcttagttcttaacaaaaagtttawaaaatctgtaaacagaaaaagtctcatagaata

SEQ ID NO: 945341 - DNA, 685 bp, Homo sapiens
atatttttaaaattgcattgattttcctcaaaacagctattttttacctccctctctgaatagtttaacatctttatctctcctaggttagtcactggtgacttgtttattgttyggtgaggtcatacttccctgaatgttcttaatgcatttgggcctatgttcatgcctgggaattgaataagtcagtatttattccagtctttgtagtctggtcttgtttgtacctgtcctcctctagatggtcttccagaaattccaagggtactgactattgagttccctaaggctggggtcactgaagctgtttcagcaccagggtgccctaagctcaggttcactgtgactcttgcaggactgaggtcccagagggccctgatggacttggagaagataagggaggggttccctgggttcccaggcaaagtgcttcattcacttccctcttcttcccattggaaggagtctgggtactaagctttgtggatctgggagaagggtggcttgggcactcccatggccactgcagctggcaccacatacccgaagcccacagcctctaggaccagagcagcactggggcttgtctgagtcctgtggccactactgcctgactgctgctgacttatgtaggtcttgaggccgagctactctgctggtggtgaagctggccagggtttaggtc

SEQ ID NO: 945342 - DNA, 746 bp, Homo sapiens
gtaggataaaatgtaggagaagatcttcargagctaggactaggcaaaattttcttagacttgacaccaaaaacatagtctacaaaaggaaaaattgctaagctaagtttcatcaaaatttaaaaatttgttctgcaaaacaccttgttaaaaagatgacaagttacagactaggagaaaatattttcaaacaacatatatgaacaaagcactgttatcttgagtatataaggaacttgcaaactccacacaaaaaatcaaacaatccaattagaagatgggcaaaagacacgagcagacatttcaccagagatgatacacaatggacaaataagcccatgaaaagatcttcaacttcactagccatttgggaaatgcaaattaaaaccacaatgaaatataatttacacacatcagagtggctaaaataaaaaatagtgacaagacaaaactctgctgaagatataagtgtgaatcactcatatattgctggtgggcatataaaataccacagccactgcaaaagtgtggcagtctcttttttctctttagagacagggtctccctatattgcccaggctggactcaaattcctgggctaaagtgatcctctcgcctcagcctccagagtagctgggactaaaggcacatgctactgttgatgtttggcagtttcttatacgactgaacatggaactaccgtatgacctagcaattacattctgactcatctatcccagagaaat

SEQ ID NO: 945343 - DNA, 617 bp, Homo sapiens
cacactgtgggctaaaatctgttgctgctataggatgtcttaccataccaaaaagttaatctagckaatgctccaagttacatacattggatttattggcaaaaactcactagtatcattccgcatagaggaacatgtcacaaaaatgaaagtagacaattatcaaaagattatacaagagggacaaagatatataaaaacacatttattctataaaacaaatttgatggggaaggggtgtgggtggagaataaaattaggacacacaatacaaggacagcaggaagaaaagcatacatagagaagacaatccaggagatctattcctgcaaatttcatgttaattatgtcaacggccaggtagagtgggaacaaaacacaggaaacaaaaaagaagtttctggccaggcatggtggctcacgcctgtaatcccaaactttggaacgccaaggcaggaggatcacttgagctcaagagttcaagacctggctgggcgcggtggctcacgcctgtaatcccagcactttgggaggccgaggcggatggatcacgaggtcaagagatcaagaccatcctggccaaccaacatggagaaacctcgtctctactaaaaata

SEQ ID NO: 945344 - DNA, 642 bp, Homo sapiens
tgatgttgggatatacacagatgtctctgaaaccatgttcagaaggaagcaaattaaattatgacttgtgtttctgtgtatgcttattcatatctgctactcctaagtatcatcaatcttgtgtcaacaggtgagaaatttgtctaaaataaatcaattccattgagcattataaatttatactaatgtactttggacatagccaaacatagtccaatttttcatatggccattattttaatgttttattgaataaacgcttggggaaaagttccttacaaatatctgtagaacagagatgatatacagattatatatattccaagtaattcaggcttccagattaaactaaaccctagaaaagtcaatgcagtgtctatgtcactgaatcttagagaattatgttagtaattatgaatggcattatctattacaaataaataagcagagttgtagaactttagaactagaagggactccagaaatcagcaaagtctagtttagatgagcagtctgaagcccagagggataagtggtttaactactttaatgtaactagccaatggcataattagggctataaaatggggttgggggagcaawaataattagcattaaaaatccctactatactacttttca

SEQ ID NO: 945345 - DNA, 607 bp, Homo sapiens
cagacaggcaggctggggagctccaacctcatggcagtagggcagaagtggagccctagccagagaccacaccctcatctacctagcacttcccttcccccactscatatcatttaaagggaccatgttcttcccttcccagcactcccatatcaaatgtatgtgtaaacatttaagaaatcttggctttaattctaataaaatgataaaattactatgtaattttagatgctaatacttctaattttgtataaaacttttataatctttatccttcataatttttagattggtgagatttgccagaactttaaactggtatctactgcatgcctacatcgtaattttatttagtcattttactagaattaaaactaaaatttctggtactccaattaacccttcagctttttcaaatgaacataaaatacatctatgcacataaattagaaaatctagaagaaatggataaatttctggacaaatacaccttcccaagacggaaccaggggagaaattgaatccctgaaagaccaaccatgagttctgaaattgagccagtaataaatagcctaccaacctccccagaaaagcccaggaccagatg

SEQ ID NO: 945346 - DNA, 586 bp, Homo sapiens
aataactcagtcagacaaaatacaggaaaaacaataaaaagagtaaacaatgtctccaagaaatctgggattgtgtaaagagaccagatctacaactcactggtgaccctgagagacagggagagaaagcaagtaacttggaaaatatgtttcaggataccacctatgaaaattttcagaaccctgctaaacagcccaacattcaaattcaggagatgtagagaacccctgtaaaataatatacaagaattccgtcccctcaacacatagtcattagattctccaaggttgaaatgaaagaaaaaatattaaagccagctagagagaaggggcaggtcacctagaaagggaaccccatcagcctaacagtagatctttcagcataaaccctacaagtcagaagagaatggggcactatattcagcaatcttgaagaaaacaatttccaaccaagattttcatatttaaccaagcctcataagcaaaggagaaataagagccttttcagacaaacatatgctaagggatttcattaycaccagacctgccttacaagaggtcctgaagggagtgctaaacatgggaa

SEQ ID NO: 945347 - DNA, 629 bp, Homo sapiens
tgcaccaggggagagagagaaacccatggtcatgttcaccctgaggttcacttccccttgttctctctacgtctcatcttggctttctcaattttggtttattttgttcgccttttgatttctgcaggctaagtatgttccaacctataatccctcttcctacacacacacacacacacacacacacacacacacacacagtgatctgtctgctactgacaactccatggctaacctggacagagtgtgttacagagccgggaaaggaattccttctgtttcacgtggtcctttggctgtgacaggcagacctctaggacacttctagggggtggtagcctccatagccaggtgctcaagaaggggacgaggagcctgccctctcaattagtgctggcagggtggaaatcaatgccgcttttgaagagcagcttggcagttaaaacccaaaagcttaaaaatgtgcacagcatttgccccagcaattcttacaattgagaacactgccagatggtatcaaaaygttatttaacaatattttaaaggaaacattattttacaataaggaaaagctagaaataattgcaatgtccaacagtagagcattaattaagtaaaatatggtgcat

SEQ ID NO: 945348 - DNA, 590 bp, Homo sapiens
agagtggcaaagccaggaaaacagggcccagagtggttaggcaactccctcaagtttgcacagccaataagacctgaaacagagaaaacaataatcatatctaacccttctttagccctagcccagtgccaggtgctattctaaaggctttatagctattatctcagttggtcctcacaaattctgtgaggcaggtccaatcattatccccattttacaaatgaatcaacagaggcacagagaagttaaggaacttgtctggagtcacacagccagcaggaagaggagcttgggtttaaacccaggaaactctggcaccagaagctgtgcccttatccactgggctaccctccatttttaatccataaatatgcaaaaagcctcagcattgtaagtgccaagtgctgatccagatgtgtttgactctagagcccatgttttgttctgtaatcccattycaaggagagcatgtggatgtggcagtggggtgaggggtgaggggacacaagagggtgagggggtctattttgctgcgtgggtcatatgagaagctggataggccattcttcatgaagggctgtctaatccca

SEQ ID NO: 945349 - DNA, 758 bp, Homo sapiens
agctgatttcttcaagacaagtgtattatttttctagggcttccataacaaaatrtcacagttttggggtggcttaaacaacagacatttattttctcacagttccagaggctagaaatctgagatcaaagtgttggcagattcagttcttttgtaagcctgtctccctggcttacagatgggtgttttctcgctatgtcctcacatggtctttcctctgtgtgcacacatccctggtgtctctccatcttctttgttataaggacaccaatcagattggattaagatccactctgacagtctccttttaacataatcaccacttttaaagtcctatctccaaacacagtcatattctgaggtactggaggttaggtcttcaacatatgaatttggtggtggtggcggagcaatccagcccataatagcaagcaatggagacagagagagagagagagagagagagagattgaatttctgctgcttggattctttcactacagggaagatctagatcttcttttgaggccatatgattagctcaggcccgttcaggattatctcccttttgattaactcacattaactgattaggggccttaattacacctgtgatccccttacaccactgccatatcacatacacataatcacaagtgtgacatcccattcccttgccatatttgattggttagaatcgagtcacagttcctgccaacctcaaggtgaggcagttatatagagtgcagattctaagg

SEQ ID NO: 945350 - DNA, 590 bp, Homo sapiens
tacaaccagaattgtgggaggattcattttgcttcaggaggttcgtgaggcatcctggaggcggggtgacaattaagagactctggtgagakaccacccaagactcgctgagatttgacccaaggcacaggttggggaggaattacagagatatgattggcaggactgccacaatgagaacaaagacataattcctggatttgcaactttttgagacaaatgggaacaaataattacaatacagttgccacatgcaatcaagaatgcaagaggtaccaaggagaaaggtggtaaatataggatttgggaagttattgcctcaaacattaggaattccagaagaataccatcacatctcctgtcagccttagcctgtgaaaacaaaactcattttccctgggaggtatctggggagcacagtctactcctgaggacctgaaggtaggttagcacacagttcacatcagtttctagcatctactggttccagccttttctcagtcagtttcctcccccatcccgccccatagtggaagtgcgggaaatgaaagttcatgaaatgctactattgaatttgctacagatgatag

SEQ ID NO: 945351 - DNA, 631 bp, Homo sapiens
tcatgggccttcactttgcgatcgtgtgacctaactctccttaataagctcccttttatatatacatatatcctatcagttctatccctctggagaaccctgactaatacgatgttgatattttgacctcttccccatgaatcacaaatattcatgaatcacaaatgttcttaatggcatctagaatggtcaatcttttccagaaggttttcaatttactttgcccagatccatcagaagaaatcactctctatggcaattatagccttacaaaatgtatttcttaagtaataaaacttgaaagtcaaaatatttccttggtccatgggttcattggttgcagatgaatgttgtgttagcaggtgtgaaaacaaccttaaagtctttgtacatctccgtcagaattcttgggtggccaagtacattgtcaatgagcagtaagattttgaaaataatctttttttctgtaccataggtttcaacagtgggcctaaaatattcaataaactatgaagagatgtgctgtgaacagatgtgctgtcatscagactttgctatgccatttctggagcccagacacaacagacttagcatcattcttaagggctctaggattttcagcatgataaat

SEQ ID NO: 945352 - DNA, 619 bp, Homo sapiens
gcatcttttgatgtcacctgggagctcattacaaatgcagagcctcccgccccacccaaatcagaatttcatttttacaagatccataggtgatttgtaagcacttgattaatatttgaaaaggattgcataggcagggtgcagtggctcacgcctgaaatcccagcactttgggaggctgagatgggcggatcacttgaggttgggagtttgagaccagcctgaccaacatggagaaaccctgtctgtactaaagatacaaaattagccaggcatggtggtgcatgcctgtaatcccagctacttgggaggctgaggcaggagaatcgcttgaacccaggaggcggaggttgcagtgagctgagatcatgccattgcactccagcctgggcaacaagagtgaaactctgtctcaaaaaaaaaaaaaaaaaaaaaaaaaaaagcactgcctttaagtgtcatgagggcagtataagcaaacgtcccaggcctgctattgcctcatcaaaccatacagaaggcatctatcygctggggtcagacttcagatcctgccctggacacttagtagctgtggatgttaggtgacattgtgaactttgaatttcagtttcctcat

SEQ ID NO: 945353 - DNA, 551 bp, Homo sapiens
attcccagtcctcatctttcttggcctgtcagcagtgtttgacactgtcgatgattccattttcctaaataaactttcttcatgtggctttcaagacatctagtytcttggtttgcctcctcccttgctgactgctgcttctcagtcagcttttgtgaatccttctgccaagctgatttctaaatatttgagagctctaggtctctattctcagacttctcttctctggctatacttactccctgggatggaaatctcgtctagtctcaggactttaaatatcatctgcagatgattctaaggttttaaaaaatttatggcctggccctttcttctgaatggtacagatttttatccaactgcccatccagcctcttgacctgagtgaattatatgtatgtcagattcaacagtgttaagctatacttatttctccctcaaaactactcctcttctaatctttcctgagtcctgaaatggcaactctgtctttccagtttctcaggcaaagaaccttatatttattctagcaaatcttatcatgtctgctt

SEQ ID NO: 945354 - DNA, 563 bp, Homo sapiens
aaaaacgatggtagtttagattacagtggtgatagtagagatggaaagtagataaatataagatttttaattcacaagagatgcttttgacgttgtatataaaaaaaaactttcactaaggattttaagatttcctcttatgttttcattggattgtttataattttagctttcacatttaggtctgtgacccacttggagttaaattgtgttatgttcaaggttagattgaagttattttgtctttttttttttttttagcgtatttatacccagtcattccagcactgcatgttgaacagactgttctttctcttctaagttgcctttttcacttctgttgaaaggtaatttactgtatacgtgtccgtctattttcagactctgtcccagtgatctgtttgtctatctttacacagtatcacactatcttcattcctgttgctwtatcataagtcttaaggttagagagtgtaagttcgtcatcttgctctttttcaaagttatcttggctattttagatcctttgcatttccatatgaactttagcatcagcttctcaa

SEQ ID NO: 945355 - DNA, 726 bp, Homo sapiens
tcatttgaacaacacaaggaacctctgaggctctcagaagagaggtttatctgggcctgaggccagggcccatattagggactccattcagaacmagaatcatgcaactagctccacatcatcaaaaaagatgagatgattaactaaaaattttccgctatagtcctgaaaatttgtttttagccagtctctagtctttttatggaaagtttctgatgccttataccctgttacaacactaaatctggcagatactttggaatagaaaaactgtggccatttagggcaatacctgggtatttccaggtgaatttctcaaatgagaaaagtgcatttctgaatcaggaactttttatagaaaggcgctacatgaacaaaaatacattttctctttatgatgttactgttactctgtaggattagacttttgcttatctggaactcaagagactgtttctacgttcttggatatgtcttccagtgggtaattcatcctcaatgtgtattgaagggtgaccaggatatagataagtgacaaaggcaagataaaacataagagatttaactgaatggcatgagcttctaaggaagtagtttacaaaagattgcagagcagaattcggcaaactatagccatgagccaaatcccaccaccacacgtttgtgtaccacttgcaagccaagaatggtttttccatttttaaatagttacattttaagcagtta

SEQ ID NO: 945356 - DNA, 629 bp, Homo sapiens
gcatgaaagtaatattaaatatctgagagtgactgagatccacaagagaaagaatgcagagaaagatggaagagaacgaagagcaagataatayataacaacaggaactgagaaaggcaactggagtaaagcaggaaatggtcctcagggctaagtagaaatcaagtagaataaagattcccactggattggcaactgtaggtcattggtgatcactaaggttgtgatttgtagagtcatgtatcttaaaaataattataagagaataagatatgagtttcccctgtatataatattttattttattctccattagcatttatacaagactcagtaagacactatgtcttattcatctttaatactctgtgtctgacacccaacaggtactcaataaatgaaaggataaaaagaaaattgggatatgtatgtgtagagtgtttttatttatgaaaatggattttgttaaggaaaacatgctacttacaacacgcttcaggcatgtatatattcttatatattcatataagaatatgcctatggcatgacagcatccacaatttaaagctggtagttaggactaataaagctaggtagctgcacagccccatgactgtgagagggccata

SEQ ID NO: 945357 - DNA, 601 bp, Homo sapiens
aagtaatgaggagccaaatgttaatcaccaagacaatggggaaaatgtctccagagcattttagagatcttcaaggcagcccctcccatcacaagccygaaggcctaggagaggaaaatggcttcatgggccaggcccagggctctgctactgtgtgcagcctcagtagctggtgctctgcaactcagccactccagctccagccatggctaaagcgggccaacatacagttcgggccatggcttaagagggtgtaagccccaacttttggcagtttccacctggtgttgggcctatgggtgcacaggagataagagttgagatttttggaacctctatctggatttcagaaaatgtatggtatacctggatgtccaggcagaagtctactgcaagggtgaaaccctcatggagaacctctagtagggcaatgcagaggggaaatgtggagttggagcacccacacaaagtccctactgtgacactgtctaatggagctgtgagaagaggcccaccaccctccagaccttagaatagtagagccactgacagcttgcaccatgcacctggaaaagccacaggcactcaacagtctacaaaa

SEQ ID NO: 945358 - DNA, 601 bp, Homo sapiens
aagtaatgaggagccaaatgttaatcaccaagacaatggggaaaatgtctccagagcattttagagatcttcaaggcagcccctcccatcacaagcctraaggcctaggagaggaaaatggcttcatgggccaggcccagggctctgctactgtgtgcagcctcagtagctggtgctctgcaactcagccactccagctccagccatggctaaagcgggccaacatacagttcgggccatggcttaagagggtgtaagccccaacttttggcagtttccacctggtgttgggcctatgggtgcacaggagataagagttgagatttttggaacctctatctggatttcagaaaatgtatggtatacctggatgtccaggcagaagtctactgcaagggtgaaaccctcatggagaacctctagtagggcaatgcagaggggaaatgtggagttggagcacccacacaaagtccctactgtgacactgtctaatggagctgtgagaagaggcccaccaccctccagaccttagaatagtagagccactgacagcttgcaccatgcacctggaaaagccacaggcactcaacagtctacaaaa

SEQ ID NO: 945359 - DNA, 618 bp, Homo sapiens
cacatgcctgccaataccccaggaggcccacaaaggtttgcaactgcctcaccatggtggtctggggatatgcctgaattttgtctgtgatggcctctggtatggcttttcatcttacacgacaagataactctcaagaattcggcagtcaatccaggccctcattctttggattcattgatagcctaaccacatgctgccaaatgttgtcacaagagggctactgatgcttttaaatctgcaagagaatcagaggttaacataatatcatcaatataatggaataggtggattccctttggacatttccagggagctcaatctatgacagcaagaccatgacatatagtggggctatgcacacagccctgtggcaacactgtgaaagtccactgtggcctcttccatgtgaaggcaaactgtttctgactctctggagcgatgtcaatggaaaataatgcattagccaagtccactgcatagtggtactgtcccaattccatcgtcaagcagtccatgaaatccatgatagatgtggcagagctgccaagccatgtgaaatayccatccccagaatgcactctggtatgggacagacatatgcagtgtataactatg

SEQ ID NO: 945360 - DNA, 630 bp, Homo sapiens
cagttgcctggaattggggcagataaaatctayaaatcataatttacgttgtcaagaaaacctagttcactgttttaataattattttttactaagaagtaaaagccagattgattttgacagtttttataaggacgataatatcagaaacttatcagatgattattatatatatatttcacagaagatatatatatatatacacatagatggatatagataaatgaaaagttctacagttagaaaatcatttgttatctctaataaaggtgtgaagagaagttcaaataactataataaggtaaaaaatatatattacatttttacctggcatcagaattttgttaggtagtaggctgtctttttttaaaaaaaagtaagtatcttgccaacctcccttgaatcggcatactgagatccaaaagatattatttggaaatcaattaaaaaatagaaagatagcctaagaaccataaatttgaggttggagaacctggagaaagaggaatgggaatgggattagattaattaaactatggatgtggcttgaatttaaagtctggagacctggagaacatgatcaggaaagaaattgccactagcagtttggtcaaaagacttttatgaaca

SEQ ID NO: 945361 - DNA, 585 bp, Homo sapiens
tttctagtcctggacattatttcattggcaatttttttattaccatttcaatctcaaggtttgttattgatctgttcagatattctatattttcctggmttaatctaggaggattttatatttccaggaatttatccatctcctctaggccttctggtttatacatgtaagattgtttatagtagacttgaatactcttttgtatttctgttgttttagctgtaatatcacccatttcatttgtaaatgagcttatttggatcttctcttctttttccctttgttaatcttgctattgttctatcgattttatttatcttttcaaagaaccaactttttgcttcaattatcttttttatttgtttatttcaattccatttagttgtgtttaggtctttgttatttcttttcttctatggagttgggatttggactgttcttgtttctgcagttccatgaggtgtgaccttagattgtctgtctgtggtctttcagactttttgatgtaggcattttatgctatgaactttcctcttagctccattgttgctgaatcccagaggttttgataggttgtgtcactat

SEQ ID NO: 945362 - DNA, 702 bp, Homo sapiens
tgtttctgcagttccatgaggtgtgaccttagattgtctgtctgtggtctttcagactttttgatgtaggcattttatgctatgaactttcctcttagctccattgttgctgaatcccagaggttttgataggttgtgtcactattgtcattcagttcaaagaatttttaaattttcatcttgatttcattgttgatccattgatcattcaagagcaggttatttaatttccatgtatttgcatggttttcagggttccttttggagctgatttccaattttattccactgtggtctgagaaaatacttgacataatttcgattttcttgaatttactgagacttgttttgcagcctatcaaaaagtctatcttggaggatgtcctatgcgctgatgaatagaatgtatattctgcagttgttggggagaatgttctgtaaatatctgctaagtctacttgttgagcggcatagtttaagtccattgtttctttgttgactttctgtcttgatgggctgtctagtgcagtcactgcagtattaaagtccccaactattattgtgttgycatctatctcatttcctaggtccagtaataattgttttataaattttggagctccagtattaggtgcatatatatttagaattgtagaattttactgttagtcattttatcattatataatattcctctttgtc

SEQ ID NO: 945363 - DNA, 595 bp, Homo sapiens
caagattagaggaggtaatgatgggtctaaagaattagacaggtgttagattatggagtgaaaagaacatattatgcagtcagaatggctattatcaaaaagtcaaaaaataacagatgctggcgaggttgcagagaaaagggaacacatacactgttggtgggagtgtaaattaattcaaccatttttgaaagcagtatggagattcttcaaagaactaaaagcagaactaccattcgactgagcaatcccattactgggtatatacccagaggaatacaaatcattctaccataaagactcatgcacacaaatgttcattgcagcacgattcataatagcaaagacatagaagcaaactaaatacccaccaatgacagattggataaagaaaatgtgctacatctacaccatgaaatactatacagccataaaaaataagatcatgtctttttgcaggaacatggatgcaacyggaggccattaccctcagcaaactaattctggaacagaagaccaaatactccagatattctcatttgatgagaacttattaacacaaagaaggaaacaacagacactggggtctacttga

SEQ ID NO: 945364 - DNA, 540 bp, Homo sapiens
tcacttaaagcctcagaagttagcaactttatagataagggcagtcctgattwtcaacccaactgcatttgtacaaaacagtagagttagcctatcctttcctgccttaaatcctggtgctgcttgcttctcttcctaataaatgtccttcgagcatccttttttttttttttttctccgtaatagggcacttctgtctgcattaaaaactcattcaggcagatatactttctcttcaatgattttttcttaatggcgcctgggaactgtctgctgtctcttggttggcagaagctacttcgcctatttcttgacattttttaagcaaacctcttcctaaaattatcaaaccatcctttgctggcattaaattctccagctttagatccttcactttctttttgctttaagttgtcatatttttcttgaatcatattagatgtaagtatgcctttctacagcaatcctgcatctacataaaagctgcattttcaatgtgagataaaaagatgttctgcaaaaagtgcaagcctgctggag

SEQ ID NO: 945365 - DNA, 772 bp, Homo sapiens
gaagttgaagccaatgctcatttaccattccaaaaatcctagggcccttaagaattatgctgaatctactctgcctgtgctctmcaaatggaacagcaaagtctagaagaaagcacatctgtttatgggatggtttactgaatatttattttaagcccactgttgagacctactggtcagaagaaaagattcctttcaaaatacgactgctcactgacagtacacgtggtcacccaagagtgctgatggagatgtacagggagattaatgttgttttcatgtctatgaacacaacatccattctgtagcccatggatcaaagagtcatttttcaactcttatgtgagaagtatttcataaggcaatagctaccatatatagtgattcctctgacagctctgggcagagtaaactgaaaccttatgaaaataattcaccattctagatgccattaagaatatttgtgattcatgggaggaggtcaaaatatcaacattaacaggagtttgaaagaagctgattccaatgctcatggataactttgaggcctttaagacttcaatggagaaagtcactgcagacgtggtggaaataggagaactagaattagaagtggagcctgcagatgtgactgaattactacaatcttgtgctaaacttgaagggatgaggagttgcttcttatggatgagcaaagaaagtggtttcttgagatggatctactcctggtgaaatgacagaaaggatttagaatattacacaaacttagttg

SEQ ID NO: 945366 - DNA, 600 bp, Homo sapiens
tccgacaaacaaactcccccagttttcatctccaaacgtcattttgaagtgcacactcacaagaaggggttgaccataaccacttatgagtatgcacctgagggggccaccatgtgaccaatggggggccggggaggaggacggccagaaatggcactgcgacgcagaacttgacctagagtcggccaggccatcagaaactctcagtgcaacaagtgccgagtttgatgtttaggttttcttttctttttttttttttttttttttgagatggagtctcactcttgttgcccaggctggagtgtagtggcaccgtcccagctcactgcaacctctgcctccctggttcaagcgattctcccgtctcagcctcctgagtagctgggactacaggcgcgtgccaccacgcctggctaatttttgtatttttagtagagatggggtttccccatctttactaaagaccacgttggccaggctggtctcaaactcctaacctcaagtgatccgccygccttggcctcccaaagggctgggattacaggcgtgagccaccgcacctggccttaaggtggttccgaggagcccactaagtccatt

SEQ ID NO: 945367 - DNA, 615 bp, Homo sapiens
ggcaacaagagcaaaactccgtttcaataataataataataataataakaagaagaagaagacaaataacccagttaaaaatgaacaaaagggccaggcgtggtggctcaagcctgtaatcccagcactttgggaggccaagacgggtacatcacctggggtccggagttcaaaaccagcatggccaaagaggtgaaaagaaaccccacctctactaaaaatacaaaagttagccgggcgtggtaccacgcgcctgtaatcccagctattcgagaggctgaggcaggagaatcgcttgagcccgggaggcagagggtgcagtgaactgagatcaggccactgcactccagcctgggtgacagagcgagactccgtctcaaaaacaaaaaaacagaaacaaaaacaaaaacaggacaaaatatctaaatgggcatttttctgaagaaagtatacaaatggtcaaaaagcccacaaaaacatataaacatcattagttaccagggaaaggcaaatcaaaaccacagtgagataccacttcacacccactagggtcactataattaaaaaaaaagaagagaaaaagtaataggtgtcggcaaggatgtagagaaatta

SEQ ID NO: 945368 - DNA, 760 bp, Homo sapiens
aaaaatttaaaatttgtgctaaaagacactatcaacagagtaaaraaacaacccacagaatgggagaaatatttgcaaatcatatatctgatgagagattgacatccagaatatatacacacctcctaaaactagacaacaaaaaacaaacaacctgattcaaatatgggcaaaggacttgaatagacgcttatccaaagaaggcatacaaagaaccaaaagcacatgaaaagatgttcaacatccctaatcattagggaaatgcaagtcaaaaccacaatgagataccatctgacaccccttaggatggctactatccaaaacccagaaaataacgagtgtaggtgaggatgtgagaaatcggaatccttgtgcactgctggtaggaatgtacgccggtgcaatcactttggaaaatggtatggcaattctttaaaaaattaaaaatagaattaccatatgatcagcaattccatttctggctacatacccagaagaaccaaaagcagggtctggaagaaatatttgtacaccgatgtccatagcagcatttttcacaatagccaaaatgtagaagcaaccagactgtccaatgacagataaacagctaaactaaatccaggccaagcatgcaatggaatactattcagccttgaaaaggatggaaattctgacacatgccacaacatggataaaccttatgctaagtgaaataagccagacacaaaaagacagatactattaatatgttattccactt

SEQ ID NO: 945369 - DNA, 558 bp, Homo sapiens
tgagcatcacctgggaactgtagaaatgcacgttctcaggccccttcyccaaactgctgaatcagaacctctgggttctaacctctcccactaattttgatgtgaacaaattgaggatcactccatttttttgatgtgaacatttgaggatcactgatgcagatgaaagcacaggctttggagatgagagcagtccagccccaattctaactaaccccagccacacgtagcctctcaaaactcagatttcacatctgtcacaggagggtgatgttatctgtctcatacatagcactgtggtggagattaagtgagatgagacgaggcacataggttgcacaggaaaagcctgacaaaatcccagtaaatgtagtgaccagccatcctggtttgctcctgacagagggagaccctgggagtcccatcgtactgggatgagttgctcgtcctatcagagaatgcgagttctctctgcccttgagggatgtagggaagcctttcctgtcctttcggtaagtagagaccctaaaggcttgaagggacttatctgaggccctg

SEQ ID NO: 945370 - DNA, 558 bp, Homo sapiens
tgagcatcacctgggaactgtagaaatgcacgttctcaggccccttctccaaactgctgaatcagaacctctgrgttctaacctctcccactaattttgatgtgaacaaattgaggatcactccatttttttgatgtgaacatttgaggatcactgatgcagatgaaagcacaggctttggagatgagagcagtccagccccaattctaactaaccccagccacacgtagcctctcaaaactcagatttcacatctgtcacaggagggtgatgttatctgtctcatacatagcactgtggtggagattaagtgagatgagacgaggcacataggttgcacaggaaaagcctgacaaaatcccagtaaatgtagtgaccagccatcctggtttgctcctgacagagggagaccctgggagtcccatcgtactgggatgagttgctcgtcctatcagagaatgcgagttctctctgcccttgagggatgtagggaagcctttcctgtcctttcggtaagtagagaccctaaaggcttgaagggacttatctgaggccctg

SEQ ID NO: 945371 - DNA, 589 bp, Homo sapiens
aaacaacaaaattttctcttaacacttatttaagaaatacttcaggcgcaagctttgtactaacgcccaccctgagttggtattttcaatcctattttacaaatgaggaaacaggcttacaggactaggtaccacacccagcgtaagttaaatggtggaacagggattccacctctgttggtaggacccccaggcctggttacccacagaacaccacctcaggccgggcgcggtggctcacgcctgtaatcccagcactttgggaggccgaggcgggcggatcacgaggtcaggagatcgagaccatcctggctaacacggtgaaaccccgtctctactaaaaatacaaaaaattagccgggcgaggtggtggtcgcctgtagccccagctacgcgggaagctgaggcaggagaatggcgtgaaccccgggggcggaggctgcagtgagtcgagatcrtgccactgcactccagcctgggcgacagcgagactccgcctcaaaaaaaaaaaaaaaaaaaaaaaaaaaagaacaccaccgcgactctaatttccatcgttatttaaaatcagagtttgggactttggaat

SEQ ID NO: 945372 - DNA, 632 bp, Homo sapiens
ggcccggtggcgccggcgttccacgtgctcactcctccccgcccctccccgcccctttccctggccttcctcgccgcgcctgtctcccaccccgagctctgcagcgggagcgcggcagccctcgaatcgaygccagtaggcaccccaggcagcacagtcttacctgttcagcgtgtcccttccggattcccctccggctcagctctgcaggagttggagcgaagcgtgcaaggacccggaaagaccaaggtgtagcgtcagccagttaggtggatgcgttttggtgttgtagcagccgatagggctatagcggccgttctttccttctcactggacgcggcttctgtctgtcgacgtcaatagggacgatctcatgaagaaggcggggagtggggcttcggctcctcccaggcctggcctgtctggggcggatgcacgtggaggctggtcatggagcgcttgggggtggggccaggcgcacgcgggggcggggccgggggctgctcccggagcagcggaactgtctggagaccctttcgtgagagaccgtgtcttcctccctccgcagggtgatgcggccctggagaagtcctctcgctgtagtggaaagagcgaaggagtctgtgaggcga

SEQ ID NO: 945373 - DNA, 609 bp, Homo sapiens
tacaatgatttatattcctttrgatatatgctcagtaatgggattgccaggtcaaatgatatttttgattctagatccttgaggaatcaccacactgtcttccacaatggttgaattcacaatcccaccaacagtgaaaaagcattcctatttctccacagcctcgccagcatctattgtttcctgactttttaataattgccattctcactggcgtgagatggtatatcattgtgtttttgatttgcatttctctaacgatcagtgatgatatttttttcatatgtttgttggcctcataaatgtcttcttttgagaagtgtctcttcatatcctttgcgcactttttgatggggttgttggttttttcctgtaaatttgtttaagttccttgtagattctggacatgagccctttgtcagatgggtagattgcaaaatttttcttccattctgtaggttgcctgttcattctgatgtagtttcttttgctgagcagaagctctttagtttaattagatcccatttgtcaattttggcttttattgtaattgcttttagtgttttagtcatgaggtctttgtccatgcctatgttctgaatggtattg

SEQ ID NO: 945374 - DNA, 644 bp, Homo sapiens
cctgaagtcatctatgtatacactcctgctctaaagcaaggaacatcagtccacctaggactttggaggtcagaaagacagaaacatattmtactaccctattggggagatagagttcctgggagccttggtgactaagaagcatgttaaggaatgaaaaaaaactcaaggaagaccagaaaggcaaactgtcatacagagatctgtaaaagcaagaaataaccgcgaagacacaatgctgggttttggattttagagtcgtctgcagaatcacatcgattatggtgcacgagaaattgcacagacacaggaagccctctaaggtggtggtgctcccgagtcactactctggccaatgggatgggccttattcaggtggatggggctttcaagcactgagagggtagggagttaggttctctgtttctaaaggcacttggggcgggtggaaggcattgattgtttatctgcctggttagttgcccctctccttctgggaactgcccctcctccactccaatacggatccccctggggagctgccctgttcttatgcggcctttgccaccacggtcatggttgatgaggctgggaatgggcatctgggagtttgtatttaagacacaaagggcagcttctctcgg

SEQ ID NO: 945375 - DNA, 556 bp, Homo sapiens
tctttaactcctgacctcagatgatccacccaccgtggcgtcccaaagtgttgggactacaggcatgagccatggacccagcctgaggtttcttgctaaaaagtttggacctcatcctcagagcaagcaakggggaggcactatagagttgtaaacaagatagttatatattaacagccatatgttttcacaagatgattcactgatttcaaaagttcatcctctgctgccatcaaccccacacccacatcctcacacacattcatctgccccaaagtttctcctagttcactgtcccatgttccaggactcctttctctctcaggtggtgggctttcccctctttgtacagagtatttcctgccctttgtttttatttctcaatgaggttactttacaagttaagatgagagtatcaggtgctattataacaatattttggtcaggaaccagagaatgacctcatcttgcccagttaattacccctatccctcccaacaaagttctaggaaggtattcacagaaaacaaatgcagaatggaaatcagggtaccat

SEQ ID NO: 945376 - DNA, 721 bp, Homo sapiens
ccatcaggagagaagagaagtgaacactgatggctcctagggtccctctggctctgatattctctgcttctacttccttcagtgtatgctccatatgagcacaaggaacataacatggcccaattrgctcagagtataatttctgagtctctgaatgcctgcgtgccactaggagcaagctgttaggtctgggagctctgggtaatgatgaagaaacatgaaggatgagcatggagaaagagtcacgtgtcggctgagctggggtggccaggcatagtgtaggaccagcctggtgcccgtcacattgggtcctcccatggcctgagggaaaaatccagggctgctttgggaggaggcatcccacttggatgctggcaaaaaaaaaaaacattgcctccagccctcccgtgtaagctagtttcctcattggtaaaatggtcaaagccaaccattttgaaagtgcagtattttattttattttgttttattttattttatttatttgtaatttattatttaatttttgtatttttagtagagatggggtttcatcatgttggccaggctggtctcgatctcctcacctcaagtgatccaccagcctcagcctcccaaagtgctgggattacaggcatgtgccaccgcacccggccgaaagtgcagtatttaacagtctgaacgggatactttgtctgcaaagatctgagaaagagaaagtgag

SEQ ID NO: 945377 - DNA, 571 bp, Homo sapiens
gtcttcagtgatcaaaattattattwttttttaatggagtctcgctttgttgcctaggctggagtacagtggcttgatctcggctcactgcaatggctgcctcctgggttcaaccaattctccttcctcagcctcccgagcatctgggattacaggtgcccactgtgacacctggctaatttttgtgtttttagtagacacaaggtttcaccatattggccaggctggtctcgaactcctgacctcaggtgatccgcctgccttggcctcccaaagtgctgggattacaggcatgagccacctcacttggcctaaaataaaatatttcttaatcaaatttaagcttatatccctcccttaggctcctgaactttgagctaccctcagtctgagtcaacatacaaccccattttatgtccctcctaagagcatgctgatttcagggtaacacattctctgatctaaaatctgactttttcaccctccatttgccattcccctcccacctactttctaatcttgtttgctcctccctaggaaagaaagcccttttcagcctacatctttgcaa

SEQ ID NO: 945378 - DNA, 571 bp, Homo sapiens
gtcttcagtgatcaaaattattatttttttttaatggagtctcgctttgttgccyaggctggagtacagtggcttgatctcggctcactgcaatggctgcctcctgggttcaaccaattctccttcctcagcctcccgagcatctgggattacaggtgcccactgtgacacctggctaatttttgtgtttttagtagacacaaggtttcaccatattggccaggctggtctcgaactcctgacctcaggtgatccgcctgccttggcctcccaaagtgctgggattacaggcatgagccacctcacttggcctaaaataaaatatttcttaatcaaatttaagcttatatccctcccttaggctcctgaactttgagctaccctcagtctgagtcaacatacaaccccattttatgtccctcctaagagcatgctgatttcagggtaacacattctctgatctaaaatctgactttttcaccctccatttgccattcccctcccacctactttctaatcttgtttgctcctccctaggaaagaaagcccttttcagcctacatctttgcaa

SEQ ID NO: 945379 - DNA, 571 bp, Homo sapiens
gtcttcagtgatcaaaattattatttttttttaatggagtctcgctttgttgcctaggctggagtacagtggcttgatctcggytcactgcaatggctgcctcctgggttcaaccaattctccttcctcagcctcccgagcatctgggattacaggtgcccactgtgacacctggctaatttttgtgtttttagtagacacaaggtttcaccatattggccaggctggtctcgaactcctgacctcaggtgatccgcctgccttggcctcccaaagtgctgggattacaggcatgagccacctcacttggcctaaaataaaatatttcttaatcaaatttaagcttatatccctcccttaggctcctgaactttgagctaccctcagtctgagtcaacatacaaccccattttatgtccctcctaagagcatgctgatttcagggtaacacattctctgatctaaaatctgactttttcaccctccatttgccattcccctcccacctactttctaatcttgtttgctcctccctaggaaagaaagcccttttcagcctacatctttgcaa

SEQ ID NO: 945380 - DNA, 580 bp, Homo sapiens
aaagggtctgtgctgaggaggattagtgaagaggaaggcctctatgcggttaagaggaaggcatctgtctcctgcatgcctctgggaatggaatgacttggtgtaaaaccgaccatacattctattctgagacagaagaaaactgccatatggctggaggcgagacatggtggcggcaatactgctctgctactttttaccacaatgagatgtttatgtaaagttaaacataaatctagcctacgtgcacatccaggcacagcaccttcccttaaacttatatatgacacagagtctttcgcttacgtttttctgctgaccctctccccacattcaccctatagttatgccacattcccctcgccgagatagtaaagatagtgatcaataaatactgagggaactcagagaccagcgcgggcgcaggtcctcacttgctgagcgccatccactgggcccacttttcttcctctgtactttgtctccatgtcttatttcttttctcagtctctcatctccaccttgcgaraaatacccatgggtgtagaggggcaggcccccttcacccgggattctggct

SEQ ID NO: 945381 - DNA, 597 bp, Homo sapiens
caggtttctcagccatggataataccacctgctctggtagaggtagcaggggactaaagtggactctgtgagggtccttggttgtaattcagtttagtgcactggtttttttgaatgcaggttgttctagcagtgaagttgtcacatggacagactgaagacttctgtgtagccaggatgttacaatgttacaggtggaattagctgttgttttctcctttattggagtgggttttttttttttttttttttgagatggagtttcactcttgttgcccaggctggagtgcagtggcacgaccttggctcactgcaaccttggcctcctgggttcaagtgattctcctgcctcagcctcctgagtagctgggattacaggcatgttccaccatgcctggttaattttacatttttagtagcgagggggtttctccatttttgtcaggctggtctcaaactcctgacctcaggtgatccacccacctcagcctcccatagtgctgtgattatgggtgtgagccaccccacctggcagsggtcattattttgtgagttactgtaagggcttgagttggttggcctccaacctggaggtgg

SEQ ID NO: 945382 - DNA, 632 bp, Homo sapiens
gagaggaacttcctcaacctgatgaatatctacaaaaatctgtagctaacgttatacttaaaggtaaaagaccaaatattttccctctaagtttgggaacctgacaaggatgtctgttctcaatactcttagtcaacatagtgctgaaagttctagctagggcaaaaaggcaaaaaaggaaataaaaagcatacagattagaaaaaaaaaaaaagaaaactatattgcaggtgccatgattctttatgaagaaaattccaaggaatcttcaaaaaaacttctaggtctaataagtaagtttagcaagtttgaaggatatgaggtaaacatacaaaagtcaatcaattgtattcctatattctggcaccaagtatgtggacactaaaattaattacaataccatgtacaattgttcaaaaaaatacttaaatctaacaaagcatgtataggatttttttttttacaccaaaaaccacacaatgctgatgaaagaaatcaatcagatctgtataaatgaagagatatgctgtgtttatgtattgaaagatttaactgatgagtgtggtagctcactcctgtaatcctagcaccttgggagactgaggttgsgggattgcttgaagtcaggagtt

SEQ ID NO: 945383 - DNA, 575 bp, Homo sapiens
tgtatttagatcaattagacttagaaagaaataatttagtataaataagaaataatttatttcttatccatttagtattggacaatattaatagctataatgatgatgttttttttatttttaagatgagtctctctctgtcacccaggctagagtgcagtgcgcgatcttggctcactgcaagctccgcctcccgggttcacaccattctcctgcctcagcctcctgcccggcaataatgattactatccaacaccaagtatttaccatgtactaggcactttacttgcagaagtctctctaagcacaaccaccattatttctcttttgaggatgacctaggggggcgtttacgaatctgaaagaacttgctgcaggttttaccactagtcaacagcaaagccagaatgcaaatccagttctgtgtgactctgaagtccttacgctgatgtaatgtttagtctgcctctccttttttaaaaatagagatgttgtctagtttgactttttgggtggtgccttcrggttcatgtctagcaaaaggagagaaggtataagcaccaagttcacaaagt

SEQ ID NO: 945384 - DNA, 577 bp, Homo sapiens
gccttttttgtataaaatgtaaaattttggtcaagaattcccagtttctctagtaccatatgttgaaaggttatctttcctctattgaattgccttttcacctttgtcaaaaatcagttggacatacttatgtaggtctatttctgggttctatacactttttaaaatggatctatgtgtctatccatctgccattgccacaccggattactgtagctatataagaagttttgtttttgaacagactcatttctcccactttatacttcatttacaaaattgttaagctttttaaatttcatggcactttcatttatattttagaatagtgttgtctctatccacaaaaaagcttaccgggatttttacagaaattctattaaatctgtttatccatttggggagaatcaatgtctttactatgatgagccttccaatccatgaaaatgatgtctccccttaaatttttaaaaagttttgcagtttttcacatataagttgtatttggttaaaatttcacctaagtatattttttsagtcattgtacatgacattgcatttttaattgtggtatcag

SEQ ID NO: 945385 - DNA, 606 bp, Homo sapiens
cagaaatggcattgcaagctggactaatgctgtaatgcaaagtaatgagtaatctctggaagagcaaagctatcacagaactaagcatgctgattaatgctagaaaggacatgctgatcaatgctagtatgggtatgctggtcaatgttggtatgggcatgctgatcaatgacagtatgggcatgctgatcaaagctaatataagtatgctgatcaatgctagcatgggcatgctgatcaatgctagtatgggggttcttatcaatgctagtataagcctgccgatcaatgctagtacggacgtgcttaccaatactagtatgggtgtgctgatcaatgctagtataaacctgctgatgaacgctagtatgagcatgctaaacaatgctaatatgggcatgccagtcaatgctagcataggtgtgctgatcaataagcaaagagaacacatgctgaagtcaagggctttaacaataacttttgtaaatactaccctttaatsccctgttaagtttactaccttcatcctaacccaagacgtaaattttcaaggagaaggagaaggagaggaaggaaggagaagaggaggcagaggagaaggaggca

SEQ ID NO: 945386 - DNA, 747 bp, Homo sapiens
ggcagcctaagtgaattgatgtgggaacagaaaaccaaataccgcatgttcttacttataagtgggagctcaacattggatactcatggacataaagatggcagcgatagacactgtgkactgccaaaggcaggggggtgacaggggttgaaaaactgttgggtactatgctcaaaaaaagaaaaaaattactaaaactcaaaccgtatacttaaaataggtaaactgtatacttaaaataggtgaactttatggcgtgtaaattatactttaataaaactatgaagaaacaacaaaacatctcacctaccctcttctaatcagaggcttctgttaatgttttggcacattttctctgtactagtatttctttgtagggatagttttttttaaaacatacaaaactcttggtaataacatttttatcatctttcatttaaaattataatgttttccacagtcattgcaattatttgtaaaacatgatttttaacttgggcttattatatgtgttcgaaagtatgtcttgaatacttttctcattttaaaataatgtcccagtagagtgggacatagaataaaaatgaaagttctccccttaatacttctcccacacacacacactcctacccccaattctcacttcactcctcatgggtaaccactgtccacagttcggttaaacaatttttaaatgggtatataattttgcatctggtgggaaaaaattgcactcaaatagttctc

SEQ ID NO: 945387 - DNA, 635 bp, Homo sapiens
cttcctgcatttggaacttgttggtgtaaagacgacaaactgaagttgttccctgaagctcccttatctgcctaaagtctggacccactaaaaaagaaaacaagaacctctggttccttccctgagttctcattaattgaactcatattgcaggaagaaagactgatgttttccaacccacatgaacagacttttgtcacaggccattgttcttcaagcccattgagttcccgtaaaaatcacttactacctatgctaaaatcatccacactttcccatttccctttcccctaagaagaaggatatataaccatctgtatcacattgtgcggtggggtaatcactctgttattctgccccatgcatggtaatcaattcgtttgccatttatcaaaaaaaaaaaaaaaaaaaagtcaagccctcatgaagtcaatattctagttggggggaaaaacaatgaaaagtgtgcgtgatgcctgagcaaattgtgttagaacatgagcagtgctatggaaaaaagaaaaccaaaacagaaaaggatgaggagggcaggagagtgggggtggaagaatccattgcaattttacatgaggaggagagggccagkgtgggccttactgtgaaggtgacatttt

SEQ ID NO: 945388 - DNA, 634 bp, Homo sapiens
taattttttgtatttttagtagagayggggtttcaccctgttagccaggatggtctcgatctcctgaccttgtgatccgcccgcctcggcctcccaaaatgcgggggttataggtgtaagctactgtgcctggccctaaactggttcttgaaaaaggtggcagatcaatacgcccctgcaaagcagggggaaaaaacaaacatttgctatttaataacctaggcaggaaagataagctaaaaaaaatcaaagagaattattcctatttcataccaacattctctttttttttttttttgagacggagtctcactctgtcgcccaggctggagtgcagtggcgcgatctcagctcactgcaagctccgcctcccgggttcacgccattctcctgcctcagcctcccgactagctgggattacaggcgcccgccaccaccccaggctaatttttttgtatttttactagagacggagtttcaccgtgttagccaggatggtctcgatctcctgacctcgtgatccgcccgcctcagcctcccaaagtgctgggattacaggcgtgagccaccgcgcccggcccatacaacattcttaagtctagataatgggaactaataagttcccaaaactgaa

SEQ ID NO: 945389 - DNA, 686 bp, Homo sapiens
atgggtaaattcaagtctgggcaataaggcagactgaactaacacaatctgttatgttcttctctcctgcccaacttccacctttttttcagatgataaaatatgcataacaaagaatttgccatattgtttttaagtatactattcagtgacattaagtacactcccattgttgtgcaaccatcaccaccacccatctccagaaccttcttcatcttcccagactcaaactatacgaatcaaaccagaactctccattcttctctccctgcagtcctcacaaccacccttctatattctgtctatgaatctgaccactctacgtagttgacataagtagaatcatacagtatttgtccttttgtgactcgcctttttcactaagtataatgtcttcaatgttcatccatgttgtagcatttttcagaatttccttacttttttaaggctgaacaatattccattgtatgtatataccacattttgtttatctgttcattcactgatgaacatttgggttgcttccaccttttggctattgtaaataatgctgctatgaacaygggggttttacaaatgtctcttcaaaatcctgctttcaatttttttgggtatatacccagaagtgaaattgctggattgtttgacagttctatttttgatattttgaggaaccactatactgt

SEQ ID NO: 945390 - DNA, 574 bp, Homo sapiens
gcaaaaagctaacacccaatgtagttcacagtctgatggatggggtgaggcaaacttttattcctggagggtctggactgttaacagttctgcctcaattgggttgtggtagttttccatttattttaatcacaggacgtagaaaatcctgcagagaatctcctgcattccagacttattcctccttatttccattgtgtagtagctactcgatttccatcgatagtcaggatcaattactacagccgttcacttccttgcctgttgattcacaagcatgcaagctcaagctgactagatggcagtctcaacttcccattcaatggagtcattattgtgtcccctggtggaagctgtcctctctttgaaaatacttggtctctacaccagcaaagcccaaaactgtagaaacaggaagccatccttttgctataagatcactaggagcaatatcactctcatttccacctcttgattcctgaacttgcagattttggctatcacaaacacaggacaatrtattagccatttcaacccatcataaaggatgttacctcagcttcacaaggtgttg

SEQ ID NO: 945391 - DNA, 578 bp, Homo sapiens
tcgcgggtgctctgtcccagggagttgggagttttatctataarcccttgacaggggctgctgcctttctttcagagatgccttgcctagtgaggaggaatctagaaaggcagcctgtcctcaggcactttgccacactgccatgagttctgcacagtcagagttaacactgtaaggggaaaaccacctgctcaaccctcagtaatggcaggtacccctccctgcaccaagctcgagtatcccaggtcaactttagactcctgtgctggcagcaagaatttcaagccagtggatcttagcttgctggtctccataggagtgggatctgctgagctagaccacttggcttcctagcttcagccccctttccaggggagtgaacagttctctcttgctggcattccaggagccactgggcgggggggagcctcctgcagctagctcagtgtctgcccaaacagccacctagttttgtgcttgaaaccgagggccctggttgtgtaggcacccaagggaatctcctggtctgtgggttgcaaaaaccaagggaaaagtgtagtatctgggccagaatgcac

SEQ ID NO: 945392 - DNA, 578 bp, Homo sapiens
tcgcgggtgctctgtcccagggagttgggagttttatctataagcccttgacaggggctgctgcctttctttcagagatgccttgcctagtgaggaggaatctagaaaggcagcctgtcctcaggcactttgccacactgccatgagttctgcacagtcagagttaacactgtaaggggaaaaccacctgctcaaccctcagtaatggcaggtacccctccctgcaccaagctcgagtatcccaggtcaactttagactcctgtgctggcagcaagaatttcaagccagtggatcttagcttgctggtctccataggagtgggatctgctgagctagaccacttggcttcctagcttcagccccctttccaggggagtgaacagttctctcttgctggcattccaggagccactgggcgggggggagcctcctgcagctagctcagtgtctgcccaaacagccacctagttttgtgcttgaaaccgagggccctggttgtgtaggcacccaagggaatctcctggtctstgggttgcaaaaaccaagggaaaagtgtagtatctgggccagaatgcac

SEQ ID NO: 945393 - DNA, 599 bp, Homo sapiens
catatttttgcagctttgtcctttggaagctctttcrgttggctcctgtgtccctctgtcatagccctatcatgtgggttggcttttcgctttcatcttctttttttttttggcctatttgaaaagtaaaaaggtttatcgcattttaatttatatttctttaaccatatgtgaaactgacttttcataagtttatggatcttttctgtttttcttgtgatttgccgatttgcccacctttttattgaactattttgcatatacttttccccagtttcttttgtttgccttatcatgtctttgaaattttgttttagagttttatgaggtaagtattttcctcagaacatggttctgtgaaattctcccccaaaccctgcaaaaagttttttggcaaatatgtttataagagaaaatgcttttttttttttttgagacagtgtcactctcacccaggctggagtgcggtggtgccgatctcagctcactgcaacctctgcctccaaagttcaagtgattctcctgcctcagcctcctgactagctgggactacagttttataaataaggtaacacttgaaccaggaatctgatggcgag

SEQ ID NO: 945394 - DNA, 645 bp, Homo sapiens
aatcattcagtccactcattattttttggtatgagatgaatagaagcattgctatttaaatcattcctccaaattaccgcatgtcatcagcaggtctttgctcttcactttgggctttatcttcttgcatgaagttcagccacatagtaaaatactcccagatgtcaatgaggggtgagtgccccttttctaagatctcatccacttagaatctcagcatatattttttaaaaacaataatctaagttattcttaactaccttgtttaacttgagagaggaaatgtaatctaatttagtaagaataaaaaatgtaacatgcacacacacacacaaacacacaatctctattttaatagttaagtagaataaggtacccagactacgactgtactttgaaagcgcagaagatctttctgcggtttatttatttatttatttatttttgagacggagtcttgctctgtcgaccaggctggagtgcagtggcgctatctccgctcactgcaagctccgcctcccgggttcacgccrttctcctgcctcagcctctctgggtagctgggactacaggcgtccgccaccgcgcccggctaattttttgtatttttagtagagacagggtttcaccgtgttagccaggatg

SEQ ID NO: 945395 - DNA, 567 bp, Homo sapiens
gatgagctacctgatgccggtgggcactttgggcaggaggcattatggggaagctctccaggaaagggcttgtgccagggcaggyagtggaacacggtattccatcactcatatgagggaggatgtaaggataggaaacctgaagtgcctttcttatacactcaacaccactcttctgacaccagatgtgtgagttttttttttcccacacaccaagcaattcttcaacagaccccaactgggtttctataatgccactcagttctgacactgtcgcctggaggtagcgtcggatcccacaggcgaagggctccgtcccacaaggctgtcccctcttcagacgccaatcacaagccctggtgtatgactcgtgttcctgactgactggctgtacattgggggttccacagtccccctcctcaggtttgactaatttgctaggatggctcacagatctcagggaaatgcttacatttactgatttattataaagggtgtcacaggtgatacaggtgagcagccagagggaaaggatgcgtgacacacgcctgtgggaagaggtgtgga

SEQ ID NO: 945396 - DNA, 625 bp, Homo sapiens
tcttaatccagtctatcattgatggacatttgggttggttccaagtctttgctattgtgaatcatgccgcaataaacatatgtgtgcatgtgtttttatagtaacatggtttataatcctttgggtatatacccagtcatgggattgctgggtcaaatggtatttctagttttagattcttgaggaatcgccacactgtcttccacaatggttgaactagttcacactcccaccaacagtgtaaaagcattcctatttctccacatcctccagcacctgttgtttcctgactttttaatgattgccattctaactggtgtgagatgatatctcattctggttttgatttttgcagcactttttactcaaccacattgcttcagtcagcttcgtggtggtgtatgttgacaaaacaattcactgcggttccgccactttacttctttttgccccagggattttctaatgctgtaagaccaaggatgcttgtggaagccacaaggcatacatacatatctacacctgtaagtgtgagagactgaatcccctttagggcaattcagccagtggcatggaagccrgaaaaaaatgctcttgcattctggttcttggacaggaattctga

SEQ ID NO: 945397 - DNA, 603 bp, Homo sapiens
tcatggctgcatggaactgtgccacagcgcaggaggccagaactcagaattcaacctttctggccagagaaactgggaaaaagagtccgaggagccagagggtgtaaagaaaatcccacagagaaaagagctaaagaaaagactctaaaattccacgtttgaacctacacaaataccaagcacacccccaagttgcacatgcacaggaaacagaccaagaagcatagcaaagtctttaagaaccaaattacagtttgaagaccgtccaggttccagagcaagccctgagtggtgtgcgccccagggtgcacagcacaaacagcatcacatagactttgaaaaatgaattaaaattgaaactgccaccacagaagaaagggacagattgggttggttgattgcctgccgaaaaaataataataatcaaattttttaaaaatcaacattatccagagaattttaacagtgaattctccactgaatttaacactttgaattttgacamcataaaattcaaggtgtccaggatacaacctgaaattacttgatataccaacaataatgaaaatctgatcaattatcaaagagacagccaaaccaaag

SEQ ID NO: 945398 - DNA, 630 bp, Homo sapiens
ataacagggcaaagtaaataagactttgtcttgcacctgaggtattagcttggccacacaggggtagaacaccaagtgggttactgggttccccaattccaggcctttgctcttggatggcctttctgtatctaccctgggtcagaggagagcctactgcccaaaaggatgagtctcaggtcaggcagcattcaccacaagctgactaaagagcctttggaacttaaggaaacaacagcaatagcctgacagtactccccatggacttgttgggatcacagccatgcaatgaggggtgggagggaagaatggaaagaacagagtcttatggtttgaatgcaagctcagccacagtacaatagaataccaggtagacttctaaggatttttactacagtctctggatcccagatggcacctctggacctgcctggagcctggaggaactcattgccctgaagggaaggacacaacactgtctcactttgccacctgctgaccagctcagagccttgagtgaacataggtggtagccaaatmgtggttacagtgggccttgagtaagaccctgtgtcatgttggctttgggtctaacccagcacagtcccagtggtggtggccacaggggtg

SEQ ID NO: 945399 - DNA, 608 bp, Homo sapiens
tcaagaggtggagtctatttcttaagcttttgtctgtggggctagtctcatgayttgctgtggctaatagatgttgtagaagtgatattatgccaactccaagtctattagtctgctcgagctgccaaaacaaaatatcacagactgggtggcttaaacaacagacatttattttctcacagttctagaggctagaagtccaaattcaaggtgccattattgctgatttctagtaagacctctcttcctggtttgaagatggctgccttctcactgtgtcctcgtgtggtctttcctctctgtgtgtgctgagagagagatccctgatgacttttcctcttataaggccactagttctatcggatcaaggccccatttttatggcttcattttacctttactatcttcttataggccctatatccaaatacagccactttgggggttaaggcttcaatataggaattttgggatgacacaatgctgtttataacaccaaatccaggcttcaaagggtcttgtcagcctccactctctcttcggaccctacctccaactttagatgggtctgggctagcccactggaagagagagaccacatgaagcca

SEQ ID NO: 945400 - DNA, 608 bp, Homo sapiens
tcaagaggtggagtctatttcttaagcttttgtctgtggggctagtctcatgacttgctgtggctaatagatgttgtagaagtgatattatgccaactccaagtctattagtctgctcgagctgccaaaacaaaatatcacagactgggtggcttaaacaacagacatttattttctcacagttctagaggctagaagtccaaattcaaggtgccattattgctgatttctagtaagacctctcttcctggtttgaagatggctgccttctcactgtgtcctcgtgtggtctttcctctctgtgtgtgctgagagagagatccctgatgacttttcctcttataaggccactagttctatcggatcaaggccccatttttatggcttcattttacctttactatcttcttataggccctatatccaaatacagccactttgggggttaaggcttcaatataggaattttgggatgacacaatgctgtttataacaccaaatccaggcttcaaagggtcttgtcagcctccactctctcttcrgaccctacctccaactttagatgggtctgggctagcccactggaagagagagaccacatgaagcca

SEQ ID NO: 945401 - DNA, 632 bp, Homo sapiens
ctaagcaaacttgcttgcagcagcccctggcaaggccccggkgccctagttgcatgataatgaagtcagagtggccgggagtctctgtgctctggagggctgggctgtctctgatttcacagcctggctggccaagcccagccactgggggccactgggagcagacatgttgcctggcatctgctgcatggccttctcttattctctctgggtctgacacgccctcatgggctgcaggatggacagttcatgggaaggcagtgagaaatcccacaggaaagtaggagtgggtcttgggtttccagctaaactgtcaatgtcatgagaacctcggtaggagtgttggatgtctagcccttgggaggacagcaaagaggggggaatacaattgagaggctgaccaaagagaagcttctgggctttgctgtctctgttttctcccagtgaataagaactcttttcccctttaatttgctttgccaaaattgaggacagatgctgctccatggtgattcatgtggaaacaagaacttttctcttctttcttcccacgctgccccctggccaccacaatttacaagaaagattggctcaagccttttaaaagtttaatagaaatccaaagttgactg

SEQ ID NO: 945402 - DNA, 592 bp, Homo sapiens
caaggtggattttgcccactctgggtgtcactgaccaaaggaattccatggacatagtgggttaaaggagagtcaaacaatgatcaagtggggattgtgattgaagccactgggaaggcacagattggctgctttagcatcttagccaggtctctgaatgcatttgagatttattgactctccctttgtcatacttaacaatgccctgaatactgggtgttctgccactaccagaagatgccaagtttgggctatacccttgaggtgtttgtaaaccagatgcctcaaaaatcactacctcaacaagaacagttggtcaaatgccaccacaccataagccaagtcttctattttttcactctttatgattttttctttaaagcaatcgtctgtgtcaccctaagagtttaacactgcccactttactgtcttgatgaaaaagtatgttgatttattttctactcattcacatattcatccaacaaatagttacagagatggtgaacttggcactgggtagacatagaactttcattctggctggggagacaaamaataaagtaaacaaataaataaacaaggtaataattat

SEQ ID NO: 945403 - DNA, 622 bp, Homo sapiens
gcgcggtggctcatgcctataatcccagcactttgggaggccaaggtgggtagaacacctgaggtcaggagttcgagaccagcgtggccaacatgctcaaccccgtgtctattaaaaaaaaaaattagccgggcatggtggcacaagcctgtaatcccagctactcaggtggctgaggcaggagaatcacttgaacccaggaggcagaggtcgcggtgagccgagattgagccattgcactccagcctgggcaacagagcaggactctgtctcaaaaacaaaacaaaacaggccaggcgcagtggctcatgcctgtaatcccagcactttgggaggccaaggtgggtggatcacgaggtcaggagttcaagaccagcctggccaacatggtgaaaccccgtctctactgaaaatacaaacaatagctgggtatgatggcatgtgcctgtaatcccagctacttgggaggctgaggtgggagaattgcttgaaccaggacccgggaggcaraggtagcagtgggccaagatcgtgccactgcattccagcctgggctgcagagtgacactctgtctcaaaaaaaaaaaaaaaaaaaagaaaagaaaacaaaacaaaacacaac

SEQ ID NO: 945404 - DNA, 625 bp, Homo sapiens
gaaggcctaaatggaaactttgcttgtcttgtattctttgcagaattactaatttctgctccttacctgaagaggcacagaattatgcttcctgttgcaagagacatcagagagacactgtagcccagkgtataaatggccttcaccagaatataaaacgtgatctacaaagaaagaaaacagatctgtaagctgagggtgaccagcaacaccagacaacaggaatggttccaggatccagccctgtgctctggccatgaaggactcttgcctgcctggaaggcacgagatagtctcgctttataattccacctccattttgaaccaaaaaatgacacccacaatttggaacctccacttttttcttataattcatcatgaatgactttggatggttcctgtaaagcacctctgtctggagggaacacgacccgccaccatcagggaaagcaaaggaaggaagcgctgagctaagttcagaaagagagctcagtctgtctccgaggcagcacatccagctttctgacactcctggatgagctcaggtggacacacaggtctgagtgtgttaaacactattacctacaggcacagggtgaggtgttccagacagaggtacttgcct

SEQ ID NO: 945405 - DNA, 619 bp, Homo sapiens
cagagtcatgaagcccctgttccaggcctcccagataacatttacagacataccatgggccagaaggggacccgctgccttgacggaaaggattcagtccttgcagcattcatcacctgctaacttaagagtccttgtgccatgaataatcagtagcaattatccaggtattacattgaatgccttgggtgagcatctgaaacttgctggctttaggtgagactgagcacattattagctgcagtgattatagggcaaaactccttttgcttgagaaaagcagaaggaaaagtttgtcttgcacttcaggtactagcatagccacaggggagggtaggtcatgaagcaggctcttgaggtccctgattctgggacttgaatcttggatggcacttctgcacatgccctgggccagaagggagcccagtgccctgaagagtgagtcccaggaaggcagcatttgccacaagctgacttaagagctcttggaccttaagggaaaatctgcggtagtctggcagtactccttgkggccggctgtggcactggctatggatgctgaggctcctctgcctttggaaaggggagggaagagtgggaaggactacgtcttgtggtt

SEQ ID NO: 945406 - DNA, 619 bp, Homo sapiens
cagagtcatgaagcccctgttccaggcctcccagataacatttacagacataccatgggccagaaggggacccgctgccttgacggaaaggattcagtccttgcagcattcatcacctgctaacttaagagtccttgtgccatgaataatcagtagcaattatccaggtattacattgaatgccttgggtgagcatctgaaacttgctggctttaggtgagactgagcacattattagctgcagtgattatagggcaaaactccttttgcttgagaaaagcagaaggaaaagtttgtcttgcacttcaggtactagcatagccacaggggagggtaggtcatgaagcaggctcttgaggtccctgattctgggacttgaatcttggatggcacttctgcacatgccctgggccagaagggagcccagtgccctgaagagtgagtcccaggaaggcagcatttgccacaagctgacttaagagctcttggaccttaagggaaaatctgcggtagtctggcagtactccttgtggccggctgtgkcactggctatggatgctgaggctcctctgcctttggaaaggggagggaagagtgggaaggactacgtcttgtggtt

SEQ ID NO: 945407 - DNA, 571 bp, Homo sapiens
tcagcactcacagattcagtgctcacttttgcattatgtagtgaataacaagtcttgaattgtttaaatcatcyacagctaacagtaaattcaacactgtagtcaggtctggcctttcttttacactgcaaacaaaccttctgcctgggctgtgatcattatggtactgagaagaatgtgcttctgtgattggccatcagtccaggtcattaaaagtttctctatatgtgatacagacccttcttgcatttttgtgagtctcattattttcaataaagccgatcccttaacaacttccatcactttgctcttgttcttcaagatcatagctatggtggaataggacgtacctgactggtgagcaataaccatcactgactttctacctttgtaattaagtggttcttaatcacttttatttcgaggtcagtcactcaatgtggcctcttactggcaacattagccataagttttgtacacttaggggccataatgaacaaaacaacatgagattaaatcaagcacaagagaaaatgatgcaatcaagagatgtggtaaacacaagatgtat

SEQ ID NO: 945408 - DNA, 762 bp, Homo sapiens
taaaagcatcccagatttctagagtaactacctactgtctactgaaaatttatttcaatttttctcctatgggttagaatcamaggcagacagcctaaaaataactcattagcagcttgtgtggctgatggcaatgttggaaattctaagttgccttttaacttaagcttattgccttctccctttgaaataatgtagctattaagaatcaagttacagatcaataaaaggtcttattaatcacgttaacaagtgcgaaaggtccaatccaacacctaatccctatgagtattctctggcacttatgcaattctttacctaaaatccaagaaacacttaatgggggaaaaaacatgaacagcaaagatagttgaagagaactgtattttcttaaaggaatgacaagcaatacattttccacattaatttatatctgcccttcatctccacaggctcaagtaataaaagttatgcataactcatgtgagagatcattaaatcaaccagttgatagtgtggactaattggtaaataaatactttataaaaatggtgatgggtgtacagaccctgttttactcttaaaaagaaaaaaaaaattaaaaaactttatccatagctttgatataaatacccacacctcaccctcttcaatttcataactttttccaagtttgttggagggagatacaccacagaattagagccccatagggggaccacaatcctggatgaaaagtttaaaatcaaataaaaaattcag

SEQ ID NO: 945409 - DNA, 602 bp, Homo sapiens
atggtaacgcagtcctgtaaagagtcccatgtggtgagagacgtggttgggagtgagcttggaagtggatccccaaccctcgtccccaaactgagacttcacatgagactgcagctctggccaacagcttcactgtaacctcacaacagaccttgagccacaagcacccagctaagctgcagggagaccccctgaaactattgctacggaataaaagatgaaatgctcctgattattgtaaatacaaagttgcatgcaggattgtgtaaagacaatgccaggttggactgccagaatgagccaactgcacgtgatgtgattccccctgcagagagcctatgaatggacgtgcagtcagggaggtttcacatcaccaagattcctatcctagaaaggcagatgttcatagctctaggaatggaatgcgacccttgtggagagcctataaacggatgcatgggggtggggcgcctgtccatatggataagatagggctagaaacgccctcatcttgccacagctcttctaggcctcttyagggttaaggcatactcccttctgagaatttctggtctaactggttgtctagcttcacatcctgt

SEQ ID NO: 945410 - DNA, 626 bp, Homo sapiens
acatatatttgcatcttgttatgtttatccattcatccagtgtgtatttttaaaatcggcatttaattcatttatattcaaggttatacttgataggtgaagaygttttttgtctgcctgtgttatttcaaaggacctgtcttcaaattcagaaattttttattctgcttggtctagtctgatgttaaagctcttgattgtattttttatttcattcatttaattcctcatagcattcctgtggttctttttttaatgacatctatctctttgttgaagtactcattcaaatcatgatttttcccctgatttcattgaatcctcaatctgtattctcttgtatctcagtgtttccttaagattattattttgaatatttttctggaattttatatatttccttatgctaggggtctgttactagataattatcgtgttcctttgtgtcatgtttccttgctttttcatgtttgatatgtctctatgtagatttcacatatctggtgtaatagtcacgtcttttggggaaggttttgtagggaaagacttatttgtttagatgggtcttgggtgttggttcagcagggtacactggatttgattctggatggacacagtagtatagt

SEQ ID NO: 945411 - DNA, 664 bp, Homo sapiens
aatgtactgtaaatgtctgttaagtccctttggtctatgatgtagtttaaatccaatgtttctttttgattttctttctagggatgtctccaatgctaatagtggattgttgaagtctccatctattatcgtattggagcctatccctctctttagatctaataatatttgctttatatatctgggtgctgtggtattgggtgcatatacatttacaattgttattttcttgctgacttgatccttttgttattattatataatgttcttcattgtttcttttgacagctttttacttgaagtctgttttgtctgatataggtatagctatccctgcttgcttttcgtttctgtttgtgtggaatatctttttctctctctttgctttcaagtgtttgacagtgaagtgattctattttaggcaacatatatttgcatcttgttatgtttatccattcatccagtgtgtatttttaaaatcggcatttaattcatttatattcaaggttatacttgataggtgaagacgttttttgtctgcctgtgttatttcaaaggacctgtctwcaaattcagaaattttttattctgcttggtctagtctgatgttaaagctcttgattgtattttttatttcattcatttaattcctcatagcattcct

SEQ ID NO: 945412 - DNA, 626 bp, Homo sapiens
acatatatttgcatcttgttatgtttatccattcatccagtgtgtatttttaaaatcggcatttaattcatttatattcaaggttatacttgataggtgaagacgttttttgtctgcctgtgttatttcaaaggacctgtcttcaaattcagaaattttttattctgcttggtctagtctgatgttaaagctcttgattgtattttttatttcattcatttaattcctcatagcattcctgtggttctttttttaatgacatctatctctttgttgaagtactcattcaaatcatgatttttcccctgatttcattgaatcctcaatctgtattctcttgtatctcagtgtttccttaagattattattttgaatatttttctggaattttatatatttccttatgctaggggtctgttactagataattatcgtgttcctttgtgtcatgtttccttgctttttcatgtttgatatgtctctatgtagatttcacatatctggtgtaatagtcacrtcttttggggaaggttttgtagggaaagacttatttgtttagatgggtcttgggtgttggttcagcagggtacactggatttgattctggatggacacagtagtatagt

SEQ ID NO: 945413 - DNA, 654 bp, Homo sapiens
gtccttcctggggcccccagggtgcaggctgcagagatgcccaggtcctgcacctaggagggtggctgcagccacaccctggtgttgggaacagtcccccaaatctggccataaactgacccgaaaactggccataaacaaaatctctgcagcactgtgacatgttcttgatggccatgatggccacgctgaaggctgttgttttaccggaatgagggcaaggaacacctggcccacccagggcggaaaactgcaaaaaggcattcctaaaccacaaacaatagcatgagtgatatgtgccttaaggatatgttcctgctgcagataactagccagaacccatccctttgtttcggcccatccctttgtttcccataagggatacttttaattaatctataatctatagaaacaatgcttatcactggcttgatgtcaataaatatgtgggtaactctctgttcggagctgtcagctctaaaggctgtcagccccctgatttcccactccacactctatatttctgtatgtgtgtctaattcctctagcaccrctgggttagggtgtccgtgaccaagctggtctctgcacccaggaaggcagatcctgcctgctcccagccctcctccaagagcacaggggggctcagatcca

SEQ ID NO: 945414 - DNA, 479 bp, Homo sapiens
cgtttaataacatagcctctgaatcttagccagatccatgactgttccactraaaactattttctagcctcccttgcacttggttgaggttagaaatacatttgaactgatgtaggcgacgtgatctgggcaaaagtgataagtaccacttctggtccatgaccttaaaggaaaaggataacaccctcacttcttccttctcccctttctgcaggctgggatacagctatgatggcaggacctggagcagcaatcttcaaccatgaggtggaagacttctgttgaggataatggaaaatcaaggtggaagaaatttgaatttccgtgattgtggagcccccgcattagccttggactgttgatgctctgactgaattacaggacagaagataaacttccacttgtttaagctactgttattctgacctttccaacagtagccaaactagtatcctaactaatatcctaacgctttgggc

SEQ ID NO: 945415 - DNA, 479 bp, Homo sapiens
cgtttaataacatagcctctgaatcttagccagatccatgactgttccactaaaractattttctagcctcccttgcacttggttgaggttagaaatacatttgaactgatgtaggcgacgtgatctgggcaaaagtgataagtaccacttctggtccatgaccttaaaggaaaaggataacaccctcacttcttccttctcccctttctgcaggctgggatacagctatgatggcaggacctggagcagcaatcttcaaccatgaggtggaagacttctgttgaggataatggaaaatcaaggtggaagaaatttgaatttccgtgattgtggagcccccgcattagccttggactgttgatgctctgactgaattacaggacagaagataaacttccacttgtttaagctactgttattctgacctttccaacagtagccaaactagtatcctaactaatatcctaacgctttgggc

SEQ ID NO: 945416 - DNA, 507 bp, Homo sapiens
aggctgagacaggagaatggcgtgaagccgggaggcagagcttgcagtgagccgagatcctgccattgcactccagcctgggcgacagagcgagactccatctaaatcaaacagcttcccaaacaaatagttttcctcctacatttttcctcaagtttacacatccacattaccaagcagcaagcaatcactcacaccccaaccaccaccaccaagcaatgagtggctgcaggagtgccctgatatgctaggggctcggaattcaggagcatttccaacagaaacaccattaagcagaaaggttttgggttgggtgccataggggacttggattccctctgaagtctacatagttgccaaggatgttaattataaagaactaacctaagattaaattatgtttcagaggaaaaagcaagcttgawaaattattcttggcattagtctctgaagctgcagacgaattagaccctggagaaaacaaacaaacaaaacaatagaacctgg

SEQ ID NO: 945417 - DNA, 554 bp, Homo sapiens
aatcatctaccatcttctctgactcccctrtaattgacctccttgtgtgcctaagaaattctatcatgtaaaatgtctgcaaatgacagaaccaaaagctcttgcaacacattttgaaatatcataagaagaaaaacattattttccactcttaacaaagtattacccttctagttgtaattttagctctgacattttattatgaaataaaggtccctttctaactccctagactagggggctggtaaactatgacctgttacctgttgttgcacaaccactgagctaagaaaggtttttacatttttaaatggttgaaaatgccaacaaataatatatttcatgatacgtgaaaatgatatgaaattcaaatttcagtgtctataagtgaaacattattggaatacagccatattcatttatttattgtctatggcagtttttgtgttacaaagtacaaaagcagaaatattcaaatgcaacagagatcatatgacccacaagtttcaaaaatattttctatgtggacctttacagaaaaaacatgccaacac

SEQ ID NO: 945418 - DNA, 597 bp, Homo sapiens
tagtggaaaaattaaagtgaaaatcacccataattctaccacatagagaaaatatcacttatctcatgtgtgcatkcactatacatacacacaaaccccaaaacaggaatttctatatgttcacctttgtctactgccataatgtattatataataggaaaataagtagtagtatatgtaacattatgtatgatataagcagtataatatgcaacattaaatattaatgtgtaatatgtatgatatactattatacactattctgttataatattaatatagaatatatcttatatattctataatatattaatatttacatgctataataatatagaaactatattctataatgtcatcacataattatataatgtatacagttaaatagtgcatatttcttattttactatgtattttttcaagtcattgtttttcatgactggagcctataggcagaatttttgttttactcttctaccaggtcatcctttctttatccaatgtccagtagttttctcttgacttgtatttcccaattattcctttcaatttacaggtacttctcagggcttttgaaatctttatgcaatagct

SEQ ID NO: 945419 - DNA, 566 bp, Homo sapiens
tactcaggaggctgaggcagaaggatggcgtgaacctgggaggcagaggttgcagtgaaccragatggcgccactgcactccagcctgggcgacagagtgagactctgtctcaaaaaaaaaaaaaaaagaaaaaagaaaaagaaataagaaaagacatattgaggagggtaggaaggacagttttgcatgatccacatcacccctgcctcaacctcagtcagcatagtgtggccaggtataccctccacttaggggaaggagagggaaataagcaacaaactttgtctcagacctcaacacttgggttgggttgttgggtgacagagtgagaattgtctctacaaagtaataaaaaattagtcaagtgtggtggcatgtgcctgtagtcctagctactctgcaggctgaggcaggagaatcgcttgagcccagaaggttacagtgagctatgatggcaccactgcactctaaagcctgggtgacaggaaaaaaaaaaaaaaaaggcagttgacttcagtcaggtgtcaggtcactcaaacttttcattgttctgtgcatgtcccca

SEQ ID NO: 945420 - DNA, 560 bp, Homo sapiens
aacatcttgctataatgtatcactaacctcaactgagcccttcctgctgcatggcaatcctattacatttctctattctcrcttccattctccaaaacaaccatttcaacctcctcctctattctaaaactctaccatccctcccctcctctcagtgcctcctaactggtctctctatgcccacctttgttccctcttcccccaagagtctattcaccacaccagacttaatgatcctttaaaaatatacatcagatcctatcatttctctgcttaaaccgcccccacacccaagactttccatttcaccaggagtcaagccaaaccctttaccatggctgaacaagacctgccctcctgctacccttctgacctcatatcccacctgcccccctcccttgctcactctgctccagccacactggcacactcccaccaacctggggcttttgcatttttcctgcctggaagattcttcccccagacagtcacaaggctcactcctctcacgctcaacttaggtctctgatcaaaagtcacttcatccaaaaggcctttcc

SEQ ID NO: 945421 - DNA, 575 bp, Homo sapiens
ccctctctccttgagacaaaataacattgaaattaggccaattaataatcctacaatagcctctaactgttcaagtaaaaggaagagtcacatatctctcactttcaatcaaaagctagaaataattayacctagtaatcaagcatttctcaccaaggacaatcttggaaagtcaagataggctgaaagctaggtctcttgcacaagttgtgaaggcaaaggaaaagttcttgaaggaaattaaaagtgctatttccttactgtaagtaattgaaaagtgttccagaaaacatgaatgataagaaaatcaaacagccttattgccgatatgggaatgttttagtggtttcaatagatcaaaccagccacaacattgccttaagtgaaagcctaatcctgaacaaagccctaacacgcttcaattctatgaaggctgagagagatgaggaagctattgaagaaaagttggaagctaccaagaggttggttaatgatgtttaaggagataagttgtttccataatataaaagtgcaaggtgaagcagtaagtgctgatggagaacctgcagtaagtt

SEQ ID NO: 945422 - DNA, 582 bp, Homo sapiens
aactcttctcgagtaattgaattccaaagtaaacctgaaacattggttcaggacatcatgggaatggatgatcggacatgcctcattataccctcatccctttgtaattcaggcacaacccatcagcattaacatcaaaacagagaccttaagaataacaaagcagactttttgtagcaataagatagcaacatgacagataacaggccctgaaagaaattattttaccctaaaatatattttttgacatattttgaaatgtccccgcaaagctgtctcttttggggaaaatctacattctgtagagaatcccacccttttccaggtctttttcctgatccaggagagaataaactaagagtttggcacctttttaagcctgataggaaacatttgcaatctcttctctctgaagcctcctacctggaagcctcatctgcatagtaagaaccccctggtctccacaaccccttattttaacccagacactcccttctgttgattctgggtctttagataaaccaattgccaatcagaaaattcttkaatccacctattatgtctccctaaaacatataaaac

SEQ ID NO: 945423 - DNA, 632 bp, Homo sapiens
aacttagttttggcttggtggctttgaacttcggcataaataacttcattttggcataagtaacttcattttggtttggcctgttgggcgtagtgcagaagcccagttcaaataatagctttctataaattttacttaacaatcattttgatgagaaatggcaaataactaggtcaatttttccaactgtagggaccaaggggaacccttataaccacccaacaggttcactttgcccagtgcctagacagagctgatttatcaagacaggggaattgtaatggagaaagagtagttcacgcagagctggctgtgtgggagaccagagttttattactattcaaattggtctccccaagcactagggaatcagagtttttaaggataatttggcgggtaggggctcaggaagtggggcatgccaactgctcaggctggagatagaattataggggtcgaagtgagttttccttgctgtcttctgtcccagggtgggatcatagaactggatgaactacattacccttctgggtggtgtcaggtgatccatcaagtgcagggtctgcaaaatatctcaagcactgatcttaggatttacaatagtgatgttrttcccaggggcaatttgggga

SEQ ID NO: 945424 - DNA, 620 bp, Homo sapiens
actcaacactaacagatacaaagacctattataaagagacagtaattaagactgtaatattggtgcaaggagagtcaaataaaccagtgaaaaggatacatagttcaagcccggtgcggtggctcatgcctgtaatcccagcacttagggaggctgagttaggagttcgagactagcctggccaacatggtgaaaccccgtctctactaaaaatacaaaaattagccaggaatggtggtgggcacctgtaatctcagctacttgggaggctgaggcaggagaattgcttgaactcgggaggtggaggttgcagtgagccaagatggtgccactgtactccagcctgggtgacagagtgagactccgtctcaaaaaaaaaaaaaaaacaaaaacgtgtaggtagtccaaaaatagaccaatataataacatctgcacctgatttatttagtccaaaaatagaccaatataataacatgggcactcaattgcaagtcaagggagacataaccatcttctcagtaatggtgttgggtcatttgtattaygcattttttttaaggacatgggcctttataccacataaaactactttgaagatggggcaaagacttatatttga

SEQ ID NO: 945425 - DNA, 648 bp, Homo sapiens
gtgatctcagctcactgcaacctccacttccccgggttcaagcgattctcctgcctcagcctgccgagtagctgggattacaggcatgcgccaccatgcccagctaattttttttttgtatttttagtagagatgggctttcaccatgttggccaggatggtctcgaactcttgacctcaggtgatccacccaccttggcctcccaaagtgctgggattacaggcatgagccactgcgcctggccaaaatgtatactttttaaaagaatcagcaagtactgcatttccctgtagaccgaggtgccagcgttctcgcagttaggggtgggcgtgtgtggaagggatttgcctctgtaattccttccttttatgccagtccctggaaagaatcaccaaaaggaattcagtgtttaatcctaaaaggggaacattaaaatgtatgtatttgaagggtaaattaaaagtcccagagagaaaagaagaaagggctatttaaaagccctcggttgctttttgtgygttaatcacctgttgggcacccaccaggataggccctgggagtggggttgggggagagggagcaggaagatccctgccttccagggccactcctccctggtctgggtatacggtctccagtgcagcgct

SEQ ID NO: 945426 - DNA, 559 bp, Homo sapiens
ggtttatctaaatgtggatatttacaccttaggtcattacatattaagaatttgaatctatatggtgacaggattttttcaggtttatctcaccccgatgttgggggaaaaaaatctccagaactcyatagtctcttgaaatgattgtccactgaagttccacgtattcataaagtgctcccacaacttgctgacaagcataggtattttacatcctgccatgagtttcaagacattaactcctttagctatcaaaaatggataaaaaccacaggtgactgacaagactttcacaagtgcagacaaaggtttggattcaaagcctggtcatatggtttggctgtgtccccacccaaatctcatcttgaattcccacatgttgcaggagggaatcagtgggaggtaattgaatcatgggggcaggtctttcccatgctgttctcgtgacagtgaataagtcttatgagatttgatggtttcataagggggagtttccctgcacaagctctcttctcttgtctgctgccatgtgagacatgcctttcaccttctgccatga

SEQ ID NO: 945427 - DNA, 725 bp, Homo sapiens
gcggaaaccccttccctgtcacttgctgtacagtctgggagacagtgtgggctgatacatcaggtacagggcctgtgtcgccagcattgctggaggtgctggggtttggtgtgggctcttcaatttagggtcttcacattcttctctttttcttgcagaggagggtgtggaagtattatattataaaacaaaactagtccaggcatcattaacaactttcatgatctttagttttcttccaaatcctgcaaatggtgattatactctgagagaaaaactgggtcccgtgactatatcatttggggagggagggaaggcatggaggaaagagagagaaagagaatgtgaatgcacagctttgagagggactgtttgtgctttaataattgccttcacttggataaggctaaatacctgctggctttgcgttttctccttggaaaatcatgctgtgagaagccacccaacatgttgtacctagattttaatgtcgtcatttctcctccttcacttctatccacttctcacccactgaaacctggcatcatctccaccaccccctgcagccgctctctccaatgccaccagcctttgcttacctggyattctgtaaattctgaacaactggctacctgccctcttgcagcactctccccctatggctgccggccgtgttctccgggtttcccttctaccttcctggcagtccctttgccgcttccata

SEQ ID NO: 945428 - DNA, 771 bp, Homo sapiens
cagctgagtcatgtgtacactaattatttttatttcccgtgcaaatttccccagagataattgtcttgctttctcattcgttttgttttctatgaacataccactagtgcaactccaaactcccwgcctttggtctaaaactctttttaagacatttatgttatctgatgttctaccaatttcctattcttagagaaatctttcctggaggtttctggtatgctccaacctgaattggttgccttctaggcctgttgcatggctactatcttcaacatcttcctgtggattctctttgcctcttccttgtgttggatctcttcttttctgaatctcatatcttccttcttattggtttattccctcttttgggtggagtacatactttagtatcttcttgggaaaggatatgtaggaaataaaattgttgaaacgttgcttacctaaaaacaggtttatttgaccctcatgctttgtaattattatgggaaataaagaaatgctttgtaatattgtttcgagcaaagaatttaagaacagtaaaacaacagcaataaaagcttttgacaactcttattatctagacaacaggaaactcctatctttaaagtaaaagaaacaaaactggggccagcccaaagaaaaagcatttctgattttcacatacacctaaaatagctcctattgccattttttcaccatctctgctagaaaactcacgtaaggcttgtccactctcacacatgattgacagtctggctgtgtatagaa

SEQ ID NO: 945429 - DNA, 603 bp, Homo sapiens
gggtttggtggggacttggagaacttttctgtcttacaagaggattgtaaaatacaccaatcagcactctgtagctaggattgtaaaacscaccaaccagcgctctgtggctagctagaggtttgtaaaatgctccaatcagcactctgtaaaaacacaccaatcagcactctgtggctagctagaggtttgtaaaatggaccaatcaccaccctgtaaattgtgccaatcagcacccagtaaaatggaccaatcagcaggacacaggcggggacaaataaggaaataaaagctggccactccagtcaacagcagcaacccgctcaggtccccttctacactatggaggctttgttcttttgctcttcccaataaatcttgctgctgctcactctttgggtccacaccacctctaaaagctgtaaaactcacgatgaaggtccacagcttcattcctgaagtcagcaagaccatgaacccaccagaaggaacaaactcctgacacactatagtgtagcctagctgaccaccacagtcttcaagctcattgttgattcacacttaagttgcattctcagataccagctttccttagcacatagt

SEQ ID NO: 945430 - DNA, 577 bp, Homo sapiens
atgaaggctgagagaagtgagaaactgcagaagaaaagttgaaaggtagcagaggatggttcatgagatttaagaaamgaaactgtctccataacataagtgcaagatgaagcagcaagtgctgatacagaggctgcagcaagctatccagaagatctagctaaggtcattgatgaaatggttgcaccaaacagcagattttcaatgtagacaaccttctattggaagaagatgccatgtagcatttttatagctagaggagaagtcaatgcctgacctcaaagcttcacaggacaggcttactctctttttaggggctaatatagctggtaactttaagtcgaagctattgctcatttaccgttctgaaaatcctagggcacttaagaattatgctaaatctattctgcctgtgctctataaatggaacaacaaagcctgaatgatagcacatctgtttatagtatggtttactgaatattttaagcccattgttgagacctccttctcagaaaaaaaaaaaaagattcctttcaaaatatcagtgctcattgacaatgcatgtggtcacccaaga

SEQ ID NO: 945431 - DNA, 577 bp, Homo sapiens
atgaaggctgagagaagtgagaaactgcagaagaaaagttgaaaggtagcagaggatggttcatgagatttaagaaaagaarctgtctccataacataagtgcaagatgaagcagcaagtgctgatacagaggctgcagcaagctatccagaagatctagctaaggtcattgatgaaatggttgcaccaaacagcagattttcaatgtagacaaccttctattggaagaagatgccatgtagcatttttatagctagaggagaagtcaatgcctgacctcaaagcttcacaggacaggcttactctctttttaggggctaatatagctggtaactttaagtcgaagctattgctcatttaccgttctgaaaatcctagggcacttaagaattatgctaaatctattctgcctgtgctctataaatggaacaacaaagcctgaatgatagcacatctgtttatagtatggtttactgaatattttaagcccattgttgagacctccttctcagaaaaaaaaaaaaagattcctttcaaaatatcagtgctcattgacaatgcatgtggtcacccaaga

SEQ ID NO: 945432 - DNA, 575 bp, Homo sapiens
aactcaccccctggtcccccaccrtgacactacctctgtgaacattttggtagatattctttgggctctgacacgtacacacatgttgacttttatcatcatcatcatcatcatcattattctagtactctctttttcactttgctaaagtttgaatcatcttttgtaatggatgcgtaatactctaccaaatatagagtatgtatttgtccatgttttgaattatttccctaggagagcttacccaaggtaaaatacttggtcaaaatttataagcctcttcatagctcttggtacatactgacaaactctctccaaaaggatggtaccaatttttaaaatctcaccagtaatatatgcagatactggtttgatgttattgagatttaaattcagttgtgttggcatggttatagcttagatagatagatgatagatagatagatagatagatagatacatacatacatacatacatacatacatacatacatacatacatacattcattcatgtgtttgtgtgtgtgtatgtgtgtgttactcctccttaatggacaaatggtgatatggatt

SEQ ID NO: 945433 - DNA, 590 bp, Homo sapiens
aatttcaaatataaatattatttcctatttaggaaatttggaaaagaaagcaggaaaaaaataactcaccccctggtcccccaccatgacactacctctgtgaacattttggtagatattctttgggctctgacacgtacacacatgttgacttttatcatcatcatcatcatcatcattattctagtactctctttttcactttgctaaagtttgaatcatcttttgtaatggatgcgtaatactctaccaaatatagagtatgtatttgtccatgttttgaattatttccctaggagagcttacccaaggtaaaatacttggtcaaaatttataagcctcttcatagctcttggtacatactgacaaactctctccaaaaggatggtaccaatttttaaaatctcaccagtaatatatgcagatactggtttgatgttattgagatttaaattcagttgtgttggcatggttayagcttagatagatagatgatagatagatagatagatagatagatacatacatacatacatacatacatacatacatacatacatacatacattcattcatgtgtttgtgtgtgt

SEQ ID NO: 945434 - DNA, 590 bp, Homo sapiens
aatttcaaatataaatattatttcctatttaggaaatttggaaaagaaagcaggaaaaaaataactcaccccctggtcccccaccatgacactacctctgtgaacattttggtagatattctttgggctctgacacgtacacacatgttgacttttatcatcatcatcatcatcatcattattctagtactctctttttcactttgctaaagtttgaatcatcttttgtaatggatgcgtaatactctaccaaatatagagtatgtatttgtccatgttttgaattatttccctaggagagcttacccaaggtaaaatacttggtcaaaatttataagcctcttcatagctcttggtacatactgacaaactctctccaaaaggatggtaccaatttttaaaatctcaccagtaatatatgcagatactggtttgatgttattgagatttaaattcagttgtgttggcatggttatagcttagatagatagatgatagatagatagatagatagatagatacatacatacatacatacatmcatacatacatacatacatacatacattcattcatgtgtttgtgtgtgt

SEQ ID NO: 945435 - DNA, 659 bp, Homo sapiens
cctgggcaataaattcccttttgactttaatatttagttatcacctgtcctgcttggtatacatttggtaaccattagtaaagtcattgaactcttcaagctcaatagcaatagattttatgaggtggtggyttccagaggttatgttatcactaatgataaccaccatgggaactgctccttattcatttactgacaaaagagggagggagatatagaaaaaaaaacagatttctcagaatgtttctgcttccactttcctctctgagaatttcagactgttgagacagttgtgtccaaggccagattttagctgatacaacaaacccctaccctaggctaccacacgcacattaatcatgaacgaattgttaggacactggtaatacacatggtgggtgggattcatgaggaaatcatctaaataattcacggatttagccaaagaatggggacatgcacaatcattctcctctccaattcccagaatttacttctctggataggtatgaccaggagattagggtcatccttataaacaacttcctcaactttactgcctcagtctctcaaaagtgagaagaaattttgagtaagtctatgaggcaggaagaaagaggcaaagagcactttttataggttagggacttgaactgtga

SEQ ID NO: 945436 - DNA, 756 bp, Homo sapiens
ttttttcttcttttttttttactactgccctttggagcttagaacatggtctgtaaaagtgagctttctctaggcagggctggcttatgctgtggtatgagaatctctggaagttgattgaaaaagattatgtatatgttgagaactgcagaactctgggcacctaatgactcagtacaaacctctgtactaagagatgacccaactctagcctggcttctagcgtccctgtccataggatgccccagcccctacttaaatgcctgcctgaggaagctaaaacctgccaggagaatttactatttgttcaagccaacaccttatgttaggttcctgactctttccttagagcatttacaaggaagggcttagacttgctcattctacatgtgcaatatgaaaaatatagttaataactgtgtattgtattcagaatttttgctgaatgagtagattataactgctctggggtggggactgatgagcaactgcgtgagatgatcaaacgttattttgtttcactgtagtaaccatgttactatatagtatctcataacatcatgttgtgtaccttaaatatacacaataacatttatttaaaaataaaaacaaaaagggcttacatttgtgaatatgcatctcctgtaactctgaagtatccttctcaaggacccgaaagccattactgtgaaaagtcrtcatcaggaaggctagggcccctgtcccccatctcagtaggtgggtagaatcctaact

SEQ ID NO: 945437 - DNA, 673 bp, Homo sapiens
tgtcagggagatagggcttctgatttcagaggagaccagaggtgtgctcatgcagatgarggtcctcatgggatggacatggaaggggcagctacaacctggggacaaatggtggtgggctgagcccctgggacttctggagtgaggaggcaagaacgtgaggaggagccaggcagggagccagaggcagagggtaaagagtaaagtagagcccaggaaaggggcagatccagcaagtagatgaaaatttcccctcacctgccccgttggcctctgtccctgcccacacgccctagtgccctcgccctgagtctctgcttgtctcggcctacctggccatcccagacaggtgtggggtaactgtgagggtaactgaagggccactttcagaaggcacagtctagaagtgaacagcattgagtcactgtcgtctcccagtcctgggaagagcctctgccacaacccgctgagctgtcttcatcaccaacgggtctccttcccccacccctggaggtccagaggacagctcagagctgtgattggtgcctcttcccagtgtctctctacactgctcctgcctgtgcctcagcatcctcctctgagaggtgggcctgtcgctgcacgtgaatggcgagcaggtcactgtggggaagggcctcctccttcctctttc

SEQ ID NO: 945438 - DNA, 581 bp, Homo sapiens
cggcctacctggccatcccagacaggtgtggggtaactgtgagggtaactgaagggccactttcagaaggcacagtctagaagtgaacagcattgagtcactgtcgtctcccagtcctgggaagagcctctgccacaacccgctgagctgtcttcatcaccaacgggtctccttcccccacccctggaggtccagaggacagctcagagctgtgattggtgcctcttcccagtgtctctctacactgctcctgcctgtgcctcagcatcctcctctgagaggtgggcctgtcgctgcacgtgaatggcgagcaggtcactgtggggaagggcctcctccttcctctttcctgggctcctggtgcctgtctcctgggggtatggcaatctagcctacccatgagtccaggcaaaaaggcagccctactccagcccccagaaagaagaaaaactagttgagctttcgggggaggaatggtgaaagcctgcacactaggacaaaaaagagttgaggcctccaggaggccatgcttactggtgccygctgggccctggagctgtgcaggaggtggcttagggact

SEQ ID NO: 945439 - DNA, 642 bp, Homo sapiens
ggggcagtgggtgaagagagaacacacactgaaaccatcacaaagaaccaggtaggagcagaaacagaccggcctaggccttgacatctggtatttatgatccatggaaacaaaatttctgaacatttatgcttgggctacataagaaatgccacactgaggagtgtttggtggtaacagtgccctgtttgacatctaagattggagtcctaacagtccttgcccttttagggggagtaagtacccttaaaataagtcttgggactagaaccaaggtgggaaaattcccaaacatggttccaaaaacagtaatgccaacaaagcataagtgatggctaatttagttcagtccggcaagtttggtcccaggtcagctcaaggaaatgttgactgagcctgggtctttgtttgaaatcaacacttttgagatatttttatttcattctttactaatgggaacaaatggctttaaggaaagccaaatgttatttagacaaaaggggtaattgagcttgtcactggggamacaaaaaatgctctgatcactgacattctactttattctcctgcaagggacagatagtgacatctatactgaaccatctgtactaacagaacttcctgtaagatctaaaaaccgga

SEQ ID NO: 945440 - DNA, 569 bp, Homo sapiens
atcaaagtagattcagaacaagaaatattgaccaggcgtggtggctcacgcctgtaatcccagcactttgggaggccgaggcgggtggatcacctgaggtcaggagtttgagaccagcctggccaacatggtgaaaccccgtctctactaaaaatacaaaaattagccaggtgtggtggcgggtgcctgtaatcctagctactcaggaggctgaggcacgaaaattgcttgaacccaggaggcggaggctgcagtgagccgagattgcaccactgcactccagcctgggcgacagactgagactttgtcttaaaaaaaaaaaaagaaaaaaaaaaaaaaaaacaagaaacattaccagggataaagaagacattttataatgattgtggtgattttaaaatatgtcttcatattgttagatatacttttctttaagaggtagagcctaattcttctcctcttgaatgttgattggactttgtgackcatgaatagaatatggtagaagagataaaagatattgtggcttccaacttagttgctctctacttagtcatttgctctgagag

SEQ ID NO: 945441 - DNA, 582 bp, Homo sapiens
tcacgttttgtttttgtttttgtttttgtttttttttgcagtgctacccaaagcatgggtcgcatacagtttaaccatatgcaatgagaatagacttatagaaacctttatagaaattcartagaattattttctgtctgttgaagctaataaaaaattaggcttattttttataggccttctttgtctagtaattcatgtttactgtgtttcacaaatgcatcagttcatgaaaattgaaaattaaaaaaaattatccccctatagatcattttaagaaatgctaggccacaggatatcaggaagttatttaaccaccctggattttagcctctacacatttaaaaactgaaaacaataagtgattctacctcacatggctcaagaaacaataaaaagtaataataaaggagaagagtggtgaaaaaatataaatacaacaaaaacaaaaatataataaaatataactagcatttgtctaggaccctaaagtaattatttaaaaaatatgctcaatagtagccccaaagttactacaaaacttcagttagtagaggtgggggcttggtgtgcgatttcagc

SEQ ID NO: 945442 - DNA, 673 bp, Homo sapiens
acttctcccagacaagcctccatctcccataaggggtccaytccaaccttctagggaaaaagaagggaaagaggaaattgttccaatgggcacaaaatatatacccatctgccaagctaaggacaaggtgtgaaaatggtgggagagaggggatataaaatgaggcttacagccgggtgcagtggctcatgcctgtaaccccagcactttgggaggccgaggcgggtggatcacctgaggtcaggagttcaagaccagcctggccaacatggtaaaaccccgtctttactaaaaaatacaaaaaattagctgagcgtagcggtgggtgcctgtaatcccagccacttgggaggctgaggcaggagaaccacttgaacccaagaggcggaggttgcagtgagctgagatcatgccattgcactccaacctaggcaaaaagaccaagactcagtctcaaaataaataaataaataaataaataaataaataaataaataaataataaggcttacttatttgttcccttcaggggccaatttcaaacagaaaagcagaaactctcatgcgtgcctagacttggaagaggttgctttagcttagtgcttctccaccttttttttccactactgcccctctaccaggagcctttgtagacaagtttctccctaaacac

SEQ ID NO: 945443 - DNA, 623 bp, Homo sapiens
catcatttgtagacagaatcaattgagactctttggcacttacgactaatccattgtaaacaattatcaatcttaaaaacacagctccagtaaacgtgtaattatactgggtacagataaggaagtacaaggccggtatgatcgcttatgcctgtaatcatagcactttgggaggccgaggcaggtggatcatatgaggccaggagttcaagaccagcctaacccacatggcaaaaccctgtctctactaaaaatacaaaaagaaattagccagccatggtggtgcttgcctgtaatcccagcttctcaggaggctgaggcatgagaatcagagaatcacctgaacccaggagacagtggttgcagtgagccaagaccatgctactgcactctagcctaggtgacacagtgagtgagaatctgtctcaaaaagaaaggaagtacaagaagctcactggctatgctaaaccaaataaatgaaaagcagcaaaactgattttttttttttttttttttgagacagagtctttgtcacccaggctggagtgcaatggtgcgatctcagcttattgcaacctccrcctcccgggttcaagccattctcctgcctcagcttccctggt

SEQ ID NO: 945444 - DNA, 678 bp, Homo sapiens
atcctgtcacttctctgagcctcagtattttatctatgaaatgagagttagacaagaaaatcttgaagggtctttcgagctgtgctctactgcactytttttttttttttttttttttttttttttttgagacagagtctcgctcagtcacccaggctggagtgcagtggtgccatctcggctcactgcaagctccgcctcccaggttcacgccattctcctgcctcagcctcctgagtagctgggactacaggcgcccaccaccacacccggctaattttttgtatttttagtagagatggggtttcactgtgttagccaggatggtctcgatctcctgacctcgtgatccacccgcctcggcctcccaaagtgctgagattacaagcgtgagccaccacgcccggcctactctgcactctttctaccagcagtcgtggctttgctcccacatggacctgctgaatgagatgcagacaagccctgatccattctaagaccagcccttgctgcttgtcaaggcctggatctcctactactgtataaggtggcccccagagaatggcaggggtgagatctctctgttagagttctttggaatggacacaatgagtcctggcccttccgagcccctggaggccacaccaggctgcccgggaagtatcaggcagagatcag

SEQ ID NO: 945445 - DNA, 613 bp, Homo sapiens
atcagatcttcctttacttccttaattatggttttctttagttctttgatcatatatatgatggctacttggaagtttttgtctcttaaatctaacatttgcttctctcccaggcagtttctgttgcctatatttttcctaatgtgtggatcatactttcctgtttcttttcatatctttaaaattttctttttggaaagtggacattttagataatatcttgtagcaactctgggtgcttgttactcctttctagcaccggttaaagttctttgcttatttgtttgatgactggctggattatttagtgagatctgtttcccttcttcaatgctaaactgctgaatttactccctgggagacaaagccttgggtagcctagtcatcttgggatgacaatgggatttagcagggctctctttgaccatcttttttcctgaccatacccagctataactctacaactaactggctgatggctctattgctttcaacaatgtcctggkgcataaattgctctatagaataatccaatcaaactcaagttcctttgaagggatagtttctgaggtcaatatttgagatatgttctaagcccagaaaagtttctccc

SEQ ID NO: 945446 - DNA, 390 bp, Homo sapiens
ggtctcagactcctgacctcaggcgatccggctgcctcggcctcccaaagtgctgagattacaggcatgagccaccatgcccggccacataactaacttctactgaattgctaatcatttggaagaggttttgataaatttgggtctcctatcaacaaatttaaagaaatagaagatagtgtcctgaagaaccaataaattgcacagtatgataaatggaaatggttactagttgataacagagcaaaaaaccttatgggaatccaagtggctaccaagcttacatgaatcaccagtactaagatggtgaacaaataggaatagttaatgattatagttgctttgccagaagaagaaaagtttaagscatgatacaataattgcatgtaa

SEQ ID NO: 945447 - DNA, 644 bp, Homo sapiens
cgataagcagactttacatttcggtgttttcctgcatagtaggtacaatcggtgatgggattatttttctctccccyattcatgcctgcttctttaagattttaatattaagaattgttttatgaaattaatgttaaaatactacagtgttctcttccctgggggtgcaatagacaggtcggtgttcctgggattccttctgagtgcccatcatccagcctcacttccctttgcctccacactggccccagtggccttctttggaggatgcccatgggcccctggagctgcttggggaaaggtacagagagccagaagtgcctgggggtttacattcgctctgaggcggccagtagcggagaaccgaatatgggagtgacaaaggtcagtggccttgcttcaatgtgggcccatttatgctttggaatctggcagaggctgggccggaatctcacctgtgcttggctttttccccatttctgttctgttcccctcatcccctttccgttttctcctgggagcactttattgatatataactgacaagtgaattgtagtctccagatctgattctgggggacccattttaagatgggggtggcagaaggtggggggatggcatgagagtgtagatcgtagataat

SEQ ID NO: 945448 - DNA, 616 bp, Homo sapiens
attgtggttttaatgtggatttgtctaaacctcagtgaggttgaacatcttttcatattcttaaagaaccctttttttctatgaactgttcatgtcctttgcacatttttcttttgggttgtcacttactgatgtgtagaaacttatattaagggattaaacccaattactttgataggaattgcttgtattttttttccagtttataatttatatttttttcctatatcgaaataaaaagtgtgtgtgcgtgtgtgtgtgtgtaaaagaaagagagagaaagagaaatttacttatcctttcctttgtggaccctgagttttatgtcaaatttgaaaggatttttccagttccgaaattatttttaaaattatgttgtgtttcctattattttatggttttatttttcacatttgtaatgtatttttaacttatgtttttaatgcagcaagattaccttatgctggctactttggatgagaatgaggaagtgatagatggaggcaaaaaaggagcaatcgatgaccttcagcaaggtgaattggaagcatttattcaaaatcttaatttggcgaagtatacaaaagcttccttarttgaagaagatgaaccagct

SEQ ID NO: 945449 - DNA, 591 bp, Homo sapiens
aggttcataaacacgcctaagggaaaatccaccacaattcctcccttgctgaggtgccctgctgcattcttttgcagctttctttctatctagtaaaactttccttttcaaacctatactgttgtcagtaaattcttctcaccaatctgcaagtcaaccaccttccaatgccggagctctggcacctagcccagcaaaagacaaagactcacacacaaaattcattctttacagctcacagaatagacagcactgatctacacagtacctaaactgcctatgatgtgaagttacaaacaactgatcgttacaggaagcatccatgcatataatgtttaagtctgtatatttatagaggcatacatgttgacattttattcaaaaaatttcatctatgtttaatttttccatcttgtgggatcagataagataaagcaccaatttcatatatatatatatttttttttttttgagacagtttcttgctctgtcacccaggctgtagcatagtgctacacccagcacccagactgctgcacgatcttggctcagygcaacctccgcctccaggattcaagtgattctcacaca

SEQ ID NO: 945450 - DNA, 611 bp, Homo sapiens
atggttcacatcacaggactctgtccatacaacccccggtaccagcctagagcctggtagacttgctgggtggctagatccagaagagagaataatcactacagcttgactctcaggaagccgcatccacaggaaaagggggagagtattacatcaagagaacacctcgtgggacaaaagaatctgaacagccttcagctctggacctttcctctgatacagctacccaaatgagagggaactagaaaactaactctggtaatatgacaaagcaatgttctttaacacccccaaaagtcacactagcttaccagaaattgatccaacccaagaagaaatccctgatttacctgaaaaggaattcaggagactggttattaagctaatcagggaggcaccagagaaaggtgaagtccaatgtaaggaaatcaaaaaaatgatacaagaagtgaagggagaaatattcaatgaaataaatagcataaataaaaaaacaatcaaaacttcaggaagcaacgaacacacttacagaaatgcaaaatgctatggaaaktctcagcaatagaatcaaacaagtagaagaaacaaactcagaatctgaagacaaggtc

SEQ ID NO: 945451 - DNA, 594 bp, Homo sapiens
aaatagtaaactgcatattgattccaaagcaaatcaagttaagtatcttctatggacatatagtcagataataaaactcaagaaaataatgtatgttcttctctgttttccactaaactagggaatctcctttaaactttgtatgcagtatggaaataaggtttctgaagtaaccattacaacatgttttcatgagtgtttattaagaagccccaaacatttttcagtaataaatcggctgacatatccatagatttaaatcttttattggttactgattaacataactgctctgcctgacaaatctttataataaataagccaaccagtgagcatttcacaatgaaaccaactttgtttaaaggactatcactaaaacaggatttatgcgctaatgaattttgcaatcagcatgtggtggtgtacaagtttcaacatgaatctaaaatgcagaaatctgaagacactgaagttattaaaaatcacaccacaacacaactacttttaattaaaaagaaatatattacattcrtatttagcagcagcattatagcgtatgaaaaggagaactcagggttactctttgaacatatt

SEQ ID NO: 945452 - DNA, 570 bp, Homo sapiens
atgagagtttgcagaagatgaaaggggagtcttgcattcagcaatttgccctgtatttaatgagccagccaccttgtgtcttcccctcctatgacatagcccttcagctcaccctacarttgccacatgaaaacttctctcatgaaacccacagggtcagtatctctcaaatactctttttcctccacttctggggcatgatcttgcaatgtactccttactgccccatcctggaaacttgtgcctatatccttgttttctatacagtgtttagccaaggtccttgaccggaatatagatcacaaaaagtactggttgtcaaatgtcaaagtaactgacatttaacagagagattatatttgaggatgccaagaattagcaaacatttttttctgatcatctcaggctatttgaagaagttatgaattcaccgaattgactgaaacctgccctctgaataattcttcagcactatataaaccaaagtttgtgttggttcaagcaggcaggagggctgtgcatctgtggtatgggagccccctcaactagaggctagaaaaaaacagcatt

SEQ ID NO: 945453 - DNA, 583 bp, Homo sapiens
attgaaccaggaagaaatacaaaacctgaacagaccaataacaattaacgagatcaaagccataacaaaattctcccagttaagaaaagcctgaaacttgatggcttcactgctgaattctaccaaacatttaaagaagaactaataccaatcatactgaaactaatctgaaaaatagaagaggagggaatatttccaatgcattctctgagtccagtattaccctaataccaaagcacacattattgcagattaaaaaagaaaactacaggccaatatctcagatgcatattgatgcaaaacctcaataaaatactagcaaagcaaatttgacaattcattataaagattattcatcatgacaaagtgggatttatcccagggatgcaagtatggttcatatgcaaattaatcactgtgatacatcctatcaacagaatgaaggaagaaaaccataacatcatttcaattgatgctgaaaagcatttgataaaattcaacataacttcatgataaaaactctaaaaaatctgggtatagaaggaacataayttatcataataaaagccatatgtgatagacc

SEQ ID NO: 945454 - DNA, 582 bp, Homo sapiens
cttctagaatgtacttcatatcagcaatgactttggcgtgttcactgctgcctctctagcacttggaccaatatgcctaacatagccacactcaatcatatatgtggaataaatgaagacacgaataaatatttaaatgaattcctctttcttagaagtttaagggacttggagcacagaccatgttgatatattcagagggaaaatcagaacacgaggtgtgacttgggacaggggagtcacagtggaaagttcttaaccaggctgaggttacacagtggtttggggaaatagaagagaaagaaggaacagggaaaaagaggtcccaaaaaagagattgggaggaaatcagagaataagctctccatttagagattttgctgtttgctgcccttgtacgacagcaggtaaagtaagtgcctccaaatagccagctgccaggatagcctgagaaaggggtgggaaacaggggctggagagaacagaagacttggggccttttacagcaagtgcaaactttcacacctgtcgctataaatcaagaggtttatggggckgcaatatttacactgtaattaaaaa

SEQ ID NO: 945455 - DNA, 653 bp, Homo sapiens
ctaaagggcattttaacccattagtggggttttctctgacagatagaagtatatatgagtgagtgattgttgtgcaataaacctgggaaacatgtaaattgcatttcctcatggcatattgcaactgaattagaatattggacagacataaacaatgcaatcaaaccgtgccttttattgagcttctatttgacttagtattcatctgtaacaacaacaacaaaaaatgtgtttctcagggtctgtgacaatgcaggccacaagagattcaatgtcagtgccggcatacaaatttattagtctataaaatttgacattctcttatttattcacagaaaggacaaataagatattttttcatacttaccagaaatatctgggagtgtttatatgccgctccatctggaggatgcaaatagtcagaactgctttacaattcagtaggcaaaagcctgctgaaggataacaaatgacttcatggtgaaactgctattgaaattctttcagtatgtgatattaaaaacaactgaacaaacagagataagggacaaataggatttgaaacagactttttttttcttacagtgcaaaagaaaaacaaacgaatgmtctagtcgaacctatatataccttttagtgatttcacagcatgg

SEQ ID NO: 945456 - DNA, 522 bp, Homo sapiens
agattcctgagcctgccccagaccaccttactcagattgtgtctaaatctaggaatatgtgttmtatcttgctcctcagccaattcctatgcaactgcttggcattctccattcgtgttttgggaaccacatgggtgacggaaagaatcagtaattctggagtctgttggacctgagttcagatcttagcacctgcacttattagctgaccaggttaccagacttctctgggcctcagagactacaaaattgcagtttcttttccaaagattttttgttttgttttttagaggaaggatgctctgaaagttgaagataccacccaactaagttggtacatcaagtagtgtgaatatagtcttctgaagatggtcctatgaaacagactgcttttctgagtggggtgtggtagccagtctcgtttatgatgtggtcatactgagtagcagtggcatttccctccctcccttcttctaaagttcaaatgagttttctctcttcaatctagaactcccatagtca

SEQ ID NO: 945457 - DNA, 522 bp, Homo sapiens
agattcctgagcctgccccagaccaccttactcagattgtgtctaaatctaggaatatgtgttctatcttgctcctcagccaattcctatgcaactgcttggcattctcmattcgtgttttgggaaccacatgggtgacggaaagaatcagtaattctggagtctgttggacctgagttcagatcttagcacctgcacttattagctgaccaggttaccagacttctctgggcctcagagactacaaaattgcagtttcttttccaaagattttttgttttgttttttagaggaaggatgctctgaaagttgaagataccacccaactaagttggtacatcaagtagtgtgaatatagtcttctgaagatggtcctatgaaacagactgcttttctgagtggggtgtggtagccagtctcgtttatgatgtggtcatactgagtagcagtggcatttccctccctcccttcttctaaagttcaaatgagttttctctcttcaatctagaactcccatagtca

SEQ ID NO: 945458 - DNA, 467 bp, Homo sapiens
tcctgatttctaattctatgagaaaaataactatttgtttaagccatcatcagactttctcttacttgcagctaaaaacattcctaattgacatggtgcccttgctatgttctctaatttgaacattatcatttcatataatgatataataatgtatatcatttatatattattataatttattatgtaattatctatctccttagcttttattgtaaacattagtacgtatctatcttgattgccactatatctccaaaatcgagcagaatgccaagaacccagtagtaaatgatcaacaaatatctgttgaaagaatgtgtgacttgtactaggccacatcttctcagtaaccacagctccttagcatactakaatcaacttaagggaggaaagtacaagttgacttatagaaattttgatgaatctggagttactatatcaagcaatgacagaaacctatataa

SEQ ID NO: 945459 - DNA, 675 bp, Homo sapiens
agtctatgtatctcttctcctgcatggtggtctcagagtagtataacrttttacatggtggctgacttcccccaaggaaggtaactcatgagaaccaaggatagtatggcctttactgacctagcttggaatttcatagccctacttctgcttaattctattagtaaaaagcacatcactggccgggtgcagtggctcacacctgtaatcccagcactttgggaggccaaggtgggtggatcacaaggtcaggagttcaggaccagcctggccaagatgataaaaccccatctctactaaaaatacaaaaattagccaggcgtggtggcaggtgcctgaaatcccaggtactcgggaagctgaggcagaagaatcgcttgaacccttggggtggaggttgcagtgagccgagagtgcgccactgcactccagcctggggtgacagagtgagattccatctcaaaaaacaaaacaaaacaaaaaaaagcacatctctaagtttggccccgattcaaggggagggaacacagactcctcctctcaaagggaggagtgttagagaatttatgatacgttttaaaatcactatgttttaactgtggcatttcaaacccttaattagaactctgaaaaagaaggtctttcctagataaatcagaaaaggctagattaatt

SEQ ID NO: 945460 - DNA, 624 bp, Homo sapiens
cagctggacagttggtcagagagtctatgtatctcttctcctgcatggtggtctcagagtagtataacattttacatggkggctgacttcccccaaggaaggtaactcatgagaaccaaggatagtatggcctttactgacctagcttggaatttcatagccctacttctgcttaattctattagtaaaaagcacatcactggccgggtgcagtggctcacacctgtaatcccagcactttgggaggccaaggtgggtggatcacaaggtcaggagttcaggaccagcctggccaagatgataaaaccccatctctactaaaaatacaaaaattagccaggcgtggtggcaggtgcctgaaatcccaggtactcgggaagctgaggcagaagaatcgcttgaacccttggggtggaggttgcagtgagccgagagtgcgccactgcactccagcctggggtgacagagtgagattccatctcaaaaaacaaaacaaaacaaaaaaaagcacatctctaagtttggccccgattcaaggggagggaacacagactcctcctctcaaagggaggagtgttagagaatttatgatacgttttaaaatcactatgttttaactgtggc

SEQ ID NO: 945461 - DNA, 540 bp, Homo sapiens
aacacagcgagtgacggtaggatggatgcccttgaccagatggcaaatagattacattgggccacttccaaaagcgcagggctacacatatgcactgacggctgtagacacagcctctggcttgttgtttgcctacccttgcagggtggctaaccagcaacacaccatttgaaccctgcaatacttatgtgctctatatggccaacccctggctgttgaaagtgataggggaacacgtttcactggacagcaggtataacagtgggcactacagatggacatatgatgggggtttcatgttccttataacccacaagccactgattgagcgatataatggactcttgaagaacgggttacggtagcatgttactcccccatctttgcggggctggagttcaaggttggacctggtgcttcaaattttgaatgagttgccacagaaaggcrgcccagccctggtggaggcactgttacaccaggccgccatgcccgtccatctatacacatctaggatgacctcctccggccaagtatggg

SEQ ID NO: 945462 - DNA, 813 bp, Homo sapiens
agctggaaggtaagttagccattaaggcatttaattgaaacactgcactaattcatcaaatacttgctgagctacatatttatatcatcagggaaatgcaaattaaaacaacaagatacccacacaccmattatgaaatggcaaaaatctggaacactgacaacaccaaatgctggctgagacgtggagcatcaggaactctgactgaaggtacagccactttggaagacagttttgcagtttcttataaaactaaccttactctcactataccagccaccaatcacaacattcctttgtatttacccaaaggagttgaagtcttatgtccacacaaaaatctgcacacagatgtttatagtagttttattcatagttacaaaaacttggaagtaaccatgatatccttcagcagatgaatggtttcataactgtggtgtatccatacagtggaatgttattcagcctaaaaagaagtgagctgtcaagcaataaaaagacatggaggaaccttcaatacatatcactaagtgagagaaaccagtctgaagagactacacactgcatgattcaaccatatgacagtctgaaaaagaaagatcagtgattgccagaggttggcaagaggaatgaaaaggtgaacacagagcattcttaggacatgcaaacactttgtgtgggactcagaatgagagatacacattctgcctttgttcaaacccatagaagtttcaacactgagagtgcaaaccatggactttggatgatgatgatgccattgtaggttcatcagtggtaacgagcgtacctctc

SEQ ID NO: 945463 - DNA, 676 bp, Homo sapiens
agtatagggttagctattctatgttttttccctttccacataaatttcaaaatttgttggtatctacaaaatacttgctgggattttgttgaatctatagatgaagctaataagaaataacatcttaatgatatggagtcttccaatccatgaacatggaatgtttctccatttacctagatcttctttgatgtttttcatcagtgcattgtaatttactacatagaggtcatgtacatattttgttagatttatacctattccatgttttgggtgctattgtaaatgatgtttttaacttcaaattttaattgttcagtgctggtatattggaaagcaattaacttttgtgtattcgccttgtatcctgtcaccttgcaacactcatttattagttccaagaactttttgtcagttccttgagatttcctgcacagacaattatgtcactatgaacagtttaatttcttcttttccaatctgtataccttctgttttcttctacaaatatgttaggttaaatggaaaagaattaaggttgaagatgaaattaaggttggtaatcacctggcctccagatgaggagattatcctggattatctgggtaarccgatatgaaagcaaaggttcttataaatgggtaatataggcagagagagagaaccagagagatgg

SEQ ID NO: 945464 - DNA, 608 bp, Homo sapiens
agtgttaattgaatggagatgccaggaagaagcaacttcctggacatgcacatcaagagacaaaatggcaaagtatgaccttccaagggcactctcccagaaatgggaagaaagtctcagatgggcawgcatactactttttttttttttttttgagacggagtctggctctgtctcccaggctagagtgcagtggcacatctccgctcactgcaagctccgccttcccaggttcacaccattctcctgcctcagcctcctgcatagctgggactacaggcacccaccaccacgcccagctaattttttgtattgtttttagtagagacggggtttcaccgtgttagccaggatggtctcaatctcctgacctcctgatctgcctgccttggcctcccaaagtgctgggattacaggcgtgagtcaccacacccgactgcatgcatactactttctaaacacactatgtgctcccgtcccaagggtaaggagggcactgcacctacaggcagcccatcctaagggaagaatcatgggaaacaggtcagtctataaagttctaacatcagggttaaacatgacacttaaccttcaggtgcccacttgga

SEQ ID NO: 945465 - DNA, 618 bp, Homo sapiens
aggattcatcatgtgccaactraagaacacttggaccttaagcataaaagaaatgtaaattaaaatgctatagcttaaaaacatgaggatagggttatacatcaaccccacctttcctttcatgttctaggatagaactaatgctttattcttgttaggagaaagtatacttacttacacatttgatgcttttttaaatttaaggttaacaactaaagacacacacacacacacacactccacatcattagagaaaaattttacaaaaatcaacttaaaagaagctggagaattaaacaaaaaaatatctgttactgatggtgtaagtccaaatatatctgtggttataattcatacaaatggattaaaatcaccaaataaataaaaattaggggttttcatattataaaaaatgatagtactactctggcccattggtttattgtttctaagtcaaggtatatgctacttcctggagaaacatctgtaagagatctaagagaagagtttaaaatacaataatgaaaaagacacatcgtataaatgaggcatccccaaccctgggagcatggactggtacctgtccatggcctgttaggtaccaggcagcacagcagg

SEQ ID NO: 945466 - DNA, 578 bp, Homo sapiens
cagccatgcatggaccgaccagcctccagtgtggtcggagcagggcagttgtccttgtcagcagcagcttggtttcactgcaggatcagccgtgtcrggtggtctgggttttgttgactggtccactggtcctgggaggtggctactgctggtttcagccagctatgatgaacccaaggtgtgatacctgaaactttaacagcagtgggggtagacaagatcacaatatggggaccatctcataaaggccttaaagtggatgggttccatcatttgatctagacagagtctccaggttggaagtgatgtactgcatctgtgaggctaacaggtatcctttctcttacccacccttgtatttcctgcacggcctcacctaaggcttgcatttgccttcttaaggttaatcccccaatttcttttaaatctccttttatctgagttatgatagggggtggtcggctgaacaatctcatagagtgaatacccagttaatttagtaggggtgcacctgattcggagaaggaccatgggcagcacctgatcccaccttagatgagtttcttggcaaaacttct

SEQ ID NO: 945467 - DNA, 578 bp, Homo sapiens
cagccatgcatggaccgaccagcctccagtgtggtcggagcagggcagttgtccttgtcagcagcagcttggtttcactgcaggatcagccgtgtcgggtggtctgggttttgttgactggtccactggtcctgggaggtggctactgctggtttcagccagctatgatgaacccaaggtgtgatacctgaaactttaacagcagtgggggtagacaagatcacaatatggggaccatctcataaaggccttaaagtggatgggttccatcatttgatctagacagagtctccaggttggaagtgatgtactgcatctgtgaggctaacaggtatcctttctcttacccacccttgtatttcctgcacggcctcacctaaggcttgcatttgccttcttaaggttaatcccccaatttcttttaaatctccttttatctgagttatgatagrgggtggtcggctgaacaatctcatagagtgaatacccagttaatttagtaggggtgcacctgattcggagaaggaccatgggcagcacctgatcccaccttagatgagtttcttggcaaaacttct

SEQ ID NO: 945468 - DNA, 561 bp, Homo sapiens
gcttccacatttttaggtatttgttacagcagcaccccactcccagcacaatttcttgcttagtctactcctgctgccatagcaaaatatgttagactggataatttataaataataraaatgtatttctcacagttatggaggctgggaagttcaagatcaaagtaccagcagacgtggtatctggtgaaagtttgctctctgctccacagacggtgcctgttgctgtgacctcatatggtggaagggcagaagagcaagaaggtacaaacagactccctcaagcccttttataagggcactaatcccattcatgaaggcagaaccctcatgacctaattacctcctaaaggccccactccttaatactattgcattgaggattaagtttcaacatgaatcttggagggacatgaacattccaagatagcaagatttatggcactgttctatctaaagcaggtattttataacctaaaaaaatcaaaaccatatacgatatccacatgcaaaagaatgaagttggacccctttccatacacaaaaattaactccaaatgg

SEQ ID NO: 945469 - DNA, 572 bp, Homo sapiens
tgccactccaaaatatgcctctggcataagaatgattttgagctgattattattatttatttatttttgagacagagtctcactctgttgcccatgctggagtgcagtggtgcgatctcygctcactgcaagctccgcctcccaggttcacatcattctcctgcctcagcctcctgagtagctgggactacaggcacctgccaccatggctggctaattttttttttttttttttgtatttttagtagagacggggtttcaccatattagccaggatggcctcgatctcctgacctcgtgatctgcttgtctcagcctcccaaagtgctgggattacaaatgtgaatcactacgcctggccgagctgagtatttttgatggcagtggctgctgccatcatgctggctgcagcagggaggcacggctttggctgcacactccataaagctggtgggagttgggaggagagctctctgggtgctgctgcaactgcccaaccagcagcttcagacccaggcctcctgctctacagagcacacaggagactcaccctcctgggtggggctacagcc

SEQ ID NO: 945470 - DNA, 643 bp, Homo sapiens
gctgtcctatttccgaacttcctgtgatgtgagataacaactggcattgtttacagtaatttgagtcagggtacaatttgatactgtgcccattgtattagtccattctcacagtgctatagagaacggccaaaactgggtaaattataaaggaaagaggtttaattgactcagttccacaggacttgggaggcctcaggaaacttacaatcatggcagaaggggaagcaaacacattcttcttcacatgacagcaggaagcagaagaatgagaacccagtaaagggggaagccccttataaaaccatcagatctcatgagaatttactcactatcacgagactagcatgggggaaccacccccatgattcaattacctcccactgggtctctcccatcacacgtggggattatgggaactataattcaagatgagatttgggtggggacacagccaatccatatcaccatttgtccattaaggaggagtaacacacacatacacayacacaaacacatgaatgaatgtatgtatgtatgtatgtatgtatgtatgtatgtatgtatgtatgtatctatctatctatctatctatctatcatctatctatctaagctataaccatgccaacacaactgaattt

SEQ ID NO: 945471 - DNA, 643 bp, Homo sapiens
gctgtcctatttccgaacttcctgtgatgtgagataacaactggcattgtttacagtaatttgagtcagggtacaatttgatactgtgcccattgtattagtccattctcacagtgctatagagaacggccaaaactgggtaaattataaaggaaagaggtttaattgactcagttccacaggacttgggaggcctcaggaaacttacaatcatggcagaaggggaagcaaacacattcttcttcacatgacagcaggaagcagaagaatgagaacccagtaaagggggaagccccttataaaaccatcagatctcatgagaatttactcactatcacgagactagcatgggggaaccacccccatgattcaattacctcccactgggtctctcccatcacacgtggggattatgggaactataattcaagatgagatttgggtggggacacagccaatccatatcaccatttgtccattaaggaggagtaacacacacatacacacacacaaacacatgaatgaatgtatgtatgtatgtatgkatgtatgtatgtatgtatgtatgtatgtatctatctatctatctatctatctatcatctatctatctaagctataaccatgccaacacaactgaattt

SEQ ID NO: 945472 - DNA, 581 bp, Homo sapiens
aggaggagtaacacacacatacacacacacaaacacatgaatgaatgtatgtatgtatgtatgtatgtatgkatgtatgtatgtatgtatgtatctatctatctatctatctatctatcatctatctatctaagctataaccatgccaacacaactgaatttaaatctcaataacatcaaaccagtatctgcatatattactggtgagattttaaaaattggtaccatccttttggagagagtttgtcagtatgtaccaagagctatgaagaggcttataaattttgaccaagtattttaccttgggtaagctctcctagggaaataattcaaaacatggacaaatacatactctatatttggtagagtattacgcatccattacaaaagatgattcaaactttagcaaagtgaaaaagagagtactagaataatgatgatgatgatgatgatgataaaagtcaacatgtgtgtacgtgtcagagcccaaagaatatctaccaaaatgttcacagaggtagtgtcatggtgggggaccagggggtgagttatttttttcctgctttcttttccaaatttcc

SEQ ID NO: 945473 - DNA, 580 bp, Homo sapiens
agctcttgggtgaccacatgcattgtcaatgagcactgatattttgaaaggaatctttttttttttttctgagaaggaggtctcaacaatgggcttaaaatattcagtaaaccatactataaacagatgtgctatcattcaggctttgttgttccatttatagagcacaggcagaatagatttagcataattcttaagtgccctaggattttcagaacggtaaatgagcaatagcttcgacttaaagttaccagctatattagcccctaaaaagagagtaagcctgtcctgtgaagctttgaggtcaggcattgacttctcctctagctataaaaatgctacatggcatcttcttccaatagaaggttgtctacattgaaaatctgctgtttggtgcaaccatttcatcaatgaccttagctagatcttctggatagcttgctgcagcctctgtatcagcacttgctgcttcatcttgcacttatgttatggagacagyttcttttcttaaatctcatgaaccatcctctgctacctttcaacttttcttctgcagtttctcacttctctcagccttcat

SEQ ID NO: 945474 - DNA, 580 bp, Homo sapiens
agctcttgggtgaccacatgcattgtcaatgagcactgatattttgaaaggaatctttttttttttttctgagaaggaggtctcaacaatgggcttaaaatattcagtaaaccatactataaacagatgtgctatcattcaggctttgttgttccatttatagagcacaggcagaatagatttagcataattcttaagtgccctaggattttcagaacggtaaatgagcaatagcttcgacttaaagttaccagctatattagcccctaaaaagagagtaagcctgtcctgtgaagctttgaggtcaggcattgacttctcctctagctataaaaatgctacatggcatcttcttccaatagaaggttgtctacattgaaaatctgctgtttggtgcaaccatttcatcaatgaccttagctagatcttctggatagcttgctgcagcctctgtatcagcacttgctgcttcatcttgcacttatgttatggagacagtttcktttcttaaatctcatgaaccatcctctgctacctttcaacttttcttctgcagtttctcacttctctcagccttcat

SEQ ID NO: 945475 - DNA, 587 bp, Homo sapiens
gagtagctgggactacaggcatgcgccaccacacctggctactgtttcatttttttttgtagagacagggtcttgctacattgcccaggctggtccggaactcctagcctgaagccatcctccacctcarcctcccagaacactggaattccaggcatgagccactgtgcctggcctttatccctccttaaaatcctcatttgtttgcttgattgttgtatgttatgctacaacataaaacttccttgagtgtggggccttcaatttctcatttcctccaagcccagctcagtccctggtacacactaaactctccgtcaatagttgctgaattgaatgaataaatggtgcagatcctcaaatatgatcatgggcgagtcagccttctgaggtaagcagcgtgcctccatttctaagtcagtaatttcagagaatatcccacttttagtgactaaaaccctcaagggaatacgtttctctacttagctcctcctgggtgaaaggggccagaacagccctgtagaggctgagcaatgaaaaggggcattgcgtgcaaacccagtccagtaacttctctgctgagtgac

SEQ ID NO: 945476 - DNA, 461 bp, Homo sapiens
agaaacagaatcaattagatagataggtagataatagcaatgatagataatagacaatgatagataataggtagatgatagatagatagatagatagatagatagatagatagatagggaggcagatggatagattagatagataaatatagacagacatttattttaaggaattggctcacatgattatggaggctgacagatctaaactctgcagggcaggctcgcaggctggagactcaggaaagggttgatgttgcagttctgagtctgaaggaagtctggaggtagaattctctttttcggggaagcttattaccttctcttaagrccatgattgattggatatgacccacccatattatggggggtaacccacattactcaaagtatacttatttaaatgtgaatcacatctaaaaattaccttcactgtaataggtagattggtgtttgatcaa

SEQ ID NO: 945477 - DNA, 606 bp, Homo sapiens
gctgacaatcagatgtggaagaaaaggcacgacttaaagttggaacttatatgtaaaagggaagtagagcataaaaatttggaaaattcayagcctatccatgtggtagagaaggaaagcctgttttcatgggaagaattcaggagagctgtggtgcaaccacttgctagagagattagcatgactgaaagaaagataactgccaatattcaagagaatggggaaaaggcttcaaaggcatttcagagatctttcaggccacctgatatggtttggttttgtggtaccacccaaatctcatgtcaaattgggggaggggcctggtaggaggtgattgaatcatgggggaggatatcccccttgctgttcttgtgatagtaagttctcgagatctgatagtttaaaaagtgtgtagcatttctcttctctctctctctttttcctgctgccatgtaagacatgccttgcttccccttcaccttcttcaatgcttgtaagtttcctgagggctcccagtcatgcttcctgttaagcctcctgtggaatcatgagtcaattaaacctattttcttcataagctatccagtctcaggcaatttgttgcag

SEQ ID NO: 945478 - DNA, 606 bp, Homo sapiens
gctgacaatcagatgtggaagaaaaggcacgacttaaagttggaacttatatgtaaaagggaagtagagcataaaaatttggaaaattcatagcctatccatgtggtagagaaggaaagcctgttttcatgggaagaattcaggagagctgtggtgcaaccacttgctagagagattagcatgactgaaagaaagataactgccaatattcaagagaatggggaaaaggcttcaaaggcatttcagagatctttcaggccacctgatatggtttggttttgtggtaccacccaaatctcatgtcaaattgggggaggggcctggtaggaggtgattgaatcatgggggaggatatcccccttgctgttcttgtgatagtaagttctcgagatctgatagtttaaaaagtgtgtagcatttctcttctctctctctctttttcctgctgccatgtaagacatgccttgcttccccttcaccttcttcaatgcttgtaagtttcctgagggctcccagtcatgcttcctgttaagcctcctgtggaatcatgagtcaattaaacctattttcttcataagctayccagtctcaggcaatttgttgcag

SEQ ID NO: 945479 - DNA, 691 bp, Homo sapiens
aagtgatacttcaaagtatggcactttggcatgctgagcactttaaattaaaggattaaaaataaaaatatcctggagggttgcatcattcctggaggtactgcaataccaagtcagtgtgtggagtggatggagcaagctcctactctatctccctgctccaaaaatccatttaatatattgcccttggatagaggacatatcaaatattaaactgataagaacagatactacacttgatcttagccaaaatatctagaagcaataaattaaaggatgtcagaaggcctcagaagcaatctcagaaccaaggtctcttagattttctgccttgctgtctcttacccttcattctgtcttgaagcaagtcatagaaaccagaattcctcttccccaaggtgggtcatagaaactagaacttctcttttccaaagccagccataaaaactagaataattactgtaacctttctttactgttctggctaggagctggacataaagaaattctctgtcttatccttgtgcaatattaggtcagaagactgtcattccagaggggtcctgcctcatccatacctaggaggaagaaatgctacaacagagagggcaagaagaaactgcataggccttgctgggcttccccacgcagyctattagcattgggtcatactcttttagtccaatcatat

SEQ ID NO: 945480 - DNA, 551 bp, Homo sapiens
tgaagtgaggattttctgaattatctaatatcatctaggttttctttaaaattttattttgttcttcagttcaagcatcttctcactaatgtttttcactataacagagaattcatttcaatttgagttggttctctcaatgatctattgatcattacaccctaactctccttccttggctcaaacaatattttccctataacaaaggcaataggacacaaaattcacatcctgctgggccttttttcatcaagtcagggtgatataaaaacattggaagtcttttcaccaaaccctgactttattgaatgctagtagaagatgtagaattagagacatctgatttgtttatcaccttagcagaaaaaccacagtccaaaagacaagcaaattaagaatggagcttaaccatgcctccattgggaagtctagactttgagccaggtacagtaagaaaaattakcctctgattcattaagtttgccacatgacttattttgatattttggatacattaactcacttaggagaattcagaaaagaatgggtga

SEQ ID NO: 945481 - DNA, 676 bp, Homo sapiens
ctttcaccattgcaattccsctgtcttgataaatgggctctgtctgggcagcaggcaaggtgaacgcactgggtggttacaaatttggcgtgtcagccgggaaagctcttgtggctacctgcctgttgttcggtggcccccgactccagcgatggatccagaagccagcccaagtggctgcctagttctcttggactgggggctggctctggtactctctctactggctgggcactgctaactcaatgcccatggatttaattgcaatggagaaataatcgtggggagacatcccctaactatagccctatcatagagtgtctgcctgtagccctattgtggggtatctgtctgtctgtagccccattgccaggtgtctggattgatgagtatcctagccactgccaacgcctccttccttctcctgaccggttctgtagccctgtggtggggtgtctgtagctccgttgcggggtgtctgtttgtagctccaccatgaggtatctgtgtctgtaatcccactgtgggttgtctggctcctgggcggtctcagttggctctttctaactagtagaaagagtcttggtttcagagacttctcaatcaggaacacttcgaggaggtttcttaagtggagaataggaggatagtttggaagggatactcttggagttct

SEQ ID NO: 945482 - DNA, 729 bp, Homo sapiens
ccaagataaattgaaaactamcagggagacagtatgtcaatttcaaagatactggtattataatagctgtggttttaaaatacaaatcccagtcattcgctttgtgggaaaattggtacaagaatatttgatggctaaaagactgaagagcaccaaggctccaacacaagaaccgacagtctggagatgccagctcctggcagggaagagacctcggaaccagttcagctttttgctctgtcactgcactctgccatttagttctggttggggagaaggcagagactgactgagctgacatctctgactgtgatttttacatcttcaaaaacagcagcaatttctccattatggtgtcctttaagattgatttcattgcaacatctgagacttgtattatctaatgacacaagagtaacatggtaacaaaagcgctcggggtcaccctgtttgactatcttcacagttagccttaaaggcttcagtctgggacagttattctgaggtttcttaccgataatgacaggaggcagacaaatgcctagatagacacgggcaggtcctggcgaaaccccacctccaagttgcagacagtttaaagcctgaaagccaagctacaagttaaatcctcggactggattgagaccccacctgcccgtttggcacactttcctctgattgatccccaccgttcacctatttttcatatacccacactttcctaattgg

SEQ ID NO: 945483 - DNA, 552 bp, Homo sapiens
attgtttggaaaactaagtctcctctctcgaagactgaaggtttttgccttttgttgaaatccttgagttatcattttgtttaagtgaatgacttattttacaatgacttgtgatccaattttgtgatagcaaatgtcttaacctttgatatttgacaaacttctcaaaatcaaattataaattttgtatttttctgacttaattaatcctttaagatgttaggcttcctaaagtccaaagttgacatatttgacgtatttggtataaaaattatataggaagcatcgtcaaatctgaaatggtgtttggttttctttgggttgtatttgtataaatatgttattggtatgtgttccaaaattatgagacactcctatcattctgatatgacttagtgtacattttcagtaataattataattgttataataaattattgtgtgccacagaggtaataaatttctttgtcaattgygtctttgactatggctgccctaaaactttttgtcatccatggacaattattgtcttgttttgatcctccttagaag

SEQ ID NO: 945484 - DNA, 593 bp, Homo sapiens
taatccctgctacttgggaggctgaggcaggagaattgcttgaacctgggaggyggaggttgcagtgagccgagatcactccactgcactccagcctgggcaacacagtgagactctgtctcaaaaaaaaattaacatacaaaaatcggtagtgtttttatataccaccaataataaactcagcaggaaagaaatcaagaagacaatcccatttacaatagctaccaaaaaaaaaaaaaaaccacctaggaatatatttaacaaagaaggtaaaagacctctataaggaaaactacaaacactgatgaaaatgaagaggacaaaaacaaatggaatgatatcccatgctcatggattggaagagttaatatcactaaaatgattatactgcccaaagcaatctatagattcaatgtaatcctatcaaaataccactgtcattttcccacagaaatggaaaaaacaatcctaaaatccatacgaaaccaaaaaagagcccaaatagccaaagcaatcccaagcaaaaagaacaaagctggaggcataacattacctgatttcaaaatgttctataaagttgcagtaaccaaaac

SEQ ID NO: 945485 - DNA, 571 bp, Homo sapiens
ctaattttttgtattttttgtagagatagaattttgctatgttgcccaggctggtctcgaacacctgggctcaaatcagtctgccctcctcggctcctaaagtgctgggattataggtgcaagccacaacaccaggcctctaatccagtcttgatgtctgcttctcagaggatccaaaccaacacattttaccactcactttgggaacgcttgtagggaaaggaaaaaacagaaacatttcttctatcctcctatgttctccaagggctcgggccctgcaaattagacagacaaaagacagaataacaagagaaaaataacaaagtttattaatgaatgtagagtgaatacatacaggagaaacacagtgatgagtcactgacagattgtggaggccaaaacaactccgtcttggatgctaatctgccatgttcacttctgattaattccagttcctcgaaggcctctaagatttctagtttatctattgttccttgtgttactttgcccttaggtcagacaaccttratattatcagacttcaattgtcccacacatcccttcagagtca

SEQ ID NO: 945486 - DNA, 557 bp, Homo sapiens
agatgtctgtcggcccctactttgacatgtctcccaattaggctatacaggggtcagggacccacttgaggaagcagtctttccgttctcagagctcaaacacagtgctgggakaaccactgctctcttcagagctgtcagacagggatgtttaagtctgcagaagttgtctgctgccttttgttccgctatgccctacccacagaggtggagtctagaggcagtaggccttgttgagctgtggtgggctccgcccagttcgagcttcttggccgctttgtttacctactcaagcctcagcaatggcagacgcccctcccccagccaggctgccatctcgcagatggatctcagactgctgcattagcagtgagcaaggctccatgggcatgggcactgctgagccaggcatgggagagaatcaccttgtctgccggttgctaagaccttgggaacaacagaatattggggcaggagtgtcctgcttttccaagtagtctgtcatggcttcccttggctaggaaagggaaaccccccaaccccttgtgcttcccggg

SEQ ID NO: 945487 - DNA, 533 bp, Homo sapiens
ctgcaaaggacatgatttcattcctttttatggccatgtggtattccatggtgtaaatatatcacattttctttatccartccacgttgatgggtatctaggctgattccttgtctgttgttgtgactagtgctgcaatggacatacaagtgcaagtgtcttttttgtagaacaatttattttcctttgggtatatacccagtaacgagattgctgggtcaaatggtagttctatttttagttctttgagaaataatcaaactgctttccacaggggctgaacaaatttgcattcccaccaacagtgtctaaggtataagcgtagaactacattttcaacttatctcctctaacaggagtctcccaatattttttttaactgtgagggcttcctcatcatagttctacctgaagtatttgctcatagaaaaaatggataaagggcagacatggtggctcacacctgtaatcccagcactttgagaggccaagatgggaggactgcttgaggccaggagttcaagaccagcctg

SEQ ID NO: 945488 - DNA, 627 bp, Homo sapiens
tgttcaccctgctccgaagaactctgtcttccactggcccctccacctcctccccattctcggtagccccagcctgtcccccttgcccctttcttacattccggggggaggagggcgctgttcagaggggaggagggcgctgttcagggagcgaaggggagcccccttgtgtctagaaggcctctccccacccccaccccgtgtgagtttgtactgcaaagctccttggcatccttgcctgagttgggtgttgggaagctcaaattgcagctacaaactggctggcagccaggggccggctatttaaaagcgcctgctctcccggagccccgtagtctctttggaaacttctgcaggggaaaagagctaggaaagagctgcaaagcagtgtgggctttttcccttttttgctccttttcattacccctcctccgttttcacccttctccggacttcgcgtagaacctgcgaatttcgaagaggaggtggcaaagtgggagaaaagaggtgttagggtttggggtttttttgtttttgtttttgttttttaatttcttgatttcaacattttctcccmccctctcggctgcagccaacgcctcttacctgttctgcggcgccgcgcac

SEQ ID NO: 945489 - DNA, 568 bp, Homo sapiens
ctaaatgatagttcattgaatgtaaaaggcattcattcgttcaatctaaaatagtaagatgtaccatttagtttaggttctattaagaaaggggcgggaacgctgctaagaatcacatgatcctgtcatttgtaaacagcatccaaggtgttccaaagaccaaaggccccaggaagaaagtcttgctaaagagatgctgggccagaattgggtctgggttggaagggaatcagcaagcagccaagtctaaggcagtttcaccctaaacccaaggcctgtatttagaacatttcaaatagacactctgtgactttgatgaaaatcaagctggcagctccagagaaaatcagcctgggattgccaaatcacatgattattttattagattgcatgctatcttgaaatggtaaaataggctgggcgcagtggctcacacctataatcccagcactttgggaggccgaggcaggtgggtcacctgaggtcaggagttcaagaccagcctsgccagcatggtgaaaccccatctctactaaaaatacaaaaattagccgggcttgatggcaca

SEQ ID NO: 945490 - DNA, 495 bp, Homo sapiens
tgcccgttcagaaaccttgtgccatcaagccacccaarcactcttaaatttccttgccacctgtggctacaaggtttccaaaccaaagctcaactctgctcagaacaggctaaatacttagggctaaaattatccaaaggcaccagggccctcagtgaggaacgtatccagcccatactggcttatcctcatcccaaaaccctaaagcaactaagagggttctttggcataccaggcttctgccgaatatggattcccaggtacggcgaaatagctaggccattatatacactaatttaggaaactcagaaagccaatacccatttagtaagatggacacctgaagcagaagcggctttccaggccctgaagaaggccctaacccaagccccagtgttaataagcttgccaacggggcaagactttcctttatatgtcacagaaaaaacagaaatagctctaggagtccttacacaggtccaagggacaagcctg

SEQ ID NO: 945491 - DNA, 622 bp, Homo sapiens
tttttgtgtttttagtagagacgaggtttcgccatgttggccaggctggtctcgaactcctgacttcaagtcatccatctgcctccgaaagtgttgggattacaggcgtgagccaccacgcccagcctcctgcatccttcttaaagtgtggctcctggagagaaacaaaggatcgattccaggtagggtgtgagccacagagaacagaataggactattacctccttcactctagacactctcccacaattaatgcaaccccaaaccgttagggcctcagccgagtcctgctgtgttaccagccgctgaccccgtgccgagccactcccctggagcctgtctgcatgaggctggtttctggcacctggtgacaggtccgtggattattccagtgaacatcatcttgtccagctccacctgtcactctacactgtggagactgtttggctccagtgtctgacacatctgcagtgttcagacaagccacacgcacacgcagcccttctgtatttyccgaggcctgaacagtggtgtttcagattttcaatctgccaacaatttttaaatctggagatttcacagacattggaatttgtggcttcttttgaaaagtggggagcct

SEQ ID NO: 945492 - DNA, 589 bp, Homo sapiens
gtgtcatgaagttctcgtactgtgtttttcagtttcgtcaggtcatttatgttcttctctaagctggttattctagttagcaattcatctaacctgttttcaaagttgttagcttccttgcatttggttagaacatagtcctttagctcagaggagcttgttattacccaccttctgaagcctacttctgtcagttcatcaaacattctccatccagttttgttcccttgctggcaaggacttgtgatcctttggaggagaagaggctaatggtttttggaagtttcagcgtttttgcactggtttctccccctgttcgtcgatttatctacctttagtcttttatgttggtgaccttcagatggggtctctgagtggacatcctttttgttaagatattgatgctattcctttctgtttattagttttgcttctaacagtcagggccctctgccacaggtctgctggactttgctggaggtccactccagaccctgtttgcctgggtatcaccagcggaggcwgcagaacgtcaaagattgccacctgtttcttcctctggaaggtttgtcccagaggggcacccgcc

SEQ ID NO: 945493 - DNA, 591 bp, Homo sapiens
ctcgggaaagtgtctgtccctctcaaagcctcagcttcctgaaaagtaaaatggaccacttagtcgtgaagcttccagctttttcttggcttcaacagagcagcaagccccttctagacactgctccaaacaaagagagaactccaactcagccttctaaaagagaaccaagcccatcccacctccttccattccccagaacagaccctcaggcccccttctgagcgacagcagacactccctcgggagaattaaaatactatttttcaataaatgaagccccggccctgcaccagccctggaagactgtgagctgggcgaggtggcttcctgcatgtgcctcacttattaagacattgccactctgaagagtggagtcattcccaaggcccccgttgtcactggcaggcagcggttgactgacaagtgtcagttgcagcttgctgagcagcagaggccaatagactgtgaaacaaggagcagatgtgctaatgacaaaactttccaaactgaaaacacaaggagcagattcccrggaaaggtgtttccccaacctctacctggtgatgggacgaatgagaaaaacactag

SEQ ID NO: 945494 - DNA, 616 bp, Homo sapiens
gatttgagaggactgactcagattttgaaagaagttctgctgtgggtaaaatgctgtcaagcagcatcgcatgctacagagaaatctttcatgaaaggaagagtcaatttatgtgacaaacatcattgttrtcttatttagaaaaattgccacagtcatctcaacctgcagcaaccaccacccaaatcaatcagcagccatcaacattgaggcaagaccctccaccagcaaaaggattactactcactgaaggctgacatgattgttagcaatttttagcaataaagcattttaaaattaaggtgtgtacatttttttaggcataatgtaattgcactcttaatagactatagtatagtgtaaacataacttttatatgcactgggaatccaaagagtctcgtgtgacttgctctattgcaatatttgctttattgcagtggcctggaaatgaacccacaatatctctgaggtatgcctgtactttgttgtagcccaaactgtctaaaatacctgagctgctagttgctgtctctctgcctctccctgtgctgggtaaaaatgtcttctgtgaccatgctgggctttcatttcagtgggctgtcttcactgcaggg

SEQ ID NO: 945495 - DNA, 599 bp, Homo sapiens
aatctaaaatagttatttttttgagaaattgccatactatttttacagagtagctgtaccattttacattcccgccagtaatacagaagcattctgatttttcacatcctcaccaacacttattatttttaataacagtcatcccaatagatgtgaagcagtatgtcattatgattttgatttgcatttccctaatgattagtgatgttgaacatcttttcatgtgctcattggtcatttgtgtatttcctttggagaaatatctgctgaagttctttgcactactcccccttttttttgcgggagattggaattttattaatactcaaatcagtctccctgagcatttggggagcagagtttttagggataactttgtgggtgaggggaggccagtgagccgggagtgccgattggttggggatgaaatcatagggagttgaagctgtcttcttgtgctgagtcagttcctgggtaggggccacaagatcagatgaatgagtttattgatctgggtggtgtcaactgatccattaagtgcagggtctgcaraatatctcaagcactgatgttaggagcagtttagggagggtcagaat

SEQ ID NO: 945496 - DNA, 462 bp, Homo sapiens
tgtcagatgcacttggctttctcaagccctcgyggggaaatatagatcacatcccttcccctggggtgggcagagagtaacgtaatatggtccagttagggaaatattaatagaagctaacttgcagacaggaagcaattaggatgcaggaggaagacatatgtcatcaagggctagatcatgtggtgtcagccaggggatgtgaaacaggcatgaaaagcgcttgacaggcaatgtccaccaccaccctgttcccacattatccgtaagtcttgctaaaggcaagattgctgttttctggaattttcaaagacagacagttggactacctgcagtcatctggaatttggccagaacaaaggaagtaagcaaatagaagactcccaaataaggtatatatttatcatcaaagcagatgcccaagcctgtttacctcactcagaggaggcgcccacggcaact

SEQ ID NO: 945497 - DNA, 619 bp, Homo sapiens
tattatttttattgaccttctctaatattcagcttttggcttcattaagctttattgtttttgtgacttctatttcattgaattccaatctgatctttattatttcctttcttctgcttactttgcattttattttttcttctttttctggcttcttaaggggaagctgagatcatggatttgagaaatttcttctccgttactggaggtatttaatactataaatataatactagtactataaattttagtactatacatgtaatactagtactataaattttagtactataaatttcccctgaagtacttctttagtgccatccacaaatttcaatatgttattttttaaattttcaattagttcagcatactttctaatatgccttttgatttcttcttttatcaatgggggtgtttagaagtgtattattttgttggcaagtatttgggaatttgccataaaactttttattattgattcccaatttaattccattatagttagaagaaatattcagttgggcttsaattcattcatacatattgagacatgttttatggtccacaatatagactatcattttaatgttccatgtgcatttgaaaaaaaaatgtg

SEQ ID NO: 945498 - DNA, 438 bp, Homo sapiens
tttacaataatccacagttgttcttcaagattcgttcagtttttgcatggccccaacaggcatgctaaatacagacgtgttagacatcaccactcttgtatctctcaggtctttgayggtggcactgatctctgcatttcctctagggatgtgatgttccttccatcttggtaaagaggggaagttctaggagcttccacttagctccttgtatcacaatcacccttaccttatgggtcagagagctaatgtggggattcttccagtttctaagcacatttattctaattatacattcaggaactgagagaagagccacagggtgggtttgtggagcaaccaaggtcactgtgagtggaacttgggctgagactccatctattacagggggaccataagctcctactttgactggtgggacacaatgatgtcatgagt

SEQ ID NO: 945499 - DNA, 438 bp, Homo sapiens
tttacaataatccacagttgttcttcaagattcgttcagtttttgcatggccccaacaggcatgctaaatacagacgtgttagacatcaccactcttgtatctctcaggtctttgacggtggcactgatctctgcatttcctctagggatgtgatgttccttccatcttggtaaagaggggaagttctaggagcttccacttagctccttgtatcacaatcacccttaccttatgggtcagagagctaatgtggggattcttccagtttctaagcacatttattctaattatacattcaggaactgagagaagagccacagggtgggtttrtggagcaaccaaggtcactgtgagtggaacttgggctgagactccatctattacagggggaccataagctcctactttgactggtgggacacaatgatgtcatgagt

SEQ ID NO: 945500 - DNA, 755 bp, Homo sapiens
ttcttccagtttctaagcacatttattctaattatacattcaggaactgagagaagagccacagggtgggtttgtggagcaaccaaggtcactgtgagtggaacttgggctgagactccatctattacagggggaccataagctcctactttgactggtgggacacaatgatgtcatgagtccttaggaattagcagcatctcagagccaatgtctagtgatccctaaggagtctgagtagttccctttctccagtgcttggtcactccagtaagggactgcaaatctcttgagggaagtcttggaggaatattaactgcatatacaatagcaaagcttcagagtcctgccccttcaaccatgggactcttggcctgtaaattggcttaggactggaaactgggtgagagaccatgacttttcattgcagtgactcaatccaaatcttaaaaaaaattttattattattattatttgttttagatttagggggtacatatgcagattttttacatgagtatatattgtcatgttgaggtttgggctccttatgatgccattgctcaagtagtgaacatagtggctgatggtagtttttcaacccttgcttctctttcagaacccccagtgtttcttgtttccatctttgtgtccatgcgtacccaacgtttagctcctacttataagtgagarcatgtggtattttgttttctgttcttgaattaattcactaaggatgatggcctccagctgta

SEQ ID NO: 945501 - DNA, 761 bp, Homo sapiens
ttcttgtcaggttcatgtttcacttatgtatctatcctctctcagggacacatttcctgaaggaatttatattgtttttattgatcaccgtagaaaattaaagttatattcagcaagaataaaatatatcattcttgaattgctaaacactttgggctttgatacccatgagaaacagttatcagaaaatgaggtcacatttttgtgtatccgaaagaagtatttatatgaagatgttggggaggtgggcaagggaataataaaaattacatattagtcaagtaaacaagctaaagaactttcagactaaataggaagacaactatgtctcaggcagcaagcaagaaaaatttaacgtataaaagtgccaagatgattctaaggtattgcactataatcagaataagatagctgtgtcagagtcaaatcttagcaaaactccaagtttattatgttttctctttggaatactcctcctctactttcagtgacacctcttttatgccagcctctgaccccagccccaggtcactgagaacacggcacaacacccgtatctgcctctgtattttttccctttccttcatcttccttcagtcaaatattattagtcctgtagttcactaattctaccatctgtcatagcaakgatggtttttgatataaaatgaaactctatttattttatgatacatacctggcaccatgcctggaaaaacatgcatttaaaaaattctttcaataattttctccctactcag

SEQ ID NO: 945502 - DNA, 799 bp, Homo sapiens
tgatttacacccattgtgatttggtgtgcctgtctctgaggagttggcacagatctcaccacgtctgaaggcagtctctgacacagacgttttttattgtggtgttcattgtcaatattcacccaaagcttgagtcttctggtgggtacccagacaggggattgatgacgtcctggtgaaacacaagcatttcctcttccccacgttataattgtgccaggttcccaggtattgtttgggagtttttccataatactggcttgccttcattttaggtgaattttttgcctgtaatatggcgtgtggctgcagttaattatctttaggaacattttttaaaaaaattaaggtaaacaatgccaaatgtaattgggagtgtggagtagttaaatcatgttttggttgttctgactgtttggacaattgggtttttaaactgtgattgtcctgttccaccacagcctgtccctgaggattgtaagggattccagtgatatgggaaagtccccactgttgcacaaatgaatcaaaaaccttactaacatatccaggggcattgtctgtctttatttgatatggaagccccataacttcaaagcaagaatacacgtagtttttaacatgagctatgccttcccctgtttggcaagtagcccagataaaacctgagaaagtatctaaagagtcatgcaaatatgaaagtctgccaaaagagctaacatgagtcacatccatttgccataaagcattaagagttaggcctctaggattaacrccaggttcctgatttggaagtaca

SEQ ID NO: 945503 - DNA, 701 bp, Homo sapiens
ccattggcagaaaggacaaaaacagtgtgaccaagcttctgaatccaaagaaaggcttaactctgttggatgaatgaacacatcaccaagcagtttccagaaaacttcctgctactttttaactgaagatatttccttttccaccatgggccacagtcctctaccaaatacctctttgcagattctaagaaaacactctttcgaaactactgaatgaaaagaaaggtttaactctgctagatgaatgcacatgtcaccaagaagtttctcagataacttgcttctagtttttatcctgagataagcgctttctttcaattggcttcaatgaactcccaaatgtctatttgcaggattgagagaaacagtgttttgaaactgctgaattagaagaaaggtttaactctgagagatgaatgtacacataatgaattggtttctcagacaaattccttcaagtttttatcctgcgatatttgcttttttgccattggcctcaatgagttaccaaacgtccattccaagaatgtacaaaaactgtgtttccaaactcctgataccaaaaacaggtttaactccctgagatgaatgcacacatgccaaatgggtttctcattggactgctttctagattttatcagaaatatttcctttttcaccartgacgtccatagtcttccacatatctcttggcagattct

SEQ ID NO: 945504 - DNA, 604 bp, Homo sapiens
caaagcgctccaaatatccacctgcagttactacaaaaagagtgtttccaaactgctcaatcaagagaaaggttcaactctgtgagttaaatgcacacatctcaaagaagtttctgagaatgtttctgtctagtttttatgtgaagatatttccttttccaccagaggcctcaaagcactccaaatatccacttgcagattccacaaaaagagtgtttcaaaactgctcaatcgaaagaaagtttcaaccctgagagatgaatgcacacatcacaatgaagtttctctgaatgcttctgtctagtttttatatgaagatatttccttttcagctataggcctcaaaatgctccaaatatccttttgcagttactacaaaaagagtgtttccaaactgctcaatcaaaagaaaggttcaactctgtgaattgaatgcacacgccacaaagaagtttctgagaatgcttctgtctagtttttatgtgatgatatttccttttccaccataggcctcaaagcrctcaaaatatccacttgcagagtctacaaaaggagtgtttaaaaactgctcaatcaaaataaaggttcaactctgtgggatgac

SEQ ID NO: 945505 - DNA, 652 bp, Homo sapiens
ccctgggctgaaaatgtaaaaatgtgctcatccttagcatgtaggtgtgatttaacaccatgctactggatgaaatcaccaaggcattgagtgtaagtaggtagaaaaaaaaataaccatgaattctgggacatacccatccaatgtttagaaactgatgatacaggagctaaaaagaaattatttaggcagatatgagggtaggagagtcctcggcggaatttcccttttaacaaaaagcagcccccaaatcatttctttttcttttcttttctttcttttctttttttttttttttttttttgagacagagtcttgctctgtcgcccaggctggagtgcagtgtcctgatctcggctcactgcaacctccgcctcccgggttcaagcaattctcctgcctcagcctcccgagtagctgggactacaggtgcatgcagccacgccccgctaaatttcgtattttagtagagacagggtttcaccatgttgcccaggctggtcgcgaactcctgagctcaggcaatccgctggtcttggtctcccaaagtgctgggattacaggcgtgagccaccgtgccgggccaaatcatttcttttttaacaaacagcatcctgaaaaatcgagctgcaraaaaagataaggaagccgg

SEQ ID NO: 945506 - DNA, 613 bp, Homo sapiens
tagaaggatggttaccagaggctgggaagggtggcgggaacttgcgggaggtgggtaagaattgttaataggtccaaaaaagaattgaaagaatgaataagacctactrtttgatagcaaaatagggtgactatagttaataataacttaattgtacattttaaaataacttaaaagtgggcagggtacggtagctcatgcctgtaatcccatcactttgggaggctgaagtgggagatcacttgagctcaggagtttgagactagtctgggcaacataatgagaccttgtctctactaaaattcaaaaaaattagccggatgtattagtgcttaactatagtcccagctacttgggggacagaagcaggaggatcgcttgagccaggggggttgaagctgcagtgagccatgatcacgctactgcactctagcctgggtgacggagcagtatcttgtctcaaaaaaaaaaaaaacaagatgaataaataaacaaatacataaataaagagtgtaattggattgtttatagctcaaaggataaatgcttgaggggatggataccccattctccatgatgtgattatttcacattgcaggcctatattaaaaca

SEQ ID NO: 945507 - DNA, 643 bp, Homo sapiens
ttggcataggtctgactttcatcatttctcacttgggcttttgcttttgtccctcaaatgtggcccctgcctaccttctctgcatcctctaattcatccttcacgtagccatcaaagtcctgctcacataccaaagacctctaatgtctccccactgcctataagacaaggccaaattcttagcatgtagttacagctccttcaaggaccttccccattatatctactttctcaatctcttccgtagacactactccccttccttgtaacctgaaacccagtcacagaaacttactctaggtgtccctaattaactatacttccaagattttgcataagcccctccttctttctcaaataatgtcttttatctccctcctctgcctaccgaactctacagtagcatagatggctggctggccaacaaaagcagtgtaaaccttccatattgcagagttgtcactcaatcagggaccacacttcccagcacccattgcacataggtgggaccacgtgaccagcacctaccaatagaatgtgagcagaattggcatgtgacacttgcaggtaatgtcattcagtttgrggttcacaatcctccacatgcagtctctcttcactcaatggccagctggatttagag

SEQ ID NO: 945508 - DNA, 624 bp, Homo sapiens
agttcaagccgatgctcatttatcatgctgaaaatcctagagcccttaagaatgatgctaagtctgttgtgtctgggctccagaaatggcatagcaaagtctgsatgacagcacatctgttcacagcacatctcttcatagtttattgaatattttaggcccactgttgaaacctatggtacagaaaaaaagattattttcaaaatcttactgctcattgacaatgtacttggccacccaagaattctgacggagatgtacaaagactttaaggttgttttcacacctgctaacacaacattcatctgcaaccaatgaacccatggaccaaggaaatattttgactttcaagttttattacttaagaaatacattttgtaaggctataattgccatagagagtgatttcttctgatggatctgggcaaagtaaattgaaaaccttctggaaaagattgaccattctagatgccattaagaacatttgtgattcatgaatatttgtgattcatggggaagaggtcaaaatatcaacatcgtattagtcagggttctccagagggatagaactgataggatatatgtatatataaaagggagcttattaaggagagttaggtcaca

SEQ ID NO: 945509 - DNA, 621 bp, Homo sapiens
acccagtaagatcagaagcaaatctcatgttagttaaggtaggarggaattcaggcaaagggaaattaaagtcactaaacagcaagaatctaagattgctctttattgtcatcccggtgatgattcctatttcacctcttttcttcaagagggtctcccattggggtaactaaaagcaataagaactctggagatgcacaatgcaccccttatggttaattttaattctggatagatctagtcattctcttccaatccatttgtttcataattatttgccgagtgcctgctatatgcactgaggcataaaattgcagccattcattcagatgacaatttaagcactctttattttgggactgctttatacaatttaaatttatgaaataaataaatgttgaggtacagaaaagtttgtatttctaaaaaagaattttgaaacaaatcaaaaccacagggtaaaaatgaactccttgtgtatatttaattgtttaaaaattcacaaagttttgagtagaaagcttgggaaaaaacaaaacaaaacatgaaagcaagagaaaaggtcttaggtagatccttgcccaccctcctaccacctccttccccttcccttgcccatat

SEQ ID NO: 945510 - DNA, 775 bp, Homo sapiens
tgaagttgtggtgcactgaaggcaactagagccaaacaaaacccaaacccagctcaactactgactagmttgactcaactcccatactaattgcctgaaagaagaagatatgtgtctgtttcagggtatagataccacttacctcagtctttattgtttttctatgcacagcatgcaacattcaataacgaattatgggctgggagttatagctcatgcctgtaatcccagcactttgggaggccaagacaggaggatggctttaggtcaggaatttgagatcagcttggataacatagtaagactccatctttgcaataaaattaaaaattagccaggcttggtggcatacacctgtggtcccagctacttgagaggccaaggcaggaggatccgttgagctcaagaagtcaaggcttcagtgagctatgatcacaccactgcacttcaacctgagtgacagagtaagaccctatctcaaaaaaaaaaaaaaaaaattacactcacacaaaaatgagacaaacaatccattgtcaagagataaagcaatccacagaaccatactggagacattagacagggactttaaaatgactatgattgatgggttaaagtcagtatgaaagtttgtcaaatgctttcctaaaatctagacttaacatatcctaattttcctaaagcagttgacattttaagaatcggtatccatagttgtggccattttttttttttttaacttcttggagtctacttcattagaaactggtctataata

SEQ ID NO: 945511 - DNA, 775 bp, Homo sapiens
tgaagttgtggtgcactgaaggcaactagagccaaacaaaacccaaacccagctcaactactgactagcttgactcaactcccatactaattgcctgaaagaagaagatatgtgtctrtttcagggtatagataccacttacctcagtctttattgtttttctatgcacagcatgcaacattcaataacgaattatgggctgggagttatagctcatgcctgtaatcccagcactttgggaggccaagacaggaggatggctttaggtcaggaatttgagatcagcttggataacatagtaagactccatctttgcaataaaattaaaaattagccaggcttggtggcatacacctgtggtcccagctacttgagaggccaaggcaggaggatccgttgagctcaagaagtcaaggcttcagtgagctatgatcacaccactgcacttcaacctgagtgacagagtaagaccctatctcaaaaaaaaaaaaaaaaaattacactcacacaaaaatgagacaaacaatccattgtcaagagataaagcaatccacagaaccatactggagacattagacagggactttaaaatgactatgattgatgggttaaagtcagtatgaaagtttgtcaaatgctttcctaaaatctagacttaacatatcctaattttcctaaagcagttgacattttaagaatcggtatccatagttgtggccattttttttttttttaacttcttggagtctacttcattagaaactggtctataata

SEQ ID NO: 945512 - DNA, 472 bp, Homo sapiens
accaaggcggtggcccacacctctccctcagggagagatcagaactctgtccatagaaaatgggcaggagtggccgaaggttccagatgggaggtcctgcccagtgaggaggaatgttttgggatactgcttaaagaggcaatctgggcacattctggcaaagcagctctgctgtgttggggggaatctttccttgtccagaccatttggattttccaaagctcacaggctggaatggctgagttgaccaaacagcagagatggtggcctgcctctgtcctccgggtctctgacccatctcaggcaggctccaccctgttgctagtagctggctggaatccaagccagtagatcttatcttgtgaggtaccgtggaagtgaggcccacagactgacactggccccctggattcagctcccttcctaggggtatatamaggtctcctgccttgctgaggatcccaaagccaga

SEQ ID NO: 945513 - DNA, 545 bp, Homo sapiens
ggggtgggctgggtgaagctgccactcctggcctggatatatggagccctgggcagtcctgcctgtcccatggctttgctggacacaacaagaactgccagatgtcatttgtgtgggaatcattttgctgtttgagcgaagttggatttgttagtgtgctcaccagtgtggatggatgaggtctgaccaggaggctgcctgttgtctgtctttcacagagggccctccacacccagggtagagctggggagaaggagtcctggggaaatactgagttaaacaaggctgatgtatcctctgcaggacttctcagtgcctttagcatggcgggtgtaggtgagtctaagagatggccaggtagcctaggtgtggatatcaccaggctagggctgctgtctgtctcctctgctcacgctcctgtgcagggagggacttgagggtgggcctggggaaactgtggaaagtaggagtctctgtccccagacactgtctctgaactggggccaagattcagtcattkcatgtccccactaggcagtgcttac

SEQ ID NO: 945514 - DNA, 627 bp, Homo sapiens
gccatcaggtctttggggattgatagaattaagcccatggaaygtgcatttgcttgctgtgaagccgcaacaatctcgctgccacagggcagaggacgttctgaactgagtgtcccctcggctccctcaccggcctcctgcaccagcagatggtgcctgatgtggtggctggcactggtgccccttgccctctgagcagcggtaccatcaaaacccatcttcccagcagctcaggatcaccgcggtggagtttccagtcgcagatgcccttggcaggggctgtgggactgcaggggagacggaggtctgggccctaccatgtgggggcagcatgcaggaggggcccattcctgccccccggcaatacaagaagcctacgggggtgcccaggggtcagggacctgagagatgtgctcactgagacctagcatgctcacccccagctgccagagggggtagttcccaaagaggggcaggccctcagagtgagctcctgtcctgagatgggcaagggaatattcctgggacactgcagaactgttaccaagccaggcacagatggggccaggcccctcggcctctaagacaaggccggcccatggatggagcacgatggccctgaccttg

SEQ ID NO: 945515 - DNA, 629 bp, Homo sapiens
agttgaggtgggaagaactggttgagcccagaaggttgaggctacagtgagctgtaattgcactactgcactctagcctgggtggcccccatctcacacacacamaaaaagagcgagaccccgtctcaaaaaaaaaaaaaaaaaaaaaaaaaaaaagggagttcctcatttgccatgagtggacacctgcttctttactgcttcaaagtgaacacagctattccttgtaaagggttggttttactgtaaggaaatctagaacacctgtgtgtgaatgccccctgattttcaaagaaatgagtggttgcatcaaaatcaagcttatatttgtggaaaatcacatgttgccaaattctctcatcaagaaccctttattaactgactaattgtgggccatggtggcaggcacttaacaaagaccatggcagcagacctccctcaactggaaccctcagttaagcgggattttgtttttattttggaactccaccttcagaagggcaaaaatcacaagatgtggtagcaagggtttattctagaaattagcttccaagcagtcgtcagcccagtctgtatgtcttccgcatctataattatagtagcagaagagaatggtgagcctggggcac

SEQ ID NO: 945516 - DNA, 677 bp, Homo sapiens
tgtcgttccagctacctgggatgccgaggtgggaggatcactcaaacctgggagtttgaagctgcagtgagccatgattgcaccactgcactccaktctggttgagagagtgggaacctgtctcgaaaaaaaaaaaaaaagaatggaaggatcaaactgggcatggtgatgcatgcttgcctgtaggcccagcctacaagggacgctgaggcaggaggatcatttgagcctgggaatttgagcccagcttgagcaacatagtgaaatcctgtctaaaaaagaaaaaaaggaagaatcaaataattgttccaaagtctttcaaaaggagtattgagtcccaactcggcactttcctgagcagggatatgtctcctctccttctcactaaggagccagaaactcaccccttctcactaaaaaagtgagaaaaataaaaatagctcagagaactttgagctatgtgaggcacgcagaatttatcaggtccggagacatgaatatgggacttcaggcagggcatgatggctcacgcctgtagactcaggaggccaaggtgagcccaaggtgggaggatcactttagtccaggagttttgagaccagcctgggcaacatcaggagatccttgcctcctcaaaaacttaaaaaaaaaaaagctgggcatggtggcacacacct

SEQ ID NO: 945517 - DNA, 677 bp, Homo sapiens
tgtcgttccagctacctgggatgccgaggtgggaggatcactcaaacctgggagtttgaagctgcagtgagccatgattgcaccactgcactccagtctggttgagagagtgggaacctgtctygaaaaaaaaaaaaaaagaatggaaggatcaaactgggcatggtgatgcatgcttgcctgtaggcccagcctacaagggacgctgaggcaggaggatcatttgagcctgggaatttgagcccagcttgagcaacatagtgaaatcctgtctaaaaaagaaaaaaaggaagaatcaaataattgttccaaagtctttcaaaaggagtattgagtcccaactcggcactttcctgagcagggatatgtctcctctccttctcactaaggagccagaaactcaccccttctcactaaaaaagtgagaaaaataaaaatagctcagagaactttgagctatgtgaggcacgcagaatttatcaggtccggagacatgaatatgggacttcaggcagggcatgatggctcacgcctgtagactcaggaggccaaggtgagcccaaggtgggaggatcactttagtccaggagttttgagaccagcctgggcaacatcaggagatccttgcctcctcaaaaacttaaaaaaaaaaaagctgggcatggtggcacacacct

SEQ ID NO: 945518 - DNA, 710 bp, Homo sapiens
acaggctcttgctctgtcacccaggctggagtgcagtggcacgatcatggcttactgcagcctcaacctcctgggctcaagtgattctcccacctcaaccccttgagtaactgggaccacaggtgcgtgcyaccatgtcaaaatcattttgtgtgtgtgtgtgttttttgtagagatggggttttgctatgttgcccaggctggtctcaaactcctgggctcagtgatcatctgcccttggcctcccaaagtgctgggattataggcgtgagccactgcgcctggccttttccttaatattaaatgaagtattatttatattacaaaccaattatttggagaaaccccgtctctacttaaaatacaaaattagctgagcgtggtggcacatgcctgtaatcccagctactagggaggctgaggcaggagcatcgcttgaccccgggaggcggaggttgcggtgagccgagatcgtgccattgcactccagcctgggcaacaagagcgaaactctgtctcaaagaaaacaaaaaacaaaaaaatacaaacaaaccaattattacgaaaatgctattggagaaagaaactgtaaaatctgatcaactgaggatctagcagtactaaaaaatatcaccattcaatcaggacaactagcaattctatattatatttagggaagttttctaaataatccattgcaaagtgaacaa

SEQ ID NO: 945519 - DNA, 593 bp, Homo sapiens
ctaatcaagcctgggcaatggcgggcgcccctcccccagcctcgctgcagccttgcagtttgatctcagactgctgtgctagcaatcagcgagactccgtgggcatargaccctccgagctgggtgtgggatataatctcgtgctgcgtcgttttttaagcctgtcggaaaagcgcggtatttgggtgggagtgacccaattttccaggtgccatgggtcacccctgtctttgactaggaaagggaactccctgacctcttgtgcttcccaagtgaggcaatgcctcgccctgcttcagctcgcgcacagtgcgcgcacccactgacctgcgcccactgtctggcactccctagtgagatgaacccggtacctcagatggaaatgcagaaatcacccgtcttctgcgtcgctcatgctgggagctgtagactggagctgttcctattcggccatcttggctcctcccccccatgtgccactcattttaaaagacaactttcttcactaaagtttacctttgccatgaatcaaatgaccatttatgtgtgtgtctttctctacactctttattctgttccgttgttctatatgt

SEQ ID NO: 945520 - DNA, 590 bp, Homo sapiens
agaaattggccaaaacaaaggggctaccagccccatgcaagtccaaaatctagtggggcagtcaaatcttaaagctccaaaataatctcctttgactccatgtctcacatccaggtcatgctgatgcaagaggtaggttcccatggtcttgggcagctccactcctgtggctttgcagagtacagctcccctccagggtgtgttcacaggctggcattgagtatctatggcttttccaggtgcatggtgcaagctgtcggtggatctaccattctagggtctggaggatggtggccctattctcacagttccactgggtggcaccccagtagggactctgtgtgagggctccaaccccacatttcccttccccactgccctagttctccacgagggccccgcacctgcagcaaacttctgtctgggcatctggacgtttccatacatcctctgaaatctaggcagaggttcccaaatcccagttcttgacttstgtgcactcacaggctcaacaccatatggaagctgccaaggcttggggcttgcactctctgaagccatggcttgagccctatgttgacccctttcag

SEQ ID NO: 945521 - DNA, 631 bp, Homo sapiens
gatgacacagaaaatgttctaaagtcagaatcttctgtgaatgtaggggagagaccaggaggtcaacttatggctgaaatattgaaggaaagagtggcagattcccatgactctcaaagaagcctggtttctataggaggagggagttctggaagtttctaggaagcagtgagattgttgactcactcttcagaccctaagacataggttgggtgagagtgagcaacctctattcaggggcacacaggggaaggagccatttggaccacagagaaagggcagtccaggtatatgttaaggccaagaggtggtaggataattctgtaattaaccaaagaaaagtatttcctggaaaaagatttcaaatctctattttggaagctacattttctttaaagccacagatctattaataacctgcacaatgaggattctgatttaaaaattaactaaaatgctttcttaaaaattctaacttttggcagggtgtggtggctcacgcctgtaatctcagcattcgggaggcctgggcaggtggactgcttgagcccaagagttcgagaccagcttggccracatggtgaaaccctgtctctaccaaaaatacaaaaattagccagacgtggtggcg

SEQ ID NO: 945522 - DNA, 842 bp, Homo sapiens
gaattgttgatttgattctcagcttagtcactgttggtgaatagcagagctactaattagtatacattaattttgtatcttgaaactttgctgaattcatttaccagttctaggagctttttggatgagtctttagggttttctaggcatatgattgtatcatcagcaaacagcaggagtttgactttctctttactgatttggatgccctttatttctttctcttgtctgattgctctggctaggacttccagtaccatgttgaatagaagtgatgaaagtggacatccttgtcttgttccagttctcacagggaatgctttcaacttttccccgttcaatataatgttggctgtgggtttgtcatagatggcttttattaccttaaggtaatatgccgattttgctgagtgtcttaatcacaaagggatgctggattttgtcaaatgctttttctgtgtctattcagatagtcatgagaattttttttttttttttgagatggagtctcactctgtccccaggctggagtgcagtggcatgatcttggctcactgcaacctccacctcccgggttcaagtgattcttctgcctcagcctcccaagtaactgagactacaggcacgtgccaccacacccagctaatttttgtatttttagtagagacggggtttcaccatgttggccaggatggtctcgatctctttacctcataatccacctacctcagcctcccaaagtgctgagattacaggcatgagccaccacgcctggcctaakttttgtttttaattctgtttatatgatgtatcacatttattgacttatgtatgttaaacca

SEQ ID NO: 945523 - DNA, 685 bp, Homo sapiens
cctctagctgatcacagatagaaaaatgagcccagccaagaccagaagaaccacctagctgagcccagcccaaattgtcaacccacagaacagaaagatgagctaaataaatgactgttttttgtttttttgtttgtttgttttgagacagagtctcgctctgttgcccaggctggagtgcagtggtacgatcttgactcactgcaagctccgcctcccaggttcatgccattctcctgcctcagcctcccaagtagctgggactacaggtgcccaccaccacgcccggctaattttttgtatttttagtagagacggggtttcactgtgttagctaggatggtcttgatctcctgacctcaagatccacccgcctcggcctcccaaagtgctgggattacaggtgtgagccaccgtgcctggccacagatggttttgttttaagccactaagttctggggtggtttctacacagccaaggctaactgatacaccacctcacagggctgttgtgagggattaaatgacagaccgcaggtcaagtcctcacaacagtacccagaacagtaagacctcaggaaacaacagctatttttatttgaaarccactctttgaggcctgcatggaatacagatgtaatagaaagtataaagatgctactagagaaagacatagcaacggttg

SEQ ID NO: 945524 - DNA, 610 bp, Homo sapiens
tctttattttatctggttaaataataaaagcttccatcactgatgtgggttgactgtccccactcaaatctcatcccaaattgtaaaccaaattgtaatccccacktgtcaggggaaggacctggtgggaggtgattggatcatgggggtggtttcccccatgctgttctcatgaaagtgagtgagttctcacaagatctgatggttttataaggggtggtttcccctcctcgctctctctcctgctgccttgtgaagaaggtgcctgcttccccttctgccatgattataagtttcctgaggtctccccagccatgcagaactgtgagtcaattaagcctcctttatttataaattacccaatctcccatagtgtctttacagcagtgtgaaaatggactaatacagtcacacttcacaaatattgataagtattaagattataatctttatttttaaaacggtgtaatgtagcataaaatacattcacaaattttgtgacactctcttcaaaaggggccacctaatttacttcctaagtgtgggctgttctcagcaacccaccatgaatagaataagatgaaagtgaccatgtatacttagattaggt

SEQ ID NO: 945525 - DNA, 432 bp, Homo sapiens
tgaggaatgtgagaaaagtctttaaagtatagaaacatatagtcatgaagaaagtaatataggtatggragctaagtgtttggttcagtgattatattctgctactaacttctgtttctgtccatttaaataagctcctaatttaaatttatggcatgtataaaaccttacctttttagtgtcagcaaaatgataactcatgagtgctaactcctctccttctatttgccctttcaaagtaaggccataaagttttggaatgtattaattatattattattattgttgttattgttattttgatggagtcttgctctgtcatccaggctggagtgcaatgacacgacctccactcactgcaacctctgccacctgggttcaagcaattctcctgtctcagcctcctaagtagctgggactacaggcgcacat

SEQ ID NO: 945526 - DNA, 571 bp, Homo sapiens
gctgcctgcctatggctcctccagggaaataaactttgccctccctaggagcagggccacaatgtagctactgccactttcacctgagcaatttgccagtggcctggggctcatcttgctcctgcataacagagccagtgtcttacacaccatccgagggactgaaagcacaatgtgacttggccccataacccccgtaccttagcacaccattgaagggtcttgggattgcccagcccagtccaccactggtggcacctaagcacttttttgagtgtctgaggttgggcccacttaacttgcccataccaccacaactgttacccacctgtgtgtaccacatgcaggtctgggaatcagctcgcctaactatagtcaaaaacagcatggaccagttgcgtcccaggggtttgtcccaccactgctactgccattgtcaatgtcataccaaccacccaggcacttgagaacctgcccgtacaccaggcccactgctgccattcccagcatctgagcaacycacctggaagctcaagaatcagcctgcctggacccatgaacgccagtgcca

SEQ ID NO: 945527 - DNA, 571 bp, Homo sapiens
gctgcctgcctatggctcctccagggaaataaactttgccctccctaggagcagggccacaatgtagctactgccactttcacctgagcaatttgccagtggcctggggctcatcttgctcctgcataacagagccagtgtcttacacaccatccgagggactgaaagcacaatgtgacttggccccataacccccgtaccttagcacaccattgaagggtcttgggattgcccagcccagtccaccactggtggcacctaagcacttttttgagtgtctgaggttgggcccacttaacttgcccataccaccacaactgttacccacctgtgtgtaccacatgcaggtctgggaatcagctcgcctaactatagtcaaaaacagcatggaccagttgcgtcccaggggtttgtcccaccactgctactgccattgtcaatgtcataccaaccacccaggcacttgagaacctgcccgtacaccaggcccactgctgccattcccagcatctgagcaaccsacctggaagctcaagaatcagcctgcctggacccatgaacgccagtgcca

SEQ ID NO: 945528 - DNA, 612 bp, Homo sapiens
gcctatggctcctccagggaaataaactttgccctccctaggagcagggccacaatgtagctactgccactttcacctgagcaatttgccagtggcctggggctcatcttgctcctgcataacagagccagtgtcttacacaccatccgagggactgaaagcacaatgtgacttggccccataacccccgtaccttagcacaccattgaagggtcttgggattgcccagcccagtccaccactggtggcacctaagcacttttttgagtgtctgaggttgggcccacttaacttgcccataccaccacaactgttacccacctgtgtgtaccacatgcaggtctgggaatcagctcgcctaactatagtcaaaaacagcatggaccagttgcgtcccaggggtttgtcccaccactgctactgccattgtcaatgtcataccaaccacccaggcacttgagaacctgcccgtacaccaggcccactgctgccattcccagcatctgagcaacccacctggaagctcaagaatcagcctgcctggacccatgaacgccagtgccaatgtgcagcacyctgcaccctggagccattacaaaggcatccttagct

SEQ ID NO: 945529 - DNA, 560 bp, Homo sapiens
aagagaaagaatgcaaatggtaccactagagaaaaccaccaaactacaatgacaagcagtaagaaaaaaagaaaaacaacaacaccaacaacaaataatatacaaaacaaccagaaaatacttagcaaaatgagaagaaaatccctcatatcaataatatccttgaattaaattttccgtttaaaagatatctcatggttgaataaagataatataatccaagtatatgctgcctgcaggaaacaaacataccttatctttaaagaaacatatagactaaaagtaaagggatgaaaaaatatatttcatgcagatggaaactaaaaatgaccaggaggaattatacatgtatatatcacataagaaataatttaagtcaaaaaacagtgaaaaaaagacaaagacgattattatatagcgataaaggatgaatccagcatgaggatataacaattctaaatatatatgccccaayattggaacatccaaattcacaaaacaaatattactagatcagaagagcgagagactctaatacaataatagcgcaggactataac

SEQ ID NO: 945530 - DNA, 560 bp, Homo sapiens
aagagaaagaatgcaaatggtaccactagagaaaaccaccaaactacaatgacaagcagtaagaaaaaaagaaaaacaacaacaccaacaacaaataatatacaaaacaaccagaaaatacttagcaaaatgagaagaaaatccctcatatcaataatatccttgaattaaattttccgtttaaaagatatctcatggttgaataaagataatataatccaagtatatgctgcctgcaggaaacaaacataccttatctttaaagaaacatatagactaaaagtaaagggatgaaaaaatatatttcatgcagatggaaactaaaaatgaccaggaggaattatacatgtatatatcacataagaaataatttaagtcaaaaaacagtgaaaaaaagacaaagacgattattatatagcgataaaggatgaatccagcatgaggatataacaattctaaatatatatgccccaatattggaacatccaaattcacaaaacaaatattactagatcaraagagcgagagactctaatacaataatagcgcaggactataac

SEQ ID NO: 945531 - DNA, 589 bp, Homo sapiens
tacaatttccttggaattttagaatgtggttatttgggaaaaacaaccattttcttttttaagatcatcatacggttttcatgggaactcattttttcatcaaacatttagtgcccatacaccacagggcacagagctgggtggggaatagggatgagcagatgaatacgatggttcctcttctacaggagtggagctccattctatcccagcattcagaacacttatcacagcttttaattaccttgttcacttgttatatatttttgtctctccactagactgtaagcttcgtgaggacatgtaccatgtcacgctgtgctcactggtgtgtctcatctagcatatgctggggactcagtactgctgtttcagtggatactaagatacatgtaaacacaaacagttcaagtataaaatatgggatggcacaattgtacccaaaattgggtagagaaaaaagttataatttattgttgctagggtgaatttttaaaaatgtttttcaaaagtaaaagaggctcattgcaaaaaatttaggaaatttayacatacaaaatgaatttaaaaaaccacctttaatactgct

SEQ ID NO: 945532 - DNA, 609 bp, Homo sapiens
gactcctaaaccgtaatttctagtcttgtggctaattggttagtcctgcgagggcagtctagtccccagtaaagaaggggattttgttttargaaagggctgttattgtctttgttttaaactataaactataaactaagttcctcccaaagttagtttggcctatgcccaggaatgaacaaggacagcgtagaggttagaagcaagatggagttggttagatcagatctcttacactgtctcagttataatttttgcaaaggcggttttagcatttcctgtggtggcctcccctttccttgaaaccacatctagccttactatttcatgaatgcatgtctactattcatttatttgatgatagcagagttagattggatacctactgtttccatccctgttacggtcccgtgcacagatgcaaacctgtgtcaggtattactatcctctatgctaaaggaaagagttgagaaaagggtgaattagaattcttagaaataagaagaggactacttttagaacagaataattggaaaattagtattcttcaaagaatccagtcccaatagttatggattccaagaaagagaacaaaatgggaactttctg

SEQ ID NO: 945533 - DNA, 637 bp, Homo sapiens
tctgctctgggtccatcattaatttttattttatttattattatttttagagatgaggtcttgctatgttgcccagcctggtctcagactacaggcattcaccactgcatccagcttttccttccttcccgccttccttccttccttccttccttccttccttccttcccttcttcctttttttcttttttttttgacaaagtcttgctctcttgcccatgccggagtgcaatggtttgatctcacctcactgcaaccttcgcctcccgggttcaagcgattctcctgcctcagcctcccaagtagctgggattataggcggctgcaaccatacccagctaatttttgtattttttagtagagatgggctttcaccatgttggccaggctggtcttgaactcctgacctcaggtgattcgcctgcctcggcatcccaaagtgttgagattacaggcgtgtgccaccatgcctggccaacacccagctttttctaggcctttttttttcttytttttttttgagacagagtctcactctgtcacccaggctggactgcagtggcgcaatctcggctcactgcaacctcccgctcctgggttcaagcgattctcctgcctcagcctcccgagtagctgg

SEQ ID NO: 945534 - DNA, 776 bp, Homo sapiens
ggctgcactctgttgttctctttttttgttgttgttgtttgacatggagtctcgctctgtcacccagtctggagtgcagtggcgcaatctcggctcactgcaacctccaccycctggcttcaagtgattctcctacctcagcctcccaagtggtgttacaggcgcgtgccaccatgcctggctaatgtttttgtatgtttagtagagacagggtttcaccatgttagccaggatggtctcgatctcctgacctcatgatccacccatctcggcctcccaaagtgctggaattacaggcatgagccaccgcgccaggcccattagtctttttttttttaatggaagtcaaattgtggtcattactcggcccccaaaaccctccagtggctctctgtatcactgagtaaaatctcactcttgcagtggcctatgaaatcctcttacctcctctcctcatcccccttactctggtccagctaccttggcctccgggctcctcctcaaacatgcttggcaagccctgaccttcaagctgttataccttcaagcctttatacctactgctctttctttctgaaactctcttttttcagatgtcatgtgactcactcatcacttcattgagatctcaggtccaaatgtcacctcatcagagaggccttcctgaaccttccttataaatagtaaccctccttccacacccgccctcactcctgttgctcccgtttcccttatcctgctttcctgtccatacagcagaaagtaacacctgccat

SEQ ID NO: 945535 - DNA, 612 bp, Homo sapiens
gtttcatagaatttccacatgtcacaaaatattattattttgatttttttctctttctcttctttttttttttttttttggatggagtttcactcttgtcgcccaggctagagtgcaggggcacaatatcagctcactgcaacctccgcctcccgagttcaagcgattctcctccctcagcctccctagtagctgggactacaggcatgtgccaccatgcccagctaatctttgtatttttagtaaagatggggtttcaccatgttggccaggctggtctcaaactcctgacctcaggtgatctgactgcctcagcctcctaaagtgctgggaccacaggtctgagccaccatgcccagtcaataatatttatttatttattgggacagagtcttgttccatcacccaggctggattgcagtggcgcgatctcggctcactgcaacctccaccttctgggttcaagcgattctccttccttagcctcctgagtagctgggattacaggcgcctgcsgccatacctggctaattttttttttttttttttttttttttaagacagagttttactcttgttgcccagtctggagtgcaatggcgcaatctcagc

SEQ ID NO: 945536 - DNA, 550 bp, Homo sapiens
tggtcaccagcgctgtgcccccatgagccactgtcttcagaatactgtcaagaacaaggatgtccacctggccagcctcgaagggctcaccaagggcagcaataataaagagtgcaaatgggacaacaggaaaacagaatgggccaggcgtggtggatcacgccttaagcccagtgctttgtgaggctgaggcaggaggatctcttaagcctaggagttcaagaccagcctgggcaacacaggcagacccgtatctgtagaaaaaattgtttaaaaaatctggtgagcatggtggcacaatcctgtagtcccacatactcaggaagctgaggcaggaggattgcttgagcccaggaattccaggttgcagtgagctatgatcacaccactgcactccagccaggcaacagagtaagaccttgtctcaaattttaaaaaaagaaaacaaaaaggaacgcaaaatacattttcaaattgcatgggaaaaacattaacaaaacttgtstaaagcacaaattgctactaccttagtgactgacttgaaaatatt

SEQ ID NO: 945537 - DNA, 533 bp, Homo sapiens
catcctgcacaaccatgagccaattcaacctcttttctttataaattacccgtcctcaggtattcctttataaacaccgcaaaagtagcctaacacagaaaactggtaccaagaagcagggcattgctgtaaagacaccttaagagtaatgacctagggtaactggcagaagaaatttctaagtagcaaagcattcaagaggtggcctgcctgcttgtcacagccaatgatcatatattggagcaaaggaaagttggagctcatatttaaaagggaagcagagcatgaaattttggaaaatttgcagcctggccatgtggcagggaaagaatccaagcaggctggggagcaaccattagctagagagattatcatcactaaaagggagccaagtgctaatatccaagacaatggaacaaaggcctcaaaggcatttgggagatcttggagacagcccctcccatgacaggcccagaggcctaggaggaaagaatggtttsaggggccaggcccaggacactcctcagcctatg

SEQ ID NO: 945538 - DNA, 588 bp, Homo sapiens
gagcagaatcttgggacctgaggctctcaggggacctcccattgggggatggagggcaatggtggtggtgcccaggaggtcttctacttagatgtctattggatctctaaatgaggctgcatgcataatcacacacaaacatccactgagaaggtgacacaccacgtcagcatgggtccctctgccggaccacaccactcctagtgactatgaggtgacatccaggcacgttgcactattggctcctgtcggtgagtgcagtgcctgacaacagtgagctacatttatttgtaaaaatgaacgccatcagagtagaccacaattgtactaactctaatttgctttgtgttcattttttcagtttccagaagtggcttaatgtttcctagggtcaaaggcagtcaaatgacctcctgactctggcaccccttctgctgggtccccactgccctgtagtggtccccacgctaccatgctgcctcctttttgatgcagcctgtgccatctctcygtgattgttggggtcagatgctggagtccactccctggcttggcatccaggctccaacacgtactgcctgtgtgtcc

SEQ ID NO: 945539 - DNA, 817 bp, Homo sapiens
gagccacgatcacaccactgcattccaacctgagcaacagagcaagacccagtcccaaaaaagggagttagggaggaagggaggaaaggagagagggagggagggsaagggtgaagtgttaatcactgctgggcagtgattaagaaaaagactaaggatatgcagttgatcaataacgagatcactggtgaccctggccagagcaatactggaccacttctctgcttccttttatagtaaactggaaagagcgtgtcgtctattttccttctattccttttttgttgcaaccacatgattaagcttttgctcctgttcctctgccaaaagtgtacttcagaatcattaatgatctaggaaggtgagggtgtggggggataaaaaagaaacaaaatcattaacgatctccacatttctaaatgcaacattcagttctcagtcctcttacctgacttggcagcagcattcactccccacagctcctcactccctcctccctcctcctgggaacagtctcttcacttgtctcctaggacagcaggccctctggcttacctcaccagcaactcttatgatacctcttcacctgcttgttctctaaatagcggtatgttccagagtttaattcatggacctcttctcttctctgtaaccactgcctaaaaagtgagctcacctcatggctttaactattatctatacactggggattccaaacatacatccccaacccagaattctctcctaaatgcgactgccaattcatatcttaactctgatgtctaatgtgcacctcaaacatgacatgtctaaaaca

SEQ ID NO: 945540 - DNA, 761 bp, Homo sapiens
gtgtctgaagagccaagagtcctcctagatgtgtcaggggagttgttatggacccttctgggggaagagatatctgaggaaccatgacgggctcgcctaggaggagagggatctggtgaatcatgacggactctcctaggagatgcacctgaagaattatgctgaggcctccttgggggagaaggatctggagaatcatgacgggccctccttgggggtgaagtgtctgaggagtcatgacggatcctcctgggaggagatgtgtctgagtcatgacgagcccctctgaggggagaaggatctggggtgtcatgacgggccctcctaggagatggatccggggtgtcatgacggtccttcctaggagatggatctggggtaccatgacggaccctcctaggagatgaatccggggtatcgtgacgaaaatgtctgtttgagggtaggtcttcgttgtggcctaaacacaaataacaaagagtcagattcccacaaatgctctgtccctctgtccacccccacacccagtttcaaaagatgctccagtagcacatacctcagaactgctcagaaagcccaaaaggcctgcacagttttcttgcttaggggcagcaaaccaccactcatgaatatcttaagaataacccctccgcctaccaagtcataaatttgcaaagcattttcagcacatttttcatattataccctttaaggtaagcagggcaggtacccttgtattacagcwtgaaaacagaggccac

SEQ ID NO: 945541 - DNA, 601 bp, Homo sapiens
gtcataactcactaccggccacctaatgaaaccaacataaatacgaaagttgggacattctgattctccttggaaatctggaattgagattgagatgatcactttctgtatgtagctgagatgtaaatagaaatgattcactcttggccatatggccaatctgcggagagaaaatatgaagtagataaacagaaagtagtataaaaaactgagtacttgaagccagtacctacactctgggtttgatgagtctcacatggattctttctttgggagtctggacatacctgcacagtaatgcctttaggctttaagtagctccaaacagtttttttgttacttgcaagcaatcgtttttctcaatggctcaagatgccttttgcatataaaaccatattcatttggaattcatcaataaattagtattaattagaattatataactatttattgtgttagatctatacagatttagttaacagatttagtatgtgtgtgtgtatatatatatatatatatatatatatatacacattcatacctgccatatgyatgtaagaaagccaatctccctaatgtaagacacaaaatacatttaatt

SEQ ID NO: 945542 - DNA, 618 bp, Homo sapiens
ccataactataatttgcttttaaaatgtggtgttccctatgaaagcagtggacaaaaaatttgtcatggaaataaagatgaacaagacaagtataaatgttaggagaaaacgtcatagaaatccaggcttatgtattcagattgcttcacatgtgtctttgtcactcagcctttaaaatgccggaattggatgtagccaacctgcattgcggatgtgatttataaaggaagacaacactgagttgtaattgctatagaactcacctccaccccaggtcttccaagagaatttaatagtggaatttcagggtctgcaatgggcgcaaaggagctatttggaatcaggtgggcaagggctcagacccaactggtcttggggcaccctgcagtaccccttacaaccaccaacctggacctgaacaacagcctcattttggggggcctcagacttcagagctccagtcaaccttttcttttctctttcttttwatttttagagataggatcccactctgttacccaggctggagtgcagtgacacagtcacagctcactgcctccctggactcaagtgatcctgctgcctcagcctcctaagtagctgggactacaggtgtg

SEQ ID NO: 945543 - DNA, 575 bp, Homo sapiens
tatctatactgaaattaataaagtatgagatactatgtagaaactcttgttctaataatatwtaaatttcattgtatattatttgtaaaagactacatataaaactaattttataatgtgaattcagtttttatgattacccatgtagtaaaatcagaataaaaatacgttagaattttctcagggatcaattctgattatatatttgagttatttttatattcatactatgttttttttgctgatatgaatgctaatcaagccaaatacagaatctatacctgaccaatcatatattccttataagttaactgtgtaaattgaattcatacatcaatgaacatttgtgggtttttttccaccttttagttattatgaataatgctactatgaacattggtagacaattacctgtttgagcccttgctttcaattttggttttacacctagaagtggaattcttggaccatacagtaattctatgtttaatttcttgaagaagcattatactggttttcacagcaattgcaccattataaattcccatcagcaatgctctagggttctgctttct

SEQ ID NO: 945544 - DNA, 575 bp, Homo sapiens
tatctatactgaaattaataaagtatgagatactatgtagaaactcttgttctaataatatttaaatttcattgtatattatttgtaaaagactacatataaaactaatyttataatgtgaattcagtttttatgattacccatgtagtaaaatcagaataaaaatacgttagaattttctcagggatcaattctgattatatatttgagttatttttatattcatactatgttttttttgctgatatgaatgctaatcaagccaaatacagaatctatacctgaccaatcatatattccttataagttaactgtgtaaattgaattcatacatcaatgaacatttgtgggtttttttccaccttttagttattatgaataatgctactatgaacattggtagacaattacctgtttgagcccttgctttcaattttggttttacacctagaagtggaattcttggaccatacagtaattctatgtttaatttcttgaagaagcattatactggttttcacagcaattgcaccattataaattcccatcagcaatgctctagggttctgctttct

SEQ ID NO: 945545 - DNA, 575 bp, Homo sapiens
tatctatactgaaattaataaagtatgagatactatgtagaaactcttgttctaataatatttaaatttcattgtatattatttgtaaaagactacatataaaactaattttataatgtgaattcagtttttatgattacccatgtagtaaaatcagaataaaaatacgttagaattttctcagggatcaattctgattatatatttgagttatttttatattcatactatgttttttttgctgatatgaatgctaatcaagccaaatacagaatctatacctgaccaatcatatattccttataagttaactgtgtaaattgaattcatacatcaatgaacatttgtgggtttttttccaccttttagttattatgaataatgctactatgaacattggtagacaattacctgtttgagcccttgctttcaattttggttttacasctagaagtggaattcttggaccatacagtaattctatgtttaatttcttgaagaagcattatactggttttcacagcaattgcaccattataaattcccatcagcaatgctctagggttctgctttct

SEQ ID NO: 945546 - DNA, 628 bp, Homo sapiens
tcgtcctccatcaagaaactattccctgaaaaggaaactatttgctgctccttctgacgaggagcaatgtcaaaaaggaagggagaaaagaaatctggctgtcaatataaaaaaagcaaagggctgaaaattacataaaacaaagaacttcaaactttttgtttggattaagactccaacaaaggagtggtttttatgccttcatacatatagggagaacagggaagaaatggaaagcaattgtacaattacatataattttaaagataaagagatgtcaagatcttgtattatcagaatagcattatcaagcaaaacaaccagttaaaattaaagactttttagacagtcaagataattgtgcaggtaatagcaacaatagctgcatcttaagagattctttctataaataaaattcccaagtataattttatagacacacacagaagtgataagtatagttgttagtgtgaggacctatcatggttctaagattttctctctttctttctctctctaacaatgttgtagytttaatcacttaattttttaaagaaataatttacattaattatttggagttttttttattttggatttaaagtgtttacatcaataaattaattaa

SEQ ID NO: 945547 - DNA, 714 bp, Homo sapiens
acttctgatgtatgatggttctgcaaagaaaaagaacttgtgtgattatgttgcaagctgaaccacctgctgttttcatggaacaccatttttttatttgaatgaatgactgaaaggcagatgatggttttccagactggttatttggcaaagattttcttgaaaatatataaagtaagcccattacttcaatgaaaactcactgtatctgttgccaataataaaattccagctttcaaaggaaaattagaatttttgccaacttgtatttgccaccatgagcttgacagcttcccagtactgaagaacctttctgataagatcagtggtaatattaataaatgcaatgattttgataacaaataataaaatctgtcactatttggaagatctgcataactcaatctatgaatattttccaagggacaaatgtatgatgttacaaaatcacgtgtggataacagttccattcaaaatgcaagatagaccagtgtattttacagtacagaaagttcattgatattgtttcattttctcccttgtaagaaatccttaagaaactaccatttgtcaagttttagtacagtattagagaagaatacccaaaattacctgaaaagagtattaaaatgatcctttcttttccagstacatatttgtatgaggcccagtttctacataaaccaaaataggcacaacagattgaatgcagaa

SEQ ID NO: 945548 - DNA, 623 bp, Homo sapiens
attatacttactttctacatgaaggaactgaggcacaaagaggttaaacaacttgcttgaactctcaaagctattgacagacagtgctcagatttaaacccaggaagactgcctttcgagttccctctctttaacattatgagctttattgcttcttataattattcatgattacacatgctacagtgcctgtcataataattaacatttcaaattgaagaatgtatgtgaacaaagctgtctcaacgttcttttcatccctaccaaccaaatcacctgtgaagtatttgctgagccctggtagaatacagaagtccatggatcccattttgaggttctcaaatcattttttccttcaatggaactgaaactggctcatagtggcactgtttttcagaggctatcctcaatgctagaatcccagcaggcaaatagaaagccacagtaactttacagacacttgcatcagccagcctggctgcagctatgcagactatacagaaytgtgaacttctttcctgacctttggatatattccaggggccaatgcttaataacactgcaccaattatttattttatattattttattttaattttttggtagagatgaggtcttacta

SEQ ID NO: 945549 - DNA, 589 bp, Homo sapiens
ataatcattgatattgtacagtccttactatatcttaggcactataaatgaacagacattccttataagcaattctgtaagattcttattagtacccccatttggtaaatgaggaaasttaaagaaaggttaaaacttgcccccagttacccagtaataagtggcagaagtagctccaggctgagtgtaactataatgctgtaagtcagaaaagctgacttaccctattatagaaataacatgtggaccaaatgaaatattcaaaggctgttcatttaaatattaagaaaaatttacataaacacccaaaataaagagaaaagcatatacatatacacacacaaaaatatttcacagaagactcacacatagggagtcatttttacatgcgacttctgttcctgttttcaattggctcattgattataatttagttagaactgctagcctttacttgatgagaaacagcaactcctggagtgtaggcaaagaaggcttcaaaacaaagcaaagtgacaaaatgaactacgtacactgactacaataaaaatacctaaaccataaatttctaaatatctagttgttttct

SEQ ID NO: 945550 - DNA, 623 bp, Homo sapiens
ggttatgaagagtagaggggcagacacagacatgggaactcagccctgtctcatttgctggcccctcgggtaacatccctggaacccctggggcttctgaaagttaagtttccacatatgaattttcgggggacaaagacatttagtccataacatttatcatgtacttatattagagatttaataagcagtataaagtccaaatagttcactatatactgtgtttgttctcaactatcctttttaatgtttacataagtttttgaatcaaatgaacctctacagaaaaaaaaagtatctacaatacagaagtggtcctaacaaaactacctttaaaaagacaacccaatacaagaatgagcaaaggctgtgaattgacaattcacaaaaaaagaactcaaaattgccattgcagtgaaggtatgctcagccttactagcagtgaaggaaatgccaatgaaagtaacagtggaaaactgattgtgcccatcataaacatatccattataaagaattatttaaagggctgggcgtgrtgcttcatgcctataatcccagcactttgggaggccgaggtgggcagatcacgaggtcaggagatcaagaccatcctggctaacaca

SEQ ID NO: 945551 - DNA, 615 bp, Homo sapiens
ccaaaaatcagggaagcaatcacagtagctggttttaacttaatatcactgaaagaggcactgaagaagataggaaagatagtcttgaattgctgaggccaccccctcctccatcccctggcagaggccatgtggcatgaggagggaatctgtgggcttgtgggaggtagagcaggcaactgcaggattttggaattcagtgctgccaacactgggcagaattcagctggtgctcatagagggagcatttagaccagccctggaaagaagggaatcacccatcccagctggtggaacttgagtttcagcaagcctcaccactgcaggctaaagtactgtgggattctaaataaacttgaaaggctgtctaaaccacaaggactgcaactcctgggcatgtcctagtgctgtgctgggctcacagccagtggacttgtggggcacatgacctagtgagacaccagtcagggtggctaagggagtgcttctgtcacccctctacaagcacaggcrgcacagcttgcagctccaaaagagaccgcttccttctgcttgaggagaggagaaggaagagtaaacaggactttgttctgaaagttggataccagctcagcc

SEQ ID NO: 945552 - DNA, 570 bp, Homo sapiens
acaacaaaaccataaacaaaccaattttaaaatgagcaaagggcggggcgtagtggcacatgcctgtaattccagcmatttgggaggccgaggtgggcagatacctgaggtcaggagatcgagaccagcctggccaacatgacaagaccctgtctctactaaaaatacaaaaattagcagggtgtggtggcaggaacctgtaatcccagctactcaagaggctgaggcaggaggacctgagaggcagaggttgcagtgagccgagactgggacattgcactccagcctgggcaacagatcaagactctgtctcataaataaataaataagcaaaggacttgaatagaaatttctccaaaaaagataagcaaatggccaagaagcacatgaaaagatgcttgacatcattattaattatggaaattcaaattaaaaccacagtgagaaacaacttcacccccactagaatggctaaattagaaggacaataacaagtggtgagaatgtggagaaattagaaccctcatgcaatgctggtgaaaatgtaaaatggtatagatgctttattat

SEQ ID NO: 945553 - DNA, 545 bp, Homo sapiens
cccaaagtgctaggattacaggcatgagccaccatgcccagccaaattttttttcaatgtactaccttctrtgaggcaatatgtaagtacagtgggtatcacatttggtagtacttatgtagatttacaagcatactgattctgcttgctttccttgggtaaattaagaaatgcaaaaagacaaaaccatccaaagtcaccgctgttagtaaatccttgggttaacagagtccccactaaaagatattgatgacaattactataatcataatatctagtattaaatatatgcctcctacatgccaggcactgattgggtgctttgactataaatctttcatatacttcactaagagtttattcaagataaagtgagttttaaaaattatttctaacttttttttatcatgatggaataactggcacctgtcttgccttcccactgtaaacaactagacaactagatgaaatatatgaaaaaaaaaaaaaactatgaagacattggacaacaggaagtccatgactgtgattgctgcaagaaggga

SEQ ID NO: 945554 - DNA, 632 bp, Homo sapiens
cccagaatggtagatccactgacagcttgcactgtgcacctggaaaagccacaggcactcagtgccagcccatgaaagcagcyggaaggggctctgtaccctgcaaagccacagggcagagttgtccaagactatgagaacctacctcttgcatcagtgtgacctggatgtgagccacatggagtcaacagaaatcattttggagctttaagatttgactgtcccactggatttcagacttgcatggggcctgtagcccctttgttttggccaatttctcccattgggaatggctgtatttatccaatgcctatactcccactgtatctaggaagcaactaacttacttttgattttacaggctcataggtggaagggacttgccttgtctcaaatgagattttggactgtggacttctgagttaatggtgaaatgagttaagactttgagggactgttgggaaggcataattggttttgacatatgaggacatgagatttgaaagtggccagggatgaagtgatatggtacagctatgtccccacccaaatctcatcttgaattgtagcttccataattcccacgttttgggaagaacccagggggagacaactgaatcatgggggcagtt

SEQ ID NO: 945555 - DNA, 667 bp, Homo sapiens
attagattgcatccaccagattaagggtggatctgatttcccccagcccactgactcaaatgttaatctcttttggcaacacccatatagacacacycaggattaatactttgtatccctcaagccaatcaagttgcttaacactcagtattaaccattacagctccctagaaaataaacggttaaaataaacacaattaggaatgatgaagtgatactactactgaccctacagaaataaaaatatttattagaaactactacaaacgcctctatgcacacaaactagaaaacttagaagagatgaataaattcttgaacacatacacccacccaagactgaacctgaaagaaattgattcccttaacagaccaataatgagctccaaaattgaatcactaataaatagtctaccaagcaaaaaaagcccaggacctgatggattcacagataaatttgactagatgtacaaagaagagctggtaccattcctacagaactattccaaaaaattgaggggaaggaactcctccccagctctttctatgaggccagcattttcctgatatcaaaacctggcagaataaaagtaaataacaaacaacaacaacaacaaaaaccgtcagagacacaacagaaaaagaaaacttgaggccaatatccttg

SEQ ID NO: 945556 - DNA, 667 bp, Homo sapiens
attagattgcatccaccagattaagggtggatctgatttcccccagcccactgactcaaatgttaatctcttttggcaacacccatatagacacactcaggattaatactttgtatcyctcaagccaatcaagttgcttaacactcagtattaaccattacagctccctagaaaataaacggttaaaataaacacaattaggaatgatgaagtgatactactactgaccctacagaaataaaaatatttattagaaactactacaaacgcctctatgcacacaaactagaaaacttagaagagatgaataaattcttgaacacatacacccacccaagactgaacctgaaagaaattgattcccttaacagaccaataatgagctccaaaattgaatcactaataaatagtctaccaagcaaaaaaagcccaggacctgatggattcacagataaatttgactagatgtacaaagaagagctggtaccattcctacagaactattccaaaaaattgaggggaaggaactcctccccagctctttctatgaggccagcattttcctgatatcaaaacctggcagaataaaagtaaataacaaacaacaacaacaacaaaaaccgtcagagacacaacagaaaaagaaaacttgaggccaatatccttg

SEQ ID NO: 945557 - DNA, 566 bp, Homo sapiens
gtcagctggcaatatcaatgatagaattcaggtccccagaaactggaaccaagtagggcagcactgtgaaaaaagccckggacttggcatcagacatccatcagatttagctttcagtaccagttccacccttttctccctaagtgcatttaaagatacaaatctcttaactcctctggaccttaattttctaacctgtaaaatgggaatagtaatacctcacaagatttctgcaaagattaacataatgatgtgagtgaaagttagccagacttgtggcacatgcctgcagtcctaaatactcaggagactgaggcaggaggataacttgggcccaggaatttgaggctgtagcaagctatgactgcaccactgtactccagcctggatcacatagcaagaccctgtctcaaaaaaagaaaaggatacggaaaatagtcagtactcaacaaatcttagttcaattgaatttgacaaccaaataccatgcatttatgcattaataagagtttgatgttctgaaatctggacatgttaaaaaaatggccacatggcaattgaaaatc

SEQ ID NO: 945558 - DNA, 505 bp, Homo sapiens
ctcttctccccttgtctgccgtctgccagtggagcctggggtttttatgggtacaggacgtgcctcctgttcctatcacagtgccccaaatcaaagtgtcttaacaacatatattctcaggaaaaaattatcccctacaaaagcaattttaacaaacttgactttaacagacttgactgctacaccagatgtgtagatatcaacagaaggacacagtcaccatgaaaaagcaggaagataggacaccacatgaaagatcataacaattttccagcaacagatcccaataacaaagaattcctcaaaatgccagataaagaattaaaaatattgatcttaaagaaaatgcaatgcaatagaaatctgaaaaccaatacagagatatcagaaattcagtttgggatatgaatgagaaatttaccaaggagatacagatattataaacttctataatttggttattgcrtagcatgatgcatatagtaaaaaaatgtatatttcaaaa

SEQ ID NO: 945559 - DNA, 802 bp, Homo sapiens
gtgggagcaatagcctagctttgttcaggttcttcgggggattgaatgagagaggggcttggtggattttagcatgggctataaaatgtcaggctgtagtgctggcacgtgtgtgcatgtgtgttttggggaaggggagtaaggaggacaggtaaatcaggaccatatcatagtggtgatgatgataattaaatgtgacaagatccaacatttatcaaatatttcttaggtgcccaagaaacacttgacctgccttatctcccagaagccctacaagggaggtgctattattgcaatccccattttacaagtagagaaaccgaggctcagagagatgagaatgggcggcagtaatcatcccttcctcctgggggtggttgtgaagcttgaaggagacactgtaagcgctcgggtggtaccctggtactccatcactaacctgctgtgtgacctcaggtaagtcgcttagcctctctgagcctcagtttcctcatctgtaaaatgggaatgattgcaatacctacctccagggcagattttctcaacctcagcgctgttgatgttgttgactgggttattctgtgtggtgcggggctgtcttttgttttggaggatgtttactaccatccggcatggcggatcccagcaaaggcccctgtgcaggcctggtgaggtggccgagcttcctggtggggaggccytccccctctcctccctggtcaatctatttgagggtgaggatggctccccttcaccctcacctggcacccaggacatccccagtccatggagggattcaatc

SEQ ID NO: 945560 - DNA, 765 bp, Homo sapiens
cgaggtttctgaacccctgccccggaagcttcccctttcccacacaygtcactcgctgccttggaatctgggctgcctccctcccaggggctcacaggggagcgaggccacagaaaggctccttacccccagtggcctaacaggtgtgacatgtggagggggaatctgggcagtgtgcctgatgctcagagctgagaccctgaagtccaactccctcgggtgtgaccttggacaagttacttagcctctccttgcctcagttacaccatctggagaatggggatgctaccctcgtctgaccaccgtgatgtgagccagtcagcacacatcaagtgctccgtgagcgtccggcacacaggtgcttgtctctgtcctgtgcttcagctccatcagtgtcttcttcagacctgtcattggcttggggcaaggatatatgtggccgctgagggcggtccgccaggtatggcagccatggagctgctaattaggccctgtgagtgggaggccctgtggggtgggcaggggcagacgcccagctgctctcggggacactccaggcctgtgctgccctccacagccccagctggagaatggtgaccagatgtcaacgacaggaagcatttccagaggccacagctctgcagggaggtctctcatgggctgacagccagagccagcgctccgggtcccctgaaaaaacgggcacagtcctcggtcacgtcgaggacctgctcagcccctccacttggcaccggagagaggatg

SEQ ID NO: 945561 - DNA, 569 bp, Homo sapiens
tggctcgctacaacctctgcctcctgagttcaagcaattctcctgcctcagcctcccgagtagctgggattataggcatgcaccaccacacctggctaattttgtatttttaktagagacggggtttctccatgttggccaggctggttttgaactcctgacctcaggtgatccacccaccttggcctcccaaagtgttgggattacaggcgtgagccaccacgcccggcccgagcagagccaagtttaaagatccaaaccagggcttagcaaattctgtagcaggtcagagagtaaatatttttggctttgcaggtcagaccacatctgtggcaactgctcagctctgccattgtagcatgaaagcggctgtagataatatgtaaatgaatgagcatggctgtgttacagtaaatttttattggatactttatagatgctgaaatttgaatttcatgtaattttcacatcatgaaatatcactcatcttttaattgttttcctccaaccatttagaaatgtacaaaccatcttaatatgtcatacgaacgtaggtggtgggttggatt

SEQ ID NO: 945562 - DNA, 684 bp, Homo sapiens
caggaacatgccaccatgcctggctaattttttattttttgtagagacggggtaaccctaggttgcttgagcttgtcttgaactcctgggctcaagtgattctcccagctcrgtctcacaaaatgctgggattacaggtgtgagccacctcacccggcctcttcctttctttacctgtgtaatccctcttcactggctgggcgcgcagtggctcacgcctgtaatctcagtactttgggaggctgaggcaggtggatcaccaggtcaggagttcaagaccagcctggccaagatagtgaaaccccgtctctactaaaaatacaaaaattagctgggcatggtggtgggcacctgtaatcccagctactagggaggctgaggcagagaattacttgaacccgggaggcggaggttgcagtgagccgagaccgtgtcactgcactccagcctgggcaacaaagcgagactctatttcaaaacaaaaacaaaaacaaaaaagactttcagctccccttgtttatcctcactttatagtgggtggcacagagtctcagaaaggtgaggaaagctgcccaaggtcacacagccaggacatggtctgctcccaagtccatgtttttccctcgttctccaagatcaagtcttgctcaaagtcactgagaatttcactctgctgggacacaa

SEQ ID NO: 945563 - DNA, 837 bp, Homo sapiens
aatatgctatctcacgtgactgtaaacactttggactcctcacctaaaagaggatataaggatatttagttctcaaacctgccgtcagtgtgcttccttagtaaggctgggagaggaggtagaaactatatgtaaatgattctaataccatctagataggactaagaggacagtgactaaggaaattcagaggagagagatgacttccagctaccagcaatcagtgcatacaatttcttgtctgcatgtttaagtttgacttcgagctcacgtctttagacagtatgctttagttgggggccctgcaatcaattcctggatgtcaatggagattcgacttactaacttgaaatctaatgagaaaattttaggtcttggataaagaaaaaaaaaatcagccattcaattgattattaaggctgtgtaataccttgaaataactttgaaataatcgtggtcctttagatgtctagaaaagaaatacttcctttgacttgttgtagacgcgaagtgactgaattgaaattgaattaagtagagtcatgtgtatagaagctcagatggaagggggccaggctgatttagatatgcttaatgctgacaaccagtttccctgagtctcactgtttttccagctcatcctcctccagtgtgactggaggaattccagggactcttcattaatttccaactttgcactctcaagagakttcacctgtgcttgcgaatgcaatgccactggcttccatgtggcaccagcatttctccttgtgcttagcgcttggcactgaccttgtggtcctctttcttcagcatgctgctcgtaagtggcttgat

SEQ ID NO: 945564 - DNA, 459 bp, Homo sapiens
gaaactccgcctgaaaaaaaaaaaaaaaagaaagaaagaaaaaaaaaagaagaagaagagaaaaggtactgggaggggatagtgcaaggtggcctgtgggtggctkcggaggccacagcttcagacccccgctgggagagccaggtcaggaagaggcatttcaacctggcagagttgaagcaggagaagagaggcttccggcagagggagcagcaggtgcaaaggcccaagtgagagttatgaagaatgggttcggggtatgaggtggactcccaggcagaaaccagactagtcaggagttttgtggtttaaaacagaggaatgaccaggcacagtgtcacatgcctataatctcagctctctgggaggctgaggcagtaggatcacttgtgcccaggagtttgagaccagactgggcaacacagtgagaccccatttctatagaaagcacaatttgaa

SEQ ID NO: 945565 - DNA, 526 bp, Homo sapiens
attctgtgggttgtcttcattttctttctttctgtcttcttcrtcttcttttttttgtcactctgtcacccaggctgtagtgcgctggtgcactcactgcaacctctgcctcctgggcttaagctatcctccaacttcagcttcctgagtggctgggactacaggcacatgccactacatctggataatatttctaatttttgtagagacggggtttcaccatgtttcctaggctggtctgaactcctggacttaagcaatcctcctgccttagcctcccaaactgttgggattacaggcatgagccactgcacccagccatcttcattttcttgatgttgctgtattctttgaagtacaaaagtttttaattttgatgaagtccaatttacctcttttctcttttatcacttctgcttttgttgtgatatttaagaaattattgtcttatccaaggtcataaacattttctggtatgttttacacttttataagttttataattttagttcttacatttaggtct

SEQ ID NO: 945566 - DNA, 707 bp, Homo sapiens
tcatggcctgggccatctctgccatatgcacagccttgtgttccctgactctcctgcatctacttcttctgccttcctgtgagaggtctcacaaggagtgatgactggtgattgaaccaaactctgttctttcattctcatcaaacattcattgtgcacctactgtgtggcaggccctttgtggccaggttgggtcagatgtggcccctgccttcaaggagctgaaagtctgggggggggagagtggcagtcccccaaatgagtcattgtggtagaagcattctgccaggagtacatgcagggacacaggggtctagtccagtctgcaggggcagggaaacttctggaggagacactgccagagctgaatcctaaaagatgaggaggaggggctgggcgagagaggtcatggaggccagctatcaggatgggaatgccaggctgagcttagacttgacccacaggctcatggacagttttcaccatggatgtgcaagagtcagcctgttaagaaggtggccctggtggcaggtggagaagagaaggggaggttcagttgcaggcagcagggacagtgaggtggctgaaggaycagaactggtgcagggcttgtctatgcagagcgagaagcggaaccaagacctcctgcctcccagtaaaggtatctgggctggccagcaattccccaaagcacagtcctcaggacc

SEQ ID NO: 945567 - DNA, 613 bp, Homo sapiens
tccattttgtttgtttgtttgttttgtttatattttctcatttgtcttcttcctgggaatayttatcaaatctaatgctaactaaagggatgaggcatttgattcccccagccatagggcaaacacaactagttttacgtgtactttgtggtagaaaaatgagtaagtacttctgaagacatagttggttgaaacttctccttccaaaaagatggaatagacatacgtttccctatttctcacactaagtacaactaaaaacccaagacactatacaaaaatgaacataaaactctgagaagtagagagaagaaagcgggctagtaagggggtcttaaaacccataaatgacatgataatgagttccctttcatcctctttatatcatatatcccagacttaaagccagagataagaagaaaaaaaaagaaaaagcccaaacacaagtctgctgtctttggccaaaggacaaataaaggagttgaatggaaagacagagaaattttagacaataacttcttacttcagctgactagcacctcaacaaatgccaacaaaggccaagtagaacacttagacttccatcgtccccagtctgtcatgagggtcccat

SEQ ID NO: 945568 - DNA, 623 bp, Homo sapiens
aacttaaatgtaaaacataacaatataaaagttttagaaaaaaatacgaacaatcttcagggtttagagcgaggcaaaggtttttcttaattaagcaccaaaaataatccataaatgataaaattggtgaatttttataaaaatttaaaactaatcctctgtgaaagtctcttaaataaataaaaaggtaatctatagacaggagaaaatatttacaagtaatatacctttcaaaggactaatatctgaaaactcaaaatcaacagtttgaaaaatctaattaaaatatgggcgaaaaaattgacatttgatcaaagagcatatggcaaataagcacataaaaagttgatcaagtattagccactggaggaatgcacattaaaaccacaatgagagatatactaaccagaatagcttgtaaccaaatgattacaaggttataggaaaactggatcaatcatatgttgctgcttggaatgtaaaattatataggcactctagaagacaggaastttcttaaaatattaaacatgctgccaccatatgacccagcagctataatcctggacatttatcctagagaaatgaaaagtttatgtttacataaaaaccttacacagatg

SEQ ID NO: 945569 - DNA, 546 bp, Homo sapiens
ctggagacatgttctgagaaatgcactgttaggcaatttagttgtgtgtacatcacagagtgtactaacacaaacytagatggtgtagcctactacacacctgggctatatggtatgcagcctatggctccttggctacaacctgtatggcatgtcactgtactgaatgaatgctgtaggcaagtgtaacacaacagtaagtatttgagtatttaaacacagaaaaggtacagtaaaaatatggtataaaagataaaaaatggcatacctttaaaagataccatgaatgaagcttgcaggacaggaagttgctctgggtgagtcagcgagtgagtggtgagtgaaggtgagggcctagaacattactgtagactactgtagattttataaatactgtatccttaggctatactaaatttatttttaaaatttctttcttcaaaaataaattaaccttagcttgcttacagtgacttttaacatttattaactttttaatttgtgaaaactctattgctcctttgtaataacacttaatttaaaaca

SEQ ID NO: 945570 - DNA, 737 bp, Homo sapiens
agctatgatcatgccactgccctccagcctgggtgacagagcgagaccctatcttaaaaaaaaaaaaaaaatcaatctgaaacttaacagagytaccgtaaaaactaagtttttctggccttctcgtaactggaaatatctggtttactacacatctactttacatgaggatgatttgtttctagtgatggcctgagacctgaggcactgaaagattctgaagacctggtcatctcagaaagtctgagttccacagcagccaaaattgggcttgaagtgtgtttctgtacataaaagtcttcaaatggttgctttttattggcccaaataattgactaacctgaagatctcattccccagtcatgtcagaggataaatattgatcatatttggtggtcaggctcaactatgagagaaaatttcctccctccattgctcaaataaacgttcatgccaaataaatctctccagggccgacttcagatgaaggatgttcaagctgaaagaaagtgatgaacctacatgaaaacatatgtcccttctctgtatacatttatggatggatgtcttaggaactcaagaaaatgccttttttccccaaaaaaagtaccaactcccctacattttcttggcagttcacaattagagtgcactggagagattgaattattttacttcaaatgtgtagaagcacactgttctcagaaaactgctgaagtctatctgagtatcagcct

SEQ ID NO: 945571 - DNA, 622 bp, Homo sapiens
attttgtgtcaacttgactggatcaggggtccctgggtgttaggctaagggtgtgtctgtgaggatgtttctagatgaggttaacatttgaatcagtgggctcagtaaagttgccctcaccagtgtgggtgggmcttatccaatctgttgagaacctaaacagaacaaaaggtggaggaagggagaatctgcttccttttttctttctttctttcctttctttctttctttcctttctttctttctctttctttctttctttcctttctttctttctttctttctttctttctttctttctttctttctttctttctttctctctctttctttctttcttttttttttttcctgcttgacttattgagctgggacatgggtcttttcctgtcctcagaccaagacacactataggctctcctggttctcaggcctttgaactcagaggcaattacattactggctttcctgggtctgcaacttgcagatggcggatcatgggacatcttagcctccacgatctcatgagccaattcttcgtaataaatacatgtattacttttattatatatatctcctattggttctgtttctctggagaatgctgacttatacagatgcc

SEQ ID NO: 945572 - DNA, 766 bp, Homo sapiens
gctgtgaatcaagctgctggtggaaaaccaccccccgcttctcactatctctcttacctaataaatatggagggctgtgtaaagctcakgtaccttgttcactagaggcaaggtgcccctgacccctttttccaaatatacccctttgtctcttgtcttttattcctgcattcaccctgctttgttcagtccaataggtctgtgtaggctacaaatagaagtgaaaaaaaagaaaaaaaacacttcacacaacaatatcagaatacacactttttccaataggtcatgaaacattctcctgagtagataacctactaggacacaaaacaagttttaccaaattttaaaatgttaaaatatgggctaggcattgtggctcattcttataattccagcattttgggaggctgaggtgggaggattagtgagtttaggagttcggcgccagcctgggcaacataaagagaccctctctttagaaaatataaaatttaaaaattagctgggcataatggcacatgcctgtgcgtccagctactcaggaggctgacgggggaggattgcttgagcctgggagatcgaggctctggttagccatgattgagccgctgtgctccagcctgagcaacagagcaaaactctgtttcaaaaaaaagattaaaatattacaatcattttttattacaagggaataaaattagaaatcaatagcagaagaaatatggaaaatctacaaatatgtggaaattaaacaacacactcttct

SEQ ID NO: 945573 - DNA, 678 bp, Homo sapiens
tgaatcaagctgctggtggaaaaccaccccccgcttctcactatctctcttacctaataaatatggagggctgtgtaaagctcaggtaccttgtycactagaggcaaggtgcccctgacccctttttccaaatatacccctttgtctcttgtcttttattcctgcattcaccctgctttgttcagtccaataggtctgtgtaggctacaaatagaagtgaaaaaaaagaaaaaaaacacttcacacaacaatatcagaatacacactttttccaataggtcatgaaacattctcctgagtagataacctactaggacacaaaacaagttttaccaaattttaaaatgttaaaatatgggctaggcattgtggctcattcttataattccagcattttgggaggctgaggtgggaggattagtgagtttaggagttcggcgccagcctgggcaacataaagagaccctctctttagaaaatataaaatttaaaaattagctgggcataatggcacatgcctgtgcgtccagctactcaggaggctgacgggggaggattgcttgagcctgggagatcgaggctctggttagccatgattgagccgctgtgctccagcctgagcaacagagcaaaactctgtttcaaaaaaaagattaaaatattacaatcattttttat

SEQ ID NO: 945574 - DNA, 646 bp, Homo sapiens
aacataccaggcattgtgttccaaaccagattctgcccattagatccatgtgggagaagggagctctgcttttttttttttttcgtttaaacataagtagtttcacaaataaagttcttgcttaaactttatttagctatcatccaagtaagctttctgggaaaaacacccatgagccctgctgctgcaagcccctcatgcctctgtgtggggtgagtgagcaggtctgaatttttttgtttgcttgtttgtttttgagacagagtctcactctgtcacccaggctgaagtgcagtggcatgatctcggctcactgcaacctctgcatcccaggttcaagcgattctcctgcctcagcctcctaagtagctgggattacaggcacccaccaccatatccagctaatttgtttatttttaatagagacagggtttcaccatgttagccaggatggtctcgatctcctgacctcatgatccacccacctcggcctcccaaagtgctgggattacaggcgtgagccaccacgcccagccaggtctgagttttacattgtgcccaggtagtgatgtggaggagatttgaggggagcrggccccacaccagggagttcacacgggatgctgttagatccacctggctggga

SEQ ID NO: 945575 - DNA, 673 bp, Homo sapiens
aaaaaatgattgtaatattttaatcttttttttgaaacagagttttgctctgttgctcaggctggagcacagcggctcaatcatggctaaccagagcctcgatctcccaggctcaagcaatcctcccccgtcagcctcctgagtagctggacgcacaggcatgtgccattatgcccagctaatttttaaattttatattttctaaagagagggtctctttatgttgcccaggctggcgccgaactcctaaactcactaatcctcccacctcagcctcccaaaatgctggaattataagaatgagccacaatgcctagcccatattttaacattttaaaatttggtaaaacttgttttgtgtcctagtaggttatctactcaggagaatgtttcatgacctattggaaaaagtgtgtattctgatattgttgtgtgaagtgttttttttcttttttttcacttctatttgtagcctacacagacctattggactgaacaaagcagggtgaatgcaggaataaaagacaagagacaaaggggtatatttggaaaaaggggtcaggggcaccttgcctctagtgracaaggtacctgagctttacacagccctccatatttattaggtaagagagatagtgagaagcggggggtggttttccaccagcagcttgat

SEQ ID NO: 945576 - DNA, 761 bp, Homo sapiens
gaagagtgtgttgtttaatttccacatatttgtagattttccatatttcttctgctattgatttctaattttattcccttgtaataaaaaatgattgtaatattttaatcttttttttgaaacagagttttgctctgttgctcaggctggagcacagcggctcaatcatggctaaccagagcctcgatctcccaggctcaagcaatcctcccccgtcagcctcctgagtagctggacgcacaggcatgtgccattatgcccagctaatttttaaattttatattttctaaagagagggtctctttatgttgcccaggctggcgccgaactcctaaactcactaatcctcccacctcagcctcccaaaatgctggaattataagaatgagccacaatgcctagcccatattttaacattttaaaatttggtaaaacttgttttgtgtcctagtaggttatctactcaggagaatgtttcatgacctattggaaaaagtgtgtattctgatattgttgtgtgaagtgttttttttcttttttttcacttctatttgtagcctacacagacctattggactgaacaaagcagggtgaatgcaggaataaaagacaagagacaaaggggtatatttggaaaaaggggtcaggggcaccttgcctctagtgaacaaggtacmtgagctttacacagccctccatatttattaggtaagagagatagtgagaagcggggggtggttttccaccagcagcttgattca

SEQ ID NO: 945577 - DNA, 583 bp, Homo sapiens
tcgctgtgttggccaggctggtcttgaattcctgacctcaggtgatccgcccaccttggcctcccaaagggctgggaytacaggcgtgagccattgtgcccggtcaaacccgctttttctttttatggctgggggacctgagctaaccaaaggggatattatattcttgggatgttattgggtggggggggtggggcatacacaatatcccagcagaggtctgtctgttagcttataacacgtgtgagcagcctactgcacaggtttaagttcatatgcatttgtctcccctgattaacaaagagttcatcaggtcatttattatctgttgtttcaaagcttgtttgttaaaggtctttccaacatggcctgatgccttgtcttgtgaaaatacttggccctcctttttagttggaaagttcttgaggacagctcattcatcattcttaactgtggggtcactgcccaacaaggtatgaacagtaattgctaataatagaaataatcattgggataggagtagtaagggctcactttacatagcattttctatgcaccaaggacttcacacggattgttttct

SEQ ID NO: 945578 - DNA, 553 bp, Homo sapiens
aaagaaaacaaaactaagttcattccttgggtcgagtggttattcttcctcactatgtctgggccggaaagatttcttcttcacatgtcccktggcaaactgttatccttctgacctaatttggagactaggtgttctccagtggctgaaatggtgaggaaatgagatgcaactgtattttgtttcagttttgtatgtacttgggtacctttcttgcagtgggtcatgagtttcgggcatcttatagaaaacctgggagcccttggtgctgaaaaaattgagtttcagatagaatgtgcttttagaactcctgattagagaatgctgggaatacaagtttcttgctttgttttgaaagttctttttcctctaaaccacgcaaatgtttttttcaaaaacttttctcattcttgatgatgatgatgatttttttgcctacaaatgggaacaaaaaagatttttttctgcataaagaataaaaggaatatatatcttgctttgaaaatttctcctagtccaatattttttgacaccttgtgaattgtaacaggag

SEQ ID NO: 945579 - DNA, 700 bp, Homo sapiens
ttaaatcctcatgtaaagccattgtaagtgtgacattttagcataaacatttwatttatttatttatttatttatttatttattttttatttattttttttgctttttttaaaaattatactttaagttttagggtacatgtgcacattgtgcaggttagttacatatgtatacatgtgccatgctggtgcactgcacccactaactcgtcatctagcattaggtatatctcccaatgctaaccctcccccctccccccaacccacaacagtccccagagtgtgatattccccttcctgtgtccatgtgatctcattgttcaattcccacctatgagtgagaatatgcagtgtttggctttttgttcttgcgatagtttactgagaaagatgatttccaatttcatccatgtccctataaaggacatgaactcatcattttttatggctgcatagtattccagggtgtatatgtgccacattttcttaatccagtctatcattgttggacatgtgggttggttccaagtctttgctgttgtgaataatgccgcaataaacatacgtgtgcatgtgtctttatagcagcatgatttagagtcctttgggtatatacccagtaatgggatggctgggtcaaatggtatttctagttctagatccctgaggaatcgccacactgacttccataaacatttcat

SEQ ID NO: 945580 - DNA, 642 bp, Homo sapiens
cctcttcctggaaacgcttggtccacttggcttctaggacttgatttgctcatggttttcctccccgctcactkgtcactccttctcggtctcatttctctctgacctcttgatgctggaggatccccaggcagggtccttgaccctcttctcttcactgtctgtacttaagcccttgatcaccccatccagtcataagactttatttaaataccatgtgcttactcatgatgcctccagcctgtctccagctttccctgagctccaggctcctatgtccagcagcctgtgtcatacttcccttatgtgtttagcagacacctcaaacttggtatgtccaatgcagagctctgctgtccctcccccaaaccttctccactcacagccttatttctctccattggtaactccagccttcccatcacaagagccaaaacgcttggcatcatccttgactcccctttttatctcacggctcacagccagtccatcagaaaatctgttagctacttttaaaaaacatccaggattcaaccacgtctcaccacctgcattcctgccatcttgatctgagccaccatcctctgtcccctggattactgcaaagcttcctcactgggttccttgcttctatctcactgc

SEQ ID NO: 945581 - DNA, 634 bp, Homo sapiens
ttggtatttgccttgtttgaaggcagtttgaacagatggccacccgtgactggccaaaactctgtgattggtactgttaacttaaaaatcaagattacaaatctgtaagtttagaaaaagagaggagattttattccttatgaagggttacagcaggtggccgtcctcatagtctgggaagcaccacctccagccaagaccagagacaggcacttaaaaggaggaggggttgagataggagctttatgctgaacaggttggctaaacatacatattcaacaggttataggaggagctgtgaatattcataagagtggtcctgacacatgcatattaaacaaatatgtatgcaacacatgacccatgttcactttgggatggagacttcacattaaatgtattacagttagggtctaaacgtcctttcaggatgggagacattcaggtgtgcagcctctgtaaactggcgagaaccaggccatggtcagaagtctcttatcaaaagaaagtgactgaaatcaatgtcttgtccattcaaagctayagttatggctggtggaacagggtggggatcagacagtcagcatctggtagagctgaaaattgttttcatatcacttaccacaaggccagt

SEQ ID NO: 945582 - DNA, 576 bp, Homo sapiens
gggcttctcccacacttttctccttgtcctctgaggggcaggctatcatccatggcaagcagatccccagacactgcctaaatcatctccatgaaaaccgaggctgcagtcaggtaggtgggacctcttccaggcttcctttcttctctggtctctggccacatagtgagtgctgagacagggagtgaattcaaagcatatagatagaatatttcatttcccttctacccccttagaaaatacattccattatttgtaaattggaaagtaaaaataattactatctttaaaaagggacttttttttcctgagatggaatctcattcttgttgtccaggctggagtgcagtgctacacgatcttggctcactgcaagctccacctcctgggttcaagtgattctcctgcctcagactcccaagtagctgggattacaggtgcacaccatcacgccaggctaattttgtatttttgtagagacagggtttcaccatgttggccacgctggtcttgaactcctgacttcgggtgacctgcccaccttggcctccraaagtgctgggattacaggcatga

SEQ ID NO: 945583 - DNA, 619 bp, Homo sapiens
tgccccagaggatgaaggttctctggcccagaagcccccaatcagatgattcaacaacaggactgagggtgcccggggcaagygccagctcatgtcatcaccctcactgagccccgggtacgtttaaccattcagggccaggaaattgacttcctcctggacactggcatggccttctcagtgttaatctcttgttctggacaactgtcctcaaggtccgttaccatccaaggaatcctgagacagtctgtaaccaggtatttctctcacctcctcagttgtaattgggagattttgctcttttcacatgcctttcttgtcatgcctgaaagtcccacaccgttattagggagagatatgttagccaaagctggagctattatctacatgaatatggggaagaatttacccatgtgttgtcctgtacttgaggagggaatcaaccctggagtctgtgcattggtaggacaatttggaagggcaaaaaatgcctgcccagtccaaatcaggctaaaagaccccaccacttttccttatcaaaggcaatatcccttaaggcctgaagctcataaaggattacagggtattgtttaaacatttaaaagctcaaggcttagta

SEQ ID NO: 945584 - DNA, 731 bp, Homo sapiens
gcaacaccccaattctaggagtgcaaaaattgaayggtcagtagagactagtgcaagatcttagactcatcaatgaggcagtaattcctctatacccagttatacccaacccctgtaccctgctctctcaaataccagaggaaggagaatgattcactgttctagacctcaaggatgtcttcttctgtattcccctgcactctgactcccagtttctctttgcctttgaggatcccacagaccacacatcccaacttatgtggacagtcttgccccaagggtttagggatagccctcatctgtttggtcaggccatggcccaagatctagaccacttctcaagtccaggcactctggttcttcagtatgtggatgatttacttttggctaccagtttggaagcctcatgtcagcaggctactctagatctcttgaactttctagctaatcaagggtacaaggcatctaggtcgaaggctcagctttacctacagcaggtcaaatatctaggcctaatcttatccagagggaccagggccctcagcaaggaatgaatacagcctatactggcttatccttgccctaagatgttaaaacagttatgggggatccttggaatcaccggcttttgctgactatggatccccagatatggcgagatagccaggcccctctatactctaatcaaggagacccagagggcaaatactcatctagtagaatgggaacca

SEQ ID NO: 945585 - DNA, 595 bp, Homo sapiens
gcacctcaaggaactagaaaaacaagaaaaaaaccaaacccagagctagcagaagaaaagaaataacaaagatctgagcagaactaaatgagattaagacaaaaaaataataatgaggattaaggatcatcatggtggacgggacacagactagattgcagctctgacttggatggacagagcagcatgcagaggctcatgtcgtgaattttagctccagaatgactactggaataaatcaggaatcccaagaggacccacagaccctctgaaggaagcagactgctcctgcaggacacaggagacatcccaaatactgtgagtgcccaaactgcggaaatgggagagggagatcctccattctggaacacacacccccactggggaaactggaggtctagtttgtgggagaagattctgaccttacctggagatgagtcaatttagagagccatgtgaaatacatgggtggaggaagcagcaggaaaggccctgggagcttgctgggtccccargcaggccattcctgcctagcatcacagagatccttcgagagggtggccagaggcatggggaaaacaccacagggagacga

SEQ ID NO: 945586 - DNA, 615 bp, Homo sapiens
tgaaattagtagattttcatgatcattatgtacttggcttcccagagttaaaatattatgtaagatgtacacaattttttgtagctcttgttcagcctacaagagtgagcataataataccmtttcaatttttaaaatccaattgcttattcttacatggttcctgaaaagctagctttattaattctttaaaatatgggcaagaattttaaaaataataatttaacagttggatttgtggctctttctacacagatattttgtctattagtaaattcagggatttttttgagtgtatgctatatactgtatatcactgtaatcatagtacgagccattcatacagtatagcaattagtctacctggccatttcctaagagccactaattttaatgagaaaatcagtgaatataggtagtcagattttacctgatttgctaccgttttagagctttcatggaaatttgagagtcagtgacctcttttattttatcctttgtgcaaatggaaccttgccgtgaaataggcattacacttgctttttcagattaaattccagcttctttaccttttacatgttgactctattttccatcttttaatcattattgtca

SEQ ID NO: 945587 - DNA, 605 bp, Homo sapiens
tccagcaaaaccataagaattggagttcctcccctccccaaagttccccagcacacttgacaggtgcatagatcttcagtaccccttggtgaccaggaaactcctaatcatctattccttaaatcaggctggggtagtgggggagggacggattgagaggcacaggagagagtgactatgcacagtaagcaaggtgcattttaagctatgcagtggctgaccacagcttaaccaaacaaacttccaatgttttccatccactgaaagccatatataaggttgcaaagtcttaatttgctcatagtgtttcagccttgggaactgtggcagccagaaccacattttccaagtatgtctggggtttgtgcccttagggcttggctcacaaaatgtgacctttttgaggagtccaccttaatctgggatatctgctgccccattatcaaaataacatctcttaaattcaacataagtgataggtggagtcttccatgacggcagggctaattacaagaagttatctagatttctttgggtttctyattcttcagttggttacctcatcaacattgtaatctcagtctgaggcagtttgttagagcctt

SEQ ID NO: 945588 - DNA, 533 bp, Homo sapiens
agcatagcttctgtgccagtgaaccttgcctgactggtggagaagtccagtgaggtgtggcctatacagccatgcacatgctccctccccatactgcagcttccccggggcccatggcaatgccctacatcactttgctggcacatgtctgcacagataggttttgctttccttgccctgccagcacactggagtgtagtctgcacccacccagcccccagccaccactgcagatggagctttggtgggcataaagccagcaagccctgcccctgccagcaccctgcccttatactaatactgcacagagaacagcggacacccccacaccctcagggatcactcctgcttgcagggcacagagaaggcacccaaacctgccccagccagcaccctgccccaagccaataccatatccagtacaaccacacacataatctccagcagggrccccccactccacccagctatgctgcctctgtcattgtggtgaacacccacagggaggtaggcacccctgcatctgctagcac

SEQ ID NO: 945589 - DNA, 587 bp, Homo sapiens
acaaacccccaagagatttatgtgcttggttgagggacataaagaccaatgtacctggtgtgcagtaagtaaggggttgcggcaggacctgagggcatagaggagctggtaccatattgtaggactctgtaaaccaatgtaaggagtttggattttttccaagtacaatgggaagtcattggagggttttaagtgaggggacatcataattttatctgtatttcataaagctcatgctgatggctgaatgaagaactgactgtggaatggaaaccaggagtctggtcagaatgattacagtacaggtgtgaggtgatggcagttttacattagggtcatggtagtagccgtgtatagaatcgatatgtattctagaagtagagttaacaatattttctaatgggctaactgggagggggtagcaacaaaaagaggaatcaagaacaactcatagaatgggcgctttagcattggatgatccycctattgactgggataataattggaagaggggcaggctgaaaaatcaaaaggttcagttttggatatgccaagtttaaaataccgattagccatccaaatggaaa

SEQ ID NO: 945590 - DNA, 545 bp, Homo sapiens
acgccactccaggctttttttttttggcagaaacggggtgtcagcatgttagccaggctggtctccaacgcgtgatctcaggtgatccgcccgcctcggcctcccgaagttctgggattacaggcgtgagccactgcacccggcccttctatttttttaaatagcgacggggtttcaccatgttggccaggctgctcctgaacacctgagttcaggtgatccgcccgcctcggcctcccgaagttctgggattacaggagtgagccaccgcgcccgactgagaactgtaagaaataaatttgtgttatttaagccacaaagtctgtgtattttgttatggagcccaagaaaagcagcttcttctgaaactaaacactttcggtatgatcagaactcgtgcctcttggtgtctacccaaatgagttgaaaatgtccacacaaaaacctgcacacctgtttatatagcagctttatccataattsccaaaacttggaactaagatgttcctgaatagagccagcggctgtggcttgtgtctgtaatc

SEQ ID NO: 945591 - DNA, 671 bp, Homo sapiens
acttctcccagacaagcctccatctcccataaggggtccaytccaaccttctagggaaaaagaagggaaagaggaaattgttccaatgggcacaaaatatatacccatctgccaagctaaggacaaggtgtgaaaatggtgggagagaggggatataaaatgaggcttacagccgggtgcagtggctcatgcctgtaaccccagcactttgggaggccgaggcgggtggatcacctgaggtcaggagttcaagaccagcctggccaacatggtaaaaccccgtctttactaaaaaatacaaaaaattagctgagcgtagcggtgggtgcctgtaatcccagccacttgggaggctgaggcaggagaaccacttgaacccaagaggcggaggttgcagtgagctgagatcatgccattgcactccaacctaggcaaaaagaccaagactcagtctcaaaataaataaataaataaataaataaataaataaataataaggcttacttatttgttcccttcaggggccaatttcaaacagaaaagcagaaactctcatgcgtgcctagacttggaagaggttgctttagcttagtgcttctccaccttttttttccactactgcccctctaccaggagcctttgtagacaagtttctccctaaacacactcca

SEQ ID NO: 945592 - DNA, 616 bp, Homo sapiens
aatgaagaaagaaaggatcaggaaaatctgaattattgcttggttgggccagttggtttctggacttttaatttaagtagatatttctaaatgccctccaaaatgcttgtagtaatttatacttccacaaactctgtgtgagatcattacatatttgaaaatattgttgcattcttccataagtcttttctccttcaagttaaacctcttgaactctgagtagggcaagttatggactgaatgtttgtgtcaccctgaattcatatattgaagcctgaatccccagtgtgatggtattaggaggtggggcctttggaagtaataagatcaagagggtggagccatcatgagtgggattaatgcccttataagaagagacatgagaaagatgatctctttttctgctatgtgaggatacagcaagaaggtggctttcaagccagaaagagagccctcaccagacacgaaatccactgacactttgatcttaagcttgtaaccttcagaacagtgctactgaaatgccaggggtttggtctaggtcctgctgcttgctgcacagaaagccaatcactgagacaacaattattrccaaggaagaaggttttaattgggt

SEQ ID NO: 945593 - DNA, 635 bp, Homo sapiens
gctgtctggctttggatgattctaaagcaactgccttccattatgggtartgactccaactcagattcaaattccccaggaaaaagtctgacagatcttgggtctatgctcaccctttgagaatggagggttgggagagtcctgtggctggcagccccaccaggaatgcatggaattggggagtttgagtttcccaaaggaaagctgagtttctgttactcaaggaagggaagaagtgctgggcatatgtgcacagcagatgttctctacacatgggatgtcaattgagagaggtgggggatggatggggtgggggatgggaatttccaggacgctgcagaacctgccataggggccaaggctcctgccacagccctggattgcatctccctctcctcctataaaagcaagctcaggaaaagaacattgtttctgttcttgacagctccatagaattgtctccttagcttccagtcacgctcagctcctgctagaataattaccacccacctgttctccatacaagaattcacagccagtggacacacatctggcctgtaaaagacatgcttggaagtctcccaggctgcttggaacaggcaggagacaacacagggtcagccactaattcaaag

SEQ ID NO: 945594 - DNA, 671 bp, Homo sapiens
tgtagttatgtaagtatacattaactaaaatgagaagttcacttattatgtcacccacattttgggtgtttaatagacaacacaaatatggaacatttccaccactgcagaaagttctcttagacagkcctgctctacaggaaactggagaacataggacccagaggctttgtcctctttctcaccttatccaattgacctgatttattatatttctcttctgcaaagaccagctccatctcactcatgtcattgttgaggataaaacaaactttagatttgtagaattctgggtcatctgtttcaaagtactgaggaggcagaaagacacagaacagaacatgaatactcttgccctgaaaggtgtaactgcttagaaccacttatcccttcaaccttaaaaattatttacaagcccaggaggagagatttcagggttaatggccaggggccttagtaggaaatgcacacccaagatgttaccttgtaatgcatacgcagtcctatgatttgggccaggaaagagcgggtgaagcgagctcggaccaactgcttgtaggctcctcctagagaggactcatagagacacttgcccacgagccgtcccgcaaactcatacattttcaggcgcagatgagcggggcgattagggttgggatgcacctgtccaa

SEQ ID NO: 945595 - DNA, 771 bp, Homo sapiens
gctccccaaagcctggccaccttcccgagggtcccaagcagtttcttggagtccctctccccactcagtcccgccacacccctctcaggcagtctggcccttccctcctgaactttggcgggctggaaccagctcccagcctctcctcccttatcaagctcactgggggcccacacagagctcccatccccaccagcttttctcgctttgccactcccagctaaaactgggctcaaggcaagcaagcctgcagtccctcagtccctcggggcccagcccctcctcagagccctcccccagcccaggtccctaacccttagggcaaggcccctcccagcaggaagcgaaccctggcggtgccaggcagagtcaaactggaagggctggttcagaagcccctaaatgggagccaggacctctcttagggagggggctttcagccccatcctccctagtgcgatctcagatctctccagacaccacactatatgggcctccacaggcggtggagtcaaaggcatttaccctccagcccccagcaagctacttaacttccaaaagcagctccttccctcctccagaggagaacgggccgcgtgctgaactgcaagcgcctctatcaccccgcccaggcaagtctgtgagcaccagaaagcaggggccaacatgacttggtytaaaccaagggggccaggcactgactttgcgctcagaaaatgtggcggaatgaataaaaagcttgaaaaagagccgcatacatgcctggctggc

SEQ ID NO: 945596 - DNA, 798 bp, Homo sapiens
aggctgacctgggagaatctctcgaacctgggaggcagaggttgcagtgagctgagatcacatcattgcactgcagcctgggcaacaagagcgaaactccgtctcaaaaaaaaaaaacaaataatmaaataataataataataataataataataataaaaagagggtgggagtggaccaaggcctaatggcatggaatttgcaaactttatcttcctagttttctctggggagccttcctccatcaccagggcccagcagggcctcagatggcggggggtggggcgggggctacacatatccctcatggccaagatgctaggaagcccctgagctggggcaacagcctctggtcacagtcatgagggaggctgggtgcagtagcgcttatctcgcctgaccttgtggagactgaccactccctccttctggaaaacgttgccccctgccctctccaaggcctcctccttcttacatcccctggtcctggctagggcctcagcacccaattctactccttgacccaccaccctgtggtgcttttgccgggccccagcccacagccatctgccaaacatctccccctggagtccctgcggcgtctctgactcagcaggtctgtgcctgcccctgctgttccccccacccagtggctctgcagagcaccatgttgcccaagccctgagtgctggccactcccagggcctcgccttcccccaccaccagcaccaccaatttgaattcctatctctccctctggcctcctccctagacccaggccctgccccagggtggggg

SEQ ID NO: 945597 - DNA, 638 bp, Homo sapiens
caacactccagccagggtctttgtggccctctctgattacaaccccctggtgatgtctgccaacctcaaggctgcagaggaggagctggtcttccagaaaargcagttgctaagagtgtggggctctcaggacacccatgatttctacctcagcgagtgcaacaggcaagtgggcaatatccccgggcgcctagtggctgagatggaggtggggacagagcagactgataggaggtggcgttctccggcccaagggcacctgccttctgtggcccacctcgaggactttcaggggctcaccatcccccagggttcctccctggtgctccaggggaactccaagagactcccactgtggactccaaagatcatgatagcagctctggactatgatcctggggatgggcaaatggggggccaggggaagggcaggctggcgctgagggcaggagacgtggtcatggtttacgggcccatggatgaccaaggattctattatggagagttgggcggccacaggggcctggttcctgcccacctgctggatcacatgtccctccatggacactgagcaagcatccttgcccaggtagtggcctctggctgctcacaccctgccagaggagaagcaagcgttc

SEQ ID NO: 945598 - DNA, 678 bp, Homo sapiens
caatctcagcttactgcaacctcaccttgcgggttcaagcgattctcctgccttagcctcccgagtagctgggattacaggcacacaccaccgcgcccagctaattttgtatttttagcagagatggggtttctccatgttggccagactggtatcgaactcccgacctcaggtgatccgccctccttggcctcccaaagtgctgggattataggcgtgagccatcgcgcctagccaattattattttttaagagactggggtctcactatatttaccaggatggtctcaaactcctggcctcaagagatccttccgcctcagcctcccaaagtgctgggattacaagcatgagccattacgccaggtctttatctaggtttttctattgtctgtatttcatcatccaaccatcccctaccagagtgtgcctggccaattttcttcccttcttccaccacacgtttctttttttttgtttgtttgtttgagacagtgtctcactctgtcacccgggctggagtgcagtggcatgatcttggctcrctgcaacctccacctcctaggttcaagcgattctcatgccttggcctccagagtagctgggattataggcatgtgccaccacacctggctaacttttgtattttcagtagagagggggtttccccatgctgtc

SEQ ID NO: 945599 - DNA, 596 bp, Homo sapiens
tgaccgtgggaaagaaaggagggaagaattttaaaaacctgtagctgtcccatattgtctaaagaggcagttattaccataaatccctctggtctctctcatgctcattcaggartgagatgttatgattaatcaatttttcagacagtaaattagacttaacaaattacttctataatgttcaaaaaaagaataataaaatagattgactgaatgttggttcccaagggaataaagatcatcagtatgcagttttatgatcatttgactgttggaggacaggagtaagattaaaacactcttcgtggtgataaaatgttactgcagttaacatctgaatgacaagacagggtgcaggcacgtacaccaataactactgttgtatgccaggcaccattttaagtgtgttgcattaattcactaatctaaacctcaaaaaaactttatatagccaggtctggtggtgggtgcttgtaatcccagctactcaggaggctgaagcaggagaatcgcttgaatccaggaggcggaggttgcagtgagccaaaatcgtgccactgtactccagcctgagcaacaaagggagactgtctcca

SEQ ID NO: 945600 - DNA, 509 bp, Homo sapiens
catcaaatgtccagacaaaaattgaaatgctttttcttatactcttagggagaagagagagtgtagcctttttttcagctttacagctctagagctccttgttctgtggttctccccactacttgaaacatggcctcttatgaaatctatgggttctgcttcccccctctattttttttttggttcgatccttctctatcctttgcctctatcgcccctgcaatttctcctcagaggaggactttgacctgtaagggagttttacatagttagctataaaagtccatagggccaaggttactccagaaacgtctcacctcactatgccatggttcctttgcttcctcttagttctctttctttttcttttctttttgacagaatcttgctytgtcacccaggctggagtgcagtggtgcgatcttggctcactgcaatcttcgcttcctgggtttaagggattcttgtgcctcagcctcccaagtagctgggattacaggtgtgcatta

SEQ ID NO: 945601 - DNA, 509 bp, Homo sapiens
catcaaatgtccagacaaaaattgaaatgctttttcttatactcttagggagaagagagagtgtagcctttttttcagctttacagctctagagctccttgttctgtggttctccccactacttgaaacatggcctcttatgaaatctatgggttctgcttcccccctctattttttttttggttcgatccttctctatcctttgcctctatcgcccctgcaatttctcctcagaggaggactttgacctgtaagggagttttacatagttagctataaaagtccatagggccaaggttactccagaaacgtctcacctcactatgccatggttcctttgcttcctcttagttctctttctttttcttttctttttgacagaatcttgctctgtcacccaggctggagtgcagtggtgcgatcttggctcactgcaatcttcgcttcctgggttyaagggattcttgtgcctcagcctcccaagtagctgggattacaggtgtgcatta

SEQ ID NO: 945602 - DNA, 575 bp, Homo sapiens
tgggtaattggggcaccaaaagaggatggagggaaagacatttgaagaacaatggccctaaattttccaaatttgatgaaaactataatcccacagatccaagaagctcaacaaacccaaatccaagcaaagaaaaagaaaaaagaaaaaacctacacccaggtatgtcataatcaaattgttcaaaaccagcaaaaagtaaatatgttaaaagcagccagaggaaaaaagatacctttcagacagaggaagaaagattaggattagatttctgattagaaacaatgacaatgtaagcaagaagatagtcgagcaacatttttaatagtattgaaagagagaatttcaaactagactccaataaccagagaaaatatctttcaaaacagaaactgaagttgaattaaataaattttcagaaatacaaatttaaaagattctatcacccaccgactataagaaatgttaaaggaagcctttcaggcagaagggaaatgataccagatagaaatatggacctatgcaaaggaatgatgagcatcaraaatggcaactagtctctgctcctcctgttt

SEQ ID NO: 945603 - DNA, 590 bp, Homo sapiens
ctgcccacctcggccttccaaagtgttgggattacaggtgtgagccatggcacctcgcccaagttttttttttttttttttttttttttttwaagtatagtccataaataaggtttccagaactaggcactggccagtcgcaggtgtggaggcgaagcacctcagaggctgggtgtagataaactgggaatagctgttggtggcccctgctggtcattataggaagtgcaccatcactcagtgcaaagccttacctgctggaaatttgtaacacttttgagttttatttttctctgtgccttgactcccaaaactctgggctgaacaccaccataggaataccttgattttgggggaaggagatatactacctgcacctttatgacctctgaggctgaggcagggaggaaggcagagctaattacaaacctcagagaaggaggactcattcccctcttgaggtagggggcagcccttaactactaggggatgcattgccgaccttcaaacctgcttcccttcccagctactccattgccaaccattagcagctctattcctttggggaacagcttaggacacactgcacc

SEQ ID NO: 945604 - DNA, 669 bp, Homo sapiens
tttgtttccatgtctagaactttcttttttttttttgtagctgttgtaaggccagtcttgtggtawtgaattctcttagtgattgattctctgggaaaggcgttattttttcacttaccagcttagtttggcatgagatgcaattcttggttggaattttgtttcttgaagaattctaaaagcaggccccattctcttctggcttgtatgttttctgataggaagtactatgttagcctgatgaggttcccttcagaggtgatatgacccttttctctagctgcctttaagattttttcttttgcgttgaccttggaaaggctgatgactatttgccttggggatggtcaacttgggtagtttcttgcagggaatctctgcatttcttgtatttgcactttcatttctctagcgagattgggaaaatatttgtgggttatatcctcaaatatgttttccatgttttctgctttctcttaagaacgcacaatgaatcatagatttggttgttttacacaatctcttatttctcagaggctttgttcatttcttaaaattattttttctttatttttatctgactgggttgatttgaaggagtgatgttcaggctctgaaattgtttcttctgcttgatctagtctattgttaagacttccaactgtaatt

SEQ ID NO: 945605 - DNA, 609 bp, Homo sapiens
gggaatcacttttgttgtgtagcaagaatgataaaaagaagccagatgagaatgtggtttaggcttggtaatggctagataagaagaacattttgtaacatcagtcattactttcagcatgcctgtttcccaaacagacaggattctgaccttgtcaaaggcctgtgagaatggcactgcatacttactgggaatatgaaatgtgaagaacgagacggttgatcccagaagcacatcaacagctccacagaaaccacctaggtcagtgacccacctttaataacttcgtaagagggaagcaagaggttcatctggctaaatcttgttgctagtgtttgggtagttttttaactatttagagatgtgaaagaataatttccatggccattacatcactattacattgctattacatataagaaaatgtcacaataaaagaacaaaagattctagaactccagctctctacattttgtattactagctttgactggatttcacagggaactataaactgaaaacacaaagtactcayttgaaggaaaaaaatgtttaaacatgctgcataaacgtataaaggaaagacacttcaagtgttttacactagaa

SEQ ID NO: 945606 - DNA, 477 bp, Homo sapiens
cataatgctgtatggaaaagccctttgcctaaaattcagtggcgcttggtagatactcgcttcctttcccttcttctttgttccacccatttttgtctcttcttctytcctttctttcaatgatcctgccatctcctgacaatctactgtgaaaagaaaataaaaatatgggaccccaattcactactccaaaagaaaaaaaaatgaagctgaaagctgactaatgcaaaaagctgactttccttttgttcctaagcagatagctacagatacaaggttaaatatctccataggtagctcctctatgttcaccttatcttctgcaaagtgttggttaactgagcatgagacaaatgcatcattgactattctcttgcctgccctttttctcttgcaacatgtggattaccatattttccctctttcccctccagcccatgtttctcctttaaatattgaagctctcaaaattatctt

SEQ ID NO: 945607 - DNA, 826 bp, Homo sapiens
acagaattacaaaggatcataagagactgttatgaacaattayatgccaacaaattggaaaacctagaagaaatagatacattcctagacacatagaacctgccaagacacaatcatgaagaaatagaaaacttgaacagaaaaatagtgagtaaatagattgaattagtaaataataagtttcctatcaaagaaaagcccaggacctgatgccatcactgctgaatgttttatttatttatttatttattttgagacagagtctcgctctgtcattcaggctggagtgcaatggcgtgatctcagctcactgcaacctctgcctcccgggttcaagtgattctcctgcctcagcctcccacgtagctgggattacaggtgtctgccaccatgccaagctaatttttgtatttttagtagagacggggtttcaccaggttggccaggctggtctcaaaatcctgacctcaggtgatccacccatctcggcctcccaaagtgctaggatttcaggtgtgagccaccacgcccagcctctatcaaacatttgaagaagaactaatgtcaatccttcccaaagtcttccaaaattcgaagtgggaaaacttctaaactcatttatgaggccaacattaccctgatatcaaagccagagaggacactacaataaaagaaaattacaggctaatatatctgatgaacagagatacaaaaattttcaactgaagattagcaacctgaattaaatagcatgttaaaaaaaacatataccatgatcaagtggaattcatcactgggatgcaaagatggttcaacataggcaaat

SEQ ID NO: 945608 - DNA, 510 bp, Homo sapiens
agcttttcagtagggggaataaacgaactttacatagaagcggcagcaggtaaatctcaccatgccctcytctcagccactaagatctcttttattccttccctatctccttagaagtccagcccactgtgatggggctggagggaaggtagacggagaagaggctacattagatctgctcaagcctttaggaaagaagccttcaatctttcatttatttaaatatatgtattcatctcctcctttggcaattggaaaggttaaaccccaagggtgaggagtagaatagaagcttggaggaaagaggttgagaagctgccttctgtctgtctttggtcagcatttcaaattagttgtgaggcccttagcattcacacgctacccagcagagctcaccaggctagaagttctgctcatgacaaaggcagcacgctcgcctgtgacatctactgtacatcttctcgccttcaggaatccacggcaaccaacgttaatccaggaatcaggcac

SEQ ID NO: 945609 - DNA, 557 bp, Homo sapiens
gctccaaatagcatccctatttgccaataacacctcaggcaccattggatctactgggtcatatggtccaagtgacagagcagcttgcacagcagcctagawctgttgcagagcattctctttttgtggaccccactcgaaactggcagcctttcagttcacacaaatgaggaatatattgccttcagaatccaaatagggctactaggcattgtgctaaagatgcacaatggttgtagaaggggccaaatccagcaacttatccttcactttagaaggaatacctcaaaaagccccacatcactggaccccttgaaattttactgaggtagaaggtccttcaattttagtcggatttatttttttttcctctgtcatggaaatgtctcaccagtcagtccagtgtgtttgctacttcttgctcattggatctaatcagcataatgttaccaatgtaatggaccagtgtgatatcttgtggaagcaataggtgatcaaggtctcttggaataagattatgacataaagcgggagagtcgatataaccctgaggcagg

SEQ ID NO: 945610 - DNA, 611 bp, Homo sapiens
cctccactgtgattcacctatgggggtctgccaaaggctccaaatagcatccctatttgccaataacacctcaggcaccattggatctactgggtcatatggtccaagtgacagagcagcttgcacagcagcctagaactgttgcagagcattctctttttgtggaccccactcgaaactggcagcctttcagttcacacaaatgaggaatatattgccttcagaatccaaatagggctactaggcattgtgctaaagatgcacaatggttgtagaaggggccaaatccagcaacttatccttcactttagaaggaatacctcaaaaagccccacatcactggaccccttgaaattttactgaggtagaaggtccttcaattttagtcggatttatttttttttcctctgtcatggaaatgtctcaccagtcagtccagtgtgtttgctacttcttgctcattggatctaatcagcataatgttaccaatgtaatggaccagtgtgatatcttgtggaagcaatargtgatcaaggtctcttggaataagattatgacataaagcgggagagtcgatataaccctgaggcaggacagtaaaggtatattgc

SEQ ID NO: 945611 - DNA, 593 bp, Homo sapiens
attggagtcaccacatagttaagcttatgataatccacaggcattctccaagacccatctgtcttctgcacaggccaaatgggagaattgaatggggatgtggtgggaatcaccacccctgcatctttcaagtccttgatggtgggactcatctacacagtccctttagggatgcaatattgtttttgatttactaggttgaggcagctctaatggcttccatttggccttttccaccatcatcaccctcactctaccagtatggagtcaatgtgggcgttctgccagctgctaagtatgtctatgccaattatgcattctggcactggggaaattaccacaggatgattctagggacccactggacccactgtaagtcaaacctgagctaaaagtttattaattgcttgaccccctataagcccctacttaactggaggaacacaatgacattttgggtcccctggaatcaaagtcagctcagagccagtgtccagtagtccctgaaatgtctgatcattttcttttccccartgcacatgtaccctggtaaaatgctggaggtcttctggggaaggataggagaaagatta

SEQ ID NO: 945612 - DNA, 606 bp, Homo sapiens
atcttagggagaagaatatggacaaacaacctccatggcagtgtctagctgataaaaagagtgtgttgaggcacaaccatcctcaccccacaccaaggcagatcttcaggcattcagggcatctgtttatccagttaacagcctgaggcacccctctcatcctgtgcagagaatttggtgtagtgtaggagccccctacacttcatgcccaggaaaatctccacacatctgacgtacccattctcctggattttgagtttaggctaccttcacttcccatgcagagcaattggggccaaggagttttcctagctttatgcctaggcacatctctgggtgcttggtggccacccgctggattctccttcagtactagtgcttgtgacttccatcggggacctatagatggttctgtctggttcagccccatccatcttgcccccacccctgggctgagcagggtgctcagaccactgtgcactccaggatcagcccattgcctgaggtaacagagaacttcttccaataargaaggatcaagtatgtacccaaccctattggctgcagccaactcttacctataagaataatctatgacctctaggt

SEQ ID NO: 945613 - DNA, 582 bp, Homo sapiens
tgagtagtatttcatggtttacatatactaccttttctttatctactgattggttgatgggcacttaggttggttccgtatcttttcaattgcragttgtgctgctgtaaacatgtgtgtgcaagtgtctttttcatataatgccttcttttcctctgggtagatacccagcagtgggattgcttgatcaaatggtagttctacttgtcattctttaaggaatctccacactgtttcccacagttgtactagtttatgttcccaccagtggcataaaagtgttccctttttaccacatccatgccaacagctattattttttgactttttaattatggccattcttgcaggagtaaggtggtatttcattgtgttcttaatttgcaattttctcatgattggtgatgttgaacattttttcatatgtttgttggatgtctgtatatcttcttttgagaattgtctattcatgtcctttggccactttttgatggggttgttttttcttgctgattcctttgagttccttgtagattccggatattagtcctttgtcagatgcatggtttgcaagtattttct

SEQ ID NO: 945614 - DNA, 580 bp, Homo sapiens
accttccaaaacagaaaacaccaggcccagatgcattcacggatgaattcttccaaacatttaaggaagaaattatgccaattstctacaatctcttccagaaaatagaaggagaatgaaatagaatgcaacaatgtataaaaataattatacaccatgaccaagtaggatttatcccagatatgtaaggctggttcaacatttgaaaataatttatgcaatccattccatcaacaagccaaagaagaaaaatcacacgaaaatatcagaagatgcagaaaaagcatttgacaaaattcaacaccattcatgataaaaactctcagcaaattaggaatagaagaaaacttcctcaaattcataagcaaaatatattttgaaaacctacagctaacattatacttaaactaatataatttaatgggaaacttgaagcttttccgctaaaatcaggaataaggcaaagaagttccctctaagcactgcttttcaacattgtactggaaggaagtcttagttaatacaatatgacaagaaaaggaaattaaaggtatacagattgggaaggaagaaataaaac

SEQ ID NO: 945615 - DNA, 825 bp, Homo sapiens
gtgacaatcagtgcgctcgtacctgagaaacagcttgcactgagcagcctttggtgattagctttgggctctggatacaaggcagccccttccacccaacactatacatttctgagtccctctctaccctttcaccaagcagccactgaggccctattgcagaccagccctgcgtcccagctgggctgaatcagcgaaccatccaagagggccagacttggggaagctcgggcccccgacagagctgccgtctcctggcagaaagtgatgagagggcagcaggatgtggccagcttctccctatgttccttcagagacaggggcaagaaaggcggggcatgaaaaccaaacactttcctcctcttcatctctcttccattcgcccactgctctcccttctcccagccctcctggcctttcctctctccccaccacaccgcaagcccacataatgtgtcggtggctgtgcaggctgacgactcactggaacaagacacccctgtggactgccgctgtgtctcaagagaagcccgacccctaagcccctctggatagacccccactttccttaggagatggctcctaggaggtcagcttcagcctccctatagaattggagatcttattgtaccccatatgaaactgcccataatgcccctgctatctagaaaattccttctgccgcagtccctgagataaacacctaacatgctcatttatttattcattctatcagcagacatttattgagggcctacagtatatcagtgagcaagaaacagcacccctgccctgagaagcttrcattcaagcatgaggagacaa

SEQ ID NO: 945616 - DNA, 613 bp, Homo sapiens
tgaggccagccctgatgctatgtgttaggctctatcgaacgttctaatgaaatgagtctgctcagaggcaccctggtggggtagtaggagccccagatttgagcatgggtatactgagttttagtaatagctctttgaataacttcctgttgactttgagcatgttatttaacttcttggaggttcagtttagtcatccattaaatggagagagggagaagtgggaaggtggtggactacatctgtatttctccaattccagttagttatataccacatttttagtatataaccatttaggctataaccatggcctctggccccacactccctgagttctaatcttggctctgctatattctagctatgtgacctcaggcaagtgcctcagtttcctcatctgtaaaatagagattgctgtgaggattacataaataagtaagtgaagccctcagaataatggctgatatgtgataagcacggtacaagtgctcattattactattcctatgaatcatacrgtatctgtactagtagtactaatgttttttctttaatatgactcacactttaaatttaaaaaagtcatctatagtctctttccaagtaatag

SEQ ID NO: 945617 - DNA, 582 bp, Homo sapiens
catgtccacggtgccgtaattggggtggttracgttgtaggttgacttgtctgatttccctatgagcatctcattgtctcccaaggatggtaagttcttggccccacatgtgttggtggctgggccagaaaactcatccccctcactcacaggagaacaagcttccttctcacagtcagccagaatgccctccttcttcttggtgtgctcctcagacaagaacttgacaaaaccatcaatgtcactctcaggttggtatcgaaggagcaagacacagacagagaccaaggtgtaggccaggagcgtgccgatagacatcatctctatcaggtctctcaagctgaccaacagtgcgaggagcgctgccaggaaccccgacacgatgcaggccaccactggtgtctctgtgtaggagctgacgtgagccaggaacctggaggggccgggcaagcagagggttaatggtgagctacagtgaccgattccagtgcagccaacatagggagctagaactatcaataggctggtgtgattaactcctcctggtcctgctccaccaatttacttctgcattcactactt

SEQ ID NO: 945618 - DNA, 595 bp, Homo sapiens
atctctctatccatatgataagggatacaagacctttctcatacagtggtttaaagatgagagtaaataatatatgtgagaacacaaatagaagagcatgcatatgaatagcatttaatgctcagttaatgaggctcttatcaaagtgacagagggcctccatgtaatcagagaagggtccacttaaggctctattggcatttgctgaaggatcaagacttgctgtattcctatctatgaatagacctatggaattaaaacccagtacaagcattttttttttctacttatatctatgtatgctctttctctcttgccttcttgataattcagaagcagaactttgtcttattactgacttccagaagaaatttcacaactctcataaagtttgtgatttttgtagactatactgaacatttagtgactcccagggaggatcattttaatcagcatacaatagtttgctcttcstcttcccttccattttcttctttccctttctccccccttctctagttttttaatctcacctcctctccctgcccttttctatcctcctcccctctcatttcccttcctttatttcttctct

SEQ ID NO: 945619 - DNA, 720 bp, Homo sapiens
tcctggaagcatctcgggccctgctctctccctctgactgggacagcctctccaggctctcccctccacatttcctcctgcctctggctgagggctgygctccactgctcccggtttgtgcccgcccctacccgggcacacacaaactcagctctgcacggcctgcctggaccgagaaaagttgccctgccgctccctccccaaagaggtcccagtggaagcagcaaggaccccaaaagtcctccctatgacttggttcccacacttggtccctgcctggcacccacccccagagctagttcgtgatcctggctgtggttatgattcctcgttaacggcttcctgattcctgctcccaggccacggttctgtgtctcacagcctttgactcccatccggctggggccaataggaaacagaaatgctcccaaaccatgccagtcctctgggagaagttctccttcccatcccatgcaggcacagggaagaagtcaaagcacactttttttttttttttaagtcttttataaggcaggcacttttcctgcattgaaatccttccaaattacctgggagggaaagggtggtgtcatttccttgtaagtatcaaggagcaggaagcccagagaggttcagccactagccctaggtcacacagcttgcaaactattctgggtctcagatttgactctaagacctcagcttttctcatgaggtcat

SEQ ID NO: 945620 - DNA, 628 bp, Homo sapiens
ttaccaccttggcatctgattggcaggtctacgatgattgacacaaccatcttccaatgaactaactctctytacagaaccctccctgcagggcttctggataaggttgggttgcatagatagttgactgcacaaaggtgctgagcagggaggtggactagcgccagcccttgccaagctgcacaccctcagcatcacgtccctccaacggggactcttatcatttctaatttgtccagaggggcaccttctttgctttgcacaaaggcactctaaagactagcaatgggctgcagtcaaggacccagtattccttctcctgactgctcagcgatgcaatgacaccatcaccgcgcaccaccccacatgctctcatggacgttgctttctgtctgctaggatcaatgaactctcttatctcttttttttcagaactatggtgttctcacaccaaagcatgggctcggccacccatcccctctcctgagaacaagcctccagaaccctccacgtttgtccccagtgttcactaacctcagtcctcctgcccggagggcatgtgtttgctggagatagtggagtcggtggcaagaaagtgccagagggaggtgcgcgggcgggaaagcat

SEQ ID NO: 945621 - DNA, 573 bp, Homo sapiens
ggggcagtggggcaagggagagaagaagccagagaggccgcaggcctgggctttccatggcgaggaggcctggatactgcataagtgcagcaggaaatgttgggtggggtcggattttcwctttacaagggcagtcgctggggcagagggcatgggactcagggagggactcaggaggcagagagacggtgggacgagactgagggtgccggctggggctgggggtagaggactgtgagcgcttggcacttggaggcagtcagagctggtctgggcaggggtgctgtcacccagggccgaggaaagggatacaggaggggcagagggtgggtcggaggctgtcctgggaaccctaaacgtgggggccaggagaaggaggtgctcccgtttctgatctgtaccaattaaggggaaggtgagaaattgcttgggtggagtgtccttctctgagtctgggggttaggtgggatgaggggacctcggaggctggaggccagagttcacactcctgccctgctgtgtgacctaaggctgagagctgcctctctctgggcccagatgcatcattaccta

SEQ ID NO: 945622 - DNA, 800 bp, Homo sapiens
tagtctggccaatatggcaaaatcccattgctactaaaaaaaaawaataataataataataataatatataaattagccaggcgtggtggcacatggctgtaacctcagttattcagggtggctgaggcatgaaaatcacttgaagccaggagttagagactgcagtcagtcaagatcatgccatcgcactgcagcctggacaacagggcaaactctgcctcaaaaaaaaaaaaaagaagaaaagaagaaaagaaaagacaagactatcctttcttagctgaattgaactgccttttcatttctatcgaaaatcaggaagggcaatttaatgtataatgacagaagattggtagttgatggaggacttttgggagtgacagaaatgttcattcctttgattgcagtgatggactcagttacatacatgtcaaaacttaacaaatggcacactttaaatatgtctactttgttgtatgtcaatttcagctcaataaagatgttttttaaaaaaattagagagcccatacaacacagggaaacctcatctctgcaaaaaatttataaattagcagggtatgatggcttgtgcctgtagtcccagctatttaggaggctaaggtgggaggatcacttgagccagggaggtcgaggctgtgatgagctgtgattgcaccactgcactccatagcttgggcaacacagcaagaccgtgactcaaaaaacaaaataaataaacaaaaataaaagaattagaggtttcaaaaggctaatacacaagaactattcatgagctttgctg

SEQ ID NO: 945623 - DNA, 539 bp, Homo sapiens
tagggtcccagtccctgggtgtgaggggttcctgccccaggggtgaggcctctgccagcaaatctctcctctctctcgcaggaccgggcagttcctagtgagtggcagcacgagcggggctgtctctgtgtgggacacggacgggcctggcaatgatgggaagccggagcccgtgttgagttttctgccccagaaggactgcaccaatggcgtgaggtcctcagttcaattccagagatgttggggcttgggttggggagggaggtgaatcccagagggagcaagtgtcctcactgaaggcactgatagaccctccccatctctccctcagcctgcaccctagcctgcctctcctggccactgcctccggtcagcgtgtgtttcctgagcccacagagagtggggacgaaggagaggagctgggccttcccttgctctccacgcgccacgtccaccttgaatgtcggcttcagctctggtggtgtgggggggsgccagactccagcatccctgatgatcaccagggcgagaaagggcag

SEQ ID NO: 945624 - DNA, 542 bp, Homo sapiens
aacacagcgagtgacggtaggatggatgcccttgaccagatggcaaatagattacattgggccacttccaaaagcgcagggctacacatatgcactgacggctgtagacacagcctctggcttgttgtttgcctacccttgcagggtggctaaccagcaacacaccatttgaaccctgcaatacttatgtgctctatatggccaacccctggctgttgaaagtgataggggaacacgtttcactggacagcaggtataacagtgggcactacagatggacatatgatgggggtttcatgttccttataacccacaagccactgattgagcgatataatggactcttgaagaacgggttacggtagcatgttactcccccatctttgcggggctggagttcaaggttggacctggtgcttcaaattttgaatgagttgccacagaaaggcrgcccagccctggtggaggcactgttacaccaggccgccatgcccgtccatctatacacatctaggatgacctcctccggccaagtatgggga

SEQ ID NO: 945625 - DNA, 597 bp, Homo sapiens
ccctgtgcacaggtaacatccctccttctcccccacgactcggctggagcttgattttgagctgctctcaaggcccaggcactcgaatcggaagttaaatagcttatggactatttaatagaatataccaccacacgtatctaatcactcaaataccacgcttttaaaactcatgaatgttttaatcgctaaaaatgtctacagtcaaaaactgcagcctaagtggctcaaagtgcacatttcaaacacaagtagcgttctacttacgctttaattatgccgttcattaattttcattaagttgtaaaacatgcaaagaatacgtagattaacaaacaaaactgaaaatctgttttattaatttacagaaacaaataattaaacacgtattaatcactggaaaaactataaaatgcagaggcagattttaaaatgtaatttaatcaagacagatcattagcggaaagattacggaggttttctttttctgtgatgcatgtattttaggtattatttccttagctgatacatatacratatattcatagtagtttctggatgtcaacagagtagcattttacttgaaagtgaagagta

SEQ ID NO: 945626 - DNA, 568 bp, Homo sapiens
gaggaattatgtctgacagaagggaagaaatgacggcggtggacttctcagacactgtaggaaaggcctctacttatctagtgaaagtgtctacctagactaagaggtattttagttatctgactcagggcatgttgattaaagctaatttgccagtcctgggtgggggcaaatcctcaagcttgatatgtagggaagggagggggcctgaataatccttgagaagtagtagaatagcagatggaacactgagaagttatttccttgaggacagatttctacgatggaaaggaaatgagaagttttaagaggcgggctagtggtttgtactatagcatagtctgcctttgctcgtgtgtggtgagtaggcctggtggaactgccatcaataaaccaagtgtgatcagggtgagaaacaggaaagaaggaaatgtgsggaaatggggtgaatgtcaggtggatcagagagatgcagtcatgagggtcaggtgtggtatcaggaataatgtgggaggctggattgaagtccgggccaggaacgatggtaattgtgggagacttaacaaag

SEQ ID NO: 945627 - DNA, 579 bp, Homo sapiens
cctctccttttgggtttcccttaggcacttaaactcaatctgtacacaactgaactcatcgtcttttatcagcccatcacccgttcgcctttcctgttctaacttattgcctgttgtattktttttcttatttgatgggcactgacattcatctttagtcactcaagacaggaacctagaattacttctacttttctccttctactgtactgacctactctgcccaccatggctaatcagtcctattgtatataccatcaaattttctagcacttttcctcttctccattaccaatgtcaactccttggttgatatcctggtcatttctccactgtattcgtgctataataaactaaactgaactggccaccgcatttcaccctcccttgcttctctattcatattcaaattgatgacaggttggttttctctaaaacttaaaagggatgaaagaatgaatgacaaaacaaaaacgagcaatttagaatgaaatctactctcaagtacaaatagtataatagcaacaaatcagctagaaaaaaatacaagctgtgtatactcctttaaattgaggtaaa

SEQ ID NO: 945628 - DNA, 579 bp, Homo sapiens
cctctccttttgggtttcccttaggcacttaaactcaatctgtacacaactgaactcatcgtcttttatcagcccatcacccgttcgcctttcctgttctaacttattgcctgttgtattgtttttcttatttratgggcactgacattcatctttagtcactcaagacaggaacctagaattacttctacttttctccttctactgtactgacctactctgcccaccatggctaatcagtcctattgtatataccatcaaattttctagcacttttcctcttctccattaccaatgtcaactccttggttgatatcctggtcatttctccactgtattcgtgctataataaactaaactgaactggccaccgcatttcaccctcccttgcttctctattcatattcaaattgatgacaggttggttttctctaaaacttaaaagggatgaaagaatgaatgacaaaacaaaaacgagcaatttagaatgaaatctactctcaagtacaaatagtataatagcaacaaatcagctagaaaaaaatacaagctgtgtatactcctttaaattgaggtaaa

SEQ ID NO: 945629 - DNA, 743 bp, Homo sapiens
tctctagagaaatagaaccaataggatatgcagttgacccctgaatgcggggattaggggcactgactctctgtaccgtcaaaaatccatgtataacttttgactccccaaaaccttaactaatagcctactgttgactggaagacttaacataaacagtcaattaacacatgttgtgtattatatgtattatatactgtattcttatgataaagtaagccagagaaatggaaatgttattaagaaaatcgtaaggaagagaaaacggacttactattcattaagtggaagtggatcatcataaaggtcttcatccttgttgccttcatgttgagtaggctgaagaggaaaaggaagaagaagagctggtcttgctgtctcagaggtgacagaggcagaagaagaggtggaggaggtagaagaaaaggcaggaaggcagacaaactcagagtaacttttacggaaaaaaccaatgtataatctctctctctctcatatataaatatatgtgtgtgtgtgtatatatatatgtgtgtgtgtgtgtgtgtgtgtacatatatatatgcacacacatacacaaaggcctgagaactctgagagtaagtcctagtccaagttctgaagacctaagaaccaggagtgcaatggccaagggcaagagaagatgcaagtcycagctcaagcagaaagcagattcttccttcctctgcctttttgttctaatgtggccatcaacagactgg

SEQ ID NO: 945630 - DNA, 631 bp, Homo sapiens
tgtctccagcaggaggtgagatgtgaccgccttcctccttatcaggttattcattctggctcatggaaccagaatcaggttatratgattaatatttctgcttaatatgttacattttctttgccaccaatctttctgttattaacactggaaaccaaacttacccagtgaaacaccttttttgctcatgagtcacaaatatcaggaccttggatagaagaagcttaaaaaataaaaagggtttttgattgttggatggtcacacttcacaccacactcacacatgctttttaaataatttgaagagtgggttcagatgaaagactatatagaataagaatttttatcgagtttgttgaggcttaaagcctgtaagcaccaaaaaaaaaagttttctctcaattaaggaagttaactattaattcaaattcttgggtgtaaatgttaatattgtcacagaaagaagactgtgcagaaagatgatacatttctatgggccataatattggtccattcataccatgctctgagctttcctcatgggatagtgatgttatactttgtttatgtatttatttatttattttgagatggagtctcgctctgtcacccaggctggagtgcaatggcg

SEQ ID NO: 945631 - DNA, 416 bp, Homo sapiens
ggtggaagttcttgtgaataaatgtcttattatgtagatgaaacctcccaagtaatctccaagagctgccctcaggggaaaagatgaaaagtctgtttgtggtggcaactctcagttatgtctcttctccagcggttacttaacgagagtcctagggaggaggtcttaagacaattgcttttcttttggaaacaagctttttttttcagataagaatattccagaaggagtcccttccagtgcttcaggaaagaaaggagatggggtgggggtgggggagggcacttggggaggggagggtcagagagaaactttggttctgaggcttattttttttttccytttttttttttttttttttttttagacagagtctcactctgttgcccaggctggcatgcaatggcccaatcttg

SEQ ID NO: 945632 - DNA, 704 bp, Homo sapiens
tggaaaccctgagcctctgtgacagcaccacattatactttccatgagttacatcctcaacgcctcctgaggctgctggccaagactgtgcacagagaagcgaggcatctttcctggggctgaaaggagtctgtgttagaaaatgtagagcagagtacagcattcttccctcctgtggactcagaaaaataaggcagagcaaataccagctagcagctactttgcattctgggcaaacccctgcaatgtgagaccatcaggctgcaaaatgggccccccaggcaatactgaaatcagcaataatatggagagaagaggtactacgaggagtgaagctgaggcagttcccatggctttctgtgttgattccagaaattattgccaaaacatcaagtccagagtctcaggtgagtgcccccatgttagtaaatcctcccatccaggctgctattccacacactactccccagtcagacacccacaagctcccttcctgcacacgtgcccttggaccccgcaattcctttggtatgtaagctatttatccctagagcagacatagcttgggttcccagaaagaagatcccaagtcacaggatytgtatgctagcatgttagtagatagtgcaacccccgggagcagaagtgaggaacaagtagaggccaacatattgatgcgccattgaactggccaccactaactg

SEQ ID NO: 945633 - DNA, 607 bp, Homo sapiens
tggtaaaaatactgaatgatgttgtaccacatatagactgacaaaaatgcaaaagactgtgtgaggaatatccacatgtttctgagggtcatttccctggaaacagcttccttatggcccttggaaggtggaaaagctcctgtttcataaaaatgtgataagaggtcctctttttcagtaaaccatagatagatcccattggtaaggtcaccagtctccagagatacatctttaactggaaagatcctgtaatgtacatgtgtgactgttggtttcctgaacccaaggatccaggtttgaatattgataggttcagctttaggataagctatcgttgtatctattacccactggaggccttttgatttgctaattctttagcatctcctcttgctggacttccatttccctgttgtgctacaagtgcattcagaataattttagttgccacagatctttacagagtaacatgtgtaagaaatggmaagttatttttctctgcaaatgcctgacttgtttctcacctcttcctgaggaagcccctttctggaaacgaaataattcattttcaatctctgctcctgtaattactttctaagtgcttctt

SEQ ID NO: 945634 - DNA, 617 bp, Homo sapiens
ccagcaatatacctttactttctwacctcaggggtatatcaactttgtggctttgtgttataatcttattaggagagaccttgatcgctttttgcttctgcaagatatcacactggtcgattacattgatgacattatgctgattaggtccagtgagcaagaagtagcaaacacactggacttcttggtaagatatttgtgtgcaagaggatgggaaataaatataactaaaattcagggaccttctccttcagtaaaatttctatgggttgggtggtgtggggactattgaggtagtccttctaagataaaggataagtttctgcatctggcccctcctataaccaagaaagaggtacaacacccagcgagcatatttggattttggaggcaacacattccttatttgaatatattactccagcccatttattgagtgacccaaaaggctgccagttttgagtggggaccagaacaggataaggctctgcaataggtccaggctgctgtgcaagctgctctgccacttggactataagacccagcagatttaatggtgcttaaagattcactgcataaattgtcagtaatgtagtggggtccttcctcaaggggac

SEQ ID NO: 945635 - DNA, 772 bp, Homo sapiens
gcaacaaaagtgcacataacatatcctcatgcatcctcctgaaagatatatgacacaaaagcaagcgttgttgctttgttgtcaacattagcaggcttgtcaacctggatkatgtgccacaatgactcattaatcctctaacaattgtgcctcaacatcctttgctatttcatcaattcatctagttatggtgctagtaaagaggaacacatgccaccttctgaactgcagccactcctgaaagtttatgacaaatatcttcagtagcagacaggatcaactcttcaccaatagtaaagggcttcttagctttagcaatgaagttagccactaagatgaggcattcagtgcagatacatttgatgaaatgatggtcttcaataattgattctgttcttcatattcatggtttttggtttttaaacgctaaaggcttgtcttttaatgagggtgcttggtcttcatgttgtgaagcaggtttgaaggtttcatggctttgctgcctagccagtcaccacatattatacaaagcaggactggagaatgtaaataaccagtcgccatgaacccataatttaagtagactcttggtattttcttccaaatgcagcatattagtccattttcatacagctacaaagaacttccaaaaactgggtaatttataaagaaaagaggtttaattgactcatagttccacatggctggggaggtctcaggaaacttacaatcatggtagaaggcaaaggggaagcaaggcaccttcttcaca

SEQ ID NO: 945636 - DNA, 642 bp, Homo sapiens
aacaatatctgctaccacagaaacacacttaagtccatactctatagtctctataaagcaactacacaatgtaaattaacgcaaccagctaacaactccatgatagaatcaaaacctcacatatcattattaaccttatatgtaaatgctctaaatgctccacttaaaaggtacatattggcaagctggataaaaaattaagacccattttcctgctatcatcaagagacccatttctcacataatgacacccacaggctcaaagtaaagaattggacaaagatctattacaaaaacagaaaagataaaaagagcagaggtcactattaatcggaaaaaaatgactttaaaccaatgacagcacaaaaggacaaagaaggcccttatataaagatcaagggttcaattcaacaagaaaacttaactatcctaaatatatatgcacccaacattggaggactcagatttataaaacaagtacttctagacctacaagaagacttagacaaccacacartaatagtgggggatttcaataccccattgatagcactagacagatcatcaaggcagaaaactgacaaagaaattctggacttaaatttgacatttgatgaattggacctaatagacatctataga

SEQ ID NO: 945637 - DNA, 602 bp, Homo sapiens
tctaccagacacacacagaaaaactggtaccaattctactaaaattattccaaaaaatcaaaaagggacttccccctaactcattctatgaagycagtgtcaccctgataccaaaagctggcaaagacacaatgaaaaaagaaaactataggacaatattcctaaagaatattgatgcaaaaacactcaacaaaacactaacaaaatcaatgtgcacatcaaaagttaattcaccatgatcaagtaggctttattctgggatgcaaggttggttccatgtacacaaatcaataaatgtgattcatcaaataaacagaattaaaaacaacacccatatgttcacctcaatagacgcaaagaaagcttttgataaaacccaacatcccttcatgatagacaccctcaataaactaggcatagaaagaacatacctcaaaataataagagccatctatgacaaacacacagccaacatcatactgaacaggaaaaagctggaagcactcccttaagaatagaaagaagataaggatgcccactctcactacttctattcaatgtagtattggaagtctagccagaacaatcaggcaagacaaaga

SEQ ID NO: 945638 - DNA, 585 bp, Homo sapiens
catgagctcctcaatatcttaacaaaaaaagtttttcaggttctacctacagcaggcttctcactattctgtaaacatgtatagcattcttagggtctctctcctggtgcttccttcctcctggatggctctctccccccaaaatccagatggccctcgctttctttttttctttttttattattataattaagctctagggtacatgtgcacaatgtgcaggtttgttacatatgtatacatgtgccatgttggtgtgctgcacccattaactcgtcatttactttaggtatatctcctaatgctatccctgccccctcccccgacctcatgacaggcccctgtgtgtgatgttccccttcctgtgtccaagtgttctcattgttcagttcccacctatgagtgaggacatggatgaaactggaaaccatcattctcagcaaactatcgcaaggacaaaaaaccagatggccctccctttcacaccttcacgtctttgctccatgtcacggtctcaatgagacctaccccrgtcacattacaccctctttaaaattcgcaaactgtgcctccacctggaaatcc

SEQ ID NO: 945639 - DNA, 584 bp, Homo sapiens
agtatattacagggatagattgtgggtaattgcatggagatagcacagaagagctggtcaactttcaccatcattaaccacattttgaagtcttgcatcacaatgaatagctgctttttgttttttaggacatggcttttctcaaaatatattcacattcattttctaggtagcactgctctttttgaagttattctatgattcagtataccttgacatgaacatttcctgttaaatttttccatcttctgtgccatatttctatgttgttttgggtacacaggactccattctgcatgcagtcatacacagaccacaaatttggcaggaacaatcctggtaatggaacccaacaccgttgtgtcagtgtcttcttatcctaccatgctcatgattattttggaaccagacagtatctttgctggcttcttcaagaaaatctggctttaattcattaaaagctcctgaagctgatgaaataatctatacaccaaacacctgtgacaagagtttagctacgtaataagcctctacgtgtacccctgaaccyaaaataaaagttaaaaaaaaaaagctcctggatt

SEQ ID NO: 945640 - DNA, 582 bp, Homo sapiens
gctggaactacaggtgcatactaccatgccmagctttgacaattttattttttaaaaaatttattgttttatttttataaaagttctaaatgtacatttcacggtaatttggaaaatacaaaaagataaaaatgaaaaacatcatagttattccgtaattcagagagtcacatttttttctaactgttcttcctataaagatttctttaccaaaattagaaatatgctatgcatgaaatattatatccttacttttattttttttctttttgagacagagtctagctctgtcgcccaggctggagtgcaagtggtgcgatctcggctcactgcaagctccacctcccgggttcatgccattctcctgcctcagcctcccgtagctgggattacaagcgtctgcccccgcgccaggctaattttttgtacttttagtagagacggggtttcaccatgttagccaacatggtttcgatctcctgacctcgtgatccacctgccttggcctcccaaagtgctgggattataggcgtgagccactgcacctggcctatatccttacttttaaaatttaacattaac

SEQ ID NO: 945641 - DNA, 551 bp, Homo sapiens
agggtgtgaacataaccttttggggggctaccatcaacttacaacagagcacttatataatsttttctggttcagtcatttatttgtattacgtgtcaccctccctttgcccactccactgcttgctctctttctctctctccccacccaactctcctctgtctttcactccatcagagctaggatctgtctgtcatctccataactgtatccataggacataaaacagtgcctgaacaagggaaagaaagaatgaaagattgggtttccttggactgtggccccttagcactttatccataaatttggtgctgctcttaacctattgtgtcagtgttgggtatgtatgtacatatgtatagatccctggttttaatatgcgctccctgaggcctgtttttcataattccaggcaatcatttctgccccataattcagagcaataaaattgtgtgccaagtattatgctacacgctgacttggttattaataatagataaagacaagtataaatacagcccacacattgcataggtttgattttatttgga

SEQ ID NO: 945642 - DNA, 610 bp, Homo sapiens
ccaccaacagccctgagtctgtttccaggaagagggagagataggcttgaaaacttgcccaaggctatctgcctcacagctgtgaaagaaaagggctttagttcttcccctacgagtgaagtctgcatactggattcacgccctcccctgagttctggccaggaggtttctcaccctgttcaaattggtacaaatttcggctagagcattccttctccctgtggagttttaccccctgcatctctggccaccctctcagtggatccctgtggtgccaggcaggaatgggctgcaggggcacccagcgagcttccagggcctttctgccgcttcctctacccctgtttttcgcttggctctctaacttgactcagcttcaggtaaagtcagaaacttctcccacaaacagatcttcggcttctccagtgggggtgtgtgttcgggagaggagggtctccctttcccacttctgcagttgtggcactgcagttggggcactcacagtatttgggggtctcctgggtcctgcaggagcagtctgcttccttcagagagtctgtggatcctctcagkattgctggtttgttcttgcagtcgatctggagctaaa

SEQ ID NO: 945643 - DNA, 576 bp, Homo sapiens
ttagttcttcccctacgagtgaagtctgcatactggattcacgccctcccctgagttctggccaggaggtttctcaccctgttcaaattggtacaaatttcggctagagcattccttctccctgtggagttttaccccctgcatctctggccaccctctcagtggatccctgtggtgccaggcaggaatgggctgcaggggcacccagcgagcttccagggcctttctgccgcttcctctacccctgtttttcgcttggctctctaacttgactcagcttcaggtaaagtcagaaacttctcccacaaacagatcttcggcttctccagtgggggtgtgtgttcgggagaggagggtctccctttcccacttctgcagttgtggcactgcagttggggcactcacagtatttgggggtctcctgggtcctgcaggagcagtctgcttccttcagagagtctgtggatcctctcaggattgctggtttgttcttgcagtcgatctggagctaaaattcacaaggcaagcctctgcatgcygctctgtctggagctgtaatctaatcctgcctcccat

SEQ ID NO: 945644 - DNA, 670 bp, Homo sapiens
aacagacagaactttcttccctcataatacataaataaataggctaagaaacccattacatggcaatatgacaaacataaataaatgaagygcatggaaagttaggaggtgaagagtgctacgggaagtgagaggagggtttgggagtgcctagggagatatggttttaaagactggtcagtgcagcctcattgagaaggtgacatttggccacgtgcggtggctctcgcctgtaatcccagcactttgggagggcaaggcaggtggatcacctgatgtcaggagttcatgaccagcctggccaacatggtgcaaccccgtctctacaaaaatacaaaaattagctgggcatgatggcaggtgcctgtaatcccagctacttgggaggctgaggtgggagaattgcttgaacctgggaggtggaggttgcagtgagctgagatcacaccaagcctgggctacagagcaagactccacctcaaaaaaaaaaaaaaaaaagaagatgacatttaaacaaagccttacaggaggtgaaggaggaaccgtttgggtgctgagggacagagcattccaggcaagagaatagcaagtcctaaggccctgggagcctggagtgtacctgccgtgtttgagaaacagcaaggaggctgtggtggcaggagcacagtaa

SEQ ID NO: 945645 - DNA, 622 bp, Homo sapiens
ggggactcacagttcctcggctrcccatggagcctgcagtggcaatcaactgtcttcaacgcatctgtggattctctcagctttcctggtatgttcctgggatagttcttggagaaaagttagcaatgtgggtctccacatgctgctctgtccctctgagtaggagctgcaagttcgtcctgcttcctgtctatcactctctcctctttttctcattttaacaaggaggaagagcagaatatctacttttaatcgctgttgaaagaactaaccaagataactcacagaatatgtctggcctagaataaaattttaataaatataaagtatgtttacccttcatttttgtttatcagagggaaaagcattcccagagttttctgagtgatcatagcagaggtaggcatataacctcatcttattttttaacttttattttagttttggagtacatgtgcaagtttgttatataggtgaattatgtgttgtcaggatttggtgtacagagcatgtcatcaccccagtaataagcatagtatccaataggtaggttttccttaccctcttcccaaacactaggcacagtgtctgttgttcccttatttatgtccatgtgtacaga

SEQ ID NO: 945646 - DNA, 593 bp, Homo sapiens
ttttttcggagagtttttattaccgactcagtcttgttataggtctgtctgtgttttcttgttttttattggttcaatcttggtaaattatatatatccaagaattcatccattttctctaggttttccaacttattggcatatagttgttcattgtggtttctaatgattctttgtatttctttcatatttattgtggcatttcctgttgtgtttctatttacattttctcacttttattcttattagtctaggtagtagtttattggtttggtttatctttccaaaaaaatcttttttccttgatttttgtacttttttgttctcagttttgtttctgccctgatctttattatttatttcattttactaatcttgagtttggtttgtttttgttttcctagttccttgagatgcagcattgacttttttatatgaagtctttctagttttttgaggtaggcatctattgctataaaattggctcttcaatactgcttttgctctgacccatagtttttggcatgttgtattacatttatttcaaggaattattaagttccattcttagkttttactttcaaccattggtc

SEQ ID NO: 945647 - DNA, 628 bp, Homo sapiens
acactccccaccctggacctggacgcctccgtctctccaaggagcccagttcctgttagsagggatcttccttctctcttgattggtgtagctacttttcacttttgggagcacctatgaatctgtcagtcatttctgagtctattttatgcctccaattattcttatgagctagttcaataggaaaaatagctctttctaaggggtgtgtgtgtttgcacgacgggggcgggggagagagaaagagacagacattttgtaaaagactggcatatgtattagtgtgagattaatgagggcattaaaagaggctaaagacgttgtcaccatgctagtggttttcaggtcccccaaatccttgactcttcctcccatgatcttcgattttcccaaaatatccctgcgtcctccctggaaagccccagaatgttccagaagtgagagcaggctgggggccgggcagcactgtaggcaggactagagggtggtcgggatgcggtggtggtgagggggcgacagacccagaaggctgagggttaggaccacagaggacactgtcacttagaaggaaaatacataggatcaggcccccctcgggcctctccagtgtcccctcagcttccacacc

SEQ ID NO: 945648 - DNA, 628 bp, Homo sapiens
acactccccaccctggacctggacgcctccgtctctccaaggagcccagttcctgttaggagggatcttccttctctcttgattggtgtagctacttttcacttttgrgagcacctatgaatctgtcagtcatttctgagtctattttatgcctccaattattcttatgagctagttcaataggaaaaatagctctttctaaggggtgtgtgtgtttgcacgacgggggcgggggagagagaaagagacagacattttgtaaaagactggcatatgtattagtgtgagattaatgagggcattaaaagaggctaaagacgttgtcaccatgctagtggttttcaggtcccccaaatccttgactcttcctcccatgatcttcgattttcccaaaatatccctgcgtcctccctggaaagccccagaatgttccagaagtgagagcaggctgggggccgggcagcactgtaggcaggactagagggtggtcgggatgcggtggtggtgagggggcgacagacccagaaggctgagggttaggaccacagaggacactgtcacttagaaggaaaatacataggatcaggcccccctcgggcctctccagtgtcccctcagcttccacacc

SEQ ID NO: 945649 - DNA, 629 bp, Homo sapiens
aatagagggtgagcaaggcaaagaggtgctttattgggtgacagaacagctcagaggagaatctcagtgggtagctcctctctgcagtcaggtcctcccattgtctactcatctctcagcatagaggagaccagcagtatgaagctagctcctctctgcaggcaggtcgtcccatcatctgctcagctctcagcagagaggagacccatggtgggtagctcctctccacaggcaggttatcccattgtctgcctgagtctggctgagtctggggtttttatgggcttcagaggaggggaagtgtgcgctgattggtccataggcaggcctggaaaaagcactataagttctcactctggaccatggaactggcagcctggcccaaaggtgggatttcaccagcgacccacccctttctgcccaggcacctgtctgcctcctgccaccattaacctgccatccacagcacccacagagtccagactgttcgtgccaaggggtgcctccaggcccacaccaagctgccctcagcaccccgttggccttccgctgtgctctttggcatccaaagtctgaagggggccaaggtagcagggggctggcatrtcagcactgccccaagtgtgcgc

SEQ ID NO: 945650 - DNA, 569 bp, Homo sapiens
catatgggcaaactctaattcaacatgaccggtgtccttataagaagaggaagtgagcygggcgtggtggctcatgcctgtaatcccagcactttgggaggccgaggcaggtggatcatgaggtaaggagatcgagaccacctggctaacagggcgaaaccctgtctccactaaaaatacaaaaaattagccgggtgtggtggcatgcacctgtagtcccagctacttgggaggctgaggcaggagaatcacatgaacctgggaggcagaggttgtggtgagctgagatcgcaccactgcactccagcctggatgacagagtgagacatcatcttaaaaaaaaaaaaaaaaaaaggaggaagtgatgccaggtatagcccacacagagaaaaggccatgtgaggacacagtgagagggtggccatctgtaggccaaagagataaaccaaacctgtcaatatcttgatcttggactctcagcttctagaactgtgagaataattaatttctgttgtttaagccacccagtctttgtcatggcagccttagcaaactaatatatagcccat

SEQ ID NO: 945651 - DNA, 435 bp, Homo sapiens
tgtgccatcacgcctggctaattttgtacttttagtagagacggggtttctccaagttggccaggctggtctcgaactcctcacctcaggtgatctgcccgtctcggcctcctaaagtgctgggattacaggtgtgaggcactgcgcccggccgaattgtttaaaccacccagagctagcagtaaactcaacatcctaactgtctaatattttctttcaacattgcaaaccttttgctttgaccgattgtcctgaagagatttgctttgactatagttgctgagagggatatacttctgtgtctggtcttcartccaggtcattagaaatttctccatatctgatataggccctcctagaatttttgttagtctcattgctttcaataaagcagatccttcaacagtttctgtgactttgttcttgttcatcaag

SEQ ID NO: 945652 - DNA, 610 bp, Homo sapiens
cgaatgcaagctgcaaacccaggcctcccgctccacggagcaggcagaagccctgctctcctgggtggggctgcaaccgcccaaactgctgctgtggatctgagcctccctgggttcttggggggcccaggagcaggcagaatctctggccatagactcaacggctgcagacctgggcctaccaggctccacagaacaggcaggcaggagcctgagacaagcagaagccccacgccttccgagttgcacccttcagagttagcgcaggacccaagagtctttgcagcctgcacccctgggaccccggtaagggccccccccaccctgtctctgcaggcttggcggtgtctgctctccctgcctggcctctctccactccctgtgcccactgtgatctgggagcagggttgaggctgagccctggggccaagaatggcagaaggaaacagatagattcccgggtggaagggggcagatccccagtgaggctccaccttcaggccagggaggaagmcatgtagtcctaacaaaaggacttgaaggcctgtgggctgccagtcctgctgacgggagtggggactcatggtgcttcttctggctgcccatggct

SEQ ID NO: 945653 - DNA, 791 bp, Homo sapiens
tgacttcaaaaggccattccttttgaatgcttcaggacaaaggggaacatggtaagaccagtggattccatgagaacgagcccactgctgcactcctttagccataaaatgagtgctttggtcagaggcagtgctgtgtggaatgccatgacggtggataaggcattctgtgagtccatggataatagtcttggcagaagcattgtgtgcagcataggcaaacccatatctggagtaagtgtctattccagggaggacaaacctcttccctttccatgatggaagaggtccagtataatcaacctgccacccggtagctagctgatcaccccgaggaatggcgtgctgtatcgagggctcagtgttggtctctgctgctggcaaattgggcactcagcaatggccatagtcaggtcagccttggtaagtggaagtccatgttgctgagcccaggcatcacctccatcactgccaccatggctaccttgttcatgggccctttgggtgatgacaggggtggctggggaaagaggctgagtggtgtccacagaacaggtcatcctatccactggattattaatatcctcctctgctgaggtcacccgttggtgagcactcacaagggatacaaatatcttcatagtttttgttacaacccataaatatatataatcatgcatctggccatctacccttccaagcaaagtgcacaactaggtgtgctgcttgaagttctgccaactgggaakatttcccttcaccgatgtccttcagggatgtcctagaaaggg

SEQ ID NO: 945654 - DNA, 714 bp, Homo sapiens
cactttacagtggtgcctgcatatggtgcagaaccatctgtgaaccaggccctagtcatctgttccgctgtcaagtgatcatagggacccctgtgaggccatcagtacaggctggggaagagaacgcagsgtgacaggagtggagatatgggcatttgagccacttcctcatgtaaattacttgtgccttcggaacctgcttgagcccaatcacgtatatactgcttccatttgatgatggaatgctgctgtgcatgacccgctttatggctaaatgggtcagaaagcacccagttcatgatagtcatctcaggtcacatggtgacttgatgacccatagtcaaatgttcagtttccaccaaagcccagttaacaggccaagagctgtctctcaaaaggagagtagttacctgcaaaagatggcagggccttgctccaaaatcctggaggcctccactgtgattcatctgtggggtcctgccaaaggctctcacagcatccctctctgcccctcacacctcaagcaccattgaatctgctgggtcctatggtccaagtggcagaacagcttgctcagtagcatggacctgttgcagagccttctcctgttctggaccgcactcaaaactggcagcctttcaggtcactcgataaatgggctggagtaacacacccacatgaggaatgtgttgtctccaaaatctaaatcggccc

SEQ ID NO: 945655 - DNA, 723 bp, Homo sapiens
ggtcctgccaaaggctctcacagcatccctctctgcccctcacacctcaagcaccattgaatctgctgggtcctatggtccaagtggcagaacagcttgctcagtagcatggacctgttgcagagccttctcctgttctggaccgcactcaaaactggcagcctttcaggtcactcgataaatgggctggagtaacacacccacatgaggaatgtgttgtctccaaaatctaaatcggcccactagatgttgtgcctctttcttggttgtaggaagggccagatgcagcaactagtctttcaccttagaaggccccacaccactggaccctagaaattttactgaggtagaaggtccctgcatttagtaggatttatttcccatcctatggcacacaaatgtctcatcagtaagttcagtgtttttgctacttcttgctcacttgatccaatcagaatagtgtcatcagtgtaatggaccagtgtgatatcttccaggagcaaaaaccgatcaaggtctctctgaataagattatgacacaaagctggagagttgatacacccctgaggtaagacagtaaaggtatattgctgtctttgcccactgaaggcaaattgcttctggtgggccttatggacagaaatggagaaaaaggatttgycaagtcaatggctgcacaccaggtactaggagatgtgttaattttctcaaggaatgaaacca

SEQ ID NO: 945656 - DNA, 625 bp, Homo sapiens
tagcaacagctttttaaaaggattagaactggtcttaaatgatttcaaacataatacaatacatttttctataactatgccctacaaacataacacgatacctttttccacaattaatgcagcacaaaacattaaaagttggcgattacctttgagatttagtttcttttctttagtaagaaataaaaacacaccattttattgctgccaattgctcaattattcagaaaaacattctcaatttcttcagctttagagaaaaaaaaaacctcatttcttttccagcacagtgatatgtattatatacgaatatgactaggcagctaaaggttacccaggggatagaactatttcttcaacccagaaatgaatccctttaacagtgagaggggcaccattttgttatttttaaaaaataaacaatatctcaccaagtctgccaagtgttaaatgcacttatcaatctctttaatacatggttttataagttaacaattcatatcagggggcaataaatattttcagtataaagagagagttgaattcagaagaacaaatataccgagagaatagaaaaaaatatrtgggggaaaaaagtaagaaggtatgaaaatcatggaggaaa

SEQ ID NO: 945657 - DNA, 743 bp, Homo sapiens
atcaaagaagaggctctggagccctcaagtatttcactggctgagttaaggagcagggaaatcttctgagagaaccctggtgtgctgacactccagccctatatgttgatttgacttgaaaactatcctgtctaacagttgcttgtggaaaaacaacgtcagattctctgattcctccctctcctttgccaccacacccatgccctgttggttttagctccaaggtagacttcactctatctgcatttctccatctccaccactatgacttgaggcaccatcatctctcacctctactcttgcaggagctttcattggcccctatgctgagcattctcctttttgggctcagatccaatccctacccttcccagtcttgctctacatcccagggaaccatatttcccaggctcttctggcttccagataaatgcaaccattgggaggcaccagtgggagactagagggagggatgaagagagaaaccagggcatctctggccctccacctgtttcaggtggaatccctgagcaacatccacacctcccccaatggtttcacctccatggtcccagctccagcagggcagccccaaccatggttctccttcctgccaaatggttccagctcctgggttctgataacatcacctccctactttgtccatttggccataagtaaaaagaagtcttgatagtaatcatttctgggtcasctccttgtcccctatttgacttctcagc

SEQ ID NO: 945658 - DNA, 570 bp, Homo sapiens
gagatgggccatagtttttaaattgtttatgatcagaagtaaagaatgttaacttctcaaactcagcttcaaggcccagcaccaactctgcttcactaatatgacctccttctcccttcttttttcctctgtctctttgactcaggcagtgcaggcttttgtttcttccttttccagacctcagagtcttcctctaggctttcagtgatgccaacgtccttctagttgtgtttcctttgccatcttaaagttcctctgcaacagatgctcgctcttcaagcaataattttgtcttttgcaatgctttccccagaaacaaataaacccccttaactgaaatcaaataaatacaattcaaataaaaaactcatttgaatacatatatttgtctgatctttccagaatatgaactaattatattttagtaatgcccattctatcatatagcaattaataataatggtgactaatcctatgttgtatcaccagaatttattgagaccattactctgtgctasgcacttggctaagtacttgcatatcatgtttcgtttaattgatataatagcc

SEQ ID NO: 945659 - DNA, 639 bp, Homo sapiens
taaaagtttagataattattaatacctatttacaacattgttgtgatgactacaaaagttgagtatatgaaattcttaacattkgaaagatgccagtaacaggtttctattattatattaatatcccatctatcattcacacactctttctcattacaaagatcactatcctattggatgtctcatatatcatcccccaaaattactgaaacaaaggatccttttctgcttataaattcaaattttaaaatatgctattttaaaaataattttcataattccccaaatattatatccttattatttaaactgagaaagggccaagcatggtggctcatgcctataatcccagcactttgggaggccaaggcagacagatagcttgagcccaggagtttgagactcctgggtgaaacctcgtctctacaaaaaatgcaaaaattagtcaggcatgttggcatgcgcctgtagtcctatctacctgggaggctgaggtaggagaatcacctgagcccaggagttcaaggctgcagtgagccgtgatcacaccactacactccagcctgggcaacagagtgagaacctgtctcaaaaataaataaatacataaataaaattgagaaagcaccgacaagtaga

SEQ ID NO: 945660 - DNA, 639 bp, Homo sapiens
taaaagtttagataattattaatacctatttacaacattgttgtgatgactacaaaagttgagtatatgaaattcttaacatttgaaagatgccagtaacaggtttctattattakattaatatcccatctatcattcacacactctttctcattacaaagatcactatcctattggatgtctcatatatcatcccccaaaattactgaaacaaaggatccttttctgcttataaattcaaattttaaaatatgctattttaaaaataattttcataattccccaaatattatatccttattatttaaactgagaaagggccaagcatggtggctcatgcctataatcccagcactttgggaggccaaggcagacagatagcttgagcccaggagtttgagactcctgggtgaaacctcgtctctacaaaaaatgcaaaaattagtcaggcatgttggcatgcgcctgtagtcctatctacctgggaggctgaggtaggagaatcacctgagcccaggagttcaaggctgcagtgagccgtgatcacaccactacactccagcctgggcaacagagtgagaacctgtctcaaaaataaataaatacataaataaaattgagaaagcaccgacaagtaga

SEQ ID NO: 945661 - DNA, 850 bp, Homo sapiens
tattagctcaatggatactaaatattttgttccagtctccttatagggattggtttttatatggctgtattcctctgaaacaaactttcttgcttttgatctgatactccattgtcagaggctcactgaatggtagaactggaacctaatcagtcagtcactctaaatcgatcttttcatggataagaaaaccaagacttgggttaaatacgtgcatagctagagaatactttggcagggccaggactgtataacctgccaatattgccgtggatatctctacgtagaaagcatttgttttagtggagaataatggaaataatcatttttctttcggcttctctgtttaagaggcacagttgaatgctgttgatgctttgattgactccatgagcttggcaaagaaagatgagaagacagacacccttgaagacttgtttccaaccaccaaaatcccaaatcctcgatttcagagattatttcaggtaagagaagaaggatgaacaagtcatatttcttttaaatgaaagagagctaagtgcaaagttgcggtaattggccagtcctaaataaatgtcttttttctctgaaggccccatttgctctatttaatggaagaataacatcttcctctcctacttcagaaggtaaaaatattctgagctcttaaaaagaaaaataaagttggaatgctttctttcttttcttttttttttttttctggaagaagcttactttaacaaaaaaaatacaggaaggccagttgccyatgctggagtgcagtgttgtgatcatagctcactatagcctcaaactcctgtgctcaagcactcttcccgcctcagtctcc

SEQ ID NO: 945662 - DNA, 629 bp, Homo sapiens
gggtatgaagaaagattcctgtggctagctcagtgtctgcccaaatggcttcccagttttgtgctggaaacccagrgccctggtggtgtaggcaccagaagtaatctcctggtctggagttgccaagactgtagggaaagtgcagtatctgtgtgagagtgcacggtatagtccctaatggcttcccttggctgggacagggagttcccggaccccttgcacttccccaccctgctttcgctcgccctccttgggctgcaccactgtccagccagtttcaatcagatgaaccaggtaactcagttggaaatgcagaaatcacctgccttctgcgtcgatctcgctgggagctgcagacctgagctcttcctgtttgaccatcttgccagcaacccccaagtactataaaacatttcaaatgcacataaaaacagaatagtacaataatcctcacatactcatcagccagaatcaacaattattaaaactgtggcacactgcactatgtacttttttctttgttgaaatattttaaaaggcatatcctacacttaaaatcattttgcctctacacacttcaatatggattgagggacaagctattaaatgccatcaacattcttctaaga

SEQ ID NO: 945663 - DNA, 588 bp, Homo sapiens
gtcttcagctagtggagtgactcaaacgttcattcctgaagggtctagatcattagtagtcctgcctggatkgagctgttgtagtttcccattgaccttaatcacaggacatagtgatactaagggacaccctaaaagagctcccatattccagacatactcctcctcacctctactgtgatccattttccccttggtagtgaggatcagttaccccagccagcgcagttaactcctttgccttttgattcagaggtctgaggtgtctgcagtggtcaggtagcagtcttaacttccagttcaatgaaatcattattgtgtctcctagtggaagcatttatccctttggaactaggatttctaggccagcagagaaggtcatggaaacagaaataaaaaatttggccagtggatcattacaggtaatggtgagtgataccactcccattttctcccctcaatacctggcctcatgaattcaggctatgggagaacagcatcatatattggacactgattcagagcatgcacagcctcctgggaaccttgtcccagccctgcaaagtactgccacctggctggtgctgt

SEQ ID NO: 945664 - DNA, 588 bp, Homo sapiens
gtcttcagctagtggagtgactcaaacgttcattcctgaagggtctagatcattagtagtcctgcctggatggagctgttgtagtttcccattgaccttaatcacaggacatagtgatactaagggacaccctaaaagagctcccatattccagacatactcctcctcacctctactgtgatccattttccccttggtagtgaggatcagttaccccagccagcgcagttaactcctttgccttttgattcagaggtctgaggtgtctgcagtggtcaggtagcagtcttaacttccagttcaatgaaatcattattgtgtctcctagtggaagcatttatccctttggaactaggatttctaggccagcagagaaggtcatggaaacagaaataaaaaatttggccagtggatcattacaggtaatggtgagtgataccactcccattttctcccctcaatacctggcctcatgaatycaggctatgggagaacagcatcatatattggacactgattcagagcatgcacagcctcctgggaaccttgtcccagccctgcaaagtactgccacctggctggtgctgt

SEQ ID NO: 945665 - DNA, 587 bp, Homo sapiens
tcctaaattatgctctgtagctggaggaaaatcgagtggggaagaaccaacaggagggaatggctgggaggtggtacaggtggtgtgtgttagtccatttttgcattgccttataggaatagctgaggctgggtaatgtataaagaaaagaggcttaattggcttagggttctgcagggtttttaaaacgtgtggtgccagcatctgctcggcttctggggaggcctcagtcaggaaatttccaatcatggcagaagtcgaagtgggagcaggaaggtcatatggggagagctggagcaagagagaaggagtaagagagagaaggggaaggttcccagactcctttaaacaaccagatcttgcatgaactaatggagcaataactaaattgtgagcaggggaatgatactagaccattcatgagggatttgcttccatgatcaaatcacctacacccaggcaccacctcccaacactgggaagcacgttgcaacaggaaatttggaggggccaaacatcctaaaccatattgtggtgyacacaaccctaagctggcgacatgcactatcttatgacatgcaccacaa

SEQ ID NO: 945666 - DNA, 764 bp, Homo sapiens
aagagtgaactcaagagtttcattttggacatgccaaatttgagatatattagatatcccatagcagatattgtgtatgattagaaggcatatataagattggggtttaggagaaaggtcagtgctgaagatacatacatgtcaatggttttaaaaccatgagaatggatgagatcaccttgagttaagaaggaaacccatggctgggcccagtggcttacgcctgtaatctcagcactttgggaggccaaggcaggcagatcacaaggtcaggagatcgagaccatcctggctaacacggtgaaaccccgtctccactaaaaatacaaaaaattagccgggcatggcagcacgcacctgtagtcccagatactcaggaggctgaggtgggagaatggcgtgaacccgggaggcagagcttgcagtgagccgagatcgcaccactgcactccagccagggcaacagagtgagactccatctcaaaaaaaaaaagaaggaaacccatgatttagagataaagtacagaaagaggaatcagaaggagacagaaggagggactactgaagttggagaagtatttggagtgctcacaaaatgccaagtgttctggaagtgcttcagaaagaaaataatggattaattgygtccgatgtagcctgagaggctgagtaagctgaggccagaaaagggacattgggttttggcaacatagaggttggagtttgtgttagtcaaggttcttagtgtaagtaaaagtaaatga

SEQ ID NO: 945667 - DNA, 625 bp, Homo sapiens
ccagcacacaaacacttcaaaatgcctaagccacagcagtcaagcattccttcaggacttcctccatcaggatcttgcttcaagtgccagaaatctggcttcaagtgccaraaatctgggccaaggaatgccctcagcctgagattcctcctaagctgtgtcccatctgtgcaggaccccactggatatcagactgtccaacttgcccagcagccactcccagagaccctggaactctggctcaaggttctctgactgactccttcccagatcttcttggcttagcgggctgaagactgacgctgcctgattgcctcggaagcctcctggaccatcacagacgctttgggtaactcttacagtggagggtaagtcctccccttcttaatcaatatggaggctaccaactccacattaccttcttttcaagggcctgtttcctttgcctccataactgttgtgtattttgatggccgggcttctaaacctcttaaaactccccaactctggtgccaacttggacaatattcttttacgtactcctttttagttatccccacctgcccagttcccttattaggctgagacattttaactaaattatctgcttccctgactattcctg

SEQ ID NO: 945668 - DNA, 573 bp, Homo sapiens
actgagaagccacagggaaggagctgcctaaggccttgggaccccatcccttgcccttgcatcagtgcaccctggatgtgagacatagaatcaaaggagattattttggagctttaagatttaatgactgccctgctgccttgcatggggccttagacccttcttttggccaacttctgccttttggaatgggagtatttacccaatgcctatacccccattgtatcatggagtaactaacttgttttttattttacagggtcataggtggaaaagactagctttgtctcagatgagactttggactttggactttttagttaatgctgaaatgatttaagactttgggggactgttgagaagcgatgattgtattttgcagtttgagaaggacatgggatttgaaggtccagggtggaattgtatggttggatctgtgtccccagtgttggagatggggcctrttgggaagtggttgcatcatggggttgtgatatggtttggatctgtgtctcccatcaaatctcatgttgagttgtaatcctcagtgttagaggtggggcctgatgggag

SEQ ID NO: 945669 - DNA, 603 bp, Homo sapiens
gctgaacactgagaagccacagggaaggagctgcctaaggccttgggaccccatcccttgcccttgcatcagtgcaccctggatgtgagacatagaatcaaaggagattattttggagctttaagatttaatgactgccctgctgccttgcatggggccttagacccttcttttggccaacttctgccttttggaatgggagtatttacccaatgcctatacccccattgtatcatggagtaactaacttgttttttattttacagggtcataggtggaaaagactagctttgtctcagatgagactttggactttggactttttagttaatgctgaaatgatttaagactttgggggactgttgagaagcgatgattgtattttgcagtttgagaaggacatgggatttgaaggtccagggtggaattgtatggttggatctgtgtccccagtgttggagatggggcctattgggaagtggttgsatcatggggttgtgatatggtttggatctgtgtctcccatcaaatctcatgttgagttgtaatcctcagtgttagaggtggggcctgatgggaggtgattgaatcatgacggtggag

SEQ ID NO: 945670 - DNA, 184 bp, Homo sapiens
tattagtgtgtgatgcattctttcagaaaggttctgcaggagtgtawcatgatatactctaaaatatgtgctttggttagaagatggcaggttgagcacatgtttgccttttgagtcaccaaagctcactggggacaaaaaaggatagaagttgctaacccatagtgagaaggccaggataagg

SEQ ID NO: 945671 - DNA, 601 bp, Homo sapiens
agtctcactctgtcacccaggctggagtacagtggcaccatctcggttcactgcaacctccacctcccgggttcaagcaattctctgcatcagcctcccaagtggctaggattacaggcgcccgccaccacgcccggctaatttttgtatttttagtagagatgaggtttcaccatcttggccaggttggtcttgaactcgtgacctcgtgatccacccgccttggcctcccaaagtgttgggattacaggtgtgagccaccgcgcctggccaaatttggtatatttctaagttttcctatatttcttgaggatttccacaccagttacacagattagaaaacccagtcccttctctccttcattctactaaattcatcaccagctatattattaaaatgtcctaagattatccttttctcatctctatcatcttcctaggccaaactataccattccttgcctagatgactgaaatgaaygtcttcttttttctactctatgggtcttcaaaccaccacccttcagccaaatctagactattgcctggttttgtatgctctgtaagctaagaatagtttttgtactttaaataaaaatgg

SEQ ID NO: 945672 - DNA, 623 bp, Homo sapiens
gaggttgcagtgagctgacrtcatgccactgcactacatcctgggcaacagtgtgagagtccatctcaaaaaacaaaacaaaacaaaacaaaatgtagggttcacttccaagatggctgaaaggtacagcttcaatctacagctcccagcgagatggacaaagaagacaggtgatttctgcatttccaactaaggtacctggttcatctcactgggattggttggacagtgggtgcagcccacagagggtgagccaaagcagggtggggtgtcgcctcaccccggaagagcaagaggtcagggcatttccttttcctagccaaaggaagccgtgagtgactgtacctggaggaacagtacactcctgcgcaaatactgtgctactcccacagcttcacaaccagcagaccaggaaattcccttgcttggctccgcaggtcccatgcccacagagccttgctcgctgctagtgcagcagcctgagatagacctgggaagctgaagcctggcagggggaggggctttttccattgctgaggcttgagtaggcagttctatgctcacagtgtaaacaaagtggcagggaagcttgaactgggtggagcccagcgcagctcagcaag

SEQ ID NO: 945673 - DNA, 623 bp, Homo sapiens
gaggttgcagtgagctgacgtcatgccactgcactacatcctgggcaacagtgtgagagtccatctcaaaaaacaaaacaaaacaaaacaaaatgtagggktcacttccaagatggctgaaaggtacagcttcaatctacagctcccagcgagatggacaaagaagacaggtgatttctgcatttccaactaaggtacctggttcatctcactgggattggttggacagtgggtgcagcccacagagggtgagccaaagcagggtggggtgtcgcctcaccccggaagagcaagaggtcagggcatttccttttcctagccaaaggaagccgtgagtgactgtacctggaggaacagtacactcctgcgcaaatactgtgctactcccacagcttcacaaccagcagaccaggaaattcccttgcttggctccgcaggtcccatgcccacagagccttgctcgctgctagtgcagcagcctgagatagacctgggaagctgaagcctggcagggggaggggctttttccattgctgaggcttgagtaggcagttctatgctcacagtgtaaacaaagtggcagggaagcttgaactgggtggagcccagcgcagctcagcaag

SEQ ID NO: 945674 - DNA, 582 bp, Homo sapiens
ctgctacagcgtggtggaaaggggccgacatacagctcggactgtggcttcagtgggtggaagccccaagtcttggcagcttccacgtgttgttgagcctgcgggtacacagaagtcaagaactgaggtttgagaacccccgcctagatttcagatgtgtggaaatgcctggatgtctaggcaaaagtttgctgcagaggcagggccctcatggagaacctctgctagggcagtgcagaagggaaatgtggggtcagagccctcacacagagtgtctgctggggcactgcctagtggagctgtgagaagagggccaccatcctccagaccccagaatgttagatccacagacagcttgcaccgtgcacctggaaaaggcacagacacttaataccagcccacaaaaacagccacgagggaggctgtaccctgcaaaatcacaggggtggagctgccaaagaccatgagaacccayctcttggatcagtgtgacttggatgtgagacctggagtcaaaggagatcattttaaagctttaaaatttgactgccccgctggatttcagacttggataggcccttt

SEQ ID NO: 945675 - DNA, 564 bp, Homo sapiens
tgcatatcgtgcagaaccatctgtgaagcakgtcctagttttctctttctctgtcaactgatcttagggaacttcccataaggccactggtgcaggcttggggagagaaggcagggtggccggagtacagaccatgggcatttgagccacttcctcatgtaacttccttgtgccttcaggacctgttcaagcctgatcacatatataccacttctatttaatgatggaatgctgctgcacacaacccactttatggctagatgggtcagaaagcacccagttcatgataggcagtacaggtggcatggtgccttgatgacccgtaggcaaacattcagtttccaccaaagcccagtaacaggtctagagctgtctctcaaaaggagaatagttatctgcagaagatggcatggccttgctctaaaatcctagaggactctgctctgatccacctatgggggcctgcaaaggctccagtaagcctccctatctgccactgacacctcaagcaccatgggatctgctggatgatatggcccaagtggcagagcagcttgcacagca

SEQ ID NO: 945676 - DNA, 795 bp, Homo sapiens
gcctgcatatcgtgcagaaccatctgtgaagcatgtcctagttttctctttctctgtcaactgatcttagggaacttcccataargccactggtgcaggcttggggagagaaggcagggtggccggagtacagaccatgggcatttgagccacttcctcatgtaacttccttgtgccttcaggacctgttcaagcctgatcacatatataccacttctatttaatgatggaatgctgctgcacacaacccactttatggctagatgggtcagaaagcacccagttcatgataggcagtacaggtggcatggtgccttgatgacccgtaggcaaacattcagtttccaccaaagcccagtaacaggtctagagctgtctctcaaaaggagaatagttatctgcagaagatggcatggccttgctctaaaatcctagaggactctgctctgatccacctatgggggcctgcaaaggctccagtaagcctccctatctgccactgacacctcaagcaccatgggatctgctggatgatatggcccaagtggcagagcagcttgcacagcagcctagatctgttgcggagccttctccgcctggattccactccaaactggcagcctttcgggtcacttgataaatggcccagagtaacaaagccaaatgacgaatgtgttgcctccaaaatacaaatagacccactgggcgttgtgcctctttcttgcttgtaggaggggccaaatgcagcaacttatctttcaccttaggaggaatatctcaacaggccccacacca

SEQ ID NO: 945677 - DNA, 564 bp, Homo sapiens
ttcaagggagacattagactcctcctttcacttgaacacttagagaccattgcagagttattaattgtcctaacttcaatattttgatgtctaarggagcagaatgaccacaacaaaggagagagatgcagaatggctagtaggtgaagcagtcagaatacatgcgacatttatgaaataaattcattctctcttatgggtgtagtttgtggcactctgaaacaattacaactgtaaaatcaaaaatcactgatcacagatcaccataacataataataaaattttgaaatagtgcaagaattaccaaaacgtaacatagagacatgaagtaagaacatgctgttataaaaatgacatctatgatttgctcgaggccagaaaccttcaatttgtaaaaaccgtggctggacgtggtggctcatgcctgcaatcccagcactttgggagaccaaggctggaggatcactttgagctcaggagttggagaccagcctgggcaataaggtgaaacgctgtctctataaaaaatacaaaaaatagctgggtgtgatagtgtgcacctg

SEQ ID NO: 945678 - DNA, 564 bp, Homo sapiens
ttcaagggagacattagactcctcctttcacttgaacacttagagaccattgcagagttattaattgtcctaacttcaatattttgatgtctaagggagcagaatgaccacaacaaaggagagagatgcagaatggctagtaggtgaagcagtcagaatacatgcgacatttatgaaataaattcattctctcttatgggtgtagtttgtggcactctgaaacaattacaactgtaaaatcaaaaatcactgatcacagatcaccataacataataataaaattttgaaatagtgcaagaattaccaaaacgtaacatagagacatgaagtaagaacatgctgttataaaaatgacatctatgatttgctcgaggccagaaaccttcaatttgtaaaaaccgtggctggacgtggtggctcatgcctgcaatcccagcactttgggagaccaaggctggaggatcacttygagctcaggagttggagaccagcctgggcaataaggtgaaacgctgtctctataaaaaatacaaaaaatagctgggtgtgatagtgtgcacctg

SEQ ID NO: 945679 - DNA, 657 bp, Homo sapiens
tcatcagcaatggaacaaaacgggacggagaatgactttgatgagttgagagaagaaggcttcagatgatcaaactactccgagctaaaggaggaagttygaacccatggcaaagaagttaaaaacctggaaaaaaaattaggagaatggctaactagaataatcaatgcagagaagtccttaaaggacctaatgtagatgaaaaccaaggcacgagaactacgtgccgaatgcacaagcctcagtagccaatttgatcaactggaagaaagggtatcagtgatggaagacgaaatgaatgaaatgaagtgagaagagaagtttagagaaaaaagaataaaaagaaatgagcaaagcctccaagaaatatgggactatgtgaaaagaccaaatctacatctgactggtgtacctgaaagtgacagggagaatggaaccaagttggaaaacactctgcaggatattatacaggagaactttcccaatctagcaaggcaggccaacgttcagattcaggaaatacagagaatgccacaaagatactccttgagaagagcaactccaagacacgtaattgtcagattcaccaaagttgaaatgatggaaaaaatgttaagggcagccagagagaaaggttgggttacccacaaaggcaag

SEQ ID NO: 945680 - DNA, 552 bp, Homo sapiens
aaccaaaccaggtgcatccagcattttggcattaatcagccatgcccatggggagaacaagagacagaatatgggcaagactggtgtcagaaaaaaatgaaataagaaagtttcatattcaatgattaaaatgaatagcaagaggtgaatgcgtgcccctcataagcaaggaatgtttctgtatgcctagtcacacccacggtgtctagcacatagcagtatttcagtaaatgttgaaagggataaaatactgaaaaaaggaagaaagaggggatgaaagaggaaggaaagaaggaaggaggagagtaagggagaaggaaaggaagcaaaacaaaataaaaatttcattggggggactgacaatcatttagcaaattatattaagtaaactcacaaaggggcaaattcagaaagctacaagttytaaagagccttcattttacatataaaatcatgattaaaatcagattatttttctgtaatttaaggtttccatgatgaacatagatgttgacagtttagccctcaagggaaattcagggagccagaaat

SEQ ID NO: 945681 - DNA, 412 bp, Homo sapiens
aagcaacatcggcgtcatgggggacacctaaacacgcttcagacatttaaaaattaagaaatatgatcagaagggctatgagcaagtgtgcagatggtgggtttctagcttaatcaatgcctaagatctggaatgttccttaagctccaagaacatttcccatctatcctccccaggcctggtgctcccaggtccttaaagacatgatcacagagaagataggagggtctgttgactgaactcaccataaacatcttttcaaaccacatgcacacacacacacacacacacacacacacacacacacacacacacacaaagytgcagccctgctaatgatatgtttatgccatgcccatttccagaaatatttatttctctctaccttgccagcaatcagtcaaaatacaca

SEQ ID NO: 945682 - DNA, 544 bp, Homo sapiens
tgatcaaacagaagaattagtgaacttgaaaacagactattacagatagcacagtcagaaaggagaaaagaacagagaataaaaaygaatgaaagaatgcctacaaaatatagaaaatagcctcaaaaggacaaatctaaaagctattgaccttaaaaagaaggtagtgagaaaggtcagagtagaatgttaattaaaaggaataatatcagagaaaataccaatttgtactcttcagcgcagtgtatgagtgtaaaccaagaaagttttgataggaaggcaaacaataaaatatggagccttaatccccagtccaagaagtctttattaatttagggaagtgaaagattattgaaagtatgtcttgatattttacaaccttgcctatgactgacctaggttaccactctactaagaataatattttgcctggaaataaactatcttggagttcatttgtagtaccatgtgggatataaagttcaggatctatcttgaattaggctcatctggatttttataggtgattttgctttctaatctc

SEQ ID NO: 945683 - DNA, 569 bp, Homo sapiens
aggttgtctcgaactcctgtcctcaagtgatctgcctgcctcagcctccgaaagtgctaggatttacaggcatgagccaccatgcccggccttaaaagttttaaaatgttgatcatgtccaatttacattttttattttattgcttgtatttttagtgtcattcttagaaggctttgtataatccagtatcacaaataattatgtctatgttttcttccaagagttttatagttttacattttactttatatctttgatccatttagagttaaattatgagtatgatgtaatgtaagggttattgtaatctttatgatagggttgtaaatgggattattttcttcctttcactttcagattgttcattgcaggtgcaagttcaactaacttgtatattgcttttatattctgcaatattggtaaacttgtttagtaattgtaayagtttttcagtggatgtcttaggattttctgtatagaagatcatgttatctgcaaatagagatagttttctcccttctctttttccaatgtagaggcctttttttttcctttttattcctagttg

SEQ ID NO: 945684 - DNA, 575 bp, Homo sapiens
tatcagaattggttgttccatctgtattctcttccacaccaatgtaagcttcaagcagtcaggtgccttgttctgtcttgtcaatattcatattccctgtaccagggcaatacctagaagatattaggtgctcaataaatgtgagttgaagtatattaaaataaattgaattaactgtgaggtttattgttgttgttattttgattaaaaaaaaaggatccccactttttttttttacttttgttctctctcaaaatagaaaattggaagcactggatttgaatgcagtggcatgtttaaggtaggtactctaaatatgaagtgtggctggaataaaaattgttttgtgctgctgattgcaaattgctccttagcttttatagttatatttcttcatttcctctatcttttttatttacctgcacatattttaaaggcacttgcatttctcaaaagatgggctcaggtatttatgcagtagacatgttaaaattatatttagagacattttttcaacatggsagtagagtaagtgccagtgtataaagagtagaagtgagagcccaagcaaaaga

SEQ ID NO: 945685 - DNA, 569 bp, Homo sapiens
ctgcatggaaaagagttttcagaaagttatctcctcctagagaatcccattcaaatcacctaattgacttttttttagatttattctgccctgtctgatagagtacagcatgcaggagctcgccatgctgccagatgatgggaaaagaataacagataaaaggaattaaaatatatctgagtttaacgtaaaatcatgatatataacatgctgctgttattactgtcatcattgttgttattactcattattctagccacttccttcccagcatggtagttgtcaggatgtttcagagactcactaacaatgccatcatttcctagtatcacaagaggaggaaggactggggttcactttctaccctttgctctgcgagaactcacgtagaaagaaccataacattaagtcccacacaaacaggaaaaaaaaaaaaaaaaaaaaaaaacctccttttaggggcaggccaaaatagtaacagtggacttgccttamcctaaaagtccctttttgaacctaaatttaataaaaaaaatttttccttttgaaaaagagagctttgggggacc

SEQ ID NO: 945686 - DNA, 600 bp, Homo sapiens
agcacaccagactggctacaacttaagaccagcctcacaaatcctttttcataattaaaactttacagagaatataaacattgatccttatcattcctagcctagtaaaatgtcttctaaaaggaaaacacaaacaaaaaataaataaacaaccaccacgcttaaaagtcaactcctgacctgatggagaaaaggaaagaaaaaaattttttttaatgcctgggaagaacctcttattcttatgcaaatgcgttcctccaccggggagagaaacttaattgctctccaatggggttgaaccccttggccaagggaggtgaagaggccatggatgcatagcattccccagccccagccgggatgggacggggaacggggagctgccgtttgcccgtccatccggaaaaaagaaggaaaaggccaaggaaaggctgggttggactgaggccgtcttttctgacccctgagcgtgacagtggtgggggcacagtttcctctagcctcagaagtctgaggttgagaaggtttagaaatgasagggaaaggccgggcgcggtggctcacgcctgtaatcccagcactttgggaggccgaggcggg

SEQ ID NO: 945687 - DNA, 593 bp, Homo sapiens
atctcattactacctgtacatgttcataaccagactcatgaactccttctccaatcctccacatcatcttcaatttcctaacttggaaaactacctactcatggaatcagaaacttagaaggaatcaccttcaacttctccctcaaccttactcttcacattcaatttgctcctaaatctcattgttcccacttcctaaatattccttaaatctgtgctttctctcccggtccttagttccttatcctgcctttgtaatctctcatgtggaccactgcaacagcctcctggagtctccttgtctcgggcgttaaccatccccagttcatagtagtatcccagagttattgtgatgaacacaactctgatcatatcactttcctgctcaaaattcttcagtgactaccacacattgaaaggatccagtctaagttatttaaagatacttatcaatgccctttgtgyactggcctctactatggtttcaagcctcatcgccacagacagcttctctgtacttaatgtatgttccaacagtactggactcttttgatttccatataaaatagaaatctttatattttcacacatct

SEQ ID NO: 945688 - DNA, 593 bp, Homo sapiens
atctcattactacctgtacatgttcataaccagactcatgaactccttctccaatcctccacatcatcttcaatttcctaacttggaaaactacctactcatggaatcagaaacttagaaggaatcaccttcaacttctccctcaaccttactcttcacattcaatttgctcctaaatctcattgttcccacttcctaaatattccttaaatctgtgctttctctcccggtccttagttccttatcctgcctttgtaatctctcatgtggaccactgcaacagcctcctggagtctccttgtctcgggcgttaaccatccccagttcatagtagtatcccagagttattgtgatgaacacaactctgatcatatcactttcctgctcaaaattcttcagtgactaccacacattgaaaggatccagtctaagttatttaaagatacttatcaatgccctttgtgcactggcctctactatggtttcaagcctcatcgccacagacagcttctctgtacttaatstatgttccaacagtactggactcttttgatttccatataaaatagaaatctttatattttcacacatct

SEQ ID NO: 945689 - DNA, 600 bp, Homo sapiens
ataccatgaatatctctgtgcatatcagtttgccaacttaaatgaaatggaccaattcctcaaaaaccacaaactatgacacttacccgtgatgaagtgggtgacttgactagtccaatacctaccaaagaaatagactttgtagttaaaaactttatcaaataaatccccaggcttagataacttcacgttagaattctaccaaacaattaaagaaataacatcaattttacaaccaccatctctttcagaaaatagatgagaagagactacatcccagtcattttattaggttagcatcaccctgatgttaaaaccagattttagaaacattaaaaagcaaaaccagagatcaatatccttcataaacatagatacaaaagtcttcaaaaaatatttgcaaattgaatccagcaatattttaaaagaataaagcacagaaaccaagaggtttttactccagaaacacaaggctggtttgatattcaaaaatcaaggggccagacacagtggcttatgcctgtaatcccagcacttcaggaggctgggggattcgcttgagcctgagwgttcaagaccagcctgtgcagcagaaggaga

SEQ ID NO: 945690 - DNA, 564 bp, Homo sapiens
cagggggagctttctcattcccttctggagtcagtttctctatcccttattgacttggaaatatcctatttaaccacagaaatatcattaaactagaaactctcctctgccgtgaacttggaaagaactaatgcctgtggcacaattaaatgctgatcttagccttcaaatgctcattatgtgaaagaaaattgagtatggaatgattcccctgttaccgatcagtaacagatatgtgggtgtaggccaagtttcttgggattattcttgcagtacaaggaaaaagcaatctaaaggaagaaacccatacgagcattcatgacagcctgacagatgctgggggtgaggtgtgacctgcccttttcccacagtggtggtggcttccttttgggtcaaggcaatattagggtaccatcttctctgaatttgccttattttacattccctagaaacaatccaaacttctaaaagactctcagacaaagcataacctgagaatgagcagatatgycagctctgccctagcctaggccagtactcaaggcagcacaggcaaactcaatc

SEQ ID NO: 945691 - DNA, 717 bp, Homo sapiens
acatcccaaatccaaaacgtctcactacttccagcaccacagtggtcaagctgtccttatctctagcctgayaaatgcacatattttaaaaatagcctcctaactggttttccaatttgtcctccctatgtttattctgccccagactccacagtgatccttttaagtggaaagtccaatggctcagcccagttcatgccctcagtggcttcctgtcactctcagaatgagctccctgtccttccttcctggccaggtccaggttccttctcagcttgctcaggtctcatcataggttctctcgggcactgtgctccggctcttcaaacacgctgggcatattcctgcatcatgacctttgcacattatcttggtccattcaggctgctagagcaaaatacctgacactaggaaatttacgaggtgcatgcagattcagtgtttggtgagggcccattcctcatagacggcaccttcgagatgccctcacatggcagaaaaagaaggcagctctctgggccctctttcatgagggtactaatcccattcatcaggtgaagctctcatgacccaatcacctcccaaaggctccaccttctaataccaacaccttggtgattaggtttcaacacaggaattttagggaaacgcaaacacagatcatagcacttgtgcatagcatataactatttcctctgcctgcaatcctattcccct

SEQ ID NO: 945692 - DNA, 677 bp, Homo sapiens
gctggagtagccaggatgcagcaagtgtcctgagattgagcaggagaacgggccctgggcctgccccctgaaaccattctttcctcctaggcctctggacttgtgatgggaggagctgtgttagaaatctctgaaatatctttgagatctttcttcccattgtcttggatgttaggacttggctccctttgagtcatgctaatctctctagcaagtggtcgctctacagcctgcttggattctttctttaccatagggccaggctgtaaattttccaaacttgtatgctctctttcccttttaaacataagttccaactctaagttattcttttgctccctcctctgattgtaggctgttagaagcaactattccacttcttgaacacttaggacacaagccataagccttgccagcatccatgtggtggtaagcctgtaggggcagattgctgtctagaaatttcttccactgggtaccataagtcatcactctcaagttcagacttccacaaagccgtaggacatggagacaatgcagccaagctctttgctagggcataactagggtgagcttccctccagttcccaatagcttccacatttctmtctgagaccttgtcagcctggaattcaccgtccatatctctaccagaattttgctcacaatcacttaac

SEQ ID NO: 945693 - DNA, 590 bp, Homo sapiens
atgaggctgcaaaggacgtgatattctttttatgagtgtgtagtattccatgtrtatgtgtaccacaaatacattttccctttcttttttttttttttttttttttttgagagggagtctcactctgtcacccaggctggagtgcagtgtcataatctctgttcactgcaacctgtgcctcctgagttcaaatgattctcctgcctcaccttcccgagtggctgcgattacaggcacgtgccaccatgcctggctaatttttgtatttttgttttagtagagatggggtttcaagacgttggccaggctggtctcgaattcccaacctcaggtgatctgcctgcctcagcctcccaaaatgctgggattacaggcatgagccaccacgcccagcctacattttctttataacatttcctttatccagtctaccattgacgggcatttaggttgacttcatgtctgctattgtgaatagtgctgtgataaacttatgcatgcatgtctctttatgctagaataatttgtatttctttgggtatatacccaataataacattgctcaatcaaatggttattgtaagttattt

SEQ ID NO: 945694 - DNA, 590 bp, Homo sapiens
atgaggctgcaaaggacgtgatattctttttatgagtgtgtagtattccatgtatatgtgtaccacaaatacattttccctttcttttttttttttttttttttttttgagagggagtctcactctgtcacccaggctggagtgcagtgtcataatctctgttcactgcaacctgtgcctcctgagttcaaatgattctcctgcctcaccttcccgagtggctgcgattacaggcacgtgccaccatgcctggctaatttttgtatttttgttttagtagagatggggtttcaagacgttggccaggctggtctcgaattcccaacctcaggtgatctgcctgcctcagcctcccaaaatgctgggattacaggcatgagccaccacgcccagcctacattttctttataacatttcctttatccagtctaccattgacgggcatttaggttgacttcatgtctgctattgtgaatagtgctgtgataaacwtatgcatgcatgtctctttatgctagaataatttgtatttctttgggtatatacccaataataacattgctcaatcaaatggttattgtaagttattt

SEQ ID NO: 945695 - DNA, 715 bp, Homo sapiens
tgagaacactgaagtggcccagggagagatctatgtggagaaaagcagaggcctcccactcactgccagcacagacaagggagtgaccaagctttaaaaactgatctttccgccctagcaaagccttgkgatgactgcaatcccagctagcagcttggctactactgcaagagtgactccaagtggaacctgcctagccaagctgcttctgaattcctgttccacaaaagctgggagtaataataaatgtttattgttttaagttactagattttggggcaactggtttcgtagcaatagataactaatgagagcatataaattaggattaggtttggctgcgtgagacagactgccctcatctccccttcctgcaaagaaagaagatagatctttatttctctctcatttaagaaatctagagtcacaatttttggctggtatggttctccaaaggtgtcagagactcaagctatttttctgttatttttctgctattctcagtatatggctctcatttagtggtccaaaatggctgctcaaaccccagccatcacatcctcattccatccaacaggaaggaagaaataaggaggaacacaacacctccattatggacatttcccagaagtcacatttgacacctctgtttatataccactggtcagaacatgggtatatggccatatatagctaccaggaaggctggcaaata

SEQ ID NO: 945696 - DNA, 586 bp, Homo sapiens
gcaatggcacgatctcagctcactgcaacctctgccycctgtgttcaagcaattgtcctgcctcagcctcccaagtagctgggactacaggcctgtgccaccatgcgaggctaatttctgtattttgttttagtagagacagggttttgccattttggccaggctggtcttgaaatccttaccttaggtgatccacccaccttggcctcccaaagtgctgggattacaggcatgagccactgcacctggctgcaagtagtttcaacaggagggataaatagaagctttcaaagtttacacttgaggaaccactatggtaggacactatatgggcgtactctcatttgcaaaaatagttatacgttaagtgtaagtacatacaccaatatatatccccacacacacacacacacaaagttccggtatattcctgttttaatccatagtaatctcttgtttcaaatacttctcaattattctttcacttttgtctaggtgcttcataggtgagaggtactatgctatgtgttacctagcaatattttatatgggcaagttgatgtaaatcaattcaaaaagggaaagt

SEQ ID NO: 945697 - DNA, 563 bp, Homo sapiens
agcaggctgcaagctgggaggagcagggtcaggagagagggaccccaggcagaggggactgaattggcatagtgcyggcccactcatggctttgcctcttgccaagactcttggcccccagcttctaacagcacgagattcacccccaaattaaaactaaataaatcacggtaataacagtgtgaagtgcatcattgctggcgtgtggcagctctctgggggtggaaacaaggagcaggaggcagcaggttaacccttggaggctgacttgtctggagagctggggagggaggtgggacaagggcaggttagtggctgtccccaagccagggtggagtgagggaagtttggagtgtcagcagtcatggtggcccacccagctggctaaagaatgtttggggttggaagacgtcgcctgatcttcagggccccttctccagtcccctccaccccctgccgattagccctgagcacagtggccatgtggctcctgcccccacaatgcttctttagacccctgaggaaatgggctactgtccatgtcatggttctgaggggtgtcc

SEQ ID NO: 945698 - DNA, 563 bp, Homo sapiens
agcaggctgcaagctgggaggagcagggtcaggagagagggaccccaggcagaggggactgaattggcatagtgctggcccactcatggctttgcctcttgccaagactcttggcccccagcttctaacagcacgagattcacccccaaattaaaactaaataaatcacggtaataacagtgtgaagtgcatcattgctggcgtgtggcagctctctgggggtggaaacaaggagcaggaggcagcaggttaacccttggaggctgacttgtctggagagctggggagggaggtgggacaagggcaggttagtggctgtccccaagccagggtggagtgagggaagtttggagtgtcagcagtcatggtggcccacccagctggctaaagaatgtttggggttggaagacgtcgcctgatcttcagggccccttctccagtcccctccacmccctgccgattagccctgagcacagtggccatgtggctcctgcccccacaatgcttctttagacccctgaggaaatgggctactgtccatgtcatggttctgaggggtgtcc

SEQ ID NO: 945699 - DNA, 540 bp, Homo sapiens
gctgcagaatacacattgttcctatcagcacatggaacatcctccaggaagagaccatacgttaggccataagacaagttataactaatttttaaaaattgaaatcatatcaagtatcttctcagactacactagaataaaactagaaatcaataacaaaaactttgtaaaccacacaaataaatggaaatttaaacaatgtgcttgctcatgaatgcccattgggtcaattaagaaattaaagatcatcaaagactactacaggcaactatatgctaacaaatcagataacctagaggaaacagaaaaattcctggatacatgaaaacctaccaagactgaaccaggaagaaacagagcagaagaacctgagcagaccaataacgagtaatgagattgaagcaatagtaaaatgtctcccaacaaraaaagcccaagactaaagggctttactgctgaatcctaccaaaattacaaataactaacctcagtttttctcaaactattccaaaaaatggaagagaagttaattcttcctaa

SEQ ID NO: 945700 - DNA, 467 bp, Homo sapiens
aagacatacctgagactgggaagaaaaagaggtttaattggactcacaattccacatggctggggaggcctcagaatcatggtgggagacgaaaggcacttcttttgccacaagagaaaatgaggaagatgcaaaagcaaaatcccttgataaaatcatcagatctcatgagacttattcactaccatgagaacagtatgggcgaaaccaccctcatgattcaaatgatctcccaatgggcccgtcctataatacatgggagttatgggaataaaattcaagatgagatctgggtgggggcacagagccaaaccatatcattccacccctgacccctccaaatctcatgtcctcacatttcaaaaccaatcatgcattcccaacagtcccccaaagtcttaactcatttcagcattamcccaaaagtccatagtccaaagtctcatctgagagaaggcaagtccctt

SEQ ID NO: 945701 - DNA, 737 bp, Homo sapiens
tgctatggcactggtgcacagtgcttgcaatttggtgggtatatgaaaataaacagaacattttaatgtggggcatgaagcgctattataagaggcctcgttaggatggttttggtgctgggttaatgcaaagacagggcacttaactcagacatgaaaacagaaagaaagaaacgaatcacagtcatatatacttgacaccaaagaagtaaatatttggcaacattttgatagataaaaatctttacttttaatagaaatattgtcatcttgttgacacactccaaatggtcctttgcccaaattatttagattatcacttgaattatttactttgcaaaagggagcccaatttaatgagaggtttgaggttcccatttagaattattgtttgaattctctactttgcaaaacagagcccaatttaatgagaggtttgaggttctagagtctcactcctgcggttaattgttgtgaccatgggtaagtgacttgattctcagtgtactggtgtctagataacttaaggcatgtcaagtgtctgcactttactaatcggcctcttcagatattagagttttatggatataaagcctctctcttctgtgcctttcagtaatggcrctcagacaacatgcacagaagatgagctggaattctgcctggcttcttgcagggcactctcatttttcgcactctagaaccatttagagaaggccccatttagaatttaaaat

SEQ ID NO: 945702 - DNA, 763 bp, Homo sapiens
ggcccttccaaccctgctctgggtycccgtaagccttcctcagccaggataggtgtgatagaactacatgctcagaggaagccaggcctgtgatgtatgggacacggaggagctgggtgaactcttaaggagtcttctttaattactaaattctctaagttaagcaggaacaatgaggacacaaagcacttaatcagaaatacacaagccttgaaggctgacaaacagaatggagtgatggctcccaaagagggctagctcaagtctctgcaggacaggctgaacctccctcagggctactcttaccttccatcctactaggattcccaaggtagggaatagctgggcggcttctatccaagttgcttctgcctaattcactcttgcctggtgaggctcagaatttgagggtagttggccgggcatggtggctcacgcctataatcccagcactttgggaggccgaggcgggtggatcactaggtcaggagattgagaccatcctggctaacatggtgaaaccccatcttcacaaaaaatacaaaaaaaaaaaaatagccggacatggtggtgggcacctgtagtcccagctactcaggaggctgagacaggagaatggcgtgaacccaggaggcagagcttgcagtgagccgagatcacgccactgcactctagcctgggcaactgagcaagactccgtctcaaaaaataaaaaataaaaaataatttgagggaagtttaggggtctatcccaaaggcttga

SEQ ID NO: 945703 - DNA, 672 bp, Homo sapiens
tacattatgtggaaggtaatgaggggatcacatggatcaagtagatatttcagagaagacctaggcttgagtgatctggacaggttcctctccacagggcaaagaaacctcatccaaaggaggctatgtggactgagccgcagaaggagtctataagaagtcagccagacagtggcgatgtcagcaagatggcagaatagaaggttcttaccctggttttcttactgaaacaccaatttaacaatatctacgaatgagagcacctttgtaggagttccagaacccaggggttgagcaccccagtagtgcacaaaagcccaggaaaactacattaaaaagcacaatttaaaaatttccattttattcatatctctagtgccaagaaagatgtcctcactctgatttctccagtgggttaaagagagaccaaggtgggtgttcagcttccccagcatttggggcccttcccaagaggcccacttctgtctcacctcaaacagaacaccgaggaagcaagcatggctaggccacctggggacagctaggaacaaagaaagatggtggcatctttcggtggctagggtgcatggatcttggcagtagtccmcagccacagtcattggcctggcctgactgaagcccctctctctggcctcacctgttcaggagcca

SEQ ID NO: 945704 - DNA, 602 bp, Homo sapiens
ccttatggtcctgggcattttttttggttggtaggcgatttattactgcctcaatttcggaactcgttatggttatttagtgattcactttcttcctggttcagccttgggagggtgtaggcatccagaaatttatgtgtttcttctagattttctagttcatgtccatagagatgtatatagtattctctgatggttgtttgtatttctgtggggtcattggtgatattccccccttaccatttctgattgtgtttatttaaatattatctcttttcttctttattagtctagctgatggtttattttattaattttttcaaaaagccagctcctgcatttgttgattttttgaatatttttttgtgtctctatctccttcagttccactctgatcttgattatttcttatcttctgctagctttgggatttgtttgctcttggttctctagttcttttagttgtgatgttaggtcatttcatttgagatctttcttgttttttttttttttttatgtgagcatctagtgctataaatttccattttkacactgctttaggtacatcctcgaggttcttgcattgtctctttgttctcatt

SEQ ID NO: 945705 - DNA, 590 bp, Homo sapiens
ctggctcgtgaactgtagctaggcggccggctgcattgccttgattaccggacaggtcagctctgcctgtgggggcggcagggggtggtcagggtgtagcaggtcctgcaaacaagaggtctcctggctggggtggacactggccccccaggcccagatcttgttcctggcacgttgcgatcttccgcctccctttttccatccctccctctcccaagtggtctttgccatccttatatccacctctcatcaccctacggccacttcatcttggcacacagtgtatgacacctgaatgcccgaccacttacctgcttttcttttttcttttctttttttttttttttttgagacagagttttgctcttgttgcccaggctggagtgcaatgctgtgatcttggctcaccacaacctccgcctcctgggttcaagcgattctcctgcctcagcctcccgagtagctgggattacaggtgcacgccaccatgcctggctggctacttttctgtatttttagtaragacggggtttcaccatgttggccaggctggtctcgaactcccgacctcgggtgatccacctgactca

SEQ ID NO: 945706 - DNA, 590 bp, Homo sapiens
ctggctcgtgaactgtagctaggcggccggctgcattgccttgattaccggacaggtcagctctgcctgtgggggcggcagggggtggtcagggtgtagcaggtcctgcaaacaagaggtctcctggctggggtggacactggccccccaggcccagatcttgttcctggcacgttgcgatcttccgcctccctttttccatccctccctctcccaagtggtctttgccatccttatatccacctctcatcaccctacggccacttcatcttggcacacagtgtatgacacctgaatgcccgaccacttacctgcttttcttttttcttttctttttttttttttttttgagacagagttttgctcttgttgcccaggctggagtgcaatgctgtgatcttggctcaccacaacctccgcctcctgggttcaagcgattctcctgcctcagcctcccgagtagctgggattacaggtgcacgccaccatgcctggctggctacttttctgtatttttagtaaagacggggtttcaccatgttggccagrctggtctcgaactcccgacctcgggtgatccacctgactca

SEQ ID NO: 945707 - DNA, 630 bp, Homo sapiens
ctctctgatgaggacgccgaggctccgggaggcaccacggcttgctcaataccacacagcaggttggccttggggcctggccttgaactcagtttcgctgggcttccccctggggtgaacccctaccctcatatcagcacagagaagcacagtgggccacatgcatgctcatccacgtatgtgtgactgcagcgcatacgatgcgcagaacgacgtgtgtgtgcacacacacgtgcacagggacacccaatccaccgctcctgcctcccagagccaagcgggggcttcccctagaagagctcataccaaggctctgtttgttctttcttgaaaatggaaaatcatgagtcaccagaagggatggggaaggaggaactagaagccggggcgggagaaggggctcctgggtcacctgagaacagctccaacccctctgggctgtgggaaccatctaccccagatgcctcccaggctgctggagggccaggctgggggcgagaggccaggcttgctgatggagtcagaagccagtggcccctagggggtccatgcaccaggacgcaagaaagccaagctccagagcagggaagtaacccatccaaggmcactcagcctggactgaaatctggg

SEQ ID NO: 945708 - DNA, 491 bp, Homo sapiens
tttgaagaagacaacaaatagttgaggctatgaattctatctctgtaaaaatagagttatgttttcctcctgtagtcagatctcctgtggaacgtgagtaaacaggaatttctatgtatggagcaaggacagtatggttagcacataatacatgtgtttatttcagagctggggaggactcctgaccagcgtgacacctaacattggagtgaaggggcagcaggtgaggagaaagttaaccctgcaccagtcctaactctagttttctcagcagcatttctgttgcttgaagaaggtcctcctcgtgtcagcttttttggtcttttcttaggttgaaaagactggaataataaaatggggctttgctctgaaatgagtaaggtggatgatatggtttggctctgtgtccccacccaattcttatcttgtagctcccataattcccctgtgttgtgggaggraccctgtgggagataattgaatcatggggg

SEQ ID NO: 945709 - DNA, 587 bp, Homo sapiens
aatgtaaggaagataaatcttcagttctttctccccctaatatcttataatgaaaaattgcaaacatacaaaaaagttgaaataattatatagtaaacacccatataactcaaaaactagattctatagtgaatattttactatcttcggtttaacacgtatctattgtttctctatcaaactgtcttatttatgcatttcagtgcaacttgctctcatcagcacacctagtccttaacatttcagcacacatattattgttagttctttttggacactttctagcactcccttcacaatctctcttgcctcattttccctcattctctccactttctcaattttcatttctgtgcccttcctcctactctatatctccaaagttctaaattgtaaaaagaaagtgtagaaatttgagcatggaacagtattgaagtggaaaaggtcaatggttaccatccaggacctcacaaggtgctgtcaccacaggcctgggatagatgagatcctcatgaacaagttgatccaaaccaactcaccagagacagaggtatatattaaaatgccaamttaataattgaaaaaca

SEQ ID NO: 945710 - DNA, 555 bp, Homo sapiens
ggcgaaggtgtgctcacaaagagctccggggccaggtgcggtggctcacgcctgtaatcccagcactttgggagaccaaagtgggcagatcacgaggtcaggatttcgagaccagcctggccaacatggtaaaaccccgcctctactaaaaatgcaaaaaaaaaaaaaaaaaaaaaaaaaagccaggcatggtggtgtgtgcctgtagtcccagctactcggaggctgagacagcagaattgcttgtacctgggaggcggaggttgcagtgagcagagattgcgccattgcactctggcctgggcaacaagagtgaaactctaactcaaaaaaaaaaaaaaaaaaaaaaaaaaaaagacgcaggcggtcaggcacggtggctcacatccacctgtaatccttaaactttgggagcctgaggcagaggatcacttgaggccaggagtctgagaccagcctggactacatagtgagaccctgtstctacaaagagagaaaaaagtagctgggcatggctgtgtgcctgtagccccaacctctcaggaggctgagggg

SEQ ID NO: 945711 - DNA, 751 bp, Homo sapiens
gcaagtcaaaatgtaatcgtgatataataaattataaacataaatttgcaaggaggactagcttcattcccttcgtgtaatgaatgagcatttgtaaaggggttgaacataggagcagactgagagaagggagggccattcaggttgagagaacagcatgagcaaaggcctggaggagggaatgtgcctgactgttcagagaacagagagaggttcttgtcatttagagcgtagcgtacaggttggggcacaagactctgcgtgagataaattaggggagggagagcagggccagagccttggggcacttgcgaggaatcacagatgcatagagtccaagggctgccggaatgttcaagagtggagattttgtgcacaggaagccataccctctcacccaggttactgtaccagctttccatcgttccctccattctgtttccactcaggccctctctaatctattccccacactgcaaccacagtggtcctttggaaactgcaaatcagatcaggtcagtcttctggtttccttttcttttagaataagtttggaatgttaatatgacctctggtgttgtgcagagcaggtcttacacacacaccccccaacacctgcctgaccttgtaccaggacactccatttctcccataatgttccagtctacctgacctgctcctccctgatcctaggctgctawggggtatctcttgtgctaactgtaatgctggaaaatagtaggtggtcaat

SEQ ID NO: 945712 - DNA, 608 bp, Homo sapiens
cctagacccagcaaaggggcacatgctgttgcttctgatctctttactcctcttagcaatttccaccagctaattccgacatagcctttcagccacagtttacatgtcctttccccggaaatgcattccttgaccctcaggcttcgttccttagtggattatcagtaccctgtaactttcccttcacagtacttatttaaagattatttgagtgattatttgaaatgtctgtcttatgtacttaaaaactatttgtggttatttttgtaaagtctaacttgtcactgctgtttcctcagaacctagcatggtgcctggcacagaattgatcctcaataaatatttgatgaatgagtgaataatgaatggatactatctttgggacctatgttgtccatatcctaagaaatgatcctcagcccccagcagctatcttccttcctaatcttgcagagcctaccagccaatatgtaggtgtaattgccctatgatgccagggaactaggagaccaggctcactgsggtgcagcaagccaataaaagtgcaaagaccttcatgtagatcatgggcctcttgtattcctgtgatcactagctaacaccttgat

SEQ ID NO: 945713 - DNA, 633 bp, Homo sapiens
tcacgaggtcaggagatcaagaccatcctggctaacacggtgaaaccccgtctctactaaaatacaaaaaaattagccaggcgtggtggcaggcgcctgtagtcccagctgctcgggaggctgaggaagaagaatggcgtgaacccaggaggcggagcttgaagtgagccgagatcgcgccaccgaactccagcctgggcgacagagcgagactccgtctcaaaaaaaaaaaaaaaaaaagagagaaaaagaaatatttaccgattgcctactgcatgcgtggtactgaagacccttggaagtctggaatttaccattgaaagctttagctgtaagagacttgaaagatccatgacatgatggaaagatcaatgacatgatggcatataataaattatatggtgataatactgcctacacctgtggtttccaaactttagtgagcattggaatcattttgggggcttactaaaacacagattgctggcccagtacgtcaggstaagacccaaggacatacatttctggtaagttcttaggtgatgctgatgttgtgaggaccacactttgagaaccactgccctatatcaaatggtttcatgaagacaaactagattatataagtaaagtggc

SEQ ID NO: 945714 - DNA, 733 bp, Homo sapiens
ttgggtttatcaaatgctggttgtagtagtaataaactcatgtggacatactcctgattaaccatggtgctgcaggcaatggtgatagctgaggctatgctatcaggttttctccttcctgggtgctgtagtattctacctggagattctgtaatggactgtgtcaattggccccaagccaggagatggcttctgcaaaagagtgccagccacagtggtagtagtgagacttgtgcctgccttatgttaccatgaggaggtactctggtgactcaggcaatgggtggggccctagaagtcccaaaagtttctgtcctttgtgttaaactaccagatcaggtagaggagcaaagccaagtggaacctgggtcagacaaatttgtgctctggctctccatgtgcagggcaagcaatggccccagtgaatattggttgacagttctctggaaatttgggtaatattccacggaggagcaaaatggtctttgttgcacagaagagttcgtacatggggtggtgagtagcaggtggcagtaagccccactcagctcccagacacttggcaactcaggtctcacacctacagtattccactagcagcagctagctaatttccaggaagtctgcactcasaatgcaaaactgccccagaccataagcctttccacagagcaaccgcagctttcagaccacacccctcctggtctgcccatctagccagggcatccagctc

SEQ ID NO: 945715 - DNA, 571 bp, Homo sapiens
agcttcagctgagagctgggaggggagacagtccattcccccatcgctgtgtgacgaaagtgaacctctgcaagtcaattttgttttaaatttttttattgtgagaaaatacatgtaacgtaaaatttaccatattctccatttttttttttttttttttttttttttttacagatggagtctggttctgtagcccaggctggacggctgtggcgccatctcggctcactgcaagctccgcctcccaggttcacgccattctcccgcctcagcctccccagtagctgggactacaggcgcccgccaccacacccggctaatttttttttgtatttttagtagagactgggtttcaccgtgttagccaggatggtctcaatctcctgacctcgtgatccgccctcctcggcttcccaaagtgctgggattacaggcgtgagccaccgsgcccggccctccatttttaagtatacatacatttcactggtaccgtatacattcataatattgctcaaccatcacccactatccatttctataactcttcatcttgtaaaactgaaattctttc

SEQ ID NO: 945716 - DNA, 749 bp, Homo sapiens
acacttgcttggctacgtaggttttctattttctttctytttctttctttctttctttctttctttctttctttctttctttctttctttctttttctctctttctctctttcttctttctttcttttcttctctctctctctctctctgtctctctctttctctctcagatagggtctttgtatgttgcctaggctggtcttgacttcctagtgctcaagtgatcctcctaccttggcctcccaaagtgctgggaaattggcggctaacccttaaaaatcaaagtctttccataaatacctgaattctcagtttcttttgaaaaggtggatgattaatccatactggacccacaatccagcagggcaaatttgattggagctgagtagcagctacctccttgggatgtggcctgagttctctagtttgccacagtccccgccactttctctttttgagatggagttttgctcttgtcacccaggctggagtgcaatggcgtgatcttggctcactgcaacctctgcctcccgattcaagtgattctcctgcctcagcctcccgagtagctaggattacaggcacctgccaccatacctggctaattttcgtatttttagtagagacagggttttgccatgttggccaggctggtctcgaactcctgacctcaggtgatccgcccacctcggcctcccacagtgctgagattacaggtgtgagccactgcgcccggcccccaccactct

SEQ ID NO: 945717 - DNA, 530 bp, Homo sapiens
acccctaagatgcacatgtgccaagtagactcaaaaagcataagacaggcctggaaaactgaaatgatattggaaccaccagcctaagaaggagaatcagaacttgtggtctgaacctacctagccaattgcctgcttaaacaataaagaaataaataacattctgcagaggatttaataggacctagaatctatcaacatgatattaaaaatattctggatacaaaccaaaagcattcaacatacaaagaaacaaaattatctaaccaatatctaagaaaatagatactcagcagataccaagcctgagataacccagatgttgggattatcaaagaccttaaagtagctattataagaataatccattagataaagataaacacattgaaatgaatgggtatataaaagttttcagagcaaaattaaaactataaaaaagaatcaartggaaatttgagaactgaaaaatcagaaaaatttactggatgggcaaaatagcataatggagatgaaagagaaaagagcca

SEQ ID NO: 945718 - DNA, 632 bp, Homo sapiens
tttttttgagatggagtctcactccgtcacccaggctgaagtgcagtgatgccatcttggctcactgcaacctctgcctcctgggttcaagtgaytctcaaaccttaacctcccaagtagctgggactacaggcacgtgccaccgtatttttagtagacatggggtttcaccacgttggccatgctggtctcaaactcccgacctcaagtgacccagttgccttggcctcccagagtgctgggattataggtatgagccaccatactcgtccagctttcaataaaaaaatcattcatcataccaagaaccagagagataccaaactgaataaacaatcaacagaagtgtgtgcactaaacaacagaactgcaagttatacaaaacaaaatatgatagaactgaaaggagacataagtaaatccataattagaattggagagtttaacactattctgtcaacagatagaataactagacagaaaattggcaagaatatgtaagaactcaataacaccattatccaacaggatctaatcaacacttagagaccactccactcaacagcagaatgctcattcctttcaagagcccacagtacatattccaagaaaactatatcctcggccacaaa

SEQ ID NO: 945719 - DNA, 492 bp, Homo sapiens
ccatgtcacaatgatgcaagaggagggttcccatgatctagggcagcttcaaccctgtggctttgtggggtacagcctccctcctggctgctttcatgggctggtgttgagtatctgtggcttttccaggtgcacggtgcaagctgtcagtggatctaccattctggggtctggaggatggtggccttcttctcatagctccactaggtggtttcccagtagggactcagtgttggggctccaaccccacatttcccctctgcactgacctagcaaagattctccatgaaagctccaccagcaaaattctgcctggatatccaggcatttccatacatcttctgaaatctaggcagcggttcccaacccccatttcttgacatctgtgtacccgcagtctcagcatcatatgcaagctgycaaggcttgagacttgcaccctctgaagccatggcccatgctctatgtttgcttctttcagccatggctgga

SEQ ID NO: 945720 - DNA, 482 bp, Homo sapiens
aacaatgctgcaacaaacataggagtgcaggtacctcttcaatatactcatttaaatctttaattcatcttaatttttgtatatggtgaaaggtaggagtccagtttcattcttctgcatgtgactattcagctttcccaacaccatttattgaatagggagtcctttctcaattggttatttttgtggactttctggctttatttctgagttctctgttctgttcacttggtgtatatatttgtttttgtaccagtaccatgttgttttaattactgtagccttatagtgtagtttgaagtttggtagtgtgatgattccagctttgtcttttttacttagaattgctttggctatttgggctctttttttattccatacaaatttcagaatttttttttctwtttctataaaaatgacattggtagcttgataggaatagtgttgaacctgtagtttactttggaaagtatgaccatttt

SEQ ID NO: 945721 - DNA, 582 bp, Homo sapiens
cagatacctggagatctgcctgggtgtggagtggagagggtctccctgtaccagaatctttacacaggaagggtggagtgagtcaggctgctaaaccaggcaagcaggtgctctgaatgcctggaaataagcctaggtgtaaagcaaagagggagctcctgtgtaggaaatgtggggcaactcagtttgcaagtccatgagagtggctgctccaaatgcttagagatctgcttatacgtggagcagagagggccccattacaacatgatctatgcacaagaagggtggggcagatcagggtgctgatccaggtgaggggttactctgaatacctgaagatatgcctgggcatgcaacagggagggccctgttgcaccatgatctatgtctacgaagggtggtggctcaggctgctggtgtaggcaagcagatgctcctgtatgcctgcatttctgcctgggggtggaacagagagggtcccactgcaccgcagtctctggggagcaggacycagaatgacacatgcaggctggttccaggtatcctaactggccctggctgcaagtcttgtcatccaggaga

SEQ ID NO: 945722 - DNA, 641 bp, Homo sapiens
gccaccatgcccagccaattttgtatttttagtagagacggggtttctccatgttggtcaggctggtctcgaactcctgacctcaggtgattcacccacctcggcctcccaaagtgctgggattacaggagtgagccagggcatcttgtattttatctggcagatataatcaagaagaaagtcttagttgggtgctagcctgtctttaacatagctctgacgcttgttaatcttcctttttatcagagagagagagaacaagtctcaggctctaggtaaaatttaacaacattgttttgtttttattgtattttatttacatggttactatgtacggtgagtgttactatcttccctttacagtagcaatatcaaattccctttgaaataactgtattcaggttttaaaaagtgaatcaatttaaagaaaactgttacgtaagtaacatcacaggttcaatgcagttgtgacaaaaaacaggaaggcgaaggccaagagaccagggcttggsgctatctgagacggcgcttctgccctttcccatctgtgaactccagggtcccttcctcccctgccccgtcccttgtccacacaggcttgatggctggaattctgcagcccctggggcaggcctgcagga

SEQ ID NO: 945723 - DNA, 576 bp, Homo sapiens
actatcctaaatatatatgcaccaaatacagggcacccagattcataaatcaagttcttagagacctacaaagagacttagactcccatacaataataatgggaggctttrataccccactgtcaatagtagacagatcaacaagacagaatattaacaaggatattcaggacttgaactcagctctggactaagcagacctaatagacatctacagaactctacaccccaaatcaacagaatatacattcttctcagcaccacatcacacttattctaaaattgaccacataattggaagtaaaacactcgtcagcaaatacaaaagaatggaaatcataacaaacagtctctcagaccacagcacaatcaaattagaactcggcattaagaaactcacttgaaactgaacaactacatggaaactgaacaacctgctcctgaatgaccactgggtaaataatgaaattaaggcagaaataaagaagttctttgaaaccagtgagaacgaagacacaatgtaccagaatctctggacacagctaaagcagtgtttagagggacgtttatagcact

SEQ ID NO: 945724 - DNA, 576 bp, Homo sapiens
actatcctaaatatatatgcaccaaatacagggcacccagattcataaatcaagttcttagagacctacaaagagacttagactcccatacaataataatgggaggctttaataccccactgtcaatagtagacagatcaacaagacagaatattaacaaggatattcaggacttgaactcagctctggactaagcagacctaatagacatctacagaactctacaccccaaatcaacagaatatacattcttctcagcaccacatcacacttattctaaaattgaccacataattggaagtaaaacactcgtcagcaaatacaaaagaatggaaatcataacaaacagtctctcagaccacagcacaatcaaattagaactcggcattaagaaactcacttgaaactgaacaactacatggaaactgaacaacctgctcctgaatgaccactgggtaaataatgaaattaaggcagaaataaagaagttctttgaaaccagtgagaacgaagacacaaygtaccagaatctctggacacagctaaagcagtgtttagagggacgtttatagcact

SEQ ID NO: 945725 - DNA, 612 bp, Homo sapiens
gcctggtcccgggctttttttyttttttttttttggtaggctatttattactgcctcaatttcagagctctttactgatctgttcatggattcagcttcttcctggtttggttttgggaggatgtatacgtccaggaatttatgtatttcttctagtttttctagtttatgtgtgtagaggtgtttataatattctctgatggttgtatttctgtggggtcagtggaaacatcctgcttgtcatttctgatcatgtttatttgaatctttctgctttgctcctttattagtctagctagtggtctattttatttttttccaaaaaccagctcctggattcactgatttttcttttttgaatggcttttcctatctcttattcagttcagctctgattttggttatttcttgtcctctgctagctttgggatttgattgctcttggttctctagttcttttagatgtgatgttaggttgttagcttgatctttctactttttgatgtgggcacttagtgctataagtttccctcttagtattgctttagctgtgtcccagagattctggtatgttgtatttttattcttattagtttcaaagaacttcttgac

SEQ ID NO: 945726 - DNA, 492 bp, Homo sapiens
cctctgagagctccctcccagggagatacagacctgttgctagcccgaatgcayctgtaggaagtcactggagaccccagttaggaggtcttgcccagtgaagaggaatggatagctgtgctgctctgctgtgctgtgctgggggatcccttctgcccctggttggcttggactctgtaaagccagaaggctggaatgccaatttgcccaaacagcaaagatggtagcctgcccctctccccagaaactcccacccaaggaagcacaaggctgccaccagtagctgactggaattccaagctagtggtattatcctgtaagatgccatgaaagtggggccctgcagactgtcactgcttggccccctgtattcagcctctttcctagtggtatgtacaggggtctaacctcctgctttgctagacccttgtggttacttttgctgggaagccctgaacctgagtatctaaggctcctacatctccaggtgtg

SEQ ID NO: 945727 - DNA, 601 bp, Homo sapiens
tagaaatgttaatggctgggcgcagtggctcacgcttgtaatcccagcactttgggaggctgaggcgggagaatcacttgagcccaggagttggagaccagcctgggaaacatggtaagaccacatccctactaaaaaaaaaaaaaagtttatgtatatatataaaattatctgggcacactggcacatgcctatagtcccagttgcctgggaggctgaggcaggaggattgcttgagctcaggtggtcgaggctgcagtgagccatgatcgcaccaccgcactccagcctgggtgacagagtgagaccctgtctctgaaaaaaaagtgcttgtttatattaatattagttagaagtctacttgtttatagcagaattaaactggtttatagcagatacaagctcttggaggaaaatactacacttcattccaggccctgagtccttagtaactggctgtgtgccctgtagggctctacggttcctggttgaggagcagagagatcaattgctccagtgtaagrggcgaagagttccttagggaacggctgctgggcccagctttgctattgtcttcgctttctagtaagccttgtgttgc

SEQ ID NO: 945728 - DNA, 566 bp, Homo sapiens
gagagggggcctgaggcttgaggctctgaggagtcataagcaggtatctggataaagatggagccgccagccctgggctggcacctggagagaatgtcgtggcttgaaggaaggcgtctttcctaaccattaggtacatctgacagtgaaatgagtggacattggagacagccttccttagattctgacggacaggttcccctggcttgcctttggccctttgaaaggactgtgtcttccacttttttttttttttttttttgagacggagtcttgcgctgtcatccaggagtgcagtggcatgatctcagctcactgcaacctccacctcctgggttcaagcaattctcctgcttcagcctcctgagaaggtgggactacaggcatgcgccaccacacccagctaatttttgtatttttagcagagacggggtttcaccatgttggccaggctgggcttgaactcctgacctcaggtgatctgcctgcttaggcctccccaaatgctgggattacaggygtgagccaccatgcctgcccgtatcttccacttttaatggaggagg

SEQ ID NO: 945729 - DNA, 595 bp, Homo sapiens
tttactttacctaaattcataagaggaatcactgtctatggtagctctagccttatgaaaaagatttcttaaataataagacttcgaagtctaaattactccttggtctataggctgcagaatggatgttgtgctgggaggcatgaaaacaatattaatcttcatgcacatttccctcagagctaccgagtgaccagatgccttgccaaagagtagtaatgttttgaaataaatctttttttctgaacagcagttcttaacagtaggcttataatgttcactaaaccatgctgtaaacataaaagggctgtcatccaggctttgtcattccatgtatagagcagaagcagagtagatttagcataaagcttaagggccctataacttttggaatggtaaataggcactggtttccacttaaagtaacaagctgcattagctgctaacaagaaagtcagcctgtgttttsaagctttgaagccagacattgacttctcctctctagctattaaagtcctaaatgacatctttttttcaatataagactctttcatccacattgaaaatctgttgttttgtatagttgagaggtgaa

SEQ ID NO: 945730 - DNA, 747 bp, Homo sapiens
gagaggctgtgggtgcagcttcagcagacctaaacattcttgcctggctgctctgaagagagcagcagatcctgacaaggagggttctcccagcagagcactcgagctctgataagggacaggctrtctcctcaagtgggtttctgacccccatgcttcctaactgggagagacctcccaactggggttgacagacacctaatacaggatagctctggctggcatcaggctggtgcctctctaggataaagtttccagaagaaggagcaggcagcaatctttgctgttctgcagcctctgctggtgatacccaggcaaatagggtgtggagtggacctctagcaaatcacagcagacctgaaaatgagaggcctgactgttagaagaaaaattaacaaacagaaagcaataacatcagcataataaaaaggacccccacatagaaatctcatgcaaaggtaatcagcgtcaaagatcaaaggtagataaatccacaaagatgaggaaaaaacagccccaaaatgctaaaaattcgaaacaccagaatgcctcttctcctccaaatgatcacaactcctctccagcaagggcacaaaactagatggagaatgagtttgacgaattgacagaaggaggcttcagaaggtgggtaataacaaactcctcagagctagaagagcaggttctaacccaatacaaggaagctaagaatcttgacaaaggttacaggaactgctaactagaata

SEQ ID NO: 945731 - DNA, 747 bp, Homo sapiens
gagaggctgtgggtgcagcttcagcagacctaaacattcttgcctggctgctctgaagagagcagcagatcctgacaaggagggttctcccagcagagcactcgagctctgataagggacaggctayctcctcaagtgggtttctgacccccatgcttcctaactgggagagacctcccaactggggttgacagacacctaatacaggatagctctggctggcatcaggctggtgcctctctaggataaagtttccagaagaaggagcaggcagcaatctttgctgttctgcagcctctgctggtgatacccaggcaaatagggtgtggagtggacctctagcaaatcacagcagacctgaaaatgagaggcctgactgttagaagaaaaattaacaaacagaaagcaataacatcagcataataaaaaggacccccacatagaaatctcatgcaaaggtaatcagcgtcaaagatcaaaggtagataaatccacaaagatgaggaaaaaacagccccaaaatgctaaaaattcgaaacaccagaatgcctcttctcctccaaatgatcacaactcctctccagcaagggcacaaaactagatggagaatgagtttgacgaattgacagaaggaggcttcagaaggtgggtaataacaaactcctcagagctagaagagcaggttctaacccaatacaaggaagctaagaatcttgacaaaggttacaggaactgctaactagaata

SEQ ID NO: 945732 - DNA, 570 bp, Homo sapiens
caggtatcccataacttaaagtaaaagaaaaaaaaaaaagaaaatttacaatagcattgtaatggctaaatctttatcaccmatcatgttaattaaccctcataaaataattttatgtttccagtactattgtttcacaagcaagagaaatacaacacagtgtggtttaagatttttgcctaagatcacagaagcgcatagtagttagggtttgaacctaggcagcctgacaactaatgaccacactctgaagaccctcatatactttgaagatagttgtttaatccacttcttttctcatatagaaaaaaggaattgaggatggaaatctaatatttgatgaagactcagtgtgcaagtaatcatggagacactatattgttttattctagtgtccttgtaattttctttatagagcaccaaaacaataaactgcttctcaaatggtcgtattcaagtgctttataatattaactcatttggtgtgcataacaactctatgaggtaggttttattattatgcccattttccaattgaagcatcttgtgtgcaaagaattaagtaattta

SEQ ID NO: 945733 - DNA, 608 bp, Homo sapiens
cctctagatttgtgaacatacaggatacagttataacaatgttttaatgtccttgtctactaatgttatcatctgtgtcagttctgaagcaatttcaattggttagctggtaattttggttgaatacaaaacattgagaatttaaccttatgggctattggatatttttgtattcctataaatactcttgagctttcttccgtggaattcttaggttaattgaaaagagtttgatccttttaatcttggttttaagatttataatgtgaaggctcagaaggcggggcaagatggtggaatagaaggctccactgattgtccttcctacaaggacaccagtttaacaactatctatacacacaaaaagtaccttcataagaaccaaatatcaggtgagtactcacagtaccacactacctggttttaatttcatatctctgaaagaggcactgaagaggtataaaaaagagtcttaaattgccaatgccacccctccccacccccagcaacatgatgcagaaagcttctctggtccycgggggagggaaaacacaacaattgtgaggtattgaaatcagtgctgtcctgttagagcagaaaggaaaact

SEQ ID NO: 945734 - DNA, 586 bp, Homo sapiens
ggtagcatgatgttatggaaagagagacactaggtagtcaggaaagacacctctgaagatataattttttttttttttttctggagtctcgctctgtcttccagtctggagtacggtggcwtgatcttttctcactgcagcttccgcctcccgggttcaaatgattctcctgccccaggctcctgagtagctgggattacaggcgtgcaccaccacgcccggctaatttttgtgtttttagtagagacggggtttcaccatgttggtcaggctggtctcgaactccttacctcgtgatctgcccacccccacctcccaaagtgctgggattacaggcgtgagccaccactcccagcctgaaggtataatctttaagttgagatcagaatatcaacaaagagtcagtcatgcaaaaatgaattgcttagttcttttgttaaaaactagaatgttagagctatgtccaactttcatagtggcaggcttttgtccaagtaatatatatgtattagtccattttcacaatgccagaaagatactacctgagactggttaatttataaacaaaggaggtttaattgactca

SEQ ID NO: 945735 - DNA, 587 bp, Homo sapiens
tctttttctcatttcagtctcacaatatccagtgaacaaggcagaacaaatattaatccataaagttaacaacaaatatttattctgaaaggtagcaagtgagagacaacaaaagttcccaagatcctcaagtaacaaaacctaattaagaaaaagagatacatgtatttgacaaaaaaaaaaaaaaaaaagtaacaatacagtccataaatgatacggccaaagaagaaaaatttcaaaggaaacactaaacaaaatctcaacatatataatagagaaagcagcctggaggttggatggggagggagtggagctcttggtcttccctacgctcacttagtacggctgaagcacagcttcaaacccccaggcttccttagacccacactgaaaaccccggtacagtttagcaagtgtcacagagtcaggggcaaaacaaggatcactggagaaggagtggaagaggaggcttcatgaacaggagggaatgaagtccaatttttaagtaagrgtgagatttgaataagaggaaagaaagaagccagttaattgttggataacagaatgctataaacaaaggctgagag

SEQ ID NO: 945736 - DNA, 709 bp, Homo sapiens
agtcatggcctgggccatctctgccatatgcacagccttgtgttccctgactctcctgcatctacttcttctgccttcctgtgagaggtctcacaaggagtgatgactggtgattgaaccaaactctgttctttcattctcatcaaacattcattgtgcacctactgtgtggcaggccctttgtggccaggttgggtcagatgtggcccctgccttcaaggagctgaaagtctgggggggggagagtggcagtcccccaaatgagtcattgtggtagaagcattctgccaggagtacatgcagggacacaggggtctagtccagtctgcaggggcagggaaacttctggaggagacactgccagagctgaatcctaaaagatgaggaggaggggctgggcgagagaggtcatggaggccagctatcaggatgggaatgccaggctgagcttagacttgacccacaggctcatggacagttttcaccatggatgtgcaagagtcagcctgttaagaaggtggccctggtggcaggtggagaagagaaggggaggttcagttgcaggcagcagggacagtgaggtggctgaaggaycagaactggtgcagggcttgtctatgcagagcgagaagcggaaccaagacctcctgcctcccagtaaaggtatctgggctggccagcaattccccaaagcacagtcctcaggacc

SEQ ID NO: 945737 - DNA, 722 bp, Homo sapiens
atcacatgctccttttagccagcagggtagaggaaggggcaaagaagagcacacaaaactttaaaactttgacacatggcttcgtatatctgcagttgaggctgggcatgtccttttttaattgagcagtaatatgaccagccaaaaattagagttctgtgatgaaggtgaaaggggaaaaggatattgcaaggcaagtgtctgttatagatgggtatttttatttaataactaatctgatttaattgttggaagattagaagaaacatactctttatgtgattttactttgtctcttttggtataggaataatgtgtcactgagctggattgtttaagaaaattttgtcattaagaagagtaaacaaactagtatagaaacaagaaatagcatacatagtaagtttcattaaaattcagctatttagaatggaattgcctaattctttcaggcaactcatgctaataagttgtacttagcataattgctgggttactactatcttttctccagattaagtatttttgatttacatttatatgacagttgtcctctgcacttagagtaatagcatcctgtttatatattctgggacccagaattaagtcttgtttttctagcttctccacctgttcattctcaaacacctacaaatacacacacacacacacacacayccacacacacacacacaaagtagttatcagaacatgtgcagtct

SEQ ID NO: 945738 - DNA, 722 bp, Homo sapiens
atcacatgctccttttagccagcagggtagaggaaggggcaaagaagagcacacaaaactttaaaactttgacacatggcttcgtatatctgcagttgaggctgggcatgtccttttttaattgagcagtaatatgaccagccaaaaattagagttctgtgatgaaggtgaaaggggaaaaggatattgcaaggcaagtgtctgttatagatgggtatttttatttaataactaatctgatttaattgttggaagattagaagaaacatactctttatgtgattttactttgtctcttttggtataggaataatgtgtcactgagctggattgtttaagaaaattttgtcattaagaagagtaaacaaactagtatagaaacaagaaatagcatacatagtaagtttcattaaaattcagctatttagaatggaattgcctaattctttcaggcaactcatgctaataagttgtacttagcataattgctgggttactactatcttttctccagattaagtatttttgatttacatttatatgacagttgtcctctgcacttagagtaatagcatcctgtttatatattctgggacccagaattaagtcttgtttttctagcttctccacctgttcattctcaaacacctacaaatacacacacacacacacacacatmcacacacacacacacaaagtagttatcagaacatgtgcagtct

SEQ ID NO: 945739 - DNA, 542 bp, Homo sapiens
acacattctacagctatatagaaatattttatttctttatatccttattctggaaccttttttctattacaaaatatatatwtttttttaacttttcaaacttttttttttccaagacagagtattactcttttgcccagcctagagtacagtggcttgatcttggctcactgcaacctccacctactgggttcaagcaattctcctgcctcagcctcccatgtagctgggattacaggtgtgcaccaccacacccagctaatttttgtgtttttggtagagatgaggtttcaccatgttggccaggctggtcttgaactcctgacctcaagtgatcctccagccttggcctcccagagtgctgggattacaggcatgagccactgtgcctggcctcaaacttttttattaaaaactaagacacaaacacacacattagcctaggcatacacagggtcaggatcatcaatatcactgtcttcacacctccaaatcttgtcccactggaaggtcttcaggggcaataacacatacacagctgt

SEQ ID NO: 945740 - DNA, 542 bp, Homo sapiens
acacattctacagctatatagaaatattttatttctttatatccttattctggaaccttttttctattacaaaatatatatayttttttaacttttcaaacttttttttttccaagacagagtattactcttttgcccagcctagagtacagtggcttgatcttggctcactgcaacctccacctactgggttcaagcaattctcctgcctcagcctcccatgtagctgggattacaggtgtgcaccaccacacccagctaatttttgtgtttttggtagagatgaggtttcaccatgttggccaggctggtcttgaactcctgacctcaagtgatcctccagccttggcctcccagagtgctgggattacaggcatgagccactgtgcctggcctcaaacttttttattaaaaactaagacacaaacacacacattagcctaggcatacacagggtcaggatcatcaatatcactgtcttcacacctccaaatcttgtcccactggaaggtcttcaggggcaataacacatacacagctgt

SEQ ID NO: 945741 - DNA, 632 bp, Homo sapiens
caagttcacctttaaaaactgttgctaccgactcccatatgtactcaaagatagatgcmtaagaattttcacatgcacgttatttgcagtaataaacaaccaaaaaccatttaaatgttaatgaatagactaacgatagtgtagaatattgacaggatggaaaactatgcagccattaaaaggaacaaggcaagtcagtgtgtgctgatatggaacaatctccaagatatattgataattgtaaaaagcaagatgtcaaaaagccaaaggaaaacctatactgacctgtgtttgcctatgcgtagactgtctctggttagattcagaagacactattaacaattgttcactggccaaggggattggggcaggagagactttacacggggaacctttggatactgtttcactttataattaaaagataattcgagaagatatatcaaggcctatttcttggaggccagagcgctcctaacccctgagcctgcctcagcctctggctcccacccccgcagccgccccgtcgcctctgagcaggacggggccccactcacccttcccggccgcagacagagcgcgggcgcccgggggagccctgcagcgggcagctccgcagcaggaggccccgc

SEQ ID NO: 945742 - DNA, 657 bp, Homo sapiens
acctctcaattttaccaaagctttgattggaatgtcatattttcagataccaccagactgttttcagggtttgaagttcacttttatggatccaattaaaaaaaataaaatttgaaaaactggcctgayaccttgtccacagcctttcctttcaggatttttagaattgtggtaagtaggctaagcatggtggctcacgcctgtaatccagcactttgggagactgaggcgggcggatcacaagttcaggagattgagaccatcctggctaatatggtgaaaccccgtctctactgaaaatacaaaaaaatagctggatgtggaggcagattcctgtaatcccagctactcaggaggctaaggcagggaaatcacttgaacctgggaggcggagtttgcagtgagctgagattgcatcactgccctccagccggtgtgacagagtgagacgccatctcaacaaaacaaaaaaaaaacaaaaaagaattgtggtaagtaaagaatgtcactttctgacaggccaaggaaactcaagatattttggggacctcataaatagagtagattaagcaatttgtacaggtattaccgacacaatttgagggtgagtcaaatctttgcctggcttcataagactccagaggcttttaaaagtct

SEQ ID NO: 945743 - DNA, 521 bp, Homo sapiens
gaattgtgctgcaataaatgtgcagttgtcttttcgatacagtgacttcttttcctttgggtagatagtagtgggattgctggatcaamcggtagatctacttgtagttctttgagaaatctccatagtgttttccacagaggttgtactaatttacattcccaccagcagtgtataagtgttcccttttcatcacatccatgcattatctattgctttttgactttttagtaataaccattgtagctggggtaaggtggtatctcattgtggctttaatttgcatttccctaatgaatattttttcatgtttggccatttgtttatcttctttagagaaatgtctgtcatttgcccactttttaatgggattttttttcttgttgatttgtttgagttccttgtagattctggatattagtcctttgtcagatacatggtttgcaaatattttctcccgttttgtgggttgtctgtttactctgatgatgatttctttgactgtgcggatgcttcttaat

SEQ ID NO: 945744 - DNA, 578 bp, Homo sapiens
aattttagaaatgctttttctaaattgatttaattatggtaatttattgaaaagagtatatttgttctgtaagttctgtaacttcaataagtaatgttgaagttacttttttttgccttcaagcatctgtttaacaaagcacatcttgcaccacccttaatccatttaaccctgagtggacacagcacatgtttcagagagcacggggctgggggtaaggttatagattaacagcatcccaaggcagaagaatttttcttagtacagaacaaaatgtagtctcctatgtctacttctttccacacagacagcaacaatccgattcctttatcttttccccacatttcccccttttctattcgacaaaaccgccatcgtcatcatggcctgttctcagtgagctgttgggtacacctgccacacggggtggcggccaggcagagggagtcctcacttcccagaaggggcggccgggcagaggcaccccccacctcccagacgggaccgcggccgggcggaggcgccccccacctcccggacggggcggctggccrggcgggggctgccccccgcctccc

SEQ ID NO: 945745 - DNA, 620 bp, Homo sapiens
tgcaggtggctgagatgggagcagcactgagtctaggagtccaaagttgcagtgaactaagagctaggattgcaccactgcactccaagccaggggacagagcaagaccctgtctccaartgaaacaaaacaaaacaaaacggtaatttcttaaagattaggtgcaacctaaataccatatcagtgaactttttatgttctgttacattaaaatttataaatctatcctccactttggctcatttactaatgcataattttataacatcatgcattgattatttgaataatattggttctctcaatatctttgcatagcaaattaccccaactcagcaacttaaaacaataaacttttgttatctcacagtttctttgggtaaggaatttaagagtggcttagctaggtggttctggcttgaaatcattcaagaggttgcagtcaaactgttggctgggctatggtcttcttaggactcaactgagagatggtccaattccaagctcactcgtgtgccttttggctgcttcagaagatctactccaaagttcactcccatggttgctgggaaccctcagttccttaccatgtggcctctccatagactgcttcagtatgt

SEQ ID NO: 945746 - DNA, 592 bp, Homo sapiens
cttaagacgactgagctcctggaacgaggggcggcagccatcactgtaactccagcctgctgttttcccctggtgrtgctggggaaactggatggtgtggagtcaggaaggattccccacagagcagcacagtggctgtggcagattgtggccagactgactctttaggctggacccagaccaggcctccctgtgggaatttcagcaactctagccaggggcttagggacagaactgtgatctccttgagatggagcccctagagggaggggcggacgtgatctccacagatcagagaatttagtctttccccctgctggctttgaggaatcaaggcagtccctgacgagtgggatttcctggtgccaccaagtggcagccagagtgctttgttaagcaggtgtctgatcctgtgccttctgactgggtgagacccccaaataggggtcaccagacaccttatgcaggagtgtttccgttggcatcaggtcggtgcccctccgggacagaactcccagaggaagaagcaggcagccatctttgctgttctgcagctcccactggtgacaccaccagatgcgagagggaccca

SEQ ID NO: 945747 - DNA, 592 bp, Homo sapiens
cttaagacgactgagctcctggaacgaggggcggcagccatcactgtaactccagcctgctgttttcccctggtggtgctggggaaactggatggtgtggagtcaggaaggattccccacagagcrgcacagtggctgtggcagattgtggccagactgactctttaggctggacccagaccaggcctccctgtgggaatttcagcaactctagccaggggcttagggacagaactgtgatctccttgagatggagcccctagagggaggggcggacgtgatctccacagatcagagaatttagtctttccccctgctggctttgaggaatcaaggcagtccctgacgagtgggatttcctggtgccaccaagtggcagccagagtgctttgttaagcaggtgtctgatcctgtgccttctgactgggtgagacccccaaataggggtcaccagacaccttatgcaggagtgtttccgttggcatcaggtcggtgcccctccgggacagaactcccagaggaagaagcaggcagccatctttgctgttctgcagctcccactggtgacaccaccagatgcgagagggaccca

SEQ ID NO: 945748 - DNA, 503 bp, Homo sapiens
aatcccagctactctggtggctgaagcaggagaatcacttgaacctggaaggcagtggttacagtgagccaagattgcaccactgtactccaagctgggcaacagagtaagaccctgtctcacaaaaacaaaacaactttaaattaaattaaaagactggacacactgtgttgctgaggatgtgaacctagaggtctcatatactgatggtggaaataaatactagcaaagtacaactttaaaaaatatttggcagtttcttaaaaagttaaacgtacaactaccatataatccagccgttccactcctaggtatttacccaggagaaatgaaagcctatgttcatacaatgagttaaacacaaatgttcatagagactttaattgtcaaaaactggaaataatccaaatctccatcaataagtgaatggataaacaaattawggtatatctatccactgtaatgctactcagaaataaaaaggactgaactactgatgcact

SEQ ID NO: 945749 - DNA, 598 bp, Homo sapiens
ctattaatgttaactgtggtcactctactgatctgtcaaataccaggtcttatttcttctatctaagtgtgtatttgtgcttataaataaacctctcttcatctcstccctccccctactgttcatagcctccctttatttctaataatttttttgccctagtgtccatttttgtctggtgttaatataatcacactagctcttttatggtttctgtttgcatggtagatgtttcttcatcttcgtacttttatctattttgtacatttgaaattgaaatgtttcgcttgtaggtagcataaagttgggtcttgctttcttattcagtctaaaaatttctgccttttgatggaagtacttaacccattcacaataaatgtagtttttggcttttagcaattaaactgtgatatatctaggtatacgtcgcttgtgtttatcctacttagagtttttttgagcttcttgattctgtttcttaatattctttatcaaatttgggatgtttagatcattatttctttgatgatttttctcctgccttttcctctcctctcctgctgggacatccattgttcatatgttggtatgtttgatg

SEQ ID NO: 945750 - DNA, 571 bp, Homo sapiens
gggtgccatgtcctgaggctggacaggtgttggggggaccctgggcccagcccacaaaaccatttttcctccaaggcctctgagcctgtgacaggagggccwgctgccaagatctctgacatgccctggagacattgtccccattgtcttggtcattaataatgcagctcctcattgctcattcaaatttctgcaccccagcaggcttgaatttttcctcagaaaatgggtttttcttttctatcacatcatcaggctacaaattttccaaacttgtttgctgtgcttctgttttaaacataagttccaatttcaaaccatctctttgtgaatgcataatactgaatgatttcagaataatccaggtcatgtcttgaatgctttgctgcttagaaatgtcttccaccagataccctaaatcatctctctcaagttcaaagttccacagatctctagggcaggggcaaaatgccaccagtctctttgctaaagcatagcatgagttacctttataccagttcccaacaagtttctcatcttcatctgagaccacctcagcctggacttcatt

SEQ ID NO: 945751 - DNA, 563 bp, Homo sapiens
caaattttccaaacttgtttgctgtgcttctgttttaaacataagttccaatttcaaaccatctctttgtgaatgcataatactgaatgatttcagaataatccaggtcatgtcttgaatgctttgctgcttagaaatgtcttccaccagataccctaaatcatctctctcaagttcaaagttccacagatctctagggcaggggcaaaatgccaccagtctctttgctaaagcatagcatgagttacctttataccagttcccaacaagtttctcatcttcatctgagaccacctcagcctggacttcattgttcacatcactatcagcattttggtgaaaaccattaacaagtctctaggaagctccaaactttctccatattcctgtcttcttctgagccctcccaactcttccaacctctgtctgttactcattctraagtaacttccacatcttttagtatctttatagcagtaccccactctatttgtaccaatttactgtttgagcccattttcacactgctatgaagatcctactggaggctgggtaatttataa

SEQ ID NO: 945752 - DNA, 563 bp, Homo sapiens
caaattttccaaacttgtttgctgtgcttctgttttaaacataagttccaatttcaaaccatctctttgtgaatgcataatactgaatgatttcagaataatccaggtcatgtcttgaatgctttgctgcttagaaatgtcttccaccagataccctaaatcatctctctcaagttcaaagttccacagatctctagggcaggggcaaaatgccaccagtctctttgctaaagcatagcatgagttacctttataccagttcccaacaagtttctcatcttcatctgagaccacctcagcctggacttcattgttcacatcactatcagcattttggtgaaaaccattaacaagtctctaggaagctccaaactttctccatattcctgtcttcttctgagccctcccaactcttccaacctctgtctgttactcattctaaagtaacttccacatcttttagtatctttatagcagtaccccactctatttrtaccaatttactgtttgagcccattttcacactgctatgaagatcctactggaggctgggtaatttataa

SEQ ID NO: 945753 - DNA, 217 bp, Homo sapiens
tgacacaacaaaatcccaagtacctaatttttcagcctyttaaagaactccagtagctcctacctaaatgctacgtgtattctgatcattcaaggatgtgggttttgtcatttgcatatggttttgccctgatctcaagttcaaaaaaataaagcgtattttgccgcagcctgatgtagaaactctaaacgttcccagaataaaaataaacttgttc

SEQ ID NO: 945754 - DNA, 248 bp, Homo sapiens
accctctatcctgaccctcctccctgacacaacaaaatcccaagtacctaatttttcagcctcttaaagaactccagtagctcctacctaaatgctacgtgtattctgatcattcaaggatgtgggttttgtcatttgcatatggttttgccctsatctcaagttcaaaaaaataaagcgtattttgccgcagcctgatgtagaaactctaaacgttcccagaataaaaataaacttgttctggcaag

SEQ ID NO: 945755 - DNA, 605 bp, Homo sapiens
accagaatgcagtgagcagagctctgaggtggcacagggcagtgagacatggagggrtcccctggccagacccgcaaaaccattttgccctcctagagctctgggcctgtgaggggccatatcgatgatctcagaaatgccttcaggactgtttcccctttttctcaatgattagcacctggtcccttctattcctgctcatctctagtgaccagtcactcagccacacccttgctgtgttctccctaacttgtttttctgttcttcacattgccaaactgtgaattttccaaatttttatacttggcttccattttaattattattctgcttgaaatcatctctttgctcccatatctcactgtaagcattcaagaacagccatgcagtatccagaacactttgtggcttagatttttttttttttttggcccagctcaccactcttaggttccaccttccataatgtcctaggacatggacataatgcagccaagttctttcctgctttataacaaggatgacctttatttctatctgagaccttgttagaatggcctttcctgtacacatttctactagcattctggtcatgactacttaag

SEQ ID NO: 945756 - DNA, 605 bp, Homo sapiens
accagaatgcagtgagcagagctctgaggtggcacagggcagtgagacatggagggatcccctggccagacccgcaaaaccattttgccctcctagagctctgggccygtgaggggccatatcgatgatctcagaaatgccttcaggactgtttcccctttttctcaatgattagcacctggtcccttctattcctgctcatctctagtgaccagtcactcagccacacccttgctgtgttctccctaacttgtttttctgttcttcacattgccaaactgtgaattttccaaatttttatacttggcttccattttaattattattctgcttgaaatcatctctttgctcccatatctcactgtaagcattcaagaacagccatgcagtatccagaacactttgtggcttagatttttttttttttttggcccagctcaccactcttaggttccaccttccataatgtcctaggacatggacataatgcagccaagttctttcctgctttataacaaggatgacctttatttctatctgagaccttgttagaatggcctttcctgtacacatttctactagcattctggtcatgactacttaag

SEQ ID NO: 945757 - DNA, 605 bp, Homo sapiens
accagaatgcagtgagcagagctctgaggtggcacagggcagtgagacatggagggatcccctggccagacccgcaaaaccattttgccctcctagagctctgggcctgtgaggggccatatcratgatctcagaaatgccttcaggactgtttcccctttttctcaatgattagcacctggtcccttctattcctgctcatctctagtgaccagtcactcagccacacccttgctgtgttctccctaacttgtttttctgttcttcacattgccaaactgtgaattttccaaatttttatacttggcttccattttaattattattctgcttgaaatcatctctttgctcccatatctcactgtaagcattcaagaacagccatgcagtatccagaacactttgtggcttagatttttttttttttttggcccagctcaccactcttaggttccaccttccataatgtcctaggacatggacataatgcagccaagttctttcctgctttataacaaggatgacctttatttctatctgagaccttgttagaatggcctttcctgtacacatttctactagcattctggtcatgactacttaag

SEQ ID NO: 945758 - DNA, 248 bp, Homo sapiens
atggaaagcgagcagcggcgggagcggaaagcgaggacatggacgtgggcggggaagaagacccagaggcctctgggggtccgcgaaactgagaaaacccgacgggggcgaaagggggtcgggtagcgcggtacctgcagaratcgtccaggacgctgccgggaatctccacccgtttggtctccatgatgaggacccacagcaggaacagtgcatcccggctccgcgcggccggggactgacggtac

SEQ ID NO: 945759 - DNA, 662 bp, Homo sapiens
gatggtgccactgcactccagcctgggggacaagagtgagaccctatttctaaaaaagaaagaaacccaaaatgctgagcgrgtgccttggattgatagtaagcagtgcctgtgtaataagcatgaattttaaaaaatgaggtcagcagccttagagctaatggttaatgggtttgggtgtgggatttttttttttttaatttttaaaacattgagataaaattcccataacataaaattgaccattaaccattttaaagtgtacagtttggtggcatttaatacactcagtgttgtgcaaccatcacctctctgtagttcaaagaccccaaaaaggagaccccgtactcactgagcgctcactccctgtctctccccgctcccccagcccctggcaactactaatcttctgtctgtatagattgacctattctgattttgggggtttttgaactcgccttccctggctgacaacctctcgccatccaggtgagactgtgtgaaagcccagctccctgcatttctgggtcttcctctccccactgggggctgcccccacctgtttccccctctgggcaccctggttctactcatcagcctggcttaatcccagcagcaggtccatgttctgctctcctgtggctgccacaaatgagaggttt

SEQ ID NO: 945760 - DNA, 621 bp, Homo sapiens
caaataggttagcaagacaaccaatatcagtcatgactgggaaggccctcccccaccctagagctgaacaaatccttgagagtttaatcaggccagaaatctggactaggggctctggttttctgtgagcatakttgatcagaccctgctcgttgtttcagtccagttggaacatttaaaagtgggttggtcagttgttcagagcatcagttttccctataaacaactaagccagtggaaattcttctgtagcagccaaggccatacctcctaggattcatttttatctcagtcaacctcatcaggacaccgtattagagggagattctggtctcttctatataagaaccagaaccatcccccactaattccgagatttccagttgtttcctagcccacccgcaacctcatcccttagaaccaaatcccattttctcttcaagaccttgcattctctcacttaaactatgtgagatggtatgtgtgagaaagcctggctcacagaggcactccaagttttcattgtgatcattgctgctttcctcaggatttaaaaacaaaagcttctcaactgtcttcttaacagttcctaactgggagagtggcagtcctaaaatgtat

SEQ ID NO: 945761 - DNA, 731 bp, Homo sapiens
ctgtcttggaaaaattgcaagaaaagttgcaaaaatagcatagatttcctctgtgcccttcacccagcttcctctgtatgcaacgtagaacaaggactgaaaccaggaactttgtaggttgatactaagcgttggtacttagtgtcttagttttagtctattttgtgttgctataatggaatacctgagactgggtaatttataaagaaaagaagcttatttagctcatggttctgcaggctgggaagttcaagagcatggccctggcttctggtgaggcctttttgtgctgtgtcataacgtggtggagagggtcaaagggaaagcccatgtgtgcaaagaagggaaacccagggagtgtcctgcttttataacaacccaggctcgggaactaatcaagcctctccagagcaagaattcccttgctaccttgagaacagtatcaagccactcacgagggatcggcctccatgattcagatacctcaccccaggccccaccttccaacactgccacactggggaccaaatgtcaagatgagttttggtgggaacaaaccagtcacattctaaccgtagcactccagactgcactgaattttgtcagtcttccgactcatgtcsgttgtctggttcaggctccccctcaggatcccacgtggcatttagttgttgtgtctctcccgtttcctcccatctgaggtttcatgacctggatgtttttgaagagga

SEQ ID NO: 945762 - DNA, 485 bp, Homo sapiens
tgttttttattttacattttaatctttctgaaactggcaagtgtcttgcaattaatggtgacttacgattataatggtgaaattaatggaatgttacatttgatgaaactgagtaaatatttatctgtaaaaacatcagcttaataactgtctttcccactagagtttatgtgccagagggcagtgactttggttttcctgatccccctatatccatggtgcctagcacagggtcaggcatgtaatagatgctcagcaactatttgtggactgaatgaatgaacgaggaaggggtaaactgaacttagttttatagatcctgaatttgcctctctcaatattttaactgtccaaatttcatgcgttcatgttcttccttgactgtatcctttaaggctttgagagtttgccctcttccccttaatytttgcgtttccagactgaagagattgactagctcaatattgcttcttgcagaaaccact

SEQ ID NO: 945763 - DNA, 572 bp, Homo sapiens
ggcggggggctgacccccccacctcctagagggaacattttctaactcattctaaagaggccagcattatcctagataccaaagccaggtaaggacattacaagaaaactacagaccagtgtctctgatatacatagatgcataggtcctcaagaaaatactagcaaactgaattcagtagcatattaaaaggattacatataatgactgttcccttcaaaacccaggttgaagtttaatttccaatgtggcagtattgagaagtaaggcctttaagaggtgattagatcatgagggttctgctctaatgaatggatgaatacattcttggaataatagatgtatgggatatcattagagggaaactgatggctttataagaaaaagaagagagaactgagctagcacattaacatattagcaagcttagctctctcactgtgtaatactctgcactgcctccagactctgtagggttcccaccagccagaagactctcaccagatgtgcccrcttgactttggacttctccacctcaataactgtaaaacataaattcctttttttataaa

SEQ ID NO: 945764 - DNA, 792 bp, Homo sapiens
taagctgtattagtccattctcwtgctgctatgaagaaatacctgagacttggtaatttataaaggaaagagatttaattaactcacagttccgtattgctggggaggcctcaggaaacttacaatcatggcagaaggcaaaggaaaagcatgcaccttcttcatagggtggcaggatggagtgagtgccaagtgaagaggggaagccccttataaaaccattggatctcatgaaaactcactcattatcataagaacagcatagaggaaactgcccctatgattcaattatctgcacctgttccaccctcaacatatggggattatggggattaaaattcaagatgagatttgggtggggacacagagcctaaccatatcataagctaatcaatacagaaacagaaaaacaaataccacatcttttcacttataagttggagctaaacagtggatactcatggacataaatatggaaacaatagacactggagaccgctaaaggggcaagggaagggggagggcaagggttgaaaagctattgggtactatgatcactgtctgggtgacagggtcaatcataccccaaacctcagcatcatacagtatacccaggaaacaaacctacacatttattccttgaatctaaaataaaagttgaaattattttttaaaaattgaattaattagatgattttttctttttcactaggctgaccctttgacccttccttggttttcttggggcttttttttcttttatcagtgtatgttggtattttgggttgcagg

SEQ ID NO: 945765 - DNA, 608 bp, Homo sapiens
cttcagtggtcaattttttttttttttggtgtgatcgagtcttgctctgctgcccaggctggagtgcagtggcgccatctccattcagtgaaaccttcgcctcccaggttcaagraattctcctgcctcagccttcccagtatctggcactacaggcgcccgccacaacgctcagctaatttttgtatttttagtagacacagggtttcaccatgttgggaaggctggtcttgaactcctgacctcaggtaatccgcctgccccggcctcccaaactgctgggattacaagcgtgagtcaccacccctggcctaaaataaagtaattcttaatgaaatttacttaagtttatctccctccgtcaggctcctgaactttgagctaccctcggtctgagtcgacatacaaccccatttacgtccctcctaagaacatgctgatttcagggtaagacattctgtgatctaaaatctgaccttttcaccctccatttgccattcccttcccacctcctttctaatcttgtttaatcctccttaggaaagaaagtccttttgtgcctacagttttgcaagccacaaagaccttatagtaagttgatactttct

SEQ ID NO: 945766 - DNA, 594 bp, Homo sapiens
caaacaccaaaagtagattaagccaaaaagatggggagaaaccagatcagaaaagctgaaaattctaaaaaccagagtgcctcttctcctccaaaggatcgcagctcctcgccagcaatggaacaaagctggatagagaatgactttgaagagctgacagaagtaggcttcagaatattggtagtaacaaacttctctgagctaaaggaggatgtttgaacctatcacaaggaagctcaataccttgaaaaaagattagacaaatggctatctagaataaacagtgtaggaaggagcttaagtgacctgatggagctgaaaaccatggcacaagaactacatgacacatgcacaagcttcaatagctgattcaatcaagtggaagaatgggtatcagtgattgaagatcaaattaattaaataaagtgagaagagaagtttagagaaaaaagagtaaaaagaaatgaacaaagcctcccagaaatatgggactaygtgaaaagaccaattctacgtttgattcatgtacctgaaagtgacggggagaatggaacgaggtagaaaacactctccaggatattaaccaggagaact

SEQ ID NO: 945767 - DNA, 580 bp, Homo sapiens
tcattcagcttatatctttgtgaacagaaaacactctcttttgtttctccctagttttctcctcacctcctggaagacttgggactttctgtgaccccccctaatttgtaataagaaaacaatagtatratactgtacttctctataagaactatttccttaaacaatagattgtcagaattaggaaaacaaatagaaagagtaaataaaggccttttctgcatctattgagataatcgtgtggtttttatcattggttctgtttatatgctggattacatttattaatttgtgtgtgttgaaccagccttgcatcccagggatgaagcccacttgatcacggtggataagctttttgatgtgctgctggattcggtttgccagtattttattgaggatttttacatcaatgttcatcagggatattgatctaaaattctctttttttgttgtgtctctgcaaggctttggtatcaggatgatgctggcctcataaaatgagttagggaggattccctctttttctattgattgaaatagtttcagaaggaatggtaccagctcctccttgtacctctag

SEQ ID NO: 945768 - DNA, 602 bp, Homo sapiens
gctgcgcccaccagccggcaacgtccaggaaagggccacaggagaaatgacacccgtgcaatgcggagtgtcccggctccrcttccccgcagggactcgaggtgcgctccttttcctggccacggtttagggaggctcggagatggacacctcggcagtatctggcgaccctcttctcactcgctccgcccactcctgctctccagggtcccagccaagggcccgaaccctcggagtcctagtgagccttggccgctttgtctgggatcaggcttatcctcctagcccacggcccgggagggaacaaagagcctcgaccctcaagctctagcctctgcctctcatcggagccccatgcgcccattcatcacctttctaaagacccctttgtctgcctggcaagcacaggtctgcaagggatgcccacgcccctgcccaaagtcctgcttttctaacaactgagctagattggattttcaagccacccagtcttgtgtaaacgacctcataccggtcttttttaccccctcagaatagaccatgtatagattcgttgatgcatgacgaccattccagcccattccttgctagctttttcattc

SEQ ID NO: 945769 - DNA, 587 bp, Homo sapiens
gttcttgccgttgcttgagctactgctttttcaagggaaaccacaaagacaggactaattcagaagtaactaaaatttatacattgatatcattgtgtgtgttaatsctcaataaccatgaagtaagtttccttattatcccagttctaccgatgaagaattaaagtctcagaaaaggtaaaagaaatgtttttaagtcacacaccattgaaacagtctttgtaaaaattctaacaatgagaaaattatgacagtgaaagagatctgacccaaccaactccaacttgcctttaacctccaaacagcccttgttaattcctgagcttagtttgagctaactggagggggaatttagtttacagtttgactttgaaacaaagatgatgacagcactttcccgaaacaacccccactccttgcctgggaaccagaccacatttggagagctaaccaattggccacaatattagaaattagggtttaggagtcatgcacacagaggccacaagtttccttaccttctcaaatgctcctatagataacatcactattgtaaaacctaagattgggctcaagacatttttcag

SEQ ID NO: 945770 - DNA, 647 bp, Homo sapiens
attcttccaccctgatgatcaatctagtgttttttaaatgaggcctagtgggtctgtactctagcagatttataggagacaaaggagawaggtccttgatttagattaatttttatagatacatctgtgccttcacagtttcccagaaagtcagggtgaactttgtggcaagagatgtcacatatccacaatgagaatcatgggtggctgttgatttctttctgaactctttgatggaaatagagtcagtttcagctctaatctcaatggcttttactgatttaaaacagagaatgactaagggttcttaaaacactagcagatggaagctttggtaattatttctttatgaaagtggatacctgagtcgcatctagaatacacagattgctctgtagatcagaacgtgactcagtaaagacagcacctcgctagtggtattatttaaaaggagaaaaatcctccattgtctaaaatttcctgccccagtcgtgcttgaaatcttattatttctttaagcatctcttctctgtgaggaaaaatcatcatcaacaatgccagcttccatgatcgactggcactgagctaagtgctttgtttgtattctctaatttaatccttgcaacaacccaaagaggaagtatttt

SEQ ID NO: 945771 - DNA, 609 bp, Homo sapiens
agtgggaaacctctagagggtatttaagccccagaaaattctgtaactgggttcttaaacaactatgctcagtcgggctcccaccttgtggagtgtacttttgttttcaataaatctcygcttttgttgcttcattctttccttgctttgtttgtgcattttgtccaattctttgttcaggatgccaagaacctggacaccctccacaggtaacaactgagcctggggagcatactgtgagatcaggaccatgcagagacttgtaggccatactaaggcctttacttttgtttctctttgctattaaagaagccaatgaaacattttaaactggaaagacatgattttcaaaaagatccctcttggctgcagggagaaaatgaatggaggtgggaaagatgaggagatataggctatttcactagtctaaataagggataacagtcacttgggcttagatagtgacagtagagatggtgggaagagatagaaagaaaataaaggcagcaggactgccaaatatctaggcctcacacttactggctgtgtgaccttaagcagatgcttaacctctctgagtcactatttctacccctttaaaaattggag

SEQ ID NO: 945772 - DNA, 581 bp, Homo sapiens
cactttgggaggctgaggcggatggattgcttgagcccaagagttcaagaccagcctgagcaagatgrcaaaaccccgtctctacaaaatagaaaaacaattagcctatagtcctagctacttgggaggctgagataggagaattgtttcagcctggggagatagaggctacagtgtgtcatgattgtgctactgcacaccagcctgggtgacagagtgagaccctgtctcgaaaaagaaaaaatatgtcaaagggcttttataccactaatatattaggaagtgcaatcctaggaaacaaatgaggggccaggagagtgaagccagaaaggatgaagagccaatttgagggtgcattattgaattggctgttattaattgcaactgatttcttaaatccagttctccaagaagtcatatatattgtgtctgaggggagctagttggaggagtggtgatgggggaacatttatttttttatcctcacctccctctggtcaaagtttcagcacacagacgtgaactaccccacacttctgaattgtgtctatgtgggtgctgagcaagtttccatggtgagc

SEQ ID NO: 945773 - DNA, 584 bp, Homo sapiens
tcagactcccagtcagtatttgaggaatgaacgaatgcacgttgtgaactctgaagggttatggaaargtgagcagcagagtgtggaggccctaactgtgtagaggatttgagtgtgtagaaaatttgactgtgacaaggagctgactccaagggctgagactgattcttcagcatcacctcttccactaaaggtcagtcacgctaagttcttcccctccccacccaagaaccaggacctggaaggtgggctgcatgtttgggacagcgtgtgtttagtgcctggaggtagaaaggatgtgtgtatctgcatgctcacatctctgcatagacaacagtgcaggtggctcttgctgcagaggtcccgtgtgttgctaaatccaacaagcagggggtttttttgttttttgagacggagtctcgctctgtcgcccaggctggagtgcaaaggcgcaatctcactgcaacctccgcctcccaggttcaagcaattcttctgcctcagcctcccgagtagctgggattaaaggcacctgccaccacacccagctaatttttgtatttttagtagaggtggggtttcac

SEQ ID NO: 945774 - DNA, 603 bp, Homo sapiens
gccaagaatctgcacagctctgtgcttgggacccaaggctctggtggtgtggctcatgrgggggatctcgtgatactcaggatgcacagatccgtgtacagagtgtggtttcctgggtggggtagcaaaatcactcaccacctcctctggctaggggtgagccctgtgcagttccctggtaggctgttactccatcctgcttttccttactctccatgggtcacaccaactgcctagtcagtcccagtgagagaacctggatacctcagttgctggtgcacaattcacttgccatttaccttcttctctgtgggagcctcccacagctatttctagttggccatcttggcccctctccaagttattttgcccttattttttgtttttatttttgcgttccataatttccttgccttttgtggttttaattaagcactgtatattatttcattttctgtcttttcttaccatataaattacacatttttaaaacttgttttagtggttgccctagaatttgcactatacatttacaactaattcaagttcattaacaaataacaatgtgctacttcatggctagtacaggtaccttgtagtaac

SEQ ID NO: 945775 - DNA, 601 bp, Homo sapiens
tttttttgagatggagtctcactccgtcacccaggctgaagtgcagtgatgccatcttggctcactgcaacctctgcctcctgggttcaagtgaytctcaaaccttaacctcccaagtagctgggactacaggcacgtgccaccgtatttttagtagacatggggtttcaccacgttggccatgctggtctcaaactcccgacctcaagtgacccagttgccttggcctcccagagtgctgggattataggtatgagccaccatactcgtccagctttcaataaaaaaatcattcatcataccaagaaccagagagataccaaactgaataaacaatcaacagaagtgtgtgcactaaacaacagaactgcaagttatacaaaacaaaatatgatagaactgaaaggagacataagtaaatccataattagaattggagagtttaacactattctgtcaacagatagaataactagacagaaaattggcaagaatatgtaagaactcaataacaccattatccaacaggatctaatcaacacttagagaccactccactcaacagcagaatgctcattcctttcaagagcccacagtacat

SEQ ID NO: 945776 - DNA, 726 bp, Homo sapiens
ttcattatatttcatctgctttattgtaatggcttacagtggactgcctaccctctctttgcctctccagtctcaggagacttaaagctagctgaaatgtggcacagcaagttttctttatcagcatcaggggtcaatgaactagcttcagacttccaggtgcactgctaggagaggaatgtgcatgcatgtattaatagaaagcgaggatagattctgctgatggcaatataattctcccattaccctagtactagttggaacttcttagttttagaaatgctaaaatgttaaaataaaatatggatgatctgtgaagaagggtaatgatgtaaaaatcctcatctacctcatgcctatccttcattttgtgtcctatcatcagaggcctgcactctgtaagtttaatgcctctgttctccactaagagcttcattaatagagactattttgtcacattctgcatatagctttcctttgtaattaaacatggatttcttttctcttttctggcttataaactcttaccaatgtagaaaaatgggagtgaccacagggacttgggtttatagcctaaaagtggtgtcaaggtttcagaaagtaagttaggggctctatgakatatagacaagggtgaagatgaaagttgaattaatgaggcataagaaaaaattttaatgaaaaccaaagttatggtttccagaagcttctctcaggaagttagtg

SEQ ID NO: 945777 - DNA, 726 bp, Homo sapiens
ttcattatatttcatctgctttattgtaatggcttacagtggactgcctaccctctctttgcctctccagtctcaggagacttaaagctagctgaaatgtggcacagcaagttttctttatcagcatcaggggtcaatgaactagcttcagacttccaggtgcactgctaggagaggaatgtgcatgcatgtattaatagaaagcgaggatagattctgctgatggcaatataattctcccattaccctagtactagttggaacttcttagttttagaaatgctaaaatgttaaaataaaatatggatgatctgtgaagaagggtaatgatgtaaaaatcctcatctacctcatgcctatccttcattttgtgtcctatcatcagaggcctgcactctgtaagtttaatgcctctgttctccactaagagcttcattaatagagactattttgtcacattctgcatatagctttcctttgtaattaaacatggatttcttttctcttttctggcttataaactcttaccaatgtagaaaaatgggagtgaccacagggacttgggtttatagcctaaaagtggtgtcaaggtttcagaaagtaagttaggggctctatgagatatagacaagggtgaagatgaaagttgaattaatgakgcataagaaaaaattttaatgaaaaccaaagttatggtttccagaagcttctctcaggaagttagtg

SEQ ID NO: 945778 - DNA, 598 bp, Homo sapiens
actgtgctctaaagtattgcgtgtttgctttatagggtttgtgggctwtgttcttaagtgtgtttttgtggtagtaggtattgttctttcatgtccatgtttagaactcccttaaggatatcttgtgaggctagtctagtggtaataaattctcttactgtttgcttatctggaagattttatttctcccttgcttatgaagcttaatttagtagaatataaaattcttggttagaatgtttaattctttaagaatgctgaacatagaacgccaatctcttctggcttgtaaagtttctgctgagaagtatgtttttagccagatgggtttccctttgtacatgatatgttttttttgtctagctgctattaagattttttttcttgagtatcgatcttggaaagtccagtaaccatatgccttggtgacattcattttgtatagtatatcgcaggtgttctctggatttcttgtatctagtgtctacatctctagcaatattaggaaattttttttgaattatttcctcaaatatatttttgatttggtttactttttctctctctctttcagaaattccaataatgcatacgtttg

SEQ ID NO: 945779 - DNA, 611 bp, Homo sapiens
tgtctctctaaaacagtaattrgtcatagctggcaacagggaaaggcagtctcccaatagacagaaaaaatcctgaaactggtaatcagcagcttcccagtaagatctcagaagttgggtgagtgggctcagcatgcacactaagaggcaaaatggcggagtttaactggtctatgactttctaggaacgttccactggtaagggaataacgcctcaagtgagcatgcgtacaactccagtaaacacactgtacacgctcccctcccaagtactggcaggccgctgcacatgcggacagcctaccccaaggaaagaataaggggagaaggaacacaagaccctggaagcatgacaacatataaaaccccacgtcaggttaaactacacacttgatcttgcaagtcacccctttcaccctcttctaagtgtactttccttcctttcatccctgctctaaagctttttaataaactttcactcctgctctaaaacttgcctcactgtctcattctgacttatacctttctatcaaagtctttcttctgaggaggcaagagttgaggttgctgcaggaacttacacattcaccaccagtcactgtcctacctgc

SEQ ID NO: 945780 - DNA, 611 bp, Homo sapiens
tgtctctctaaaacagtaattggtcatagctggcaacagggaaaggcagtctcccaatagacagaaaaaatcctgaaactggtaatcagcagcttcccagtaagatctcagaagytgggtgagtgggctcagcatgcacactaagaggcaaaatggcggagtttaactggtctatgactttctaggaacgttccactggtaagggaataacgcctcaagtgagcatgcgtacaactccagtaaacacactgtacacgctcccctcccaagtactggcaggccgctgcacatgcggacagcctaccccaaggaaagaataaggggagaaggaacacaagaccctggaagcatgacaacatataaaaccccacgtcaggttaaactacacacttgatcttgcaagtcacccctttcaccctcttctaagtgtactttccttcctttcatccctgctctaaagctttttaataaactttcactcctgctctaaaacttgcctcactgtctcattctgacttatacctttctatcaaagtctttcttctgaggaggcaagagttgaggttgctgcaggaacttacacattcaccaccagtcactgtcctacctgc

SEQ ID NO: 945781 - DNA, 611 bp, Homo sapiens
catggcaacggagccaaggagaatgagggagggagggaaggagagaaggagcgagagagaaagagcaagcaagtgaaagatggaaatgatggtcttttwtgagctaattgatcttatttaggtgattgttgctgtagttgttgcttgttgtatattcctaaacctaactaaagctcatttcttagattttggcttctctacatatacaaatgtagatataaattagaacagaatagaaacaataattgcagtctgtactcaaggggaggaatacacaagagaatgaaggccaggagatagagatcaatgtgggaactgcacaccctattatattgaataagacactgagattcaatagatgcagtaaattcatactgctgtgaaaggtggatttgatattggaagctaggagtcccaggactgaataattagctctttcttcttacaaataaattatgtaaatcgtttgtgtgttgatttatgtgatcataaattatattactttaaattattaacaacattatgatgatttattttttacctccttgcgttagttaggtttaggcttctctgcatatacaacaagcaataactagagcaatgatcaccta

SEQ ID NO: 945782 - DNA, 412 bp, Homo sapiens
gtcagtggtgtctgtgatttcctgagtggcttagggtgcaattgttagtggagkggagactgtggcaaagttttgctggatacagcaatgccaggtggtcctatcttcagacctctgtggtggcagcagtgggctgagcatgcctgcccttgggctccagggtggcatatattggcactggtttcagtggttccaggcagtccaattcttggatccccaggtggctttctcaggtgctggtagtagcagagttgggctaggcaagcgggtgggttttcaggcccctgggcaatggtcatggcatggatgattgtagtagcagtagatggactaatctctgggtcctacatggtctgtacttgtgttgacagtggctgtgatgtgctgggtgggccagtccgtaggcctatag

SEQ ID NO: 945783 - DNA, 614 bp, Homo sapiens
gaagcacaagcaggcacatcacatggtgaaagcaggagcaaaagagagagaaaggggaggcgctacacctttttttttttttaaatagagacagagtctcgctctgttgcccaggctggagtgcagtagtgcagtctcagctcattgccaacctccgctgcccaggttcaagcgattctcgtgcctcagcctctagagtagctaggactacagtcatgtaccacaatgtctggctaattttttttgtatttttatttagtagagatggggtttctccatgttggccaggctagtctcaaactcctgacctcaggtgatctgcccgccttggcctcccaaagtgctgggattacaggcatgagccactgtgcccggcccaccacacacttttaaatgaccagatctcatgggaattacttactataacaaggacagcaccaagggggtgacactaaataactcatgagaaatctgcccccacaatccaatcacttcccactaggctccacctccaacattggggattaaatttcaacatgagatttggatagggaaaatatacaaactgactcctgaaccwgctggacagtcttctcatgaccttatgtcatgga

SEQ ID NO: 945784 - DNA, 591 bp, Homo sapiens
tgacacagaagacgggtgatttctgcatttccatgttagataccgggttcatctcactagggagtgccagacagcgggcgcaggccagtgggtgtgcrcaccgtgcgcgagccgaagcagggtgaggcattgcctcacttgggaagcgcaaggggtcagggagttccctttcagagtcaaagaaaggggtgatggatggcacctggaaaatcgggtcactcccacacgaatactgctcttttccgtcgggcttaaaaaacggcgcactacgagattatgtcccacacctggttcggagggtcttacgcccacggagtctcgctgattgctagcacagcagtctgagatcaaactgcaaggcggcagcgaggctgggggaggggcgccctccattgcccaggcttgcttaggtaaacaaagcagcctcgaagctccaactgggtggagcccaccacagctcaaggaggcctgcctgcctctgtaggctccacctcttggggcagggcacagacaaacaaaaagacagcagtaacctctgcagacttaaatgtccctatctgacagctttgaagagagcagtggttctcccag

SEQ ID NO: 945785 - DNA, 623 bp, Homo sapiens
agtcataaacagcttggtgaaggaggcatgagaaagataaagggtggtggcctgattacctctagccatcctcatgcacaaacacacacctacctgtcatgtatggaaatgtctcagaatgtgggcccagcccagatctcaacaaaagcataggtttcaaagattgagggaacataaaagcaacctcagaaatcacctcttcagtcttcacagaatgccagtgccagaagaaactctagtcatcatcccatccaaatttatcattggaaaatgaagaaacttggacgtagcaagggggaaaagaggtattcaagattacgcagaacgttcactgcagagatggcatgtaaacataactaccgcttcacatgtagtctaatcactaccaccaccatcaacaaggctattataaatatgttttttcctttattagggtataatttacacatagctaaacatcaaggtatattttacatacagtttaaatttaccctttaaagtaagttctgtgagttttgtcaaacacaaacaattttgtcaccagactatatactcaygacacaaaatgtccaccatccaaaagaattcctttgtgctcatttgtagtaagccttcccctccct

SEQ ID NO: 945786 - DNA, 615 bp, Homo sapiens
tggtgccagatatccaaatatcaattcctgagtggtctgagcacttgttggtcctacctgtggttgctgtagtctccattaaccatttttttttttttttgtcctcagacagagtctcactctgttgctcaggctggattgcagtggcacaatctccgctcactgcaacctctgcctcctgggctcaagcagttcttcctgcctcagcctcctgagtagctgagattacaggtggccgccaccacaaccagctaatatatgtatttttagtagagatggggtttcacaatgttggacaggctggtctcaaactcctgacctcaggtgaaccgcccacctctgcctcctaaagtgctgggattacaggtgcaagccaccgtgcccagcctccattaacttacctgacctagagactgtaaggggcacttcaggctatgccctgattttatttacaatttcccctgcatctacaactcaaatgtcttttgattgtctggtttaatcacctcactcaacaacacacacctgctttttawctattctcccagagtcataagatcctataatgggcaaatggctgtattagcttctaattcaatagaaacacattggagt

SEQ ID NO: 945787 - DNA, 568 bp, Homo sapiens
acacctaagcatagctaagtgagacaactacatatgtaaagtgatccagagtataatactggagacttaaataatacaaatgctgttgctactgacgccaggttttctaaaatgatgaaaacttttagtgaagtgcagagcaaaacaaagcacaatctgctcttgatttactggtagttgcgttcctggaaatttcagtagctcttaaaaccatgcaaacaatacttggtacttacatgtgtcatggggttgggctctgagctcagagattttttttattttgttatttttatttacttatttattttgggggggatagggtctcactgtgtcagttgggttctgggctcagagacttttttttttttttgagtcagggtttcactgtgttgcccaggttgaagtgcagtggcacaattacagctcactgtagcctatacctcccaggctcaagtgatcctcccacctyagcctcctgagtagctgggactacaggcatgtgccaccaggccagctaatgtttttaattttttttttgtagagatggggtcatgccatgttacccagg

SEQ ID NO: 945788 - DNA, 560 bp, Homo sapiens
aggatgcatcaggtggagaagattttcaataataagsggaacaagatgaattgtctggtagatgtcagtctttttctccagccaacccagggcttggttaatgggcccatgtaccaagtggctatcaaagcagtgacagaggttcaatagtatggtcttctccttacctacattatttggctactatcattgccgaatgcccaacctggcaacaacgtggagtgtgactacatttccaaggctgggttcctaatatggcattactgtcaatgagacttgctggcaacccggtaacatgatggttacattgggcaatttccataagaaataggtagcactttgtcttcacaaagataattcacattcaaggtataaatctgcattctctgcctgcagtgtttccactggcactaatattcttgacatttctgaaggttttatccattgcataggaatcccaaaaacatttcttccaaccaggtacacagtttatggcaatggaagtgaattcaatggttttaacacatgcttatctcctaaagtaactagcttgatagaac

SEQ ID NO: 945789 - DNA, 430 bp, Homo sapiens
ctgcacggaagctagactggaggcaaagttgccagttaggaagccactgcaatacagcaggtgagagatggcagtggctaggctcaagccaacagcaaaggaagtggtggaaagtggtcatattacgaatatattctgaagatagcataaacaagtcttcctgatggattggatgttgctgtaagagtaaaaaagagtaatcaaaaatgaccttaaagttttggcctgatgagtgggaaaacggagttgctccttcttgagatggggaagacttcaggaagaacacagaagctctcactatgctaagacctctgtttttgaaacattagtttgagatgcctgtggacgtaggcttcccaaaatggcgctgtwtggtggtggctatatgtatctgaaattctgggaagaggtccagggtggagccatcacc

SEQ ID NO: 945790 - DNA, 756 bp, Homo sapiens
ttaaatatagaacccaatctgtagccctgggcaccctaaccagaagtattaattttatagtttagcaaatacggtaatgcaccaaataacaacatttcagtcagggacagacctcatatacaacagtggtcccataagattataatggaactgccctatatagtgtaaccgtttttatcttctatacagtgtttttactgtactttttctatggttagacatgttgagatattaaaatacttatcattgtgttataattgcctacagtattcaggacagtaacatgctgtaccggtttgaagcctggtagcaacaggctatgccatacagcttaggtgtgaagtagggtttaccatctaggtttgtgtaagtgcactctatgatgtttgcacaatgacaaaatcgcctaaggattcatgtctcagaatgtatccccatggctaactggtgcacgactgtacttactaagtctatcctatgtaccagccattgttctaagtgtggggaccaaaaagacaacttctgaccctcttgaagcttacattctgagaaagcgagtcagacagtgaccaaaatcagtaaaccatatagtgatttagaagtcttaagtgcaatggaaaggaacagaaagggaggatggagaattgggggcaaggagatgatgcagtttgatcagggcaagccctgctgagaaaaaatgattttggaggaaacacccaaasagagtgtgaaagtaatccatgttcatgaagaaga

SEQ ID NO: 945791 - DNA, 627 bp, Homo sapiens
aggattacagtcgagagttgcaaggttctggcaggtagaccaatgggctatgggacttgtcatcatcagagtggccagggaaggaaagcttccctggagaggaggtgcttgctctaagatctgtaggacatgtaagtgctaaccaggcagagatggaggaaagcagcagctttaaaggatgcaagactcgagggtgcggccagtatagtatgcaggcttctgaagtcaagcatttactcatctattactcagcaccccataggcacaaggctccatggataatgggtcctagggacactgctaactgagaaaaatctctccagccccaggcaggaacacatcttgctgtcagagatcactgatgtcccagtctgagagacccaaattcccatccctgcctctcattttcaacatcaaaaggctgctatgctttagatctaaaacccaggatggcatttttcatctcctctcctctaggtagctggcctttcaaatgggggagaatatcattcctcttcaaagcggtgcaggtgtcatttgctgatttaaaaaaaaraaaaagattttggaaaaagtaaggcctgggtcaccagatacacacctgccaggtgttcagatgctggtcct

SEQ ID NO: 945792 - DNA, 563 bp, Homo sapiens
cttagaagcactagataggatccctcccaggtgggctcgagcttcccttctttccaacccttgatgaggacgttgtctccaggctggtggtggtgaactggaaattcgaggggtggcctctgtgctaggaggyctttggttctaagggaagagaaagtggaggatggaccaagtatatagtttttggggaatagatcttttgtttcaaatgtaggaatgtcagcagtggagtgtaaacaaagcaacccaaacagcatttcataaggggtaagccaacatcttttggaggggcagttcagattctcaacaagacaatggaaaggcatttaatccacggtaattgaatctctaggactaatttggttaggtgtttcttcagagtctagttcattcttctcttcctgatgaaggtgggtgccaggggatatggtagtcccatgttatatccagtacttgggctagtttcttaatgacatttgtagtgaaatgagtcctattatctgaatcaacattttctattaatctgaacctgggtatagtattttcaacaaatgtcttgactg

SEQ ID NO: 945793 - DNA, 629 bp, Homo sapiens
gtaagaaatttttacccttttgctgccagcatattaggcttctgggttcccttccccttagttcaactttaagccaaacattttaaggtttggagaattaacttttcccaagttgaaagtacacaaagaaaagatgcaattttaaaccacaagagaaggaaaaacaccatagaaaggagttctactaagggttaagaggtaatacctctcttcctgttgggaatggtgtttcccctatttctttgccttccctattttctcttttcccttctggcctactataggagacatattgcttatctccaaaattttcttctgcttgcggaactgcctattttagctaaaatgagggtttgactttgcagcaacataaccttccctccatgtgagatcaaatacctgagttaaattttggaaagcttccatgtatctaacaggttcatcaaaagatcagccttagtttctctttacttgcctaaggtcctgcaatgagaagggaactttaaggagcgccaaataagggagacccttagatgacttccctgaaagttaytttaattttgggaactattttccccgagcctgcccgatatggccacaaaagaaaataagccactttttcttcagag

SEQ ID NO: 945794 - DNA, 543 bp, Homo sapiens
ttcccaaagtgctgggattacaggcrtgagccaccacacctggcctgagattctttcttctgcttgatcgtgtctattgttgaaactttcaaatgtattttgtatttcattgaataagttcttcagttccagaatatttttgttcttttttgtgatgtatatctctgtggcaaatttctcatttatatcctgaattattctgtgatttctttgtattgtttttctgaattgtcttttatctcactgagcttcttcatcaaaattttgaattttttttgagatttcatgactttctttttgttctgatctgttgctggagaattgtgttctcttagaggtgcaatatttccttaatttttttcatgtttcctgtgtccttacattaataatctggacgtctggtgtaacagtcacttcttccaatttttttttatttttgagatggagtctcgctctgtcgcccaggctggagttcagtggcgcaatctcggctcactgcaagctccgcctcctgtgttcacaccattctcccacctcagcctc

SEQ ID NO: 945795 - DNA, 543 bp, Homo sapiens
ttcccaaagtgctgggattacaggcatgagccaccacacctggcctgagattctttcttctgcttgatcgtgtctattgttgaaactttcaaatgtattttgtatttcattgaataarttcttcagttccagaatatttttgttcttttttgtgatgtatatctctgtggcaaatttctcatttatatcctgaattattctgtgatttctttgtattgtttttctgaattgtcttttatctcactgagcttcttcatcaaaattttgaattttttttgagatttcatgactttctttttgttctgatctgttgctggagaattgtgttctcttagaggtgcaatatttccttaatttttttcatgtttcctgtgtccttacattaataatctggacgtctggtgtaacagtcacttcttccaatttttttttatttttgagatggagtctcgctctgtcgcccaggctggagttcagtggcgcaatctcggctcactgcaagctccgcctcctgtgttcacaccattctcccacctcagcctc

SEQ ID NO: 945796 - DNA, 542 bp, Homo sapiens
catagagcagtgagccctggacccattccaggaaactatttttccctcctaggcctgtgatgggagggtmtgctgtgaagttctctgacatacctagagacattttccccattgccttagtgattaacatttggctccttgtttcttagacaaatttctgcagctagcttgaatttctccccagaaaatgagattttgttttctatcacattgtcaggctgtcaattttccaaacttttatgctctgcttcttcttgaatgatttcctgcttagaaatttcttctgccagatatgctaaattatctctgtaaagttcaaagttccacagatctctagggcaagggcaaaatgccatcagtttctttgcatagcaaaagtgacctttactctagttcctaacaagttcctcgtctctatctaagaccacctcaacctggactttactgtctacatcactattggcattttggttaaagcatttcaacaagtctctaggaagttccaaacgttcccacatcttcctgtcttcggagccctccaa

SEQ ID NO: 945797 - DNA, 724 bp, Homo sapiens
ggtgcctcacgcctgtaatctcagcactttgggaggctgaggcaggtgaatcacatgaggccaagagttcaagaccagcctgggcaacatggcaaaastccatctctactaaaaatacaaaaattagctgggtgtggtggcacacgcctttggtcccagctactcagaaggcttaggcatgagaatcagttgaacttgggaagcagaggttgtagtgagctgagatcatgtcattgcattccagcctgggcaaccgagtgagactctgtcttaaaaaaaacaaatgctgatgatttaggatagtggaggaaaaactaaaaaaagaaatatataacaacaacaaaaaaaaacaaaaacaaactgaaaagaaaactcaatgtatgaaaaagtgtattacagggatagattatgggaaattgcaccaaggtaagaggcaggatttgaaccttggcactctcgctccaaagtcgtaaccactgccccttcctgttccctgctctctttgccggatctgctgcctggccccgcggcgacctgcccagggatgtgcccttctcgtaaagttgttcaatggctgccccctccggatccacagcacggccgcctggacacatccctccaccaagggtgggcattctggagggtcaaggagatcctgtagggaatgggagagcaaaagtaggggtggggagaagcctaaggaaggcacaaaggcagggacggg

SEQ ID NO: 945798 - DNA, 555 bp, Homo sapiens
tcaggtgatctgcccgcctcggcctcccaaagtgctgggactacaggcatgagccaccgtgcccagccctggctgcatttttattttagatttttatcttattaaaaatttttaactattaaaaataactattttaactattttgacataatttaaaactcacactcccagagaagttgcaaaaatcccttttatccagattaaccagatctttttttttttttttttttgagatggagtcttgctgtgtggcccaggctggagtgcagtggatctccactcactgcaacctctgcctcccgggttcaggcaagtctcctgtctcaacctcctgagtagctgggactacagttgcacaccaccacgcccagctaatttttttgtttttttagtagatgtgggctttcatcatggtggttaggctggtctcgaactcttgamctcaggtgatccacccacctctgcctcccaaagtgctgggattacaggcgtgagccactgtacctggccagatgttaatctttttaaccgcatttgccttattattcttttttt

SEQ ID NO: 945799 - DNA, 633 bp, Homo sapiens
ccacttgttggagggcacttcttcgaagttgctggctgggctcaggacttggcgcttcctggggagcactggaggaaaggggtgtatgttttggtttcccactgagctgcgtatttcagcaggcccctttgagggggagactcaagtagcagatcccacctggatgcaggaccatgtgccattgaaatcattttgggaagctgcatttattgagcacttacaatgtaccaggcaccagagtgcttcctgcgcactatcacgtctaatcctcaaactgaggataggatgatgccccttttcaaagaaggacactgaggcttaacccccgccacctgcccagggtcgcacagccagccggtggtggaggaggtgggtgtggagcccaggtcggcctccctccatgctctggcccagccttcttgccactgacacctttcactacctcctagttctgggcagtggggagtgggggatgtcaaaggcactctcccacaggagcttcagtgctctcaacaccccctcccggggtgcagctagctaactgcttgggcccaggsacagcctgtggtactgcgaatcccagtgacatctgagctgcctcctatcttggtgggtaggctgggtgctatcagc

SEQ ID NO: 945800 - DNA, 721 bp, Homo sapiens
tgtgactctaagtaatccccatgccaactcttataaatggcagtcagtccttttgattttgcaggtttaagggaacactatcagagcaaaattaaagagaccctagataatttgttgtcatkaaatttctaccagaatagaatcagaaactggatttggccaaaagtcattgaagttccttgaagtaaattagcagaagagaagttcttccctgaatgttattggaaaatctggttagtgttatgaagctgtcattgctgttagaagttgctggagaactatgttcattctccgtatttggtagctatttgagaatttgtctgagtgttgtttatgaaatggggatgtttaaggtagtgaagttgacaggaaattactgtgtgacaaatgatctgagaattgttaagtgttgcacttctgttcaattcagatgtctctgctgcatacaaatggcagtgtgtatatagcatgtctcttaaatggataggttgatttgtcttataaattatgattgacattgttcactaatattcctggtcctctaatccttctgggagaataggagggttgcatgtctttgtcccattaaagttagacaaacatgtcatatgcctgaccaacaaagtgagagcaaagtgactggtggcacctctgagctaaagcacagaagatcatgtgcataatttcctttattccctttgtcaccctgctaaaacctgga

SEQ ID NO: 945801 - DNA, 442 bp, Homo sapiens
ctcctaaagacagcagatggttggtgagttcttgcctattctgtggttctgtatcttttaaatggagcatttaggccatttacattcccatgttagtawtgaaatgtgaggtactgctgcattcatcatgctttttgttgctggtgtaatttggttttttgtttttgctttttaacttgtatttttgttttgtaggtcctgtgtgattcatgctttaaagaggttccgtttctatgtgtttccaggatttgtttcaagatttagagctccttttagtagttcctgtagtggtggcttggtaatggtgaattctctcagcatttgttcgaaaaagactgtatgtttccttcatatatgatgcttagtttgctggatacaaaattcttggctgaaaatagttttgtttgaggaggctaaagatagggccccaatctcttctagc

SEQ ID NO: 945802 - DNA, 469 bp, Homo sapiens
tgggctggtactgggggttgtctgcacagagtcctgtaatgtgaaccatctatgggcctctcagccgtggatacttgtgcagttttttggggggtctcccaggtcctgcaggagcagttggcttccttcagagtgtctgtgggtcctctcctgtaccacaatttctttatccagtctgtcattgatgggcatttaggttgattccatgtctttggtattgtgaatcatgccacgatgaacattcatgtgcatgtgtccttatggtagaataattagaattctttggggtatataaccagtaatgggattgctgggtcaaatggtaattctgttttaagtyctttgagaaattgccaaagtgctttccacaatagctaaactaatttacattcccacatgaaatgtataagcattccctttttttctgcaactttgacaccatctgttaatttttgactttttagtaata

SEQ ID NO: 945803 - DNA, 770 bp, Homo sapiens
atgatttgtcctccagggcaggccaaactgccagtcatgcacttgggggagggaggctgctgggttttttagggggacactggttgtatcccagcttacakcccttgggacttgggcccgatgcccagaggagattcagcagaggtggcaggggtcccagaagcaggccaggggctcagccaggctccctggatacccctccccagccctcagcggcaggaggtcaggaaggagactggatgttatcctgccggtgtcgttaccatggtgatggggtatatatctgagctctccccagggcccctgaacccctcctcagggaccttggggaggcgtcttggagggggatgaggcagagtgtggtgggggcaaactgaggtcagaagacaggtgaagaggctggactcagtggctcacgcctgtaatcccagcattttgggagatcgaggcaggtggatcacctgaagtcaggagtttgagaccagcctgaccaacatagcgaaactccgtctctactaaaaatacaaaaattagcagggcgtggtggcgcatgcctataattccagcgacttgggaggctgaggcaggagaatcgcttgaacctcggagacggaggttgcagtgagctgagatcgtgccattgcactccagcctgggcgataagagctctctctcacaaaaaaggaagaagaaaggagaaggagaagacaggcgaagaaactccctcccctgcagatgagttcatttagggtggggcactgggtagcgca

SEQ ID NO: 945804 - DNA, 589 bp, Homo sapiens
gattacaggcgcacaccatcacgcccagctaatttttgtatttttgtakagatggggtttcaccatgttggacaggctggtcttgaactcctgacctcaagcgatctgcccgcctcagcctccgaaagtgctgggattacaggcctgagccaccacgcctggcctcagactcatgtgttttactgtagataagttatgtcaatttttttctgaagtccagggaatatggttaagttaaaaacaatcacttgcagatcaataattacagcagcttttatttactaaaacaaacaagcaaataccaaaaacaaaaaacaaaaaaaaatgtgcatgctgatattgacatgcaaatctatcctagaaagccaaagagcttgaatagggtttctcagacatctttgtggctccatgatcagtgaaaattttttattgtattttattgtatttatttatttatttatttatttatttatttatttatttattttgagacagagtctcacactgtcgcccggactggagtgcagtcgcgagatctcggctcactgcaacttcctcctcccgggttcacgcaattctcctgcctcat

SEQ ID NO: 945805 - DNA, 569 bp, Homo sapiens
cacagtagaacaagacaccaggtagatttcyaaggtttttgactccagtccctggcttactgactgcatttctggacccacccagagctttgggaaacttgctgccctgacgaaaaggatataagcctggctgcatttggaacctgctggttttagagccctagggccttaagcaaatatagccagcagccaggtagcggttatagtgggctttggtcgagacccagtgcagtcccagtgctactggccacagtggtgcttgtgtcaccctatccccacctccaggtggctcagctccctttgtttgggagaaagtaaaagaagagaacaagagcctctgcctggtaatccagataattcttctggatgttatccaagaccactaaggcagtacctctatgagtctgcaagaaccgtagcagaccgggtgtggtggctcacgcctgtaatcccaacactctgggaggctgaggtgaatggatcacttgaggcccagagtttgagaccagcctggccaacatgatgaaacctagtctctgctaaaatcacaaagattagccaggcgtggt

SEQ ID NO: 945806 - DNA, 586 bp, Homo sapiens
ttctgtatgagatgtctgccgacccctgcagggatgtgtctcccagtcaggaggcacggggatcagggacccacttgaggaggcaatctgtcccttagcagagctcgagcactgtgttgggagatctgttgctctcttcagagccatcaggcaggaatatttaagtctgctgaagctgagcccacagccacccctacccccaagtgctctgtcccaaggagatgggagttttatctgtaagtccctgaccagagaggaggaatctagagaggtagtctggctacagtggctttgctgaggtgggctcttcccagttcaaacttcccagcggctttgtttacactgtggggggaaaactgcctactcaaggctcagtaatgctggatgctcctcccctcaccaagctggagcttcccaggtccacttcaggctgctgtgctggaagcgagaatttcaagccagtggatttttagcttgctggtctccatggggrtgggctccattgagcaagaccacttggctccctgactgcagccccctttcccgggaaatgaacggttctgtcttgctggtgttccaggcacca

SEQ ID NO: 945807 - DNA, 609 bp, Homo sapiens
gagtccaaccctgagtctttctgagtctcaatttcctcaggcatacaatgggaatatgaattgtttccaagsctctcacaattaaatgagatcatataggccatgcttagcatcccattcttccatcaccaggtgtcacctatcacggagtctgtgctgattctacttctaaacatttctgtaatgtcatttccatctcttctgccaacatgttaaacaaggccccatcatcttccccatggatgactgcaatacactcccaactggacttctcatatctattctttcctcctgtccaatctgttctccattgtgaagccaggatcacctttttaaactccaattatgagcataccacccactacctcccattcgtcacctgcttaacacccttcagtggcttcctacaggcatcaagagagagaatgtaaccctctgcatagcatggttggcccctgctccctctccagcctcatctcaccctgggttccccctcactccctgcatccccgccttgctgacattctttcaagctctcccatctgccaggatgcctcctgacatgagggcctgaaatatgctgttccctctgcctatcatgctcgtttc

SEQ ID NO: 945808 - DNA, 643 bp, Homo sapiens
catgactaaaagggccaaggtacagctcagcctgttgcttcagagggtggaagccccaagccttggcagcttctatgtggtgttgtgcctgtaggygcacagaagtcaagaattgaggtttgggaacctctgcctagatttcaggggatgcatggaaatgcatggatgtccaggtagaagtttgctgaaggggcggggctcttatggagcacctctgctacagcagtgcagaagggaaatgtggggtcagagcccccacacagagtccctactggggctctgcctaatggagttgtgagaagagggccattgtcctccagaccccagaatggtagatctaccaacaccttgcaccatactcctggaaaggctgcaggcactcaacagcccatgaaagcagccaggagggaggctataccctgcaaagccacagaagcaaagctgcccaagaccatgggaacccacctcttgcatcagcatgacctggatgtgagacatgaagtcaaaggagatcattttggaactgtaggatttgactgccccactggatttcagacttgcatggagtctgtagcccctttgttttggccaatttctcccatttgaaatggctgtatttactcaatgcctgtacccccattgt

SEQ ID NO: 945809 - DNA, 769 bp, Homo sapiens
tgatttttcctccagggcaggccaaactgccagtcatgcacttgggggagggaggctgctgggttttttagggggaccctggttgtatcccagcttacakcccttgggacttgggcccgatgcccagaggagattcagcagaggtggcaggggtcccagaagcaggccaggggctcagccaggctccctggatacccctccccagccctcagcggcaggaggtcaggaaggagactggatgttatcctgccggtgtcgttaccatggtgatggggtatatatctgagctctccccagggcccctgaacccctcctcagggaccttggggaggcgtcttggagggggatgaggcagagtgtggtgggggcaaactgaggtcagaagacaggtgaagaggctggactcagtggctcacgcctgtaatcccagcattttgggagatcgaggcaggtggatcacctgaagtcaggagtttgagaccagcctgaccaacatagcgaaactccgtctctactaaaaatacaaaaattagcagggcgtggtggcgcatgcctataattccagcgacttgggaggctgaggcaggagaatcgcttgaacctcggagaccggaggttgcagtgagctgagatcgtgccattgcactccagcctgggcgataagagctctctctcacaaaaaaaggaagaagaaaggagaaggagaagacaggcgaagaaactccctcccctgcagatgagttcatttagggtggggcactgggtagcg

SEQ ID NO: 945810 - DNA, 658 bp, Homo sapiens
aagaaatctggggaagaggtatgtggatgacccctctgagtggtcaaaacctgtgaagatatttctatcccatatgagtgttcaccaaaggatgacctcagcagaggagcattttaataatcaagtggataggatgactcgttctgtggacaccactcggtctctttcctcagctattcctgtcattgcccaatgggcccatgaacaaagtggccatggtgtcagggatggaggttatgcatgggctcagcaacatggacttacactcagcaaggccgacctagctatggccaccactgagtgtccaatttgccagcagcagagactatcactgagcccgtgatatggcaccattccttggggtgatcagccagctacttggtggcaggttgattatactggacctcttccatcatggaaaaggcagaggtttgtccttaccagaacagacacttactccagatatgggtttgcctatcctgcacgcaatgcttctgccaagactaccatccatggactcacagaatgccttatccacagtcatggtatttcacacagcactgcctctgatcaaggcactcacttyacagctaaagaagtgcagcagtcagctcatgctcctgaaattcactggtcttacaattttctccatcatcct

SEQ ID NO: 945811 - DNA, 573 bp, Homo sapiens
tcacagcagccaaagtggcccttttcaatcctctaacagatccttcctcacttcctactccctctcactcaccctggtccagccacaccagcttcctcaccggcaactataataggcacgttccctcactgccacctataacaggcttttgagtgcttctccctctacctagaaagcttctccctcattctgttcagttgttgttccaggtcatgttttcagagaggtgttatctacccaccccatctaaaacagcaactagctcccataattctctatccccagacctggctttacttttcttctgtgcatttaccatggtctggtgtgtgcatgcacacacacacacacaaacatacacactcacatacacacaccacacacatacaatgtttgcttgttggttggttggtttattgtctgtttgtctaacaaattataagctccataatgataggaacttcatcggttttgttcactgttaacakcctcactgccttaaacattaccttgcaacacagcaggttgaatccatgaaaaataaggaaggagcagaagaaaaggtgagcaggt

SEQ ID NO: 945812 - DNA, 712 bp, Homo sapiens
ctgtatcttgtattttattttgcaataaaaagattgtctaaaaaagatagggacaagagggagaatagaaagtctctgcttttatcccrgtccctggacatgtttgtgttgagacagggatcatgaacagagtatattccagatacagggcacagcctaagcaaggcaagaaagtagaaaccagacatgtggcaaattctggcaatagcagatattcctgtttggctgtgcaatggctatatgcagaggatatgggagaaaataaaaactaagaagtcagggcatactgtggaagtcaaatgatgtcaggacaagatgtttgtaatcttttaagcagcagagaatgggtaaatgtttctcaacaaggattgacacctagattgagcgactctggtggttatttctcactctaaccccctcctccttcctaacagaactctgattttgtccagtgatccatcctggaggtttcagtgtctatgtgtgatgtctggaactgcaccagccatcttggggcgatgagaaactttaacctggggagtacatgctgtacatgtacatttaagtacagagaagtggcaggaatatgaatttcagattatgctgctgagccactgaatgaattaaccccatagtcccccttgtgccagggttcttgataaatgaaataatgaatctccatatcatttaaatgagctgggtcttccatcac

SEQ ID NO: 945813 - DNA, 567 bp, Homo sapiens
aagaggcccccgtaagctgagatcctgactttgttggagagggcacagctatgcttactgagtggtagagagtcactagagtgccaccccagcaaagttcacaggaaatctgcctgctagggygctggaggaagaaacacatggtgaggtatctcatggaagacattctgctacaaaaccacccaagggaatgggtgctgggagaagctgttggtcgctggatgccggtgattgctgcacaccgcaggagctaggcaatggagaagctacgcgtactgcaggagctagacatggagaggccatgcacgctgcaggaggctagtgccagagacgccacccgtgctgcctgcctactgaacacaccagaaccagggtgaaaaaagcctttccttctgcagtgtctctccagcatcttctactaaccactgttaacatcatgttagctggcaagggaaacacgtttaagggcccagaaccatttttgcatagcaggcagtgaaggtgggtttggggctgagaggcaataaattaataactgactgtctcagtgagtttgggctgctgcaa

SEQ ID NO: 945814 - DNA, 573 bp, Homo sapiens
aatgaacaacttctatagagcccctttcaagactttgaaagggacctgtgcaagcttatgctccattaacctcaaggtgaatctgactctgtctagcactctataattctatcaactaatccctaattttgaggatgagaggagttgggatgggagccttctcaaagcctctaacattacacgacacaaagagctttctctatttcttgtttaatcttaaattttcttttttgaatttttaacttatattttaggttcaagtgtacatgtggaggttacacaggtaaactcatgtcacaagggtttattgtgcagcttgtcaccaagatactaagcctattgtccaattttttactttttcagatcttctccctcctcttaccctccacagtgaagtaggctccaatgactgttgttcccctctatgtgttcatgtgtcctcatcatttaggtcccccttgtaaatgagaacatgtggtatttggttttctgtttctgcattagtttgctaagattaatggcctcwagctccatccatgtccctgcaaatgacatgatctcattcttttttat

SEQ ID NO: 945815 - DNA, 688 bp, Homo sapiens
ctaccagcacagatcagacctgggttgaatcaatgaaygggtaaggcaaggaaaggaggtcgcagggcagaaggcagggaggaagggcaggagggtgaaatggaaggaagggaggaaaggtggaggggagcaaggagagggggagggtaggagggcgagaaggaaggaaaagaaggaacccaggttcccaattggcagcagtacccacttccaacccctatgttgccacttccacctcggcaggaaagttgccccttctccagccatctaggtcccctgtactctttccctggggatggagctgggtgccggtgcaggcatcggaggagcggtgccggggaacccgcctcctcacctcttgcccctagcacggggcggtgactccagagctgggagcctggcagcgtcctcaccccaggaaggcatgcgcccctctgcgggcggccccagccctgggccccctgcccccggaattgcccaagatgccgggtgactcctccccggggactctcccactctgggacgcgtcactctccccacccctgggtccggaccccggcggcttctcgcgcgcgagccacgcgggggacaagtcgcggccacctgctccggagctggggagcccgggcgccgtccgcccgcgcgtcggttcgtgtgccccgggccccatggagctgcgggtcagcaa

SEQ ID NO: 945816 - DNA, 672 bp, Homo sapiens
tcaatttcttttaaattcaaatatttgaggtttactcagactttttaaattgctaattcttctttttataatgttttggaatgcattgagtttatacaggtgtaatgatgtgttgaaatcttgtgttctccaaggaagcttctttttaaaaaaattatggtaaaactgcataacataaaatttaccatctgagtcatttttaagtgtacagttcagtagtgttaagtacagtcaaacttgtgcaaccaatctccagaactattttcatcaaactgaaactctataccactaaacatctccccattctcccctcctcccgcaaccaccattctactttctgtgtctataaatttgactaatctaggcacctcatacaagtggaatcatatagcgtttgtcttttgtttttgaggcagagtacccctctgtcatgcaggctggagtgcaatggcacaatcttgactcactacaacctctgccttctgcgttcaagtgattctcatgcctctgccacccaaatagctgggattatatgtacacaccaccacrcccagctaatttttttgtacagacagagtttcaccatgttgaccaggctggtcttgaacccctgacctcaagttatccatcttcctcggcctccccaaatgctgggattacaggtgcgagcca

SEQ ID NO: 945817 - DNA, 761 bp, Homo sapiens
tccacctcctgggttcaagcagttgtcctgtctcagcctccygagtagctgggattacaggtgcacgccactacacccagctaatttgggtagttttaatagagatggggtttcaccatgtcggccaggatggtttcgatctcttgaccttgtgatctgcccgcctccgcctcccaaagtgctgggattacaggcttgagccaccgcaccaggccaattttttattttcaaatgttgtagaggtggggtcctcactacgttgtgcaggctggtttagaattcctgcactcaagcaatcctctcaccttagcctctcaaagtgctggggttataggcatgagccactgtgcctagccaagacaagcttctagaataaggtagatcagttttacaatatgcccactggttgggggaccatgagagcaggagcttctttttttttttttttttttgagacaaggtctcactttgtcacccaggctggagtgcaatggcacaatcacagctcactgcagccttgacctcccaggctcaagtgatgctgccacctcagcctctggagaagctggaactataggtgcatgccaccacgccctaagaatttttgtattttttgtagagatgaggttttgccatattgcccaggctggtctgaagctcctgggctcaagtgatccacccgtcttggcctcccaaagttttggggttacaagtatgagccactgcgtccggcccaagagtaggagcttcttgagcctggc

SEQ ID NO: 945818 - DNA, 558 bp, Homo sapiens
gaccctatgtacattccatatactttgactcacagagagcctatttctctatttgtaaaaagcatgcattaagctagataactccaaggactggcrcagtggctcacacctgtaatcccaacactctgggaggccaaggagggtggatcacttgaagtcaggagtttgagagcagcctggccaacaaggtgaaaccctgtctccgctgaaaatacaaagattagccaagcatggtggtaggcacctgtaatcccagctactcgggaggctgaggcagaagagttgcttgaacccaggaggtggaggctgcagtaagccgagaccgcaccacagcactatagcctggacaacagagtgagactctgtctcacactgaattctacttatttcttctattgtataacttctgtcctgtcccccaaaaggcggtaaggtgtgggaagccaacatcctatgtcttatgcatttactccaatgagctagctacaggagaggatactaagaaaaactgccacaggtcttcacagtaactccaatgtagtcaggatgtaagacaca

SEQ ID NO: 945819 - DNA, 664 bp, Homo sapiens
ctgaggaagactattacaccttcttccttctgtcttccataaccataaaagttattttaaaatgatgcttgtttttgtgacctgtaactcagatgagcagatgttcaaatttgatgtttcttaaaagatttattagaataacaatttatttagtactttggttagctgattgttgttatttaagtaccacattttaaagtgacagactttctaaaatttctggtcattttttctagacagctcaactgaactgctgctgtattgcgatacttctggtgcataaaaagctatgtagtagccaagggaatgggatagcaattagaatagtattaatatttcttccattttctgtttagtaagaacttttatttataattaattttaataaatatttgttatatattagtagaaaagttttttcttccaacttgaactgtatgacatcctattatttattttttataatttgtgtttattcaaatgagcaatcacttataaaacacctattactgtgggctagtcatagtgttaggcatatactttataatgtgtgtgtgttatagaaaaatagaagttctgcattttcttaactcgyttgattacttcattgattttaataaaggaaaaatgtgacaaagaaataacgaaatctcttttctttata

SEQ ID NO: 945820 - DNA, 627 bp, Homo sapiens
ctccctaaaattatatgcaaaatgttgtgaaaatatacagtgaagctctgcataatgattttttggtcaacagaccacataagattacaatggagctgaaaaattcctttcacctagcaacatcatagcrcgatgcattactcacatgttcatggtgatgctggtgtaatcaaacctactgcactgccatccataccaaagtatagcatgtacaattatgtacagtacatgatatttgatgataataaatggctatggtactggttagtgcatttgatatagtatacttattatcattattttacagtgtactacttctacttattaaaaatcaacttaatgtgaaacagcctcaggcagatccttcaggaggtattccagaagaaggcattgttatcataggagacgacagttccatgaatgttattgcccctgaagaccttccagtcggacaagatgtggaggtggaagacagcaatactgatgatcctgaccctgtgtaggtctaggctactgtgtgtgtttctgtcttcgtttttaacaataaaaaaagaagttcaaaaagtaaaaaaataaaaagtaaatttttaaaatagaaaaagtttatagaaggataaagaaatattt

SEQ ID NO: 945821 - DNA, 642 bp, Homo sapiens
tatactctaaggtgctatcgacgtttacctggggtggagaaacacaatgcacttttcatttttttaagttattaaaaatactgcatttatgtttactgaaatattagtgaatctatagcataacccaatacaaaatatattagctccttgttatagcaaatttggatgtaatacctcaaatgcttcaatatatcaatctatactgaccccttcgacaaggatgatttagaataaaattgttgaataaagaaaatacagcctttattccatcaatgacccaacaacatgttgcctttatataatgtacaaattggaattcagtaacacaacaggcacatttctatcttctgccttcctaaagcatggtgcatacgctaagaagaagagatgcttgtaccaaaacactctcacacactcacaagtaccttttgctatatcaatcaaataggctttagatgaccaccagggttgattgccttccttggccaattgaaatgttaataaaaccatgaakggattatatttataaatggactgttctttcacttaatccaaatccagatgtcaaaatgttttaaaatacccatctttggattttgaagctagctattaattattttccctacaaagtaaaataaatta

SEQ ID NO: 945822 - DNA, 645 bp, Homo sapiens
tcatgattagattgatgatgagcttcaaggtaggcactttcagccggaatattatataggtgatgagttcttctcaaggtactcactcacaatgtctgtctgcccctcgttggtgatgctaactttgatcatctgcttgaagtgttgtctgatttgtttaccatatagtcactgtttttttctttttacaacctcaaccaatatgcagtctgttggaggatactgaaggtcatgctaatagcctgctcctcatcaccatttctccccagatttagcatccgttgatgattcttgccagatccaaactttattgtgatggttgcaaaatgatgattttctagctgtaacatttcttccatgtgtaccagtgggcttggcattctgctgtaaggtagagttctcccttctctcttacgtatttgtttacccatttattatggactcaggggttctgatttttcaatggtctgtaatgttactatccttaattattgtggtgctcaaattgtccgatttttggccagtgggcccccrcttcccatgtccttaggggatgtcctcatcattttttttttggagaacctctttcctttttggcattaaaaaatgttccaggcccatcttgtatctgccctgccttcactc

SEQ ID NO: 945823 - DNA, 751 bp, Homo sapiens
gtgtccactttcacttgccaatactctctccaatccaaattctctgcatcatatgtagccagattaataatgattaaaaaaaaaaaaaaccaaaycaccaaacgaaaagcccccaaaccaaatcatacctctcacttgcttaactccagaggcctccttggaataaaatccactcctgtccacatggaaggccctgggagatctggccctgctggtgtgcagatctcatggaacctactctctcatttcctcattcccttctggtgccttttttttttctttcttttttttgagatggagtttcgctcttgttgcccaggctggagtgcagtggtgtgatcttggctcactacaacctctgcctcccgggttcaaatgattctcctgcctcagcctcctgagtagctgggattacaggcatgcactaccacgcccggctaagtgttgcatttttttaaagtttttttttttttgagatggagtctcgctctgtcgcccaggctggagtgcagtggcgtgatctcggctcactgcaagctcctgcctcccgggttaacaccattctcctgcctcagcctccagactagctgggactacaggcgcccgccaccacgcccggctaattttttgtatttttggtagagatggggtttcaccatgttagctaggatagtctcaatctcctgacctcgtgatccgcccgccttggcctcccaaagtgctgggattataggcgtgagtcgctgtgcct

SEQ ID NO: 945824 - DNA, 641 bp, Homo sapiens
ttgaccaccataacctggtttcggccatgcagtgagccttcattatttctgtaagctcaagttgcattccattacggggttgggcagtcacactgtagtccttcccacgtacacgttaataaattttgtatgccttttctctaattaatctgccttttgtgagttcatttttcagcaaaccttcagagggcaaaggggaagttttctccttgacccctagaatacgatattgtttatctggggaccacaatttgggaatgatggaccaacttctaatgacacaatttcataataagacacagctaatgagcaagaccatttttaaaaggcatttctgcaggctgagacaagaaattaacatgtgaacaacacaaattattttaaattaccaggcctagagagacattaaaatgagaccagcatatgccctttgaactatgtattcatctcttgaaactgcttactgttgctataagtagctataaattatctaacaatgcaacaatggacaccataatccatactctataactkaacaatgtgtagccaatcattaatcactgttatttctataaaccaatgagaattcctgacaattttatatcagccgctccctgtccccctttttttgcctttaaaat

SEQ ID NO: 945825 - DNA, 641 bp, Homo sapiens
ttgaccaccataacctggtttcggccatgcagtgagccttcattatttctgtaagctcaagttgcattccattacggggttgggcagtcacactgtagtccttcccacgtacacgttaataaattttgtatgccttttctctaattaatctgccttttgtgagttcatttttcagcaaaccttcagagggcaaaggggaagttttctccttgacccctagaatacgatattgtttatctggggaccacaatttgggaatgatggaccaacttctaatgacacaatttcataataagacacagctaatgagcaagaccatttttaaaaggcatttctgcaggctgagacaagaaattaacatgtgaacaacacaaattattttaaattaccaggcctagagagacattaaaatgagaccagcatatgccctttgaactatgtattcatctcttgaaactgcttactgttgctataagtagctataaattatctaacaatgcaacaatggacaccataatccatactctataacttaacaatgtktagccaatcattaatcactgttatttctataaaccaatgagaattcctgacaattttatatcagccgctccctgtccccctttttttgcctttaaaat

SEQ ID NO: 945826 - DNA, 597 bp, Homo sapiens
gcaggggagacagaaaagttccactataaaacatttgatgagtccgggcgtggtgactcactcctgtaatcccagcactttgggaggccgaggcgggcggatcatgaggtcaggagatcaagaccatcctggctaacacggtgaaaccccgtctctactaaaaatacaaaaaattagccgggcgtggtggcaggcgcctgtagtcccagctacttgggaggctgaggtgggagaatggcgtgaacccgggaggcggagcttgcagtgagccaagatcgagccactgcactccagcctgggcgacagtgataccctgtctcaaaaaaataaaaaaaaagaatatttgatgagcactggcttataggattctccctgtggccttcattccattgcacagcctctaccgttttcccgtctggctctctgttttgcctttcagtaataatacaagaaggtgcaccattcttttggttgaaargggaattaagaatgaactcaagttctttcgcattatttaccgtgtaatgtgaaaagaaatctacttttgtagggatgtcttttaaagatgtttttactttgaatttttagttttctcct

SEQ ID NO: 945827 - DNA, 582 bp, Homo sapiens
tacattcccaacaacagtgtgaaagcattccagaatctctgggacacagttaaagcagtgttaagagggaaaattctagcactaaatgcccacattaaaaagctagaaagatctcaaatcgacgtcctaacatcacaactcaaagaactagagaaccaagagcaaacaaatttcaaagctcgcagaagacaagaaataaccaggatcagagcagaactgaaggagatagggacacaaaaaaaccttcaaaaactcaataaatccaggagttgggtttttgaaaaaattaataaaatatatagacttctggctagattaatagagaagaatcaaatagacacaaaaaatgataaagaggatatcaccactgaacccacagaaatataaaccaccatcagagaattctataaacacacctgtgcaaataaactacaaaatctaaaagaaatggataaattactagacacatacaccctccccaagactgaaccaggaagaagttgaatccctgaatagaccaataataagttctgaaattgaggcagtaataaatagcytaccaaccaaagaaagcccaggacc

SEQ ID NO: 945828 - DNA, 640 bp, Homo sapiens
gcttctaattggattcagtcaggctgcttcctgctgacatttggtgggtggtgacattcggcaggtgagggactaggttagaaagtcgccaagcaggcccaggcctcgggagagggagtttaacctgtgtggctttgatgctggtcagaagccacactcccttgagagctgtcctgatctctatcccaagagaccagacaccagccggcgctccacttaatgccagccagaggaaggctaaggggcttagagtctggctaaggatttctgtccctctttgcttccctccttacaaactagcagactgaaaactctccaaatcacggagtgatgattcacagaggttattaaggtgcagggacctgggaaagcagtggttctcagccctggtcacatgtaagtatctcttccagaggagcttttaaaaactaacaatgcccaggtcctacctgagacctatgcatctgaatgtgcaaaggtgcagcccaggtccctgtatttctcaaaacctccccaggtagttccaagggacagccagatgtgagaatcactgcgytagaaggtaaataaatggctcctgggaagggacagacggtgacatcatagtgtgtggtgtggactcacccagcccattctccct

SEQ ID NO: 945829 - DNA, 559 bp, Homo sapiens
gctgcagaatacacattgttcctatcagcacatggaacatcctccaggaagagaccatacgttaggccataagacaagttataactaatttttaaaaattgaaatcatatcaagtatcttctcagactacactagaataaaactagaaatcaataacaaaaactttgtaaaccacacaaataaatggaaatttaaacaatgtgcttgctcatgaatgcccattgggtcaattaagaaattaaagatcatcaaagactactacaggcaactatatgctaacaaatcagataacctagaggaaacagaaaaattcctggatacatgaaaacctaccaagactgaaccaggaagaaacagagcagaagaacctgagcagaccaataacgagtaatgagattgaagcaatagtaaaatgtctcccaacaaraaaagcccaagactaaagggctttactgctgaatcctaccaaaattacaaataactaacctcagtttttctcaaactattccaaaaaatggaagagaagttaattcttcctaatccattctacaaggccagc

SEQ ID NO: 945830 - DNA, 438 bp, Homo sapiens
agacggaaggaagggagggaggtgtagggaaggaaggaggacaggaaaggagaaagagagagagaaagaaagaagaaagacagaaaggaagtaaagggkaagaaggaaggaaaagaaagaaagagaaagagaaagaaagaaaagaaagaaaaggaaaagaaaagagaaagagaaagaaaggagggaaggaggagggaggggtgggagggaaggagggagaacctttgtgtgtcagacggggcagtccagaggcgagaggggaggccaggaagaagctgataagctgggatggtgatccacacaggagagggtgaggtctggggaacagcttcaggggatggagaatgtaataactctcatcctgtgacctgcagacttctagagagatccatagctgattcggtggcatctgtaatccccgatgttgtctgccaaact

SEQ ID NO: 945831 - DNA, 660 bp, Homo sapiens
ttttgccagacttttttgtttgtttgtttttgagatagagttttgctcttgttacccaggctggagtgcaatcgtgccatcttggctcaccgcaacctccgcctcccgggttcaagtgattctcctgcctcarcctcccaagtagctgggattacaagcatacaccaccatgcccagctaattttgtatttttagtagagacggggtttctccatgttgttcaggctagtctcgaactcccgacctcaggtgatccgcccgcctcggcctcccaaagtgctgggattagaggcgtgagtcaccgcgcccagccggccagatgattttaaagcaaacacaccaggcagctcagcatttccacttccaaaagacttcaatatttatcatttacttgaaactagtttgtatgcccccgccgacaaagaaataaagatcaagaaagtatggccaagtggccacatctgtgaagtttagccaatgggtgttcatgacagcacttttttgtttgtttgtttttgttttgttgttattatttgtttgtttgtttgttgtttgtttttgagacggagtcccgctctgttgcccaggctggagtgcagtggtgcgatctcggctcaccacaacctccgcctccctgggttcaagcgattctcctgcctc

SEQ ID NO: 945832 - DNA, 568 bp, Homo sapiens
ctccctcctccattaaaagtggaagatacgggcaggcatggtggctcacrcctgtaatcccagcattttgggaggcctaagcaggcagatcacctgaggtcaggagttcaagcccagcctggccaacatggtgaaaccccgtctctgctaaaaatacaaaaattagctgggtgtggtggcgcatgcctgtagtcccaccttctcaggaggctgaagcaggagaattgcttgaacccaggaggtggaggttgcagtgagctgagatcatgccactgcactcctggatgacagcgcaagactccgtctcaaaaaaaaaaaaaaaaaaaagtggaagacacagtcctttcaaagggccaaaggcaagccaggggaacctgtccgtcagaatctaaggaaggctgtctccaatgtccactcatttcactgtcagatgtacctaatggttaggaaagacgccttccttcaagccacgacattctctccaggtgccagcccagggctggcggctccatctttatccagatacctgcttatgactcctcagagcctcaagcctcaggccccctct

SEQ ID NO: 945833 - DNA, 591 bp, Homo sapiens
agccactgcgcctggctctggctgacatctgatggtaacctcaggagagatcccgagcctmaaccacccagctaagctcctgaatttctctcacacgaaaaccatgagataataaatatttgttaagtggctaagttttggtgaacacctgttacacagcaatagataacttgtaaatggctgaggtgtgatttggactcaggtagtctggttccagaacccaacatcccagcatcaatcataatatcaaaaattagaaattttggggcttggcgtggtggctcacgcctgtgagcggggaagcaggcaggaggatcatctaaggccaggagttcgagaccagcctggccaacatggtgaaaccccgtctctactaaaaaaatacaaaaaattagctgggtgtggtggcacgtgcctgtaatcccagctactcaggaggttgaggcaggagaattgcttgaacctgggaggcagaggttgcagtgagccgagatcacgccactgcactccagcctgggcaacaagagtgaaactccatctcaaaaaacaaaagaaagaaagaaagaaagtttgtaaatgttactgggcaca

SEQ ID NO: 945834 - DNA, 593 bp, Homo sapiens
acagactgacaaatgtgtgcagatacagagaggggctggggggtcctgggggctagaaggacttactaaagtgatagagaaacagaaaaacaggccaggcacagtggctcatgcctgtaatcccagcactttgggaggctgaggcaggcagattacttgaggtcaggagttcaagaccagcctggtcaacatggcaaaaccccatctctactaaaaatacaaaattagccaggcgtggtggcgcacacctgtaatcccagctactcgggaggctgaggcaggagaatcgcttgagcccaagaggtggaggttgcagtgagccaagatcgtgccactgcactccagcctgggcaacagagtgagattttgtctcaaaataagaaacagaaaaacagagagaagggactgagtgagagcaagaaagggaagaggtgacccaaggtcaggagacagagggagtgaaaaggagagagsaagacggtgagtggtggggtgcgaggctggatgggccctccctggccctgcccatactgcctagacaccatgggttagggcaggacaatgattttactggctcgacccctgccaggtac

SEQ ID NO: 945835 - DNA, 627 bp, Homo sapiens
tatcagaagtaacaatataaaacagtggccccaattttttttggacacatctattcattgtaccaaccatataatgcttaattcacccatgtatccagttgttagtctagacatgttcctggatagtaaggatcatgactgcttcatctgttttttgaatggccatataaaatgaaaacaattactttatctgtttgagtcaccagacctcctattgctttcatccaagtatcaggaaacttgagaaactctcatctgggtaccaaccaaagttatctcttgtataaggggagaaaaaaacacagaattgccaggcatggtggctcacacctgtgatcccagcattttgggaggctgaggtgggcggatcacaaggtcaggagttcaagaccagcctgtgcaatatggtgaaaccctgtctttattaaaaatgcaaaaattagccaggcatggtggcaagtgcctgtattcccagctatttgggaggctgaggcagaagagtcacttgaacccgggaggcggaggttgcagtgagccgagatcgcgccactgcactccagcctgggygatagagcaatactccgtctaaaaaaagaaaaaaaaccctaaaaaaaccacacacacaca

SEQ ID NO: 945836 - DNA, 579 bp, Homo sapiens
tgaatcagggcaaatccatttcgaataggggctgggtaaaatgaggctgagacctayggggctgcactcccagatggttaggcattctaagtcacaggatgagacaagagttcagcacaagatacaggttataaagatctgggtgataaaacaggttgcagtaaagaaggtggataaaactcaccaaaaccaagatgggatgagagtgacctttggtggtcctcactgctacactcccaccagtgccatgacagtttacaaaatgccatggagacatcatggaaacatcagaaaatgactttatattgtctaattgggaggcaaaaataatccaccccttgtttagcatataatcaagaaataaccataaaaatgggcaaccagcagccctcagggctgctctgcctatagagtaagccattcttttattccttctgtttcctaataaacttgcttttactttactctgtagactcaccctgaattctttcttgagcgaaatccaagaaccctctcttggggtgtggattgtgacccctttccgataagaactctgcacattttctttttctcatttaa

SEQ ID NO: 945837 - DNA, 619 bp, Homo sapiens
tcggggcgcagattgtgcagctgactgccgggaggcctgagtcccgccacagccacttcccacccattacaaccagcccctcccctctctggggatgtcggacccggcactctcaccatttctaggcttccaggggttcctggcgtcttagctgtagatctcccaatacctgcgggtcacagggccacagagcctggacctctaggagcagaggacacagagcgctgaagacgagacctggagctcaggccacagcgagggacaaaggccccgccaaacccggaagccgccctgtccgcttcacctgcgtgcctgattggacggttccctgcctagcgtctctgattggataacatttaaatccccgccccctcaggccatgattgacggaagatgtgatgagatgcggggctgaaagaagagtgacagcttgggctgcatccttctctgacagggcttcctccctgagctgagccaggcccaccccagaggttatttgcatttaaccttgtgtgtaaggtcatatgcayttataaataatatatggggccggtcacggtggctcacgcccgtaatcccaacattttggaaggctgaagcgggcagatgacctgaggtc

SEQ ID NO: 945838 - DNA, 597 bp, Homo sapiens
gttactagccatgttggcttgcaaagggarcttcacccctcaggacctcggtctgctcacctgtaggtggggaaggtctgatatctgtgatgagtttagggaaatgcctggggcataaaaggaaaatgctcagtgaacttattccaggatccagaagatcctccttctcctcgtctacctcatcacaccgtcctgtgaagaggaaggatggagaggtggaaagagtgttggtgttgaggaaaactgggttgaaactctggctggccactttctccctgtgtcccccgccccaggctccgccttgcagtctgtgaagataatgacacctattaatagcttgttggggttcctggagaccatgtacagtgcttgacacttaagtgacagctacattaaaagttatcatttattctcggccgggtgcagtggctcacgcctgtaatcccagcactttgggaggccgagacgggcggatcgcttgaggtcaggagttcaagaccaggccggccaacacagtgaaacccccgtctctactaaaaatacaaaaaattagccaggcgctgtggtgcgtgcctgtaatcccagctactcaagagg

SEQ ID NO: 945839 - DNA, 610 bp, Homo sapiens
ttcttgtaggtacaggagaatgttagagggatgaaatgagctaatccatgtaaattgctgaggacagggctggacacataccaggtcctccattcattcatkaattcacccattcattcattcaaaggatatttatgaagcatgtgctatgtgccaggcacctttatgctggggaagaaacaaaataagaaatcttgaccatccctcataggtttctgcatgctggtgggagagacagaacatgaacaaacaagtaaaatatatatggcctgtcagaagggagtgtgtgacacagagaaaagacatctgaaagagggaaggggacccagagagatgtgggaactgcagttttattttattattttattttttggggccaggcgtggtggctgacgcctgtaatcccagcactttgggaggccgaagcaggcagattacttgacctcaggagttcaagaccagcctggctaacatggtgaaaccccatctctactaaaaaatacaaaaattagccaggcatggtgacacatgcctgtagtcccagctactcaggagactgaggcaggagaagggcttgaacctggggggaggaggttgcagtgagccaaga

SEQ ID NO: 945840 - DNA, 614 bp, Homo sapiens
  misc_feature 605, 606, 607, 608, 609, 610, 611, 612, 613, 614: n = A,T,C or G
aaagggttattgtggcgtagagtattacacagccttgtaaagtggttattgtgccatagagtgttatgcaatggcgtaaagtggttattttggcacggaaccttatgcatggcaatrggtttttgtgccatggagagttacacaaccgcatgaaggggttattgtgccatggagtcttacataactgcgtagaggggttatcgtgtcgtggggtcttatacaaccgtgtaaatgggttattttcgatggagcatcacacaactgagtaaaatggttattgtgcacggagcgttaaacgaccgcatgaaggtgtcagcgtccattggcgcgttccacacccctgtagaggagtgactccaggccccagtccccgacgccgtgagaggaaggagacacagcagcctacgagtgggacccgtgtgaacgagattctgccgagaccacgcgcgcccagggtggtgcaggctcgcaagcggatatacagctggtcaacctgagagaccaggtgctcgtccgcagcggctcaaggcagcccacgtgcgctcccggcgtctttccgtctgttaaacctcactaccagcagaagcgaagacaggtcgagctannnnnnnnnn

SEQ ID NO: 945841 - DNA, 614 bp, Homo sapiens
  misc_feature 605, 606, 607, 608, 609, 610, 611, 612, 613, 614: n = A,T,C or G
aaagggttattgtggcgtagagtattacacagccttgtaaagtggttattgtgccatagagtgttatgcaatggcgtaaagtggttattttggcacggaaccttatgcatggcaataggtttttgtgccatggagagttacacaaccgcatgaaggggttattgtgccatggagtcttacataactgcgtagaggggttatcgtgtcgtggggtcttatacaaccgtgtaaatgggttattttcgatggagcatcacacaactgagtaaaatggttattgtgcacggagcgttaaacgaccgcatgaaggtgtcagcgtccattggcgcgttccacacccctgtagaggagtgactccaggccccagtccccgacgccgtgagaggaaggagacacagcagcctacgagtgggacccgtgtgaacgagattctgccgagaccacgcgcgcccagggtggtgcaggctcgcaagcggatatacrgctggtcaacctgagagaccaggtgctcgtccgcagcggctcaaggcagcccacgtgcgctcccggcgtctttccgtctgttaaacctcactaccagcagaagcgaagacaggtcgagctannnnnnnnnn

SEQ ID NO: 945842 - DNA, 614 bp, Homo sapiens
  misc_feature 605, 606, 607, 608, 609, 610, 611, 612, 613, 614: n = A,T,C or G
aaagggttattgtggcgtagagtattacacagccttgtaaagtggttattgtgccatagagtgttatgcaatggcgtaaagtggttattttggcacggaaccttatgcatggcaataggtttttgtgccatggagagttacacaaccgcatgaaggggttattgtgccatggagtcttacataactgcgtagaggggttatcgtgtcgtggggtcttatacaaccgtgtaaatgggttattttcgatggagcatcacacaactgagtaaaatggttattgtgcacggagcgttaaacgaccgcatgaaggtgtcagcgtccattggcgcgttccacacccctgtagaggagtgactccaggccccagtccccgacgccgtgagaggaaggagacacagcagcctacgagtgggacccgtgtgaacgagattctgccgagaccacgcgcgcccagggtggtgcaggctcgcaagcggatatacagctggtcaacctgagagacmaggtgctcgtccgcagcggctcaaggcagcccacgtgcgctcccggcgtctttccgtctgttaaacctcactaccagcagaagcgaagacaggtcgagctannnnnnnnnn

SEQ ID NO: 945843 - DNA, 594 bp, Homo sapiens
cattttagatgctgcaactaaaaagaaaaacggactttcactggctgactgattgtctggaaaccgttttgggatttctttcctaagcttcttaattagaatctttacattatagagaaaatgattttgagagttgagtgtggtctgtggagtgtcctattagtaacgacttctgagtaggtttaactcacctcttttattgaaatgtgaaaaggtgtgacatttataatagaaaactctttgaaagtcgcaccgttcattttagaggaattttaaatgtcaccccaaattttacgattttaattaattttaattaatttccaaattttaaccaataggcataatattcaagatcttatctaaaaattattacatggcaatattttgtccttgttaattaaaaaataacactgaaaacacagtcgtcttcctttaaggtaaaaacctgtccaatagtaacaatctcaatgatggcagaatgaaatcagaatctgattrgattaaaaaggagggaaagggtgtggctaaggtgggtggagagaccctctcgtataaaagcccctggcaggcagctctcactccagatctgagctg

SEQ ID NO: 945844 - DNA, 592 bp, Homo sapiens
ccccatgtccattttattcaacaggatatatctgcacctatcattaaacacctccttttaatcttgtttacctgtttcatttgctttgaaagtgtttattattttagaaagggcaaaaaggtattgtatttaatgggaaagtaattaactaggaccagaagataagaatgaaaggaaggcttattctttcttcacttgtatattcttttgtatttttaaaattttgaaacatgtatttctttaaaatatacatatgtacagctcctggaacagagtaggtgcaaactgaagcatgtattgaaggcatcaattatgtaatgaaagaatgagaggcagagaagaggagaaaagcaccaagttggcccctgggccaaggaactctcagattcaaggctccaaatgagaatactggtgttatgctggaggcagggtcaatttgaaatcttgtgacagagggggcagtaggaatcaggcaacctcctggttttgtcagacagtttgggtagatggcaaacaaatccacttccctctcatctsagaagcatggcttctgtggacaccacgggttctgctgttcacctgatcttatttg

SEQ ID NO: 945845 - DNA, 627 bp, Homo sapiens
ttgttaactaaaatctccatgctgtacattaaattcctgaatttcttcatcttgtaattgaaagtttataccstttgactaatgtctctccagtctctccccattctcccagtccctggcaaccaaaattctccacttttttttttcttcagatggagtatcactctgtgcccaggctggagtgcagtggcaggatcttggctcactgcagcctccgcctcctggcttcaaaggattcttgtgcctcagcctcctgagtacctgggattacaggcgcccacgaccacgcccggctaatttttgtatttttagaagagatggagctttaccatgttggccaggctggtctcgaactcctgacctcgtgatccacctacctcagcctcccaaagtgctgggattacaggcgtgagccaccgcgcccagccagcattctcctctttgcttctgtgagtcaaggactatgtggctatgttacagcccacatatatgtgagattatacaagatttccttctctttttaaggctaaataatattcacatatataatcacattttcttcatttctaaatgtccaggaacatttaggttgtttccatacttgtctattatgaagaaggctgcaat

SEQ ID NO: 945846 - DNA, 222 bp, Homo sapiens
aagttagacaggaactaaggattcccacagttcctggtaacaacacctctgtggtaaccasggcagagaataaagtgccaagaaacatagggttgattgagtttggataaaatgagatgacactcagacaccctggggtccctgcctcccggggaccagccagcatcctctctcacctttcttgtccgacatgctcacagccagaatctcccacgtggtgat

SEQ ID NO: 945847 - DNA, 222 bp, Homo sapiens
aagttagacaggaactaaggattcccacagttcctggtaacaacacctctgtggtaaccagggcagagaataaagtgccargaaacatagggttgattgagtttggataaaatgagatgacactcagacaccctggggtccctgcctcccggggaccagccagcatcctctctcacctttcttgtccgacatgctcacagccagaatctcccacgtggtgat

SEQ ID NO: 945848 - DNA, 222 bp, Homo sapiens
aagttagacaggaactaaggattcccacagttcctggtaacaacacctctgtggtaaccagggcagagaataaagtgccaagaaacatagggttgattgagtttggataaaatgagatgacactcagacaccctggggtccctgcctcccggggaccagccagcatcctctctcacctttcttgtccgacatgctsacagccagaatctcccacgtggtgat

SEQ ID NO: 945849 - DNA, 629 bp, Homo sapiens
tgacgcattctgtcctataagtctggcttcttcacaacagacttttttttttttaaatttttgttttttaagagacagttgtcacccagggtaactccttgaagcctcaactcctgggctcaagtgatccttctgtctcagcctcccgagtagctgggactacaagagcacactaccactactatttttttttttttttgagacggagtctcactctgttgcccaggctggagtgcagtggcatgatctcagctcactgcaacctccacctcccgggttcacgccattctcccacctcagcctcccaagtagctgggactacaggcacccgccaccatgcccggattttttttttgtatttttagtagagacggggtttcaccatattaaccaggatggtctcgatctcctgacctcgtgatctgcccatctcggcctcccaaagtgctgggattgcaggtgtgagccaccgcacccggcctgactactttttaaaatatttttttgtaaggctgggtgcagtggttcatgcctataatcgcagtccttygggaggccgaggcgggtggatcacctgaggtcagcagttcgagacaagcctgaccaacatggtgaaacctcatgtctac

SEQ ID NO: 945850 - DNA, 181 bp, Homo sapiens
tagtgtgtgatgcattctttcagaaaggttctgcaggagtgtawcatgatatactctaaaatatgtgctttggttagaagatggcaggttgagcacatgtttgccttttgagtcaccaaagctcactggggacaaaaaaggatagaagttgctaacccatagtgagaaggccaggataagg

SEQ ID NO: 945851 - DNA, 546 bp, Homo sapiens
actgagaagccacagggaaggagctgcctaaggccttgggaccccatcccttgcccttgcatcagtgcaccctggatgtgagacatagaatcaaaggagattattttggagctttaagatttaatgactgccctgctgccttgcatggggccttagacccttcttttggccaacttctgccttttggaatgggagtatttacccaatgcctatacccccattgtatcatggagtaactaacttgttttttattttacagggtcataggtggaaaagactagctttgtctcagatgagactttggactttggactttttagttaatgctgaaatgatttaagactttgggggactgttgagaagcgatgattgtattttgcagtttgagaaggacatgggatttgaaggtccagggtggaattrtatggttggatctgtgtccccagtgttggagatggggcctattgggaagtggttgcatcatggggttgtgatatggtttggatctgtgtctcccatcaaatctcatgttgagttgtaatcctc

SEQ ID NO: 945852 - DNA, 546 bp, Homo sapiens
actgagaagccacagggaaggagctgcctaaggccttgggaccccatcccttgcccttgcatcagtgcaccctggatgtgagacatagaatcaaaggagattattttggagctttaagatttaatgactgccctgctgccttgcatggggccttagacccttcttttggccaacttctgccttttggaatgggagtatttacccaatgcctatacccccattgtatcatggagtaactaacttgttttttattttacagggtcataggtggaaaagactagctttgtctcagatgagactttggactttggactttttagttaatgctgaaatgatttaagactttgggggactgttgagaagcgatgattgtattttgcagtttgagaaggacatgggatttgaaggtccagggtggaattatatggttggatctgtgtccccagtgttggagatggggcctrttgggaagtggttgcatcatggggttgtgatatggtttggatctgtgtctcccatcaaatctcatgttgagttgtaatcctc

SEQ ID NO: 945853 - DNA, 600 bp, Homo sapiens
aaaagtatataaaaaaaactccagagaagtttatagaaagagatgacatgtaaaccctgctgaaaaatagtttcatttgttagaatataattgtcttccactaaaaaaagaaaaaaaaaagcatttaaggctctaagtatctcttgaagtaccacttttcctgaatcccagagtttttatgtgcattatttttatgcgtttgtagtttgatatgttgtatttataagtagttttagctttccattatgaattcttctttgacccatgagttatttaggtaagtgtttaaaaatttacaatagtttatatatgcaaatattatgttgttagagttggttttcatgtcatttttacatatacaggggcagtttccccaactaaattgtatattccttaaagcagcactcttaaattttatttctgtgtcaatttcttgactgtgtttcctggcatggaatacatggcataaaatttgttatgtaattaaatgaaatattattatactttctattttttaggcatacaagaattaaattctgaataagtctgcaggtaggatggacagttwttttaaagcagctgtcagtgacttggacaaac

SEQ ID NO: 945854 - DNA, 764 bp, Homo sapiens
ggaagtaactaacttacttttgattttacaggctcataggtggaagggacttgccttgtctcagatgagactttggactgtggacttctgagttaatgatgaaatgacttaagattttgggggactgttgggaacacatgactagttttgaaatgtgaggacatgagatttgggaggtaccaggggtggaatgatacagtttggctctgtcctcacccaaatttcatcttgaattcccatgtgttgttggaggaacctggtgggaggtaattgaatcatgagggcaagtcttccccatgctattctcatgaaagtgagtaagtctcatgagatctcatagtttttaaaaaaaggctgtcccccacacaagctatctctcattttttgcctgccaccattcatgtaagacgcgacttgcttctctttgccttctgccatgattgtaagacttccccagccacatggaactataagttcaattaagcctctttcttttgtaaattgctcagtttcacatatgtctttatcagcagcatgaaaattgactaatacaccctgagagctggttattaaaagagcttggcacctcctcccgtctctcttgcttcctctcttgctatgtgatctctgtamccactaggtttcctttgccttcgaccatgaacaaaagcagcctgaggttctcatcagaagccaagaagtttctggtgctgtgcttcttgtacagcctgcctaaccatgaggtgaatagatttattttcttt

SEQ ID NO: 945855 - DNA, 764 bp, Homo sapiens
ggaagtaactaacttacttttgattttacaggctcataggtggaagggacttgccttgtctcagatgagactttggactgtggacttctgagttaatgatgaaatgacttaagattttgggggactgttgggaacacatgactagttttgaaatgtgaggacatgagatttgggaggtaccaggggtggaatgatacagtttggctctgtcctcacccaaatttcatcttgaattcccatgtgttgttggaggaacctggtgggaggtaattgaatcatgagggcaagtcttccccatgctattctcatgaaagtgagtaagtctcatgagatctcatagtttttaaaaaaaggctgtcccccacacaagctatctctcattttttgcctgccaccattcatgtaagacgcgacttgcttctctttgccttctgccatgattgtaagacttccccagccacatggaactataagttcaattaagcctctttcttttgtaaattgctcagtttcacatatgtctttatcagcagcatgaaaattgactaatacaccctgagagctggttattaaaagagcttggcacctcctcccgtctctcttgcttcctctcttgctatgtgatctctgtaaccactaggttycctttgccttcgaccatgaacaaaagcagcctgaggttctcatcagaagccaagaagtttctggtgctgtgcttcttgtacagcctgcctaaccatgaggtgaatagatttattttcttt

SEQ ID NO: 945856 - DNA, 605 bp, Homo sapiens
tccagctgtgagctcatgaaactagagaagttatatgcttccaaaatacagtgagaggaagtttcttgtttcaggtccagcatgtaaggagcttggaagtcgtcactctgccataacaaaataaaaagctatacaaactgaagaatgaacaactcttctttgatctttcacagaggtgaggtcacaagacaaaatacttcccccaaaattggaggggtagacaggcaaatacagagaatcacaacttactggaacagaaatctataagaagaaaactccatgaaaaaaaatgcctgagtaaaaaagcctaaatagtagttgatgagttgctggaagctcagtgtggacaaatctgtgaattaaaaatttcaggggccatttactgaaaagtgaccctcacttttgtgaattttacctccagaaactcaactaggttcttaaaatgaatattggagaaaaattcccttgtgtttgcagcagaaaaagtggaaactaaccgttttgaaatatgccagaacacttttaatagtatttcaagataaactattttatcatgmactatagaacaaattgacctaatagatattgacagaacatttcatcca

SEQ ID NO: 945857 - DNA, 555 bp, Homo sapiens
tcacctattcatccctcccctgaactcctggcaatccctgacctttttattgtcactacagttttgcctttttcaggatgtcatatagttaaattaataatatgtagccttcgtggattggcttcttttacttagcaatatgcattcaagattccttcatgtctctctgtggcttgatagctcatttctttttaatgctatataatacttcattaaatggccaatatcacagtttgttcacctattcaactattgagggatgtttttgttgctgccagcttttggcacctataaataaagccgctataaactttggcatgcaggtttttgtgtgaacataagttctgaactcatttgggtaaatacctaggagtatgactgctggattatatggtaggagtatgtttatctctataagaaaccatcggctgggtgcagtggctcacgcctataatcccagcactttgggaggctgaggcaggyggatcacctgaggtcaggagttcgagatcagcctggccaacatggtgaaaccccatctctactaaaaataca

SEQ ID NO: 945858 - DNA, 693 bp, Homo sapiens
aattcctctcctctcagacggtcctgagaatccagtgggagttttctctgtgctccagaacatagtggcctcttgcattcattccctaccagaaataatgtctcgttcaccagctaytttctcagccaataatttttgtccacccccattcctccttcagaaacttgcccttcccagagccctaggagatccagaaccccataggattcttttggctctggccatggctgtgtaccaaggggttggatatgggattacagccaggccatgtggactctctcccagaaatttggagttgaaaatctctgagcttatctctggaaggtgcttgaaactagagggggatagaaagttggtgacaatatagtcatgtttggcctgtggacaattgcaatagaaaaaactgatatgcagggtgatatggtttggctgtgtccccacctaaatctcaaattgtagctcccataatttccacatgtcatcggagggacatggtgggaggtaattgaatcgtggggcgggtttttcccatgctgttcttgtgatagtgaataggtctcacgagatctgatggctttaaaaaggggagttcccctgcacacactctcttgcctgccaccatgtaagacgtgactttgctcctcattcgtcttctgccacaattgtgagatctccaaagccatgtggaactgg

SEQ ID NO: 945859 - DNA, 718 bp, Homo sapiens
agtcgctaaaaaggacttcaactgcctgcctttggggagagggatttgatgggagaagggctggggtaagacagctttgttttccatttcaagtcatttgtatcatttgcttgtactgctttgataaagagaaatctgaaattctagaaaaaattagaagtgaaaaaaaattcctttatagccatgagcagaaccgttaacaatagcagccgggtatggtggctcacgcctgtaatctcagcactttgggaggccgaggtgggtggatcacctgaggtcaggagttcaaggccagcctggccaacatggcaaaaccccgtctctactaaaaatacaaaaattgccaggcgtggtggtgggtgcctgtaatgccagctactcaggagactgagtatggagaaacacttgaatccaggaggcggaggttgcagtgagccgagagcgctccattgtactccagcctgggtgacaggagtgaaactctatctctaaacaaacaaacaaaaagcaatagcaatagcaatagtaatgacactaacttatattgatgtgctagattttatccatgtcacctcattcacctttagttctcactacaaccttgggtgacaaacttgtgttkgctttagcacttactggatttgacactgagcgttccctatacctggaaccacttcggtcctagataaaccaaagaggatggctggtcaccctacta

SEQ ID NO: 945860 - DNA, 613 bp, Homo sapiens
tgtggttgtttgtgttcttattcttgagttttaatawtttttttaatatatcctagatacaagttatttgttggatatgtgacagaaaatatttatttggtatgtataaatattttgttctcgtttttagcttatgttttcattctatgaatagtgtttttcacaaaataaaaattttaattttgataaagcccactttatctttgcttttcttttatggatcatgcttttagtttcatgcctaaaaactctttagatcctgaagattttctcctggttttttctaaaagttttatactttcatgtattacatttaagtctatgatccatcttgagactatagaaggagctcaacaaatgttaatagtttctcccaacccctctgaactattataagacctgaaaagaagtagagctatggattccacttttattggatgctgtgtttgtgatttatacttctgttggaggagtagaaacctcagtagtcagagaagagaatcaggtcaatcagtgaatttcaaccatattaatgagagcccaatagagattgcaataaaatgtttaaaaatctactatacccatggacattttaaaaagggaagattaataa

SEQ ID NO: 945861 - DNA, 721 bp, Homo sapiens
ggcgcccctcccccagcccactgccwccttgcagtttgatctcaaactgctgtgccagcaatgagcgaggctccgtgggcatgggaccctcccagccaggtgcgggatataatctccttgtgtgccgtttgttaagcccattggaaaagcacagtattagggtgggagtgacccgattttccaggtgctgtctgtcacccctttctttgaccaggaaagggagttccctgaccccttgcacttcccaggtgaggcaatgcctcacccttcttcggctcacgcactgtgcgctgcatccactgtcctgcacccactgtccagcactccccagtgagatgaacctggtacctcagttggaaatgcagaaatcacccgtcttctgagttgctcatgctgggagctgtagactggagctgttcctattcggccatcttggctccaacctcctgaaccttttttattctagtgaggtgactgatcctttgtttgggttttccagcatggtttcctgttatgagttgtcctgaaatccccacaggagcatggaaggacatcctaggctgtcctaggtaaggtaatggtaggtagataccaggtaagaggggctagagttgtccttgggtctgctctagttgggatttctgaaagatggaggcagggtgatagggatattgctgatcttaaatcaggaatgtggaatttaggcagggatgtagactca

SEQ ID NO: 945862 - DNA, 550 bp, Homo sapiens
tattcacatgcaaggtatgttacaaagaggcatctagacatacattttgggttttttgttttgttttttgagacagggtcttgctcttttgcccagtckggagtacagtgataagatcacagctcactacagccttgacctcccaggctcaagagatcctcccacttcagcctccccagtagctggtactacaagcatgtgccactatgcctgctaatttttttaaaatgtttgtagagctggtgtctctctatgttgcccaggctggtctcaaattcctggtctcaagcaatcctgctggcctcccaaagtgttgggattacaggcaagagccacagagcctgacatagacatacaaatatatacattttgtatacatttatagctaattaattttaggaagtactggcatccttttcactcaaccagaagccagtgataacatagtaacgtcttaatacattaaggaataacaagccaggcgcataattccagcacctctggaggtcgaggtgggcaaatctcctgaggtcaggagttcgagatcagc

SEQ ID NO: 945863 - DNA, 542 bp, Homo sapiens
gagaggacatcgaggggagcacgctggtggaagagcacaccaacagatgctgccacctggcaggccgtccagcagaggaatgacgcggagtttggtcgtggcagtcataggagagcccgggctgctgagcggctggactccagggggaaaccatctcccttctggctcccccatctgctgatagctacttccactcagtaaaaccttgtactcattctccaagcccaggtgtgattcaattcttccctcacgccaaggcaagaacccgggatacagaaagccctcgtccttgtgataaggtggagggtctaattgagctggttaacacaagctgcctatagacggcaaaactgaaagagcccatggtagcacatgcccactggggctttgggagctgtaaacatccacccctagatgctgccgtgggatcgacccccacaacctgcatgctcccctagaggtacgagcagcagggcactgaagaagcgagccacttctccagttgcacacctygcaagggggacaagggaacctttctcatt

SEQ ID NO: 945864 - DNA, 650 bp, Homo sapiens
cctgggtcagtgtgggacccagcgtgagcccccgctctggagcagtggggtcacacagactccagggagctccctgcaccagtctcagggcctgcaggggttgaggggctcccctggggctgggatcacaggrgtgtgtggtgagaatgtggacccctggggatctctcaccctttcccgacacaggggagcctctccaggctcccgaccaagacccatcctgtctgggctgtcgtctccctctccttcattgcgcgggtgccgcccagccctcccctgtcgagttcccgtggtctccgttagatgttctccgtgcgatgactgactcctgttttggttctcctgtgtggaggagtctgacatcctgtgcctccagccagccaccctgagccttcctcctgaaaacaggtttttgtttgtttgtttgtttggtttttgagatggagtctcgctgtgtcacccaggctgaagtgcagtggcacaatcttggctcactgcaacctccgcctcctgggttcaagtgattctcctgcctcagcctcctgagtagctgggactataggcgcatgccaccacacctggctaatttttttgtagtttaggtagagacgggatttcaccatgttagccaggatggtctcgatctcctg

SEQ ID NO: 945865 - DNA, 757 bp, Homo sapiens
gtaattacaggtccggcaccaccatgcccrggtaatttttgtatctttagtagagacagggtttcaccatgttggccaggctggtctcaaactcctgacctcaggagatccgcccacctcggcctcccaaagtgctgggattacaggcatgagccactgcacttggcctgtgatattcttaactccaaactaacaacctcgctctaaccattggagaacactagaaaaatccgaatcaaggaccattcaatacatgcctgatgaatactcttcaaatctgtcaatatcgtgaaagacaagaaacctgtcagcatttgcaggagatgcaggagaagtgatgactgatacgagctgaattttgtctcccaacaacttcatacattgaagtcctaacccccagtacctcaaaatgtacttgtatttggaaatagggtctttgtagagatgactaagttaaaatgaggtcatgagagtggattctaacccaatatgactggtgtcctttttttttttttttttttttgagacagggtcttgctctggcgaccagactagagtacggtggcacaatctcagctcgctgcaacctccacctccagagttcaagcgattttcctacctcagcctcccgagtagctgggattgcaggcatgcaccaccatgcccagctaatttttgcattttttagtacatgttgatctcaatctcctgacctcaagtgatcctgccgcctcggcctcccaaagtactgggatta

SEQ ID NO: 945866 - DNA, 589 bp, Homo sapiens
tctttttttttttttgtatatatatttattgtactttacgttctagggtacatgtgcayaacatgcaggtttgttacatatgtatacatgtgccgtgttggtgtgctgcacccattaactggtcatttacattaggtatatctcctaatgtcaagcgattctcttgcctcagcctcctgattagctgggattacaggcacctaccaccacacctggctaatttttgtaattttagtagagacggggtttcaccatgttggccaggctggtctagaactcctgacctcagatgatcggcctgcctcagcctcccaagttgttgagccaccgcgcccggcctattttggagatttttttcatatcaatacttaaaaagcttcttcattttgtttttacaactgcctacattttcacggcatgaacacatcatcatttaaccagttttctattgatggccacttaggttgtttctaatctttaattattacaagcaacactgcagtgaataaccttatacatgaggggtcagcaaactgtttctgtaaagggctaggtagcaaatattttaggcattgcaggccatttggtc

SEQ ID NO: 945867 - DNA, 631 bp, Homo sapiens
agaggtgctccccacctcccagatggggcggctgggcagaggcgctccccacctcccagacgaagggcggccgggcagaggcgctcctcacttcccaggcagggtgtccgggcagaggcgcccctcacctcccagactgggcggccaggcagaggcgctcctcacctcccagaccgggcagccaggcagaggcgctcctcacttcctgccagacgggggtgtccgggcagaggtgctcctcacttcccagatggggcagccgggcagaggcgctcctcacttcccattcagggcaaccaggcagaggcgctcctcactgcctcccagaggggcggccgggcagaggctctcctcacttcccagacggggcggccaggcagaggcgctcctcacatcccagacgatgggtggtcaggcagagatgttcctcacttcctagacagggtggcggcagggcagaggtgctccttgcttcccagatgggggcggccaggcagaggcgctcctcacttcccatttggggcagccgggcagaggcgctcctcacttcctcccagatagggcagccgggaagaggcactcttcacttcccagagsgggcggccaggcagaggcactcctcacttcccat

SEQ ID NO: 945868 - DNA, 436 bp, Homo sapiens
atggtatatgtttgatctttgtttaycatgagaagctccctgtagattcagacattagactgtcctgtggcatacataatagtctgagctccctgcttagcccctgagtggggactaagggccagatcagcaggcctgcctacaccatcactcaatggcaggcataatcaccaggtccaaggtgggattcagggtacagccatcaagcacccagggatgtactggggagtagagtgtacagacctccactgttccaagttctgtgcctaggacaggtggcctaaactcctaatcaaaaagagtgggtgctccagtcatatgcctgcagatataactgggcatgtagtgtagagggtgccagtgcaccaagatgggtggtgagagggaaagggggtgactcaggcttctactccaggtgagcaggtgcactgattgc

SEQ ID NO: 945869 - DNA, 704 bp, Homo sapiens
gatcgccttggaagccccatagaccatcacggacgccaagctttaagtaactctcacagtggagggtaagtccgtccccttcttaatcaatatggaggctactcactccacattaccttcttttcaagggcctgtttcccttgcctccataactgttgtgggttttgacagccaggcttctaaacctcttaaaactccccaactctggtgccaactaagacagtactcttttaagcactcctttttagttatccccacctgcccagttctcttattaggctgagacactttaactaaattatctgcttccctgactattcctaggctacagccgcacctcattgccatcttttcccccagttcaaagcctccttcacatcctccccttgtatctccccaccttaacccacaagtataagacacctctactccctccttagcgaccgatcatgcaccccttaccatcctattaaaacctaatcactcttaccccactcaatgccaatatcccatcctacagcaggctttaaaaggattaaagcctgttatcactcacctgctacagcataggcttctaaaacctataaactctccttacaattcccgcattttacctgtcctaaaactagacaagacttasaggttagttcaggatctgcgccttatcaaccaaattgttttgcctatccaccccgtggtgccaa

SEQ ID NO: 945870 - DNA, 251 bp, Homo sapiens
cttgccagaacaagtttatttttattctgggaacgtttagagtttctacatcaggctgtggcaaaatacgctttatttttttgaacttgagatsagggcaaaaccatatgcaaatgacaaaacccacatccttgaatgatcagaatacacgtagcatttaggtaggagctactggagttctttaagaggctgaaaaattaggtacttgggattttgttgtgtcagggaggagggtcaggatagagggtggg

SEQ ID NO: 945871 - DNA, 220 bp, Homo sapiens
gaacaagtttatttttattctgggaacgtttagagtttctacatcaggctgtggcaaaatacgctttatttttttgaacttgagatcagggcaaaaccatatgcaaatgacaaaacccacatccttgaatgatcagaatacacgtagcatttaggtaggagctactggagttctttaaraggctgaaaaattaggtacttgggattttgttgtgtcaggg

SEQ ID NO: 945872 - DNA, 567 bp, Homo sapiens
tttataaattacccagcctccagtaggatcttcatagcagtgtgaaaatgggctcaaacagtaaattggtayaaatagagtggggtactgctataaagatactaaaagatgtggaagttactttagaatgagtaacagacagaggttggaagagttgggagggctcagaagaagacaggaatatggagaaagtttggagcttcctagagacttgttaatggttttcaccaaaatgctgatagtgatgtgaacaatgaagtccaggctgaggtggtctcagatgaagatgagaaacttgttgggaactggtataaaggtaactcatgctatgctttagcaaagagactggtggcattttgcccctgccctagagatctgtggaactttgaacttgagagagatgatttagggtatctggtggaagacatttctaagcagcaaagcattcaagacatgacctggattattctgaaatcattcagtattatgcattcacaaagagatggtttgaaattggaacttatgtttaaaacagaagcacagcaaacaagtttggaaaatttgtag

SEQ ID NO: 945873 - DNA, 567 bp, Homo sapiens
tttataaattacccagcctccagtaggatcttcatagcagtgtgaaaatgggctcaaacagtaaattggtacaaatagagtggggtactgctataaagatactaaaagatgtggaagttacttyagaatgagtaacagacagaggttggaagagttgggagggctcagaagaagacaggaatatggagaaagtttggagcttcctagagacttgttaatggttttcaccaaaatgctgatagtgatgtgaacaatgaagtccaggctgaggtggtctcagatgaagatgagaaacttgttgggaactggtataaaggtaactcatgctatgctttagcaaagagactggtggcattttgcccctgccctagagatctgtggaactttgaacttgagagagatgatttagggtatctggtggaagacatttctaagcagcaaagcattcaagacatgacctggattattctgaaatcattcagtattatgcattcacaaagagatggtttgaaattggaacttatgtttaaaacagaagcacagcaaacaagtttggaaaatttgtag

SEQ ID NO: 945874 - DNA, 469 bp, Homo sapiens
ggttaaggatttttgataggaagtcctcagtgctttcgggaatacgcccttgtttacactgacaacmaagtggtattagagtgttacagggttacggagaatacctttaattatcaattataggttttaaatttaccttggcttttaaaggaatagggtacactgtttttttttccttaacttctggtatatttctctctttctctctttctttctctctttgactttctgtctctctctttttgactttgcttttgcctctgtctctttctgcctctctgcctctctctttctctctctctctctctctccttgactccctctttgtctctctgtctcttcctctctctctctttgcccctttttctctctctttcctcctctgtctctctctgctggtctttccttgtctctgccagccacttatgctgctgttctctcaaccactggtgaggggggtgtggggtct

SEQ ID NO: 945875 - DNA, 757 bp, Homo sapiens
ttaagtacatggaacatgggcaaattgaaccaagttagctattattctgagatggtgggaggttgaaaaatgagggtcaagaagggaggcactggtaccagatggtcagaaagatgsgcagagtgtgtaaaatggataagaaaggaagtagatccagaagggagaatgaggtaggtaatggctggggtgaaaatgtagggccaaaagtctggaggtaccataaggtcagaagcaagttggaataatggaactgaacactgcagataaagtcaatcttgaattttgaactttcagtctgggcaccgtggctcatgtctgtaatctcagcattttggaaggccaaggtgggaggattgcttgagcttaggagttcaagaccagcctgggcaacatagcaagatcctgtctctactaaaaataagaaaaaattagttgggtattgtggtgtgcacctgtagtcctagctactcgggaggtttcggtgggaggatcacttgtgcccaggagattgaggctgcagtgagctatgatgacaccactgcgctccagcctgggcaacagagtgagaccctgtctcagaaaaaaaaaaaaagaagtttggactttcagaggagaccagatttggttgggagggaatgccgagacaacaaacagatggagttgagttggtagaaatcaaggagctccaggaacttcatagctgcctgttggatggattgtctagatgagctctgggttttcccagattgatgacacc

SEQ ID NO: 945876 - DNA, 495 bp, Homo sapiens
agtttttgaagaagacaacaaatagttgaggctatgaattctatctctgtaaaaatagagttatgttttcctcctgtagtcagatctcctgtggaacgtgagtaaacaggaatttctatgtatggagcaaggacagtatggttagcacataatacatgtgtttatttcagagctggggaggactcctgaccagcgtgacacctaacattggagtgaaggggcagcaggtgaggagaaagttaaccctgcaccagtcctaactctagttttctcagcagcatttctgttgcttgaagaaggtcctcctcgtgtcagcttttttggtcttttcttaggttgaaaagactggaataataaaatggggctttgctctgaaatgagtaaggtggatgatatggtttggctctgtgtccccacccaattcttatcttgtagctcccataattcccctgtgttgtgggaggraccctgtgggagataattgaatcatggggg

SEQ ID NO: 945877 - DNA, 468 bp, Homo sapiens
gttaaggatttttgataggaagtcctcagtgctttcgggaatacgcccttgtttacactgacaacmaagtggtattagagtgttacagggttacggagaatacctttaattatcaattataggttttaaatttaccttggcttttaaaggaatagggtacactgtttttttttccttaacttctggtatatttctctctttctctctttctttctctctttgactttctgtctctctctttttgactttgcttttgcctctgtctctttctgcctctctgcctctctctttctctctctctctctctctccttgactccctctttgtctctctgtctcttcctctctctctctttgcccctttttctctctctttcctcctctgtctctctctgctggtctttccttgtctctgccagccacttatgctgctgttctctcaaccactggtgaggggggtgtggggtct

SEQ ID NO: 945878 - DNA, 709 bp, Homo sapiens
ccgacaaaattaaatggagtcactcatgctacatgtgacataatccaagactttaaggaaacacgtaaatcctagagcagaccagactttgttattctcctgtatacaggccgttccaacataaggaggcaccctctactcaggccttgttccctccttgcaaaacccattgttctactgttcaccaaagggtttcaagaccatataagtacatttgcaaaatgatagtaacatcaatgactaaagttttggtcaatctcttaaaatagagaaaatgaccaaaaagggggaattgctaatgcaaactaaatatggcctaagaaggactctatacttctatatttgagtccctatggatgaactgtaacctagcttaatagtcagacaagattgaaaacctaacttaggagtacacacctgtaacaataactgagtgttggccaatcccagtggccatacttcaaccactcatagatggctaagtgttcaaactatgttcaaataaggcaaatgtcaacctgtaaccaatcaagctgtttctgtacctcactgctgatttctgtacatcatttccttttttttttttttttttgtctgcaaaycttcttccaccacatggctgcactggagtctctgtgaatctgctgtgattctgggggctgcccaatttgggaatcattcattgttcaattaaattcctttaaattta

SEQ ID NO: 945879 - DNA, 589 bp, Homo sapiens
atgttcttgccgttgcttgagctactgctttttcaagggaaaccacaaagacaggactaattcagaagtaactaaaatttatacattgatatcattgtgtgtgttaatsctcaataaccatgaagtaagtttccttattatcccagttctaccgatgaagaattaaagtctcagaaaaggtaaaagaaatgtttttaagtcacacaccattgaaacagtctttgtaaaaattctaacaatgagaaaattatgacagtgaaagagatctgacccaaccaactccaacttgcctttaacctccaaacagcccttgttaattcctgagcttagtttgagctaactggagggggaatttagtttacagtttgactttgaaacaaagatgatgacagcactttcccgaaacaacccccactccttgcctgggaaccagaccacatttggagagctaaccaattggccacaatattagaaattagggtttaggagtcatgcacacagaggccacaagtttccttaccttctcaaatgctcctatagataacatcactattgtaaaacctaagattgggctcaagacatttttcag

SEQ ID NO: 945880 - DNA, 598 bp, Homo sapiens
ggctgaagaggtggagcaatgatgggatttggcttaactggaggggtaaggaaatagaagggcttctgaattgcttcctcatcaaaactttagggtagtaagcaacctctgaatgtcaggagaaagtgaaggagatattctgaaacttattcaagaagacttttatttcgtctgtggaggtgctgccacatgtggtaatgtcagcggtagcagacatctaagttacactgagttactggtggcatatcaatataggtctgcagcaacttcagttcttgccttctcagaagaaagaattcaactggggtacataaggcagaaggagagactgaggcatgtttcagagcgggagtgaacgtttattaaaaagctttagaacaataaggaaaggaaagaaaagaaaagaaggaaagtacaactgggaagaggaccaaggggttgacttgagaaaccaagtgcacagcttgacctcttgacatggggttttataggttgacatacttccggggtcttgccttacttctctccactcctgaggtcttaytgggaagctgctgatcagtttcaggtgttttctatcttttaggagacggctttt

SEQ ID NO: 945881 - DNA, 704 bp, Homo sapiens
  misc_feature 1, 2, 3, 4, 5, 6, 7, 8, 9, 10, 11: n = A,T,C or G
nnnnnnnnnnnattttggccaggctggtctgaccrcaagtgatccttccacctcggcctcccaaacttctgggatgacaggcgtgagccactgtgcccagccaacagctttcacattacaaaagcccaagcagaagctggcaagctgccaacaagctgcactaattcatcaataaatatttactgagtttcttactgcatttgcaaattccaaagcagaagttggacagacacctaaaagcccgccctgtccctcaccagaaggggacaaaaggaagctgagcaggacaggggccacttaagtcccctaaagaaggggattgcataccccagcacctcagacagtatccagtgcacagcacatgttccttatggtttgacttgtgacgagtccccggccaagtttccttgtttcatttttttgagacagagactctctctgtcacccaggctagagagcagtggtgcgatctcagcccactgcaacctccgcctcccaggttcaagtgattctcttgcctcagcttcctgagtagcttggactacaggcacctgccaccactccctgctaatttttgtatttttagtagagatggggtctcaccatgttggccaggctggtctcgaactcctgaccataggttatcctcctgcctcagcctcccaaagtgctgggattacaggcgtgagtcactgcacccagcc

SEQ ID NO: 945882 - DNA, 593 bp, Homo sapiens
gaaacataatttgtttatccacttaactactaaaagatgtttgggttgtttccaatcttttgctattaaaaaggatgctataataaataatcttttccaggactcattcagcatgtacactggtctatctgatggctttactccccaaagaagaactggtgggtcaaaaggtacatgtattttgattaacattgacaatttgccatctgcagaagttgtcctaacctacactcccaccagaattataagtaagaaagctatttcccagaccagtgtctcatgcctgtaatcccagaactttgggaggccaaggctggtgaattgattcaacccaggagtttgagaccagcctgggcgtcatcgcgaaatcccatctctacaaaaaatacaaaaattatctgggcgtggtgatgtgtgcctgttgtcctagctactcagaaggctgacgtgggaggatcacctgagcctggggaggtcraggctacagtgagccgtgagtgatggcaccattgcactctaggcttggtgagagagtgagactttgtctcaaaaaacaaaacaaaacaaagaaagcaagctattttcccagaaag

SEQ ID NO: 945883 - DNA, 623 bp, Homo sapiens
atacagtcctaaatataacacatttatttacaatcaagtggattccacaaaaccaagagcaccctttccattgccatgccaggcataatacrcatccctgctaacttgcgggggttctggcagctcttcattttctagtctgatgctttttctggaacttaccattgaaggcaactccttaattctctttccttttaggtgaaatgactcagggcaaggctgctcactctgttctgagcagttctgggaagaaaggaggaaaaaccccaactctgacatctgccttgatttcctggaagccatgcctccccagtgtacttagaagtaccaggtgctgagagccagtccccatgcaggctttgccaaagagaaactcggcaggccgggcaagtccctgaacttccttgagctctggtttctcatttgtaaaatgaaaatattatgggcttatcatcaggaagctggggaagtgaagaagaggcaaccttctgggaaattgagaaactggtctcactgccctcaaggtaagggcagcccatgcccctcactggggacacctggtccctccctactgaacccacagtcctgtctcccaaccctccccatcttcctccaggccatta

SEQ ID NO: 945884 - DNA, 504 bp, Homo sapiens
aagatgattagtttttgaagaagacaacaaatagttgaggctatgaattctatctctgtaaaaatagagttatgttttcctcctgtagtcagatctcctgtggaacgtgagtaaacaggaatttctatgtatggagcaaggacagtatggttagcacataatacatgtgtttatttcagagctggggaggactcctgaccagcgtgacacctaacattggagtgaaggggcagcaggtgaggagaaagttaaccctgcaccagtcctaactctagttttctcagcagcatttctgttgcttgaagaaggtcctcctcgtgtcagcttttttggtcttttcttaggttgaaaagactggaataataaaatggggctttgctctgaaatgagtaaggtggatgatatggtttggctctgtgtccccacccaattcttatcttgtagctcccataattcccctgtgttgtgggaggraccctgtgggagataattgaatcatggggg

SEQ ID NO: 945885 - DNA, 548 bp, Homo sapiens
gaggctgaagcaggtggatcacaaggtgaggagatcgagaccagtctggccaacatgatgaaacaccatctctattaaagatacaaaaaattagctgggcrtggtggcatgcacctgtaattccagctactagggaggctgaagtaggagaatcacttgaaccggggaagcagaggtgagctgagatcgtgccattgcactccagcctggatgactgggcaagacttcgtctcaaaaaaaaaaaagaatagcagcatttaacattaatgttcacttcttacataccaggtactatactaattccttccaagctaccattttatttaatcctcaatataatactttgagttgcaaaaattatccccatttgcaaatgaggtaaagtaacagctaatatgtagagacagactacaatctcaagtctgacaaaaatcaaatcctattataatctctatgctttatagtcttgacataaaatatacaactacttgattagaatgcttgcttaaaaacatatttttaaagtataatttcacaacactatatac

SEQ ID NO: 945886 - DNA, 615 bp, Homo sapiens
ctgaatttctccccagaaaatgggtttttcttttctatcacagagcctgcaaattttccaaatttttrtgctctgcttcccttataaaactgaatgccttgaacaacacccaagtcacctcttgaatgctttgcttcttagaaatttcttccaccagatagcctaaatcatctctttcaagttcaaagttgcactaatctctagggcaggggcaaaatgccaccagtctctttactaaaacataacaagagtcacctttgctccagttcccaacaagttcctcatctccatctgagaccacctcagcttggattttattgtccatatcactatcagcatttcgggcaaagccattcaacaattctctaggaagttcctaactttcccacattttcctgtcttcttctgagccctccaacctgttccaatctctgcctgttacccacttccaaggttgcttccacacttccggatatcttttcagccacgccccactcctagtaccaatttactgtattagtctgttttcatgctgctgataaagacatactagagactgggaagaaaaagaggtttaattagacttatagttccacatggtgggaggtaaaaggc

SEQ ID NO: 945887 - DNA, 582 bp, Homo sapiens
tgaggaggtccaacatgcctctattaggtgttttagagagaaaagaaaaaatggggaggaagcagtacttcaaaatattatgggtgaaaagtccccaaagttaaatcttaaaactaaagaatcattcctactccaatataaggtaaataaaagaaatacggtcaggcacggtggctcacgcttgtaatcccagcactttgggaggccaaggtgggcggatcatgagatcaggagattgagaccatcctggttaacacggtgaaaacccgtctctactaaaaatacaaaaaattagcccagcatggtggcaggtgcctgtagtcccagctactcaggaaggtgaggcagagaattgcttgaaccctggaggaggaggctgcagtgagccgagatcgcaccactgcactccaacagagtgagactttgtctaaaaaaaaaaaaaaaaaaaaaakaagtggatgcaagaagcaactgtgggcaacaatagcagagaagagaaaataccagagagcatctcaggcaataaaaggtatcatgaaacttgttttggttttatacatttgttgcctacatatttacatt

SEQ ID NO: 945888 - DNA, 582 bp, Homo sapiens
tgaggaggtccaacatgcctctattaggtgttttagagagaaaagaaaaaatggggaggaagcagtacttcaaaatattatgggtgaaaagtccccaaagttaaatcttaaaactaaagaatcattcctactccaatataaggtaaataaaagaaatacggtcaggcacggtggctcacgcttgtaatcccagcactttgggaggccaaggtgggcggatcatgagatcaggagattgagaccatcctggttaacacggtgaaaacccgtctctactaaaaatacaaaaaattagcccagcatggtggcaggtgcctgtagtcccagctactcaggaaggtgaggcagagaattgcttgaaccctggaggaggaggctgcagtgagccgagatcgcaccactgcactccaacagagtgagactttgtctaaaaaaaaaaaaaaaaaaaaaagaagtggatgcaagaagcaactgtgggcaacaatagcagagaagagaaaataycagagagcatctcaggcaataaaaggtatcatgaaacttgttttggttttatacatttgttgcctacatatttacatt

SEQ ID NO: 945889 - DNA, 653 bp, Homo sapiens
aacagatatacatactgttatagttttggaggctaaaagtctaaaattaagcagtcagcaggggcacgcttcctctgaagrctctaagggagggtcctccttggctctgcctaccttctggtgttgccagcaatccttagtgtctcttgccttgtagatgtgtgactctaatgttcaccttcctcatcacttggtgctctcccagtgcatctgtgtccaaatttccctcttcttataaggacaccagtcattagattagggcccaccctattccagtataccctcatcttaagttgttttcattggcaaaggccctgtttttaagtaaagtcacgtttacacgtactgagtgttaggacttggacacatttctgcaggggacacaactcaacccagtacactgtccatgttatatatataaaaaaataaaaggttgtcagagttttaaaacacagttgaaagtcctttggtactcctctcttagagagtgggatcttgccccctccccatgaatctgggtgggcttcctactgcttggaccaatgtagtaagagaagtgacactatatgtcttccaagcctaaggctacccaacctctaccttattcactaggtagaacactcactcttagagccttgagccaccatataaga

SEQ ID NO: 945890 - DNA, 453 bp, Homo sapiens
taaccatgacacttcttccgtggcgcccatcttcattctcttgaacattgatactggaagattcccagggtggtcctaggccttctctcattctgtcttgtcgatccccaccccagtcttattaatgcccttagatcagttatggaccatttacaaatgattgcagagtttattgtcctaaccatgatctctcctaaagtccagacctacacctggctacatgacttctgcgcagtcagatgtctaaaaccaaattaaagatcttccctaaaccttctcctaacatgttccctgctcattaaatggcagaaccagaacccaggagtcacccttgacacctcctcctctcacctcgtcagattcagwccatccttaggtgctggcagtttgacctgttatcacacccctagccaggtgcccattgtctctcatttccactaacttagtggcctc

SEQ ID NO: 945891 - DNA, 619 bp, Homo sapiens
ggtaatggcctggaggaagatggggagggttgggagacaggactgtgggttcagtagggagggaccaggtgtccccagtgaggggcatgggctgcccttaccttgagggcagtgagaccagtttctcaatttcccagaaggttgcctcttcttcacttccccagcttcctgatgatagcccataatattttcattttacaaatgagaaaccagagctcaaggaagttcagggacttgcccggcctgccgagtttctctttggcaaagcctgcatggggactggctctcagcacctggtacttctaagtacactggggaggcatggcttccaggaaatcaaggcagatgtcagagttggggtttttcctcctttcttcccagaactgctcagaacagagtgagcagccttgccctgagtcatttcacctaaaaggaaagagaattaaggagttgccttcaatggtaagttccagaaaaagcatcagactagaaaatgaagagctgccagaacccccgcaagttagcagggatgygtattatgcctggcatggcaatggaaagggtgctcttggttttgtggaatccacttgattgtaaataaatgtgttatatttaggac

SEQ ID NO: 945892 - DNA, 597 bp, Homo sapiens
gacatctatgcttggtgaaccctagtcagcctctccacacttccttgtttcaataaatggccccaatattcacctagtttttcagactcaaggcataggagatatttttactcttttctttacaccacacctccaactcatcagaaacttccatttattccaccttcaaaatttatttcaaacttcaccactgtttaccactttcactgctgctatctataccaaagaaaccatctttgttcacctaaatccctgcggtaggcttgcacctggactccctgattccttttatactcttaagtggtcaggtctccagatagcaactagaatgatctgcctaaaacataaatcagataatgcctcacccctgcctcaaagtcctacataacactttggattttggttgttgtttttgttttgttttttgagatagggtcttgctctgtcacacaggatggagtacagtagcataatcacagcttactgcascctcgacctcctggctcaagcagtcctcctgcctcagcaacctgagtagctgggactacaagtgtgcaacgtcaagccaggctaattttttatttttcgtagacatgg

SEQ ID NO: 945893 - DNA, 759 bp, Homo sapiens
ttaagtacatggaacatgggcaaattgaaccaagttagctattattctgagatggtgggaggttgaaaaatgagggtcaagaagggaggcactggtaccagatggtcagaaagatgsgcagagtgtgtaaaatggataagaaaggaagtagatccagaagggagaatgaggtaggtaatggctggggtgaaaatgtagggccaaaagtctggaggtaccataaggtcagaagcaagttggaataatggaactgaacactgcagataaagtcaatcttgaattttgaactttcagtctgggcaccgtggctcatgtctgtaatctcagcattttggaaggccaaggtgggaggattgcttgagcttaggagttcaagaccagcctgggcaacatagcaagatcctgtctctactaaaaataagaaaaaattagttgggtattgtggtgtgcacctgtagtcctagctactcgggaggtttcggtgggaggatcacttgtgcccaggagattgaggctgcagtgagctatgatgacaccactgcgctccagcctgggcaacagagtgagaccctgtctcagaaaaaaaaaaaaagaagtttggactttcagaggagaccagatttggttgggagggaatgccgagacaacaaacagatggagttgagttggtagaaatcaaggagctccaggaacttcatagctgcctgttggatggattgtctagatgagctctgggttttcccagattgatgacaccac

SEQ ID NO: 945894 - DNA, 212 bp, Homo sapiens
caacaaaatcccaagtacctaatttttcagcctyttaaagaactccagtagctcctacctaaatgctacgtgtattctgatcattcaaggatgtgagttttgtcatttgcatatggttttgccctgatctcaagttcaaaaaaataaagcgtattttgccgcagcctgatgtagaaactctaaacgttcccagaataaaaataaacttgttc

SEQ ID NO: 945895 - DNA, 234 bp, Homo sapiens
ctcctccctgacacaacaaaatcccaagtacctaatttttcagcctcttaaagaactccagtagctcctacctaaatgctacgtgtattctgatcattcaaggatgtgagttttgtcatttgcatatggttttgccctsatctcaagttcaaaaaaataaagcgtattttgccgcagcctgatgtagaaactctaaacgttcccagaataaaaataaacttgttctggcaaggc

SEQ ID NO: 945896 - DNA, 575 bp, Homo sapiens
tgtgcttagggagttatgtgcatgcccatctgaggcttcctattttgggtagcatgtgcccagaaratcatactttaccacctttgtctcttaacacgcatgcccaggaagtggcttctccctggggtcggcagtcagctaacattttttaacaggtgtggaccatcaagaaatggcctctccctggccctgccaaattatcatttttagagaggctatgtggtaatagcaaaaccatcacccaagatttctagtgggtagtataggatccctctcccgcctccctcatgcctaactacctgtaacaatatggacaatgaagtccaagttgagatgctcacagatggagatgaagagtttattgggaaattgtgcagaggtcattgttgctaggctttagcaaagagactggcagcattttgcccctgccctagagatctgtggaactttgaacttgagtgagatgatctgaaatgggaacttatgtttaaaatgtaagcagagcaaaaaaattttggaaaagttgcaggctgacaatgcaataaaaaagaaaaaacccattttctggggagaaa

SEQ ID NO: 945897 - DNA, 512 bp, Homo sapiens
atgtaacatttggggcaaagatgccacccagcagccctgccatggaagccaggatggaaaagatctccacggccacagtggacttgccctgtgcgctgtggtacaggggcaggaaggttgtccagaagctgcagaacagcagcacgctgaaggtgaggaacttggacttgttgaaggcgtctggcagacccctggccaggaaggctacaaagaaggtgcccccagccaggaggcccaggtagcccagcacacaggagaaagcgacagcagagccctctcagcactggatgacaatgtggctgggctctgaggccatgtccccatctgggaatggtggggaagtgcccagccagatgccacagagaacaacctgcaccaaggaagcagcaaggaccaccgaggtggaagygccaggtcccaggcacacccagaccctgtcacctggtgaccctgaaggccaggacggaagagacagccatggtgaacacaacagcaactgtggtctggtagag

SEQ ID NO: 945898 - DNA, 565 bp, Homo sapiens
ggccatgagcaaaactcatggtaatcccctgtcctccttccatggacacctccttgggaaacaaagaaaccagtcactaataaaggtaatggtgaaaaggaccrtgtagagtatgataaaaaataataatgtcatttgcacaatgaaagaggtttaaaagaaaataaatgggtcccaggggctcctttagatagtgtgatcagaaagggtcacacgagggaggtaacattgaaggtgagacctgaaggatcacagggaggtaggtggccaggcccggtgctcctggcagagggaagagcaagttcaaaggtgggagagagcttggcatggttgaggaacaggaaggaggctgatggggccaaactgaagggaaaactagtaggaggtgagactgtagtaggtaaaagtcaccaggttgtgtaggcctggaagcccgatagaggagttgttatttttattctgaatgtgacaggcagctctgatgggcccttaaacacgagaatgccatatttgatttgcttcccagagaacggaacaaaatggggaaaagtagaagtctgttgag

SEQ ID NO: 945899 - DNA, 549 bp, Homo sapiens
ggtcactagacagacaaactcaagtcrcaaaacatgtttctccttgaaaagtaagaaatgatgtaatgcatacctcaattgaataactggctttgtttctcacttctgtagtatgcttccctctgcagagatctccccccaccccactaaatgcttaaaaggtaacttaactctttgttcagggctcagtcctttggatgttaatccgacggctggtgcacctaaataattaatgaatatcctcctgaaccccaatggtctctctgattccttaaaaatcccactacatttcttgggggtggggggcttgcctggggttggagatgacagatttactgtctcctttgcctgtgagactagagctctggggctaggagagacccagcatccaaggcacaccacaggggagcttcaactggatagaaaccagctctccccatattctgacaccctgcctggcagtgcaatggaactgggaatggggctgcaggatgataccagcacttcaggaactgcagtaaagagcaagtgcccaaggcagcaaagccc

SEQ ID NO: 945900 - DNA, 545 bp, Homo sapiens
tccaagccgggagggttggcacacacctgtaatcccagctacttgggaggctgagacaggagaatcgcttgaatacaggaggtggaggttgcagtgagctgagattgcaccactgcactccagcctgggtggcagagagagactctgtctcaaaaataaacaaacaaacaaacaaataaataaaagtaaacgccgggtgcagtatctcacgcctgtaatcccagcactttgagaggccaaggtgggcagatcacttgaggtcaagaatttgagaccagcctgaccaacatggtgaaaccccgtctctactaaaaacacaaaaattagctggccatagtggtggtgcctgtaatcctagctactccagagctgagaatcgcttaagcccaggagacagaggtggcagtgaaccaagattgtgccactgcactccagcctgggcaacagagcgagactctgtctcaaaaaacaagcagccaggcgtggtggctcacgcctatarccccagcactttgggaggctgaggcgggcggatcacctgaggt

SEQ ID NO: 945901 - DNA, 555 bp, Homo sapiens
tccccttcatcctcatgggatgggctttgctgccttgggcacttgctctttactgcagttcctgaagtgctggtatcatcctgcagccccattcccagttccattgcactgccaggcagggtgtcagaatatggggagagctggtttctatccagttgaagctcccctgtggtgtgccttggatgctgggtctctcctagccccagagctctagtctcacaggcaaaggagacagtaaatctgtcatctccaaccccaggcaagccccccacccccaagaaatgtagtgggatttttaaggaatcagagagaccattggggttcaggaggatattcattaattatttaggtgcaccagccgtcggattaacatccaaaggactgagccctgaacaaagagttaagttaccttttaagcatttagtggggtkgggggagatctctgcagagggaagcatactacagaagtgagaaacaaagccagttattcaattgaggtatgcattacatcatttcttacttttcaaggagaaacatgttttgtgacttgagttt

SEQ ID NO: 945902 - DNA, 681 bp, Homo sapiens
cagagctacagaagccaatagggacaaaactcctgttcttaatggagattacaaggctacatgtagaaagctttaaaaaaaaaaaaaagttcaaggccaggagtgatggcttatgcctgtaatcccagcacttcgggaggccgaggtgggtggataaaataaaaaaaactagcccggcggggtagcgggcacctgtaatcccagctactcgggaggctgaggcaggagaatcgcttgaacctgggaggcggaggctgcagtgagccaagatggtgccagtacactccagcctgggcaacagagcaagactccgtctcaaaaaaaaaaaaaataggaaaaagaaaagaaatctcagatggcaaagagctatgaacaaggtaaaattaagaaacagaatcgactgtgaagaaccagcatcaaagtcaatagcagcgtttcctaaacttcacttagaagaattacctaagatatttgctaaaaataaattcctggctacatcccagacccactgaatcagaatctcctgggaaagggcccagaagctgtaaaacaagcgccttaggtgattttttaattagagatgttagagcaacatcaatgagaaactggggcctaaacgtcagacttcggctttaatcccagctctgcaacttactagctcyataaacttgagtctctttc

SEQ ID NO: 945903 - DNA, 569 bp, Homo sapiens
gtctatcaatttattgttccagtgtcttctgctccaggtaaacagatcttgactgcagctctcyggttttacccaccaattcatattttcaagtggcagtttgctttgtgaactcaatttgtctaagaaaaattgttgatttctttctttggctatttctagttgttagaatgaaggtgacaatttccaagctttttatatttcagagctaaaatcaaaagtccattgtattagtccatttttatactgctataaagaacttcccaaaactcggtaatttataaaggaaagaggtttaattgacacatggtttagcatggctgaggaggcctcaggaagcttacaatcatggcagaaagcaaaggggaagcgaggtggccggaaggagaggttctgagtgaagggggaagagccccttataaaaccatcagatctggtgagaactcacaatcatgagaacagcaataggggaaaatgctcccatgattcacttacctccacctggtccctcacttgacacgtggggcttgtggggattatggggattatggagattacaatttaagatg

SEQ ID NO: 945904 - DNA, 804 bp, Homo sapiens
ctgtgatggtttagcatttgctctgctacttgagatgatggagagcaggttcttttaactcaagttacagtcgatcctgggagagcaaggagccagcaagtctagacattccagagccacaggccctggattytatccaagccacgagggattttatgccctgggcttagattatggtgcgtcagggcagccttccaccctttagcacagagcttggtgttccaaagaccacaaggggttttagacccttgaccctggacatattccaagactcttttacattatgtcagaatgcaagccctgcctcagcttctcccaacactcagcttttcgcaacataatcccagcactttggaacgctgggtggattgcttgaacccaggagttcgagaccatcctgggcaatatggcaaaaccccatctttaccaaaaataagctgggtgtggtggaacatgcctgtggtcccagcttcttgggaggctgaggtgggaggattgcttgaacccgggaggtagaggctgcaatgggccatgatcacgatcctgcactccagcctgggcaacagagagagacagtccctggcccactgcccccttccctggcccagtctcaaaaaaaatgaggctgggcgtggtggctcacatctgtaatcccagccaaggctggcagatcacttgaggccaggagttctgagaccagcctggcttacatggtgaaaccccatctctactaaaaatacaaaaactagccaggcatggtgggaggcacctgtaatcccagctacttgggaggctgaagcagga

SEQ ID NO: 945905 - DNA, 603 bp, Homo sapiens
tctttcaggcatctagtataattgaactcaaagataacatcatcttttgctctgagtctctttagagwtattaatgtaatattggatttccctcattacataacccatttatttattcttttatcctcagctactatttcttctatctttttttagaccccaaattgtccaccattggaagggacattacattcaggagtgtacagggagtctaaattgcaggtagtaatattagtctagcaagtacctccctctcattccattcttattcaaatagtgtaaagttacacaggtgaagaactagtgggctatttagccaaatttactgttgaaaattgcacttaattttttgcttagaaatcatacctgcttccaacacttgtaattgcagtcctgagactaccacatcaaatgggaaaaaaaaatacttttaggggatgtggataagaaagaaaaaaaatatagtcattaaaccagtgtcctccctccctggcaaaaattgcatagtcataccagcatcctttttcaccctctcttccctatatctaccaggaaaagagaggaatttatctagcaagaacactcccttcagccaacacctgt

SEQ ID NO: 945906 - DNA, 626 bp, Homo sapiens
actacagtatttaagaacaaatgtgagtaatgaaccataaagtgaaatatgtaaggcagggaaatatttctggcaatacatatgctctacataaattttacttacgtataaggatactgaagtgtaggctgaggctacctagagacattgattagaaaataagcaataccactttgtttatacattagtgcttgtgtagcactttctgaagagttgcagagttgtgttgtgtcatgaaatagtaactatgtaacttatctcctttcttcctttctattttttttctccttctctctctcactctccttctctctccttctttgcactggctaccagggagcacagagcgtgatatactgagcaaatggctcagctctgccttggaatgaacttaacactttcttattaatgatacctgtttttctatttttttctatatccttgcataccatttacagtgttatacaactgattttattatgaacaatttcaagtaccttttagagaagcagaytgctaattcaaagcaaacatgaaacagatactagcatttgtaattaattttgaataaatttcaaagaatacagcaggatggtgatctgattcttttcctttggcttttttta

SEQ ID NO: 945907 - DNA, 741 bp, Homo sapiens
ccagtggggcgggccatgtccgtggactggttttatctgctccatttctgtgttgtttcagttggtcagagggtgctgtcatcacaggtagaaaagggtagaaatgctaccaatcatcagcaaacctcctycttctagtaaggctccatcaacagacattagcctgctttaagctgagctctactatagtactgggagtgtcccatcagagattctcccaaggtatagtgactgcccttgagggaggaaccaaagccactctcatctgaacaagtggagtgttatggattatagactaatgagacctttccaggtaaagtgccacattgaataaatctcgaagaacttttttttttttttttgagacggcgtctcactctgtttcccaggctggaatgcggtggcgtgatctcagctcactgtaacctttgtctcccgggttcaagtgatcctcctgcctcagcctcctgtgtagctgggattacaggcatgtgctaccatgtctggctaatttttatacttttagtagacatggaatttcaccatgttggccaggctggtcttgaattcctggcctcaagtgatctgcccacctcggcctaccaaagtgctgggataacaggtgtgagcccccacacccagccaaatcttggagaatgaaaagatattctcaagttaaaaaaaaaaaaaaagaatgggaaggaaagtggcataaggaagtatcttcagtagcacagagca

SEQ ID NO: 945908 - DNA, 714 bp, Homo sapiens
taacagctgcactgccaactgaaagactctcagtggccaaagctggaacaatttgagcaacaaaacaaagtagtattggattataacccaaggtataaagtaaatatacatgagtccatactgacataagtaaataaatgggggagaacaggcaactctccagaacagaattccagaagattatgtagatactccaccaccttggaggaacagggtaacttcccagtccttacgtgtaggctgcacacagtgacttccttccaaagagttatgaaaagggagaaaaagagtaacttcaaagcagagaaacctagccacgtgcaatagctcacatctgtaataccagcactttggtaggctaaggcagacagattgcttgagcccaggagttcaagaccagcctgagcaacatggcgaaaacccgttctctacaaatatacaaatacaaaaaattattcgagcatggtgacgtggcctgtagtcccagctactcgggagggtgagatgagaggatcacccaggcccaggaggttgaagctgcagtaagccaaaatgacactactgcactccagcctggaagacatagtggaccctgtctccaaaaaaaaaaaaggtacagaaacctaacaygtatctcagccaggtgatcaacgtcaacattaacagtgataaattatgttgtagtatgcagccttgatgaaaatgtactttacc

SEQ ID NO: 945909 - DNA, 632 bp, Homo sapiens
agtggatttgaggaaagattgaaatgggatgaagctggagaggttagcgaaaaattgtacacccagaagtttagctatctggaaagtggagagaatgcctgcttcccctgagtatgtrttttaataatgacaacttttgactacttatttattttaatttatgcattatttaagataacactggctacagcaacaaatgcctcagaaggatatatctgttcaaacatatgagaagtctatttttgctcacctgaaataaagatcaacaggcaactcaactccaagtggtaagttgaggaatctaggccccttgtttcttgtggcttggccactttccacgagaccattgtattatcttttatccttctcaggaaaggaataaaggacatcaaggattcatgaagctttctgtgaaccattcccagttgcagtgagcatcaattctactcactacaggaacagaatattacacgagctagtcacatgatcaccagagtagctggtaaatgtgggttagctatagatttaggaagaagatgaaatgggttttttgcacagctctactctcagccacataatagttgttacttaaacctatgatgaaataacattaggacaggcagtttgaaata

SEQ ID NO: 945910 - DNA, 643 bp, Homo sapiens
ggagagtcacttgaacgcaggaggcggaggttgcggtaatctgaggtcatgccactgcactccagcctgggtgacagagcaagactctgtctcaaaaaatgaatgaatraataaaagaaagttggacaggaagatccgttctcactgtgtcacccaagctggagtgcagtggcccgaacatgattctctgcagccttgacgtccccagctcaagtgatcctcctacctcagccctcccaaataatggggactacaggtgcatgccaccatgcccagctaatttttttttgtattttttgtagagatgggctctccccatgttgcccaggctggtcttgacgggacttggactcaagtgatccgcccacttcagcctccccaaagtgctgggattataggtgtgagccaccgcacctggccaggtgtttaaaaatagaataatgtccagaacctaattttggagaacaggatgtaaagggatgcaggacaagggagtaaatgaattaggaaagggatatagaccaggatctgaaggacacatatcaggtgttagcagtggtctctctgcaaggatgggcttgtgaatactttgtgcgattggctcatcttttttttttttttgtaacagctttatcgaaacata

SEQ ID NO: 945911 - DNA, 573 bp, Homo sapiens
cctagctactcagaaggcttagatgggaggattgctgagcccaggaggtggaggctgcartgagctgagatagcaccattgcacctcagcctgggcaacagagtaagacactgtcttaataataataattaaacatttccattaataaacattcctaaaattataataaatgaatatatcattaattcctgctaattaatgtacaatttaagtagagaggggtgcaaagctgtccttgaaatgagattatcggaaaaggtggcatttcatagtcatcaatatacaggaaatcagagaacctcaagggaataattaaaaatttgatgtcttaagtctatttcctaggatagcaggttcatagttggaggcttacatattaagagaattctcaggatcaacactcgtatgggagtgaaggcagtagggttggtctgacacgggggaattcaactgtgattgagctgcagtaaaaggctcacaatagcttggggaacactggggatgggtcggcccatcagagttgtcctgccttcagatgaggcagctaggcttcatcattaaaggggcatcttg

SEQ ID NO: 945912 - DNA, 673 bp, Homo sapiens
aaacaacaaatcacaaagggtctgacagtttcatttctaaggtatgagaaaaaattgataataaaagaaaccagaaggctgggcgtggtggctcacacctgtaatcccagcactttgggaggccgaggagggcagatcacggggtcaggagattgagacctgcctggccaacatggtggaacttcgtctctactaaagatacaaaaaattagccgggcatggtggcacgctcctgtaatcccagctactcgggaggctgaggcaggagaatcactttaatctgggaggtggaggctgcagtgacctgagatcgcgccattgcactccagcctgggtgacagggagatactccatctcatagataaataaataaataactacaaggggagcaaaacacactggatccttttggagggtggggggtgggaggagggagaggatcaagagaaacaaccaatgggtaccaggcttaatacctgggtgataaaataatctatactacaaaccctcatgacacaagtttaccagtgtaacaaatctgcacttgtatcctgaatttaaaagttaaaaaaaaaaaaaaaaaaaaaaaagaaactacaatgwctgagagaagaataggatttttacaaatccgtagcccatagagtatttcaataaggacagataccaaaaa

SEQ ID NO: 945913 - DNA, 496 bp, Homo sapiens
gtctgagaaataaagggacagagtacaaaagagagaaattttaatgctgggtgtccaggggagacctcacatgtcagcaggttctgtgatgccccctgagccgtaaaaccagcaagtttttattagtgattttcaaaaggggagggagtgtacgaataggatgtgggtcacagagatcacatgcttcacaaggtaataagatatcacaaggcaaatggaggcagggcgagatcacaggaccacaggactggggtgaaattaaaattgctaatgaagtttcaggaacgcattgtcattgataacatcttaccaggagccagggtttgagagcagacaaccggtctgatcaaaatttattaggygggaatttcctcgtcctaataaacctggaagcgctatgggagagtggggcttatttcatccctacagctttgaccataaatgacggctgccccccgaagcggccatttcagaggcctcccctcagggatgcatc

SEQ ID NO: 945914 - DNA, 716 bp, Homo sapiens
ataagaaaatctagtaagtgtaacctggaagccaagtgaaaaaaaaagggtcactgtgaggaagtgatcaactaatgtatcaaataatgttgaaaagacaagtaaaagtgaggtaagagaccagcaggacttattttccagtcccaacaggataaagagaagaaatggtgggaaccagcagacagtgctgaaagcaacctctagcttccttcgttgctcattagcgtaagaccctcccaccagcaccatgacatttacaaataccatggcaatggccaagaagttaccacccctttccatgacaataatccaaaaattaccaccccttttccagagatttctgcataaccctccccttgatttgcatgtaattaaaaatgggtataaatatagctagccaactgtccacaagtgctcacttggggtgcactgcctaggagttggatgtgcttcacaggagcaattccagttcagtaaaacttgctaacaccactggcttgcctttgaattctttcctgggagaagccaagcacctgtatgagctcatctgcctgcatcaataggactgaaaaagaccactggatttagccacatggaatccatcagggatctytgatgagagcagacacaaagacctgattggagtgggtacaagagcgaatggaagaagaggaattagagatgagtattccacacctctactgaggaatcttact

SEQ ID NO: 945915 - DNA, 617 bp, Homo sapiens
aggtgcggtggctcatgcttgtaatcccagcactttgggaggccaagccgggcagattgcctgaggtcaggagtttaagaccagatataaagatatttttggccgggcacggtggctcatgcttgtaatcccagtactttgggaggctgaggcgggcggatcacaaggtcaggagatcgagaccatcctggctaacacagtgaaaccccgtctctactaaaaataccaaaaaaaaattagctgggcgtggtggcgggcacctgtagtcccagctactcaggactctgaggcaggagaatggtgtgaacccggaaggtggaggttgcagtgagctgagatcacgccactgcactccagcctgggtgacagagcgagactccgtctcaaaaaaaaaaaaaaaaaaagattctttctggtttttctgcaattaattttaagagatctaccccagtcaccttcacagtagcggctctggatatatgaaagttgggggragctgtggagggggacgctatgagaaaagagtcaggaatgggatggggttttgctcacctcaagccctactccagccccaaacccctctcctttcattctcaaagatattaaggaaatcaagg

SEQ ID NO: 945916 - DNA, 564 bp, Homo sapiens
tgttttaagagttagtatttgcaaaataacagatgtttctcakgatgtagagacaatagaactcttatacactgttggcaggaacgcaaattggtacaacttctatggaaaacagtatggagatttatcaaagaactaaaagtagaacaaccatttgatccagcaggcacactaccagatatctattcaacaacaaaaaattgttatataaaaagatagctgcactcatatgtttatcacaacactattcataatagcaaagatatagaatcaacctaagtgttcatcagtggatgattggataaagaaaatgtggacacactaaatagaaacaaacacaaaaaaggaatacatacacaaacagacacacacaatggaataatatttagtcatcaaaaaggataaaagtatttcttttgcaacatggttaggactggaggccattatcttaagtgaagtgggtcagacatagaaagacaaatatcacatgttctcactcataagtgggagctaaataatgtatacatgtggatgtagagtatggaatgacagacaatggagatt

SEQ ID NO: 945917 - DNA, 733 bp, Homo sapiens
gctgcctggagaaaaaggaacattaaaaaaaaaaaaaaagattaaaattagccrggtatggtggtgcacgcctgtagtcccagctacccaggaggctgagacaggagatcacttgagcccagaagcaggaagctgaagtgagccatgatcacaccagcgcacttcagcctgggtgacagagcaagaccctgtatcaaaaaaaaaaaaaaaaaaaaaagaaaaagaaaagatagatttaacaaatggtgcttagacaactggataagcacatgcaaaagaatgcatttggactcctacctcaaaccatatacaaatattaactcaaaatggaccatagacctaaatgtaagagctgaaactggctgggtgcggtggctcatgcctgtaatcccagcactttgggagaccaaggcaggcagatcacttgaggccaggagttcaacaccagcctggccaacatggtgaaacccctgtctctactaaaaacacaaaaattagctgggcttggtagcatgcacctatagtcccagctactcaggaggctgaggcaggagaattgcttgaacccaggaggtggaggttgcagtgagccaagattgcacaactgcactccagcctgggcaacagagcaagcctctgcctccaaaataaataaataaataaaaataagtcaatcaaatttaaaactggacaaaggatttaaatagacatttctccaaagaagatacacaag

SEQ ID NO: 945918 - DNA, 733 bp, Homo sapiens
gctgcctggagaaaaaggaacattaaaaaaaaaaaaaaagattaaaattagccgggtatggtggtgcacgcctgtagtcccagctacccaggaggctgagacaggagatcacttgagcccagamgcaggaagctgaagtgagccatgatcacaccagcgcacttcagcctgggtgacagagcaagaccctgtatcaaaaaaaaaaaaaaaaaaaaaagaaaaagaaaagatagatttaacaaatggtgcttagacaactggataagcacatgcaaaagaatgcatttggactcctacctcaaaccatatacaaatattaactcaaaatggaccatagacctaaatgtaagagctgaaactggctgggtgcggtggctcatgcctgtaatcccagcactttgggagaccaaggcaggcagatcacttgaggccaggagttcaacaccagcctggccaacatggtgaaacccctgtctctactaaaaacacaaaaattagctgggcttggtagcatgcacctatagtcccagctactcaggaggctgaggcaggagaattgcttgaacccaggaggtggaggttgcagtgagccaagattgcacaactgcactccagcctgggcaacagagcaagcctctgcctccaaaataaataaataaataaaaataagtcaatcaaatttaaaactggacaaaggatttaaatagacatttctccaaagaagatacacaag

SEQ ID NO: 945919 - DNA, 643 bp, Homo sapiens
cggcagtgtaaacaagagcagggcatgtatgagtagttgagaatggagaayaggagtatgactagacagaaaatagtagggatgacaagttttttgggggcacagtctaagttggtccggtgtctggaatgagactggggcctaataaaaaggagctcaaatgggctgtaccttgtagcatgccgaggacaggtctgacttctaagaagggaaagtggtaaaagtattgtccagtctttttaagttggtggctgagcttggtgaggtctgtttttaaaagacctttagtccgttctacttttcttgaagacagaggaccgtaagggatataaaggtttcactgaatactaagagcctgaaaaactgcttggctgatttgactaataaaggctggtctgctatcagactgtatcgaggtgggaaggctaaactgaggaattatgtctgacagaagggaagaaatgactgcggtggccttctcagaccctgtaggaaaggcctttacttattcagtgaaactgtctatttagactaagaggtattttagtttcctgacttggggcatgttgaataaagctaatttgccagtcctgggtggggcaatccttgagcttgatgtgtagggaagggagggggcctgaat

SEQ ID NO: 945920 - DNA, 568 bp, Homo sapiens
agggcagggactgcactgtgtgccgtaactcacaggatcgtgccagtggatgcttctagctccccagtctctccctctctccacctgactgactcctctgagtgaactcctggggtgctttttgacacccacagggaggtgctggaccccctggtagtaatggcagggtatggttaggcagaaattatgaataacaaaggaaaggtgacatttttactccaagctgaagaaatagatcagtcaggctacctgtggcaataataaacacaaacaatgattcccacacaaggaagtgtgcagcagtgtttgttatggtacagaaacacttgaaattgttcagagttggggaaagggtgaattatatcacgtccctgtgatgaaatattatgcagccattaaaatcaaatttctggggtcaggcgcagtggctcatgcctgtaatcccagcactttgggaggcygagacgggcggatcacaaggtcaggagtttgagaccatcctgcctaacatggtgaaaccccatctttactaaaaatacaaaaaattagctgggtgtggtggcaggcg

SEQ ID NO: 945921 - DNA, 578 bp, Homo sapiens
tcacttttttttttttttttttttttttgagacggagactcgctctgtcgcccaggctggagtgcagcagcgcgatctcggctcactgccagctccgtctcccgggttcacgccattctcctgcctcagcctcccgagtagctgggactacaggcgccggcaaccacgcctggctaatttttttgtatttttaatagagacggggtttcaccgtgttagccaggatggtctccatctcctgacctcgtaatctgcccgcctcagcctcccaaagtgctgggattacaggcgtgagccaccgtgcccggccacattcacttctactacagatgacctacagttctcttccatgcagagaactttgagcttacctcactcccagtcagtgacagatggaaagaagaggtctgtctcccaacaactatatacaaatcctagggaaggattctgattggccctgctgggacwacatgtccattctttgggccaatcactgtagccaaggaataggcgcctatgattggctggacctggccatgtgcccatgggggtgtgttatgaggggttctcagatggac

SEQ ID NO: 945922 - DNA, 578 bp, Homo sapiens
tcacttttttttttttttttttttttttgagacggagactcgctctgtcgcccaggctggagtgcagcagcgcgatctcggctcactgccagctccgtctcccgggttcacgccattctcctgcctcagcctcccgagtagctgggactacaggcgccggcaaccacgcctggctaatttttttgtatttttaatagagacggggtttcaccgtgttagccaggatggtctccatctcctgacctcgtaatctgcccgcctcagcctcccaaagtgctgggattacaggcgtgagccaccgtgcccggccacattcacttctactacagatgacctacagttctcttccatgcagagaactttgagcttacctcactcccagtcagtgacagatggaaagaagaggtctgtctcccaacaactatatacaaatcctagggaaggattctgattggccctgctgggactacatgtccattctttgggccaatcactrtagccaaggaataggcgcctatgattggctggacctggccatgtgcccatgggggtgtgttatgaggggttctcagatggac

SEQ ID NO: 945923 - DNA, 675 bp, Homo sapiens
attaaaacagttgagggcaggtcaccaggctgttgcaggctccattaagaaatggctctgagagggttactttagagcaagggaagggtcttctgttgcaggggctctgtgcctggccagcaccacctcccccgccttttttttttttttttttttttgagatggagtctcgttctgttgcccaggctggagtgcagtggcgcagtctcggctcactgcaacctctgcctcccaggttcaagcgattctcctgcctcagcctcccaagtagctgggaccacaggcgtgtgccaccattcctggctaacttcttgtatttttagtggagacgaggtttcactgtgttagccaggatgatctcaatctcttgacctcgtgatccacccaccttggcctcccaaaatgctgggattacaggcgtgagccactgcgcccggccagccagtcccttattttatggaaaccccagcctattccagccacccaagaaccttcgttaagtggctctgaagtgggaatggctacttaatttgcagggatcagcacaaaatgaaaatcaataattttcagaaattaagattcaagatggtaatagagcattcgagtgagcattggggacccttctgagcacagggccctgtctgtgcagttwgcacacagcccaggtctggggag

SEQ ID NO: 945924 - DNA, 571 bp, Homo sapiens
agacctagtgtttgccagcacaacagggtgactatagacaaaaaagaatttaattgtacatttttaaataactaaaaaagtataattggattgtttgtaacacaaaggaaaaatgcttgaggcaatggatatctcattttccctgatgcgattatgacacattgaatgcttgtatcaaaatatctcatatattccacaaatatttatacctcctatgtacccacaaaaatttaaaatttaaaaaagacaaataacccaaataaaaaaatgagacagagttcaaatggacattagatggatggatggatggatggatggatagatagatagatagatagatagatagatagatatagcaaatactcaattgagaaactgctcaacatccttccttagtcactagagaaataaaaatcaaagccacaataaggtacccatttatttatttatttatttwttaataaggtacccatttatatctactaaaatgactatcattttgaaaatggaaaataacaagtgttgtaaggatgtagagaagctggaacccctcatacattgcaggtggaga

SEQ ID NO: 945925 - DNA, 519 bp, Homo sapiens
cattgcagcctcaacttcccaggctgagatgattctcccacctcagtctctcgagtagctgggattacatgcaagcaccaccatgcctggctaattttctttttttttttttattttgagacagagtttcactctgtcacccaggctggagtgcagtggcgtgatcttggctcactacaacctccaccttccaggttcaaacgattttcctgcctcagcctcccgagtagctgagactacaggtgcctgccaccacacccagctaatttttgtatttgtagtagggacggggtttcaccatattggccaggctggtcttgaactcctgaccatgtgatccacccgccttggcctcccaaagtgctgggattacaggcatgagccaccacgcccggcctaatttttgtagtttttgtagagatgggatttcatcatgttgcccaagttggtctctaactcctgggctcamgctaccttcccacctgggcctcccaaagtgctggggttacaggtgagagc

SEQ ID NO: 945926 - DNA, 600 bp, Homo sapiens
aggagtccccatggaggagctgatgcttccattgggcctcacaggtaaacggctgcagttgggtatatggggttgtggccggagcatatgaaaaattcaaagaccagaaagagggtgccttgtggggtcagtgggagagaaggctgggcagggcggctgcaggcagatggtgaagagctctgaatgcatgctgaggaatgacccacaatgacaaggtaccccattgactgtgcccttgagaggcagtgtggtgcagtggttcaagacttggactctgcagccagcctgccccagtcaaatctatagcatgaggacagtagcgggatgtacaggaagaataagcaggagtgactgcacagcccctacccggtgccagggtagatcccttcacctctgcctacctgtctaccagggaccgcatggcttttatgtccaggagagcatggggttctgtcttcaggctgtgactctggagatgccttgagtctcccgagtccccggttctcttccctctgaaggcacgtgctgcagaggctgtgaggatgccaagcccacctgcrtgagtggtgcccgggtgcagggaggtgctggacacacgca

SEQ ID NO: 945927 - DNA, 585 bp, Homo sapiens
gggaggcgtggagggggtggagtagcgtgggggcagtgcgtgctttctgggttatctggagatttagacrgggacactgtgcctccaagatcctctggctcctccttttccttttatttatttatttatttatttatttttgtattttattttattttattttgagacaaggccttgctttgttgcccaggctggagtgcagtggcgcaatctcggctcactgcaacctccgcatcccgagttcaagtgattcgcctgcctcagcctcccaagtagctgggatcacaggcgtgcaccactacgcccaactaatttttgtattttcagtagagatggagtttcgccatgttgagcaggctggtctcgaactcttgacctcaggtgatccactagcttcagtctcccaaagtgttgggattaaaggtatgagccactgtgcccggccaggttctcctttttcaacagcaagttgcctaaacagtacaagtggaatgagctcctgcctcttattggccagtttagccctcgtgatggatcccttgcacctgtgcccctgggctcagcgttaggtctagtctggggttg

SEQ ID NO: 945928 - DNA, 685 bp, Homo sapiens
caccttaaatgtcctcaaggttgctttgcacacagtaggtgctcaataaagacttctgcagggaatacctgagctctgttcatttgttcagttcatgagggacctatccctgackgaagctttctatccctgaccaatgctctctgcccccctccattccccacaccacctggtgcctggctcgcacctgccgcctccagtagcctgctcagactgtgagggtttttttgaagtgtttatctcccttctgactgggagttttcaggcctcatctcttctgatccaaaaggacccctggcagatgcctggcacccagtaggcattattaaatgaagactgaatgaatctttgtatctcaacacccatacggtgcctgccacatgctaggcacagagcgcaggctagtcgaatacatgaatgagaacttactgtatatagacttcacttgtcattggccacagtcagggcccttttgagtccctcctcagtgaaatgttaatattcagagcattcactgctctgctgacaggccttaggcagagcagcctgaagcctaagggttaagcatgtggttaagtgcaattagaaaattagatgtcttggaggaaaaggattagacttacggagatgctgctgactcgcggtgcctcctctgtgtggggctaggacctggcttgtcctcagg

SEQ ID NO: 945929 - DNA, 685 bp, Homo sapiens
caccttaaatgtcctcaaggttgctttgcacacagtaggtgctcaataaagacttctgcagggaatacctgagctctgttcatttgttcagttcatgagggacctatccctgactgaagctttctatccctkaccaatgctctctgcccccctccattccccacaccacctggtgcctggctcgcacctgccgcctccagtagcctgctcagactgtgagggtttttttgaagtgtttatctcccttctgactgggagttttcaggcctcatctcttctgatccaaaaggacccctggcagatgcctggcacccagtaggcattattaaatgaagactgaatgaatctttgtatctcaacacccatacggtgcctgccacatgctaggcacagagcgcaggctagtcgaatacatgaatgagaacttactgtatatagacttcacttgtcattggccacagtcagggcccttttgagtccctcctcagtgaaatgttaatattcagagcattcactgctctgctgacaggccttaggcagagcagcctgaagcctaagggttaagcatgtggttaagtgcaattagaaaattagatgtcttggaggaaaaggattagacttacggagatgctgctgactcgcggtgcctcctctgtgtggggctaggacctggcttgtcctcagg

SEQ ID NO: 945930 - DNA, 812 bp, Homo sapiens
ctcactctcatctacccttcctataattaagctttagtaaaatatccaatcatagaattatccttgcttccaacagcaacatctaaccctgagcaaatctccacttccataaacccaccyccaaatcaccagccagaagtgcaaatcctgtaataaggcccttagagcactttctttccgaaatgccccaggtttccatggtgcaaggttttccttctccgaaatgagcaataaacccaacttgcttaactgcaggtgtgttcctgctggtcttcggctggaagtattcacagggattttctttaaaacttgaaaaacaatggatctggtggctcacacctgtaatcccagcactttgggaggccgagacaggcgggtcacctgaggttggggcttcaagaccaacctggccaacatggtgaaaccctatctctactaaaaatacaaaaattagctggacatggtggtacatgctcgtaatcccagctaatcgggaggttgaggcaggagaatcacttgaacccaggaggcggagattgcagtgagctgagattgtaccactgcactccagcctggatgacagagcaagactccatgtcaaaaaaaaaaaaaagaaagaaatgaaagaaaaacaatggatcctgccctaaatactcataggccaaccctcattaataactgcttcccacagtggatttaacgacctccttcccgacacccatttcccatttctcttggtaaccaccactaaccccacttttcaaataacccctcccaatcagcctacctgtccagcaagttgacttccagga

SEQ ID NO: 945931 - DNA, 743 bp, Homo sapiens
ttaaaacacaacccaaagcacactgcttacttcttatgcccttggaagcttaccattggacttggatacaattgaaattctttttgttttttgagacagagtctcgctctgtcacccaggctggagtgcagtggcgtgatcttggctcactgccacctctgcctcctgggttcaagcgattctcctgcctcagcctcctgagtagctgggattataggtgtgcactagcacgcctggctaatttcgtatttttagtagagacggggtttcaccatgttggccaggctggtctcaaacccctggcctcaagtgatctgcctgacttggcctcccaaagtgctgggattacaggcgtaagtcaccacgtccggccaaatccaaattctttaccgcaacttacaagcccctgcctgatataaccctaagttctctacactctaatttgatatcactcttctccccactgtactccaaccacaccacgccaccttccttcgcttgttcacaacgacagtcatttccctggggcctgtccctcagtgtgggatgctcttttcaccactctgcaccgatggctccacggttcctttaaaccttcagacctcagctcctyggaggccttctcaacacacctcaattcctcttctaagattctccctctctgttctccctgcccccacatcgtttctgtttgcttgcgaatatttatcacaatttgaaattacttaattttcccccctact

SEQ ID NO: 945932 - DNA, 613 bp, Homo sapiens
tattagtccattttcacactggtgataaagacatacggctgggtgcagtggctcatgcctgtaatcccagcactttgggaggccgaggcgggtggatcacttgagatcaggagttcgagaccagcctggccaacatggtgaaacccaatctttactaaaaatacaaaaattagccagatgtggtggcaggtacctgtaatcccagctacttgggaggctgaggctggagaatcgcttgaacctagtaggcagaggttgcagtgagccgagatcacaccactgcactccagcatgggcaacagaggagactctgtctcagaacaaaaaaagaaaaaagaaaaaaaagacatacccaagacagggtaatttataaagaaaaagagatttaatggactcacaattccatgtgcttggagaggcctcacaatcagaaggtaaaaggtgcttcttacatggcggcagcaagagagaaatgagagccacamaaaaggagtttcccattgtaaagccatcagatcttgtgagactgattcattaccatgagaacagtatgggggaaaccacccccataattcaattatctcccacagggttcctcccacaacacatggga

SEQ ID NO: 945933 - DNA, 576 bp, Homo sapiens
tgagtcatcaaagatggagccccactaatccttgctcttcatccctgttgccagaagcaggcacatggggcaggttcctgcaggcatgtcaccctgagtgctgaataactaacgacctggacagggagagggttaccatgcttgaaaagcagttgtggaaggactcacagtggaattcataggaagctcccgagagagttgaaggcttacacctcacacttcacagggggatatccctttctttaatcacacttctaagaatgaaatttcatttcccatgccctgaattttttttttttttttttttgagacagggtgtcactctattgcccaggctggagtgcagtggtgcaatcatggctcactgtagccttaaatccctgggctcaagtgatcctcccacctcagcctcctgagtagctgggaccacaggcacacactaccacrccgggctaattaatgttttttttgtttgtttgtttgtttttgtacagaaggagtttcgccacattgcccaggctggtctcaaactcctgggctcaagagatctgtctgcctcggcctcccaaagtgctg

SEQ ID NO: 945934 - DNA, 617 bp, Homo sapiens
tcatctgaggtcaggattttgaccagcctggccaacacggtgaaaccccgtttctactaaaaaaaaaaattcaaaaattagctgggcacggtggcatgtgcctgtaatcccagctactcagaaggctgaagcaggagaatcccttgaacctgggaggcggaggaggttgcagtgagccaagatcgcactacggcactttagcctgagtgacagagtgagactctgtctcataaataaataaatagataaatagttctacctccacctccttaggtcagttacttctccaccaagtccaacaaagcatatggagaagggtgtttctggtctattctaaaaagagctgcttccattacaccctagtggaaaatagcttagaataagggtcagactgatagaggttcaaactgcagatctaccactgaatagtcacatgactctagaccagcaagacttatccatacttagacatcatgtcctcatttctaaatgcagatgacaakgcctacacagcctgatcatcatagaattaaatgataaaatgatgtaaagggccagtcctctggcacatagtagggcgctaattaatgatagctgccacctggtctggtcaccca

SEQ ID NO: 945935 - DNA, 795 bp, Homo sapiens
caccctgtgggttgtctgtttactcttcttattatttcttttgctttgcagaagctttttagtttaattaggacccatttatttgtttttgtttttgtcacatttgcgtttagggtcttagtcctgaatttctgcctaagccaatgccagaagaagagtttttccaatgttatcttctaggatttttatggtttcatgtcttagatttaagtctttgatccattgggagttaatgttttttataaggtaagaaatggggacccagtttcattcttctacatgtggcttgccagttttcccagcaccattattgcatagggtgtcctttctccaatttatgtctttatatgctttgtcaaatatcagttggctgtaattatttggctttatttttgggtactctgttctgttctattggtctatgtgcccatttttataccagtaccatgctgttttggtaactataaccttgtagtataatttgaagtattgtaatgtgatgcctctagatttgttctttttgcttagtattgctttagctttgtgagctcttttttggttccatgtgaattttagaattgtttgttgtagttctgtgaagaatgatgttggtattttgatgggaatcgctttgggtagtatggtcattttcacaatgttgattcttcccattcgtgagcataggatgtgtatccatttgtttgtgtcatctattatttatttcagcagtgctttttagttktccgcgtagaggtctttcccctacttggttaagtatattcatatgtattttat

SEQ ID NO: 945936 - DNA, 577 bp, Homo sapiens
agttcattagtcctcacgtctccttagggtcttcttggctgtgaccgtttctcggactttccttgtctttgatgaccttgacagttttaaggagtgccgatcagctattttgtagaatatctcttagtgagatgttaggaagaaataatgatagggcttggagttgtgttgggtgatttgggggaggattcaaggaagtggttctttgctccagattggatgcttccaggaagcaggggtcattctgtatctgggtatctgtattagtttccaactgctgccattatgaaacatcataaacctagtagcttagaacagcaaaaaattatctcacagttctggaggaagtccaaaatcagattcattgggttaaaatgaaggtgccagcaggtctggttcttctcccctggaggctccaggggagaacctgtcttcttgccattcccagctctggatgccayatgcattccttggcttatggcatcttccttaatcttcaaagccagcagcatggtgttgtcatatctccttcactgactccaacccgactgtcttcctcttacaagagccattgtga

SEQ ID NO: 945937 - DNA, 598 bp, Homo sapiens
gggacacaacaatggctccattgagacaggaattgagactatccagtcatttcagcactgaaccaacgggctggaggttactgttttggctggtgcaagtgatcctggcaacaarggggcatttatgtcgttcctacacagtggatggtgagaaaggcatctggaacccaaggattctctagggcatttttagcacttcccatgtatgccactaacttctaagggacagctataacagtctcaaagaggggaatgattgaggtcctttagggaatgatgttttggtacaccccaccccgtataaatcctgagaagctgagctactggctgagggaagaggaaccatgggatgtgtaaggaaagaaggaaatttattatttcagccttatgactagccagttacagaaacaagttactgcaactgttacatggagggttggcactccatatcagtgagttccagatatcgacttgactaaccacagaaagtactcaaaaaataaaaatacaataaaaaataatataaagtacaatacagtatgacaactacatagcattgacattgtattaggcatcataaatcatctagaggtagtct

SEQ ID NO: 945938 - DNA, 594 bp, Homo sapiens
caaagttgcactgatctctgtaagatatatttgatctggatggtatctcttgctaatatctctttcatcagcattgtctggatggggagagcaggggtgaccctacataactgcaaaattgcggcaggaactaacaagaccattgaggtcatgaagatgacaatctgccaaatattagcagactgcatgttactgtgacatccctccctcctctcccgatcatggcaggttctcacctccaccactcttctctgacctctgctctgatccctgtccctgatggatagttcatcatgtataacacctgtatcaaacaaacgctctccctgaaccgaatccttcctgctttcacctcagagcttcatttaacctcactaggatggccacaagtcaaacatagagaatgacgcaggaacaggtctgcagttcaaaccctagagcgcattctgtagtccataggaacagaaaacgagctatgtyaggagggtgtggcacaaagccacacttggctatctgagctcctatcaggcattcagtcaagaagttagcagataatgacgggaacaggacattatctgcaggaaaataaagcaa

SEQ ID NO: 945939 - DNA, 594 bp, Homo sapiens
caaagttgcactgatctctgtaagatatatttgatctggatggtatctcttgctaatatctctttcatcagcattgtctggatggggagagcaggggtgaccctacataactgcaaaattgcggcaggaactaacaagaccattgaggtcatgaagatgacaatctgccaaatattagcagactgcatgttactgtgacatccctccctcctctcccgatcatggcaggttctcacctccaccactcttctctgacctctgctctgatccctgtccctgatggatagttcatcatgtataacacctgtatcaaacaaacgctctccctgaaccgaatccttcctgctttcacctcagagcttcatttaacctcactaggatggccacaagtcaaacatagagaatgacgcaggaacaggtctgcagttcaaaccctagagcgcattctgtagtccataggaacagaaaacgagctatgttaggagggtgwggcacaaagccacacttggctatctgagctcctatcaggcattcagtcaagaagttagcagataatgacgggaacaggacattatctgcaggaaaataaagcaa

SEQ ID NO: 945940 - DNA, 559 bp, Homo sapiens
tgtaatcccagctacttgggagactgaggcaggagactcgcttgaacccggaaggcagaggttgcaatgagccaagattgcgccattgcrctccagcctgggcgacaagagtgaaactttgtctcaaaaaaaaaaaagaaaaaaatacagacttacagtccgggtgcagtggctcactcctgtaatcccagcactttgggaggccgaagggggtggatcacttgaggccaggagttcaagaccagcctgggcaacatggcaaaaccccatctctactaaaaatacaaaaattagccaggcgtggtggcacatgcctgtaatcccagctactcgggagactgagagaggagaactgcctgaacctgggaggcagaggttgcaatgagctgagatcgtgccactacccttcagcctgggtgacagaacaagactctgtctcaaaataaataaataaataaataaataaataaataaataaataaataagaagtaaataaataaatagaataagaacttacagtaagaaaaaaaataaaacagtctgggagcattggaaatg

SEQ ID NO: 945941 - DNA, 581 bp, Homo sapiens
gttctcgaagcctcggtcataagcatagatggttccmgggttagttgaagacttgagatgagtggatgcgcacaaattgaggggtgcttctctacctctcctctttctcaggttctccaccacactttggagatcctggttgccccaagaccccttttcctgattgctgagtcctgtagccagaaagatggccatattttctctaggggtttagctatccagagctgccccagtgaggctgccttcagagaaagctaccaagaaacaggaaacttagtccatatgggttgcttgctcaattaactttccatttctttccagaatctacctgcttttcttcagtttccagagtgctcaggtagttgtagtttgtccagagtttacggctgacacttggagcaactgaggagccatttgttaagagttacttctgccatactggaagcagacgcctcactacagctctctttttctttcctcctctcctttctcctcaattgattgccctcttttcctctatagctctcttcctctctcctttcctgtcattccccttctacttccctgtctctgaagttcac

SEQ ID NO: 945942 - DNA, 609 bp, Homo sapiens
  misc_feature 229: n = A,T,C or G
gagatgagggtgatccaatctctccatgaggaaacacgtagcttcccagacttgttcttcatcttccatcatgttattttattttactttatttttattatttgtagaaacaggatgttsctttattgcccaggctagtgttggtctcctggcctcaagtgatgctccaatcttggtctctcaaagtgctaggattactggccatgagctacgttcggtttcctaaagnccccaatatttattattattattatttttattattattattttgagacacggtcttactttgttacccaggctggagtgcagtggcatgaatatggctgactgcagccttgacctctcgagctcaagagattctccccactcagcaccccaagtagctgggactacaggcacatgcctagctagtaataatttttgtacgttttgtagagacgggtttttgccttgttgcccaggatggaaatcatgttattttaaagagacaatttaagaaagtctcttgggcccctgcctgatgtttcagccgcatcttattctgccatatagacagactagaagaggtatggatagcttcacactccaacaaattgtgcatggattc

SEQ ID NO: 945943 - DNA, 587 bp, Homo sapiens
gctgtggtgtcagccacctcctcatcagtcatcctgtgggtcacagtctcrggagatcatattgttcacactcgtgccctgacacgttcctcctcagatgccacttatggggtctagtaacaaactggcttctagccaactttatcagaccgtcaaggaacatagggccccatacaatggaatgagatgcaacttgtattaagtcgtggttttggagtccgtttaatggcgtgaggccgtgtgtgtaataaaatgtcaggaaccaaaagcaggcaaaaaattgttcttaagcaatcccaattttgtatctacccatgacgctgttgcttttgggggattctttggaagttccatctgaaaactctgtctcaaaattacatcagccaggagagcattcctgaacctcatttataacaggaatcaggtactagcgtaagggaacagacactccgtactgatggcgtttaatgtgctgatcaaataataaaatgtgctcattctcccggtgtaaaaagaggagtcgtgttttgtgaagttggtgaacatcctccttcctcttctgggctgatgtgaagccagcccattct

SEQ ID NO: 945944 - DNA, 693 bp, Homo sapiens
aggggattggagtgtgttagctgtcccagaactgaacaaaaagagtttcctactgattattttaataaatacaggtaattatgactacacaggagaagaggctgaggcaatacatttactttggcttcaaaatactcacttccaatcccgggagatgaaatactgcagctctaagagacggtgttcacagtcttctaccatcttctctgtgtataaatgttccatcaggcacgacaagatcctagccattaaatgtgtaaaattgtaacaagagagaagtgttcagaactctatgtcaatatagtatttccctggtctgtagaaggcggcttttagttattttcttagggcaatcagatttatttttctaagaatcactcaaattaactgaacctgacagtggttataccttcgatcaacttcagagccactcagcactgaagactatgcatgcacaagggcagtgtgcagctgctgtatttttaactggttatgaaaactttccaacacacaaagaagtagagaataatgtaacagccaccttccctccccataactttatcaatctgtkgccaagtctgttttaactctaggcctctttgctgatattttaaagcaaaatcccagatactccatcatttcatttgtaaatatttcagcatgtttctttaaaatataaggacttaataccat

SEQ ID NO: 945945 - DNA, 552 bp, Homo sapiens
cttcaaggaagagaccatggattccagatccagaggacaggtagatgttggcctggcagaggtggggctggggaggaggttttagccggcgattactgcagatcaaagtccccaaggagaaagaaaatatggtcggcctaggaactgaaagaagtttggagtgttcagcctaaaatgcggcattttatgtaaattagtgggcatgattcctgctacatcatatgtgcctgatggcttatggttattttgcagaagtttacttcttactgggtggagacacttggcatttgtaaatgagaataccaatttgaaggaagataagaaaaagaacaaaacctcctagcataaacaggtatccttgtattaaacatctctgagtggattcctaagggctgagagtccgtggggagggggtgtgggagaggaaggctggagaggaaagcaggtgccagtcttggggatgtttgcaccttctctygagggcaatggagagtcatttaagaaggagctggttgtgatcaggtgtgggttggaggacatcatagcttgcag

SEQ ID NO: 945946 - DNA, 652 bp, Homo sapiens
acacgattggcagggagagcacgtgtgtttttatgagaattatgccgagataggtaacagttgaggaagacatttgggctcgattgaagtaatgggggctgtccgtgaagctttgcggcagtacagcctaggtaatttgctgagcttgatgggtgtcagggtcagtccaagtgaaagcgaagagaggctgggatgaagggtgcaaaggaatagtaaagaaagcatgtttgagatccagaacagaataatgggttgtagaggcaggtattgaggataggagagtatatgggtttggccccacggggtggagaggcaaaacaatttggttgataaggcgcagatcctgaactaatctgtaagacttgtccggtttttggacaggtaaaatgggggaattgtatggagcgtttataggttttagaaggccatgctgtagcaggcgagtgagaacaggctttaatcctttcaaagcatgctgtgggatgggatattggcattgagcggggtaaaggtgattaggttttaatgagatggtaaggggtgcatgattggtcaccaaggagggagtagaggtatcttatacttgtgggttaaggtggggggatacaagaggacacaaaggaggctttgggytggggagaagggcagcagt

SEQ ID NO: 945947 - DNA, 508 bp, Homo sapiens
tcccagcatctttacccctcaaaaggaacaactctgagactcattctatgctgtctcccagaagtctctagaagcactgagcttcaaaagctcacagcagtaacctgctcattaatgtaacctacggtggcctccttccttgcctcacctccccagttccccaccattgctttctgggatctccacccaaagaaactacttgtacagggtccgctttctgggtaacctaatcttggccaggctctcctggcatagcccagaatgcctcattgtgcaaatgtggctgtttaatgggcttgagcatggaatcagtcatgaacggaggctgtgtgtatctaaaggaaatctccaaggtcaagacattgagggcattagctgccctggtttggttatttggatcagtctttaggactggatgacctggaaggcatgaaccaggaagaagatggtggtggaggtgcagaaacagcatcmtaagcagaccccctaggagatgactttttggcta

SEQ ID NO: 945948 - DNA, 837 bp, Homo sapiens
tagataattttatcaagttgaggaagtttggaaatgttcctgttttcctagttttctgagagtttgtattttgaatggatgttaggttttgtcaaatactttttctacatctattaatataatcatacaatttttattctttaacctgttgatatgattgattacattaattgatttttaatgttgaaccagccttgcaagcctagaataaaccctacttgaggtgtataattatttttatatatttatatatatatttatgtatattttatatttttttatatattttgtattctgttttctaagatattgttgaggagttttacatctatgacgtgggtgtatagattttttaaaataatgtctttatctggttttggtcttaacataatgctggtttcatagaatgagttagaaagtcttccctctgcttctatcttcttgaacacattgtacaaaattggtatcatttcttccctagatgtttggtagaattaagcaatggaattatctgtgcctggattttttctttttaggaagatttttaaccaaaaaaaattgtatttaatagatatagacccctttagattatctgttcctctttgtgtgagctttggtagcttgtgtctttcaaggaattgattgattttgatatggacagaaggcagggaaattctaggtagaagagggagggtccccagcaagggccccaccctcaagcccaaaaacctgaaaccacagcccaaagtgagaacttacatccctgttttcccgcttgaatatcgccttttccaaaaccacccatggcccacactgcycccaatcctgtgcctataa

SEQ ID NO: 945949 - DNA, 566 bp, Homo sapiens
gcagctcctgctcggacagayggagcagcttgtggagactcacactgtgaacttttgctcaaggaactaccacggcaacataccaggaaagctgagagaatccacagatgctctgaaggaactgtgtagcttccacagtttccctgagatgctaaaaaaactgtaaggtctgattgctttctcagtggggaggctggtggtctggaacaagttctcagccctggccaccagctgcctggaaatagacttggtactgttggggggcacagtgggagtgatactggcctttaggactgtgtgttgcatgggagcatggtgaggcctgtgactgccagctttcccccacttccctggccacctttatgaatcagcagaggcagccataatcctcctggaaacataactccattggctggggaatcacacccctatcccccgcagcagccgcagcaagccccgcccaaggagagtctgagctcagacacacctagctctgggcctaccctttctctacccaccctgggtgcgcaagacaaaagatataatttcttgggagttctatggcc

SEQ ID NO: 945950 - DNA, 566 bp, Homo sapiens
gcagctcctgctcggacagacggagcagcttgtggagactcacaytgtgaacttttgctcaaggaactaccacggcaacataccaggaaagctgagagaatccacagatgctctgaaggaactgtgtagcttccacagtttccctgagatgctaaaaaaactgtaaggtctgattgctttctcagtggggaggctggtggtctggaacaagttctcagccctggccaccagctgcctggaaatagacttggtactgttggggggcacagtgggagtgatactggcctttaggactgtgtgttgcatgggagcatggtgaggcctgtgactgccagctttcccccacttccctggccacctttatgaatcagcagaggcagccataatcctcctggaaacataactccattggctggggaatcacacccctatcccccgcagcagccgcagcaagccccgcccaaggagagtctgagctcagacacacctagctctgggcctaccctttctctacccaccctgggtgcgcaagacaaaagatataatttcttgggagttctatggcc

SEQ ID NO: 945951 - DNA, 565 bp, Homo sapiens
cccagctagttttagtattttttcgtaaagataggattttgccatgttggccaggctagtcttgaacttctgagctcaagcaatccaccaaccttggcctttgaaagtgctgggattacagatgtgaactacaatgcctggctgcttatgtatttttattttttatttcttaaaatatttatttgagatggagtcttgctctgttgctcagactggagtgcacggtggcacgatcttggctcactgcaacctctgcttcccaggttcaagagattctgctgcctcagcctcccgagcagctgggattctaggtgcctgccaacatgcctggctcacttttgtatttttagtggagatgggtttcaccatcttggccaggctggtgtcgaactcctgaccttaggcaatccacccaccttggcctctgaaagtgctgggattacaggcgtgagccaccacatccggccttytttttttttttttttttttgaaacaggggtcttgctctgtcacccaggctggagagcagtggcacgatcatggctcactgaggggattcagacaa

SEQ ID NO: 945952 - DNA, 529 bp, Homo sapiens
tgagtctcctgcctcagcctctcgagtggctgggattacagcgtgtgccaccatgcccagctaatttttgtatttttagtagagatggggtttcaccatgttgaccaggctggtcttgaactcctgacctcaggtgatccacccgccttggcttcccaaagtgctgggattacaggcatgggccactgcacctggccggaggactttttcaagcagccaccccgaggcaggttctgggaccctgacattgctcaaacaagatgtcctgagatactggacggccacagaagttattgtggaccagcaactgctctgacaactttccaaagcaaaccatctcagcctggctcttggatgtggagggcttgctggataatgtgtgcaccacagtggacccagagaggycctatggaaaagtcctggcttggctgcaggcctgcccttagcctaccatctcaggggtgtaggtggctgcccatgcaggtgagatcttcgttgagctgggccttgccttttggaatgagggtga

SEQ ID NO: 945953 - DNA, 569 bp, Homo sapiens
gcaagcaagagacagaaaaagcctgtagaaatggtttgtacatttaaaaaaataaaacaacaaaactccagtataagccctggtttcatctgagaaatgtttcctgttttcaaagtaatggaaaaattcaagaaatacatgctttatcataacacaaatacaaaatacatcttaatggaaaaaattatttcagaaaactactctggctcagataaaacttgcgaaaaaatttccagccatcatgttggcagccagttctaacacagtttattttaaatatgatagtattcataaaattgctcattgtcataaggctgacaataaaaaattatggcaacaggcatgataaccacaagcacaaaagttagttttgcatttaccatttatgtattcagttcattacttcaatgcattcacacttattaatgtctttagaagtgtttttttttctgtcatttcccacatgcatatcttgttttggaagcaatataataagytcttcttggacaggaggtattcactgtattttctctctctctccttttttttttttttttttgtggagacag

SEQ ID NO: 945954 - DNA, 713 bp, Homo sapiens
agggatataaaggtttcactgaataccaagagcctgaaaaaatgcttggctgatttgactaataaaggccggtctgctattggactgtatagaggtgggaaggccaaaccgagaaattatgtctgacagaaggaaagaaatgacaaggctaaactgaagaattatgtctgacagaagggaagaaatgactatggtggccttcttagaccctgtgggaaaggcctctacttatccagtgaaagtgtctacctagaccaagaggtattttagtttgctgactcggggcatgttgagtaaagctaatttgccagtcttgggcaggggcaaatcctggagcttgatgtgtagggaagggtgggggcctgaataatctctgagaagtagtagaatagcagatggaatactgagaagttatttccttgaggatagatttctatgatggaaaggaaatgagaggttctaagaggcgggctagtggctagtactatagcatagcctgcctttgctggcgtggggcgattaggcctggtggaactgccctcaataaaccaagcgtgatgagggcgaggaacaggaaagaaggaaacatggggaaatggggtgaatgtcagatggatcagagagttatagtcataggggtcaggtgtggtatccagaataatgtgggaggcyggattgaagtccgggccaggaacaatggtaattgtgggaga

SEQ ID NO: 945955 - DNA, 583 bp, Homo sapiens
gctccataatcactgaaacttgttggtaatgcaggtcactcatctcagtctccatactgctccttccatcactggagaccagtgagttgtgagagtttcattcctgggagagtggataatgaccatgcccgttcattcaacggcacgaaactaaagataagagaagctcctggcaagtgctggctcaccatggatacatccatgctgaagggttatccctttctgaagggtcactggccacagccttctctggggcaccccatgatgtcactcacaccttcttctctcatgctttccaaatgtacccttctgctctcaagaagtgtggaaaacacacaaaaacccagcaattgcatagagtaactagaatactgcattaaagagcctctagacttacattgcttcagaagttcagaaagatggtaacatcatcattaattctgtcttcacattactaaccaggatgacatggagggtgggaagcagaaggctagagaccatgatctgtgcatgtctggagtcacacgtttttttgcacactgaygctgttgcaaacatttttcactgtagaccccagcagctc

SEQ ID NO: 945956 - DNA, 431 bp, Homo sapiens
aagtacagatgggcttggctgggtctatgctcagggaatcataaggctgaaataaaggtataaaccagcctgagtttttattcrgaggctctgagaaagaattcccttctcagctccttctggttgttggaagaattaatttctttggggtggtaagacagaggttcccatttgcttgctggctgtcagttgtaggtgctctcagtttctagaggctacctgtatttcttgccatggggacccgtccgtcttccaggcatcaatagcttgtcaaatcctgcttgtatttcgaatctctctgacttaattttatgccaccagccagaaaaaagtctgaatttaaaggactcatgtgattatatttgtataatatatgtaatttacatattacatgtaataatccatgtaatttccctattttcaggtcaact

SEQ ID NO: 945957 - DNA, 574 bp, Homo sapiens
tgacagaaccctgtaactcagttctttcccagctagaactccattctagctcagttgcagtcatgggccagtattgcctgcccaggtrtttaaccagtgacacagcaggaagccgtcccgaaacccagaggaagtgatacccatctgagcatctgtatatttggtaacagtctttctgttggcagacactgaataagacgctggtccaggtgcaacccctactgaccaaggctgtggaggcagttaagtgcaccaagagactagatagaatccatgcccattcaagcacttggtaatagatctgccaactacaggctccactgcaaacccggcagcagttaggtgacctggcttcaaccccattcatctgtgatcctgaaggtagtcatgtctttgcaaggactccaaaagagaaagtctttatatgctaaaaccagcttataaaaactgaaagaggtgtttgctcctttagttgcacaggcaataatgtgaggctttatggacaataaaacaaccaaatgaaactagaaaggctccagtaatcaatcctatagaaatagagatctacaaattg

SEQ ID NO: 945958 - DNA, 604 bp, Homo sapiens
actgagaggaggactgaggctcttctaggttaagtcacttgtccaaagcagcccagtgagaatacggtrggtccctgacaaaaaccccaaaacccaatctgtctcacttgagagcaagtggttttcccctattgtgagtaaacacaaaaactgcaacttgatgaaatgaatgaataaatgatcaatgaaaaaaagaatacccatgtgtatcttaaggtctggaagttgcaccaaccattttagcaaggcagtcaaagaaagaaatctatagcagtttgatatctcaattgtttgctagaatcacctggaaggagacaaaactgccagaggggatcatcatgagagatgttgacagagactgacaagaggagtgttgccttcctaactcctgctgcatcaaagtgcccccgaaagaatgcagggccttcatctcccgcccacggccatccgagaaagtggcctgctgccaagttgctataaatctgtttttttaatttaaactcttctctggcctcaccattagcattgctgcacaagcaaggaaagggagtggagcccctctgtgattatcaccagaaaaaattcaggggaagaaatagaaaag

SEQ ID NO: 945959 - DNA, 457 bp, Homo sapiens
attcattctccaagacaccactctcaacccactcactgacgtgcatcctcatctttgctcaaatgacatcaaggtgccatttccctgacatctcgagcactccgggacagtatttggatttcttctctatgcatrctcactttaaaaataatcttgtttagcccataggctttaaatatgttaaagtctccccaatttaattcttcatgcccaaactctctcctgaacaccagatgcatatatcataatgtccacctaacatctctatttggaagttgaatggacatctcaaagttaatgcatctgaaacgatctctttgttttttaccactgcccacacacctaaaactcctcctgcagtccttttggtcttagagtctagccatgcagatactcagccaaaaacttggagtcatctttgatgcttctgtctatgtcacacatcacatcggtaaat

SEQ ID NO: 945960 - DNA, 730 bp, Homo sapiens
acctagaagcctggaggaccttggtaaataactggactcatctgtcctcactctatcctcaagaagkttgttccaaaaagggcagtgtattagtctgttctcacactgctataaagagctgcccaagactgggtaatgtttaaagaaaagaggtgtaattgactggcaattccacatggctggggaggcctcaggaaacttacaatcatggcggaaggagaacaggcacatcttatatggcagcaggtgagagtgagtgtgttaagcccaggggggatccgccatttataaaacgatcagatctcgtgagaactccctcactatcacaagagcagcatgggggaaactgccccatgatccagtcaccttccatgaggtccctccctcaacatgtggagattatggggattacaatttcagatgagatttgggtggtgacacagagccaaaccatatcaggcagcttgatgccacccaggagacactgcagacctaggtcagtctcctcaactctgggtcactgggccaaggagactttttcaacataaaggccccaagctcttggcatgtatgtcctggaattatgaagcatggattaaagcgtgggatctccccatccagccccaaaccctgacatccaggcactatcaccacacccagcagggctcccaggaccagagaggcctcctgaccctttcttcacaccccttaaagacaggttctggaaggt

SEQ ID NO: 945961 - DNA, 622 bp, Homo sapiens
taacattttatctatctggaggcccaggagggactctgggagccaagattcctactggccccagcagagtacagggagaacattcagttcacaaccagcaggtggttcctaactttctgagaaggtaatgaaagttctggatgttctccccagaaatgcacaaaaacatatgcacatactgttttgcacacagcttcagggaatcacccaccctcagaagcctatccatggagccctgcactagtactttgatctaaactatgggtcctttagtgtgggtgctgagaaacaatgggcaaaacatatgtattctggggaatgggtgctcagaaaatgttaatgaatgaccttgactttgaccaggccaagatccttaattgtggtcactgatgggtatttcttatactctctgctagagcctgtgtgagcccttagctggagctctcccagggttcaggtagaataagcagcccactgcatgggggcatctgtggggttcagggaaggccccgctcctcaaaagccccttcctcgaacaatctgcctttggactcaccatccctrgaactctgccgttagcataacatccttttgaaggatccttttgagtttacggagcccc

SEQ ID NO: 945962 - DNA, 775 bp, Homo sapiens
actaaaagaattgtggaggccagtcgtggtggctcacgcctgtaatcccagcactttgggaggctgaggcaggcaaatcacctgaggtcaggagttcgagaccaacctggtcaacatggtgaaaccccgtctctactaaaactataaaaattagttgggcatggtggcgggtgcctgtaatcccagctactcaagaggctgaggcaggagaatcacttgaacccagggggcgaaggttgcagtgggctgagataaccccattgcactgcagcctgggcaaaaagagcaaaaccgtgtctcaaaaaaaaaaaaaaagaattgtgtaagggtctttgacaaatggttggaggtaaggaaggtaagtgccacagaggaaggaatgtcagtcatcacgttcctcctgatgccctcacaggtgtccgtggtggggaatctctctgggctctgcctgcctgcagggcctccctcttctgggttgtcatgagtctcctcctgtctcagatcctggcactgaaaactcaaacttgtagcctgatgataacatcatatggggttctgtctggggctggaatgtgagccctctccatgtacacaaccctttgcaggtcactgttggagggatgcctagaggacactgcacactaagagagaaccacctgggctgcaggccgccctcaccttctcatttgggattcatgagccactgaggacyccagtcttccatgtgccaaagcggggtttggccttgctgacctctgagattgacccccggctt

SEQ ID NO: 945963 - DNA, 628 bp, Homo sapiens
ccctaccttgagtctctgcttgtggatagcccttcctgcatggctggtggctcaaaccctgtccattcaagacccagctcagtgccgtctatcccacagcatcttctccaagccagcacctgtttccctcaatcactcattcagaccttacctgaaacctacctgaggccagaagctatgccaggcactggggtgcagagactagtcagatgcaggctctgcttttgagagctttcctgaggagtgagagcttttcggagtggggagcaagtccatgactgcccccaccccagcacctacctttgcacccctgtcgaacaggtgcaccacattggaggatgctgctcagagcaatgttgcagaccttgctaacgggagacagaacagtcatacctcggcctgcagaagtccagggaggagggaagtggtttcagaagttccaggggcagaggggaacagataggagctgagggggcagcttctggtggcagccgaggtggccaagcccactcctctcctggatccacctttgcygggacaggcggggttcttcctggaacctcagggagccccagagcttggtttgcagaccctcctgatcccccaggccagccaggcctggctgcag

SEQ ID NO: 945964 - DNA, 796 bp, Homo sapiens
attggagtcaccacttggttaagcttacgataatccactgacattctccaagattcatctgtcttctgcacaggtcaaatgcgagagttgaacagggwtgtggtgggaatcaccactcctttgtctttcaagtccttgatgatggcactgatctccacaatccctccagggatgtgatattgtttttgacttactatttttctaggtagaggcagctctaatggcttccatttgtcctttcccaccatagtaacgctcaccctaccagtcagggagccactgtgggggttctgccagctactaagtatgtctatgccaattatgcattctggcactggggaagtgaccacaggatgagtctgggggcccactgtaagtcaggcctgagctaaaacttcattagttacctgacctccataagcccctactttaactggaggaccacaatgacattttgggtgccctggaatcaatatcagctcagagccagtgtccagtagtccccgaaatgtctgatcatttccctttccccagtgcacagttaccctagtaaaaggccagaggtcttcttggggaaggatgggagaaaaattcactgcataaattgttggtaatgtagtggggtccttcctcaagggaacccggcctccccttcattcagggggttccaggtctattaactggctcaagtctggaaattgagaggccatgattctctgtttttataattcaaattagtctttcgtccattcgacctacaagttttctgcttgtataaagtaggaatatagtaggc

SEQ ID NO: 945965 - DNA, 572 bp, Homo sapiens
ttttaaaataaacccaagcaaaatttctgtaagtctagtrttggcattttctggaaatgttaatagagatcacacaataaagaattgcctggtctaagatacaataaaaattgtgagaccttttgttcaaagccattcagagaaattatcttggagattctcacatttctgaaaggaggaaggagggggcatggctgagaagattgccgtattattcaactgaacaatcctcagggaaggtatgtgttttatgaaattgctgtcactgtcaacatatttagcaatatggcactgcctcagtagttttttaagaccaatattacatctagttattggattttgagactttctaatagttggcattattagaatggagagactaaatgttagttttaataggagttatccatgtatctatcccaggtacatctggtgtggttttttaaaatttatctgtaatttgtttcatttttagacaaattagatatatgctctcctagataaaaatttataaaaatctcattcctttatatgaaagacatctttagcactcacaccagaagtgatctcag

SEQ ID NO: 945966 - DNA, 624 bp, Homo sapiens
attacgaagttagcagcttaaaatagcacacatttagtatctcactgttctggtgggtcaggagtccaggcatagctttgcttgtcctttgattcaaggtctctgacaaggctgcaatcaggatgtcagacagagtgggaggcttggctgagggggggatcttattccaggcccctgtggttattggaagaattccatttcttgcagattgtaggcctcagggcttccatttcttggtggctgttggcaggagaccacatttagtttttttgccacatgggtcttcccaacatggccacttggttcatcacagtgttccatccaatcaccactgtgttccatcacagtggagcaagtcacagatcctgccatgctcttgaggaggagatgatacaaagacatgagaatcaagaagcagagatcattgggaccatcttaggaactctccatcacaagctctgaagctgggatggcctttttgagctgtcccaagttgggaacaggaagaaagaagatcagacttttatacctccccatgaatccatcactrgacttgggtcatcccaggaaagtattgtgaccttggaagaggtagctttctgctgatgaggctatttctggcat

SEQ ID NO: 945967 - DNA, 562 bp, Homo sapiens
cctctctgcctcatgatgtctgcaaacgcacagtaaaattaagaaattgtgccaatgctaatattcccagtctcaacaaagtggtttgtttattaggtcttctggctcayaaaagaggtatttaaaaactctgcatgtagccttgggaaccgaccacggaaaaagtaaacctaaagcacaagttttgcctttgcaagcagcaagcactgaatcaatgaacattagaccatttgagtgaaggcaacaagatcacaatcagaaagaacagcttactgatcaaaggtagatatccctgaattgtgatccatcaatctgtgaaatttaaaatagcccacatatgagtatttaaataaattaaggtatatctaagtggctatgaaaacaaactgctactgtagaaaactatctgttaatatacagaaatgtccacgtcatatatctaaatgaaaaatatattgtgaaaactgaattccctaatttataattgtctttatatatttatatatgttgttacatactttatatatcaatgtctttttatctatttcataaatgaataatc

SEQ ID NO: 945968 - DNA, 585 bp, Homo sapiens
actcctagtaaataaagaaaggaggtagttaacctggtcaattctccttgtaaacayactagtgtcagatctcttgacaaacaatccaatggtgtttattagtaagaaagtccctatcgatggattttagcaggacgtatctaatctgtctaggattacttctggttaacaaatttggaatctttcaatatagggagtatagccccttggaaaatatgtcacataagttatgcaaccactggagtacaaagcgaaaatgattcctaatggaaacagcttcctaacataccacaggcattgcttctaagcccttgtaccttaaatctgggcccacagcatcctagtgcagctagagaggacctggagagtagggatggatggctatcctgtacctgaggactactcgtattcctgaacattattagtaaaccttgatgtaagctaagggctgattcttgtgaatgtgatttgacacttttttttctcttatttttgagacagggtctcactctgttgcccaagttggaatgcaatggcatgatcatgactcactgcagcctcaacccctgggctcaagagatgctc

SEQ ID NO: 945969 - DNA, 646 bp, Homo sapiens
attgaagagactgtcctttccccagtgattattcttcttgcctttktcaaaaatgagttggctgtaaatgcgtggatttctatctgggttctgtattctgttccattgatctttgtgtctgtttttatgttagtatcatgctgttttggttactatggctttctaatacattttgaagtcaggtagtgtgatgcctacagctttattctttttgcctgggattgctatggctatttggggtcttttgtggttccaatttaggatcgtcttttctatttctgtgaagaatgtccttggtattttgatagggatgccctgaatctgtagatcacattaggtaggatggacattttcacaatattagttattccaattcatgagcatggaatattttcccatttttaaaatgtcctctttaatttctttcatcagtgttttatagttttccttgtagagatcattcctttctttgtttaactttattcctaggtattttatattttttgtatttaatagctattgtaggattgctttcttaatttctttttcgttttgtttgatgttggtgtgtattaatgttagtgatttttgttgttgattgtgtattctgcaactttactggatttgattattggttctagtagtt

SEQ ID NO: 945970 - DNA, 771 bp, Homo sapiens
gctggagtgcagtggcacgacctcggctcactgcaagctccacctcccgggttcatgccattctcctgcctcagcctcccgagtagctgagactacaggtgcccgccaccacacctggctaattttttgtatttttagtagagatggggtttcaccatgttagccaggatggtctcaatctcccaacctcgtgatccacccccctcggcctcccaaagtgctgggattacaggcgtgagccaccgtgcccggccaagacatttttttaaatgtcacttaaaattagttaacaactccagcacttcaaccttaggatcacctagtgaacctgttttctttgcattgttaacagtttatccagaatttctgatgcaggaatcttgaaggctgcttattctctatcccagtcttggcatccttctattctgaggctgggacagaaattagggatttattttctcctataaaaaaaaaagagggaatgacaatgaccagcccagccatggtggcccctgcctgtaatcccagcactctgggaggctgaggcaggaggattgctcgagctgagaaattcgagagcagcctaggcaacatagcaagactttgtctctactgaagaaaaaaaagacagcctatctaggaattaggtccttggaggaggcagcctatcctgctgccagtttasgctttccctggagccagctatgcatgtctcctctgcccaggctgagatgattgtcccatgtgggtcagtgtggcaagataaaggca

SEQ ID NO: 945971 - DNA, 448 bp, Homo sapiens
ctgtctattcatcaagagacaaggaaagatactcagaacaattaactttgtttttaactattgatgttgctcccaatgtcctcaacttttcaatcaacttttgttaccaaaagactcacagwcttgaacaagtttattttctgcggacacatttcttcagctaataaaaacacagtttaattagcttaccattgataaatgggtttccttgcttgctaacaaatgaaccacttggaaactaagtttggttgcagcctcatttacatttgtaattcttgtgaagaaattccactataataagatattctattttaaatttcctaattgttctgcctgttgctttcctgtgaattggacatattgtgatgagtgcttagtctggcaatgttgacatatattctgttgttttagcatagttatagtgtcagtgcatactaaacacatgctt

SEQ ID NO: 945972 - DNA, 448 bp, Homo sapiens
ctgtctattcatcaagagacaaggaaagatactcagaacaattaactttgtttttaactattgatgttgctcccaatgtcctcaacttttcaatcaacttttgttaccaaaagactcacagtyttgaacaagtttattttctgcggacacatttcttcagctaataaaaacacagtttaattagcttaccattgataaatgggtttccttgcttgctaacaaatgaaccacttggaaactaagtttggttgcagcctcatttacatttgtaattcttgtgaagaaattccactataataagatattctattttaaatttcctaattgttctgcctgttgctttcctgtgaattggacatattgtgatgagtgcttagtctggcaatgttgacatatattctgttgttttagcatagttatagtgtcagtgcatactaaacacatgctt

SEQ ID NO: 945973 - DNA, 491 bp, Homo sapiens
tttaagttcagggagtaccagtgcaggatttttacataagcaaacttgtatcatgggggttagttgtatagattatttcatcacccaggaattagcctagtatcaattactttttcctaatcttcttcsttctcccaccaccgtccaccctccaaaaggccccaatgtctgttgtccccctctttgtgtccatgtgttctcatcatttagctcctacttataagtgaaaacatacagtatttggttttctcttcctgtgttagtttgctaaggacaatggcctcaagttccatccatcttcctgcaaaagacatgatctcattattgtttatgactgcatagtattccaaggtgtatatgtaccacattttctttatccagtctattattgatgggcatttcagttgattccatgtctttgctattgtgaatagtgctgtaatgaacacatgcatgcatgtgtatttataatttaatgatttctattcctt

SEQ ID NO: 945974 - DNA, 690 bp, Homo sapiens
atttgcaagagaattttgcaggtaaaatacatactgatctttytaataaactgaaaacacctagtaaaaaaatacacgtggtaatagcacaatgcaatttgtataacagctagaacaaattcttgaccaaaaaatatgatgcaactgtgcagaaaatgacgttttacttagggagataatggctaatttcataaaatagtgaaatatgtcacactgttcactggtaaaggtaagtctagcaaatctattagttttcctgtatcacaaaatcgaatcaaatctctttaaaacgtatgaaaccattgtaaatataacttgtgttgcattgctgtctttttttttttttttttttttttagacagaatctcgctttgtcgcccaggctggggtgcagtggcccaatatcagctcactgcaagctccacctcccgggttcccgggttcacgccattctcctgcatcagcctcccgagtagctgggactacaggcgcctgccaccacgcccagctaatatgttgtatttttagtagagacggggtttcaccgcgttagccaggatggtcttgatctactgacctcgtgatccgcccgccttggcttcccaaaggaattgctgcctttaacatgtcattgatcctttatttttcctggaaatttttcattattcaccatctttttgaacaacccca

SEQ ID NO: 945975 - DNA, 722 bp, Homo sapiens
aacatacgtgtgcatgtgtctttatagcagcatgatttatagtcctttgggtatatacccagtaatgggatggctgggtcaaatggtatttctagttctagatccctgaggaattgccacactgacttccacaatggttgaactagtttacagtctcagtaaactattgcaagaacaaaaaaccaaatgccgcatattctcactcataggtgggaactgaacaatgagaacacatggacacaggaaggggaacatcacactctggggactgttgtggggtgggggtaggggatagggatagcattgggagatatacctaatgctagatgacgagttagtgggtgcagcgcaccagcatggcacatgtatacatatgtaactaacctgaacattgtgcacatgtaccttaaaacttaaagtataataataataaattaaaaaaaaaaaagttctgactcatgcgatggcattgatgaaccttaaagacatcacgccagcagaaataagctggcttcaaaaggacaaatattgtttgcttgcccttatatgaggtatctagagtagtcaaatccatacagacaagaagtagaatgawgttttccaggtgttaagttttggtttgggaagatgaaaaatttctggagataaatggtggtactgtggttgtacaacagtgttaatttacttaatgacactgaagtatacacttgaaaatggttaaa

SEQ ID NO: 945976 - DNA, 577 bp, Homo sapiens
cacagagaacctctactagggcagtatggaggggaaatgtggggttggagctcccacacagagtccccgctggggcattgcctagtggagctatgagaagagggctaccrttctctagactccagaaaggtagatccatccacagattgcaccgtgcacctgaaaaagccacaggcactcaatggcagcccatgagagcagccgcaggtgctgaatcctgcaaagccacctgagtggggctgaccaagaccttggtagcccacccctcacaccagtgtaccctggatgtgggacattaggtcaaaggagatttttttggagctttaaaatttaatgacttccctgctgtgtttcagacatgcacggggcctatagaccctttgttctggccaatttctcccttttgaaatggaagtatttacctaatgtctatacccccattgtatcttggaagtaactaacttattttatattttacaggctcataggtggaagggacttaacttgtctcagatgagactttggacatttgagttaatactagaatgagttaagacttttgggcactgctgggaag

SEQ ID NO: 945977 - DNA, 749 bp, Homo sapiens
tgcagtggtatgattacagctcactgcaacctcgaccttttgggcttgagccatcctcccacctcaccctccctagtagctgggatcatagacatgcactaccatgctgggctaatttgtaaaatttttgtagaaatggaggtctcactatgttgcccaggttggtctcttggactccagccattctcttgctttggcttctcaaagtgttgagattacaggtgtgagccaacacgcccggcctccattattatgagaataaattctaaaggcctttccatgcccttcaatgaaagcccttcacaacctggtccctgcccactctccaacttcatctcactccactctctcccttgatccttatacttcggccacactgttaggtttattaaacacaccaaacttacagtgggtcctgcatcttggcactttctattccttctgtttgaaaagctcttcgctgggagtttgacatgactgccttctaaatcattcaactgtcagctcaaatgtcatcttctcataaaggaattaccttgtaattccagccaaagtcactcctccaccaaatctgtctattgttttactgtaatgtctccataactgtactagaatgagaagttatyttatacatttattttcatttttattggttatttcctctctctagaatataaattttggattgcaagtattcaccactaaattctccaaaatctaaaacaatggcacatgtcaagtacttagta

SEQ ID NO: 945978 - DNA, 671 bp, Homo sapiens
taaggtcttagattgtcccaaaggtggcgcatgaaatccaatcaggagaacagtttcctacgaggtgtagcctgggaaagttgggggtgactgrtggaaaggaggagtgaagctccgccctttctgctgcgaggctgcgcccgaggctatttaaacccaccctggcaggcctgtactcagatcttcgcagagcggagcagcggccggagcgtttggcggactctgcgtggacttggagctcacagcgtcttgcgacttggaagcggattcagaggacaggacagaacacttgggcaagtgaatctctgtctgtctgtctgtctgtctcattggttggcttatttccattttcttaaggagcacatacctcacaccacacacacaaacacacacacacacacacacacacacacacacacacacacactccttcattctgcgggttagaaaattagtgggggtccctgggagctgcaggtttcctaatcatgtctgcacctaagaacagtagggtcttgtctggctcttcttatgaacggtcccccagcccggactccccaagatccatgctagcctcacccagcttctccctctcccctctcagatactcagacttaagaggaagctcctcaccagggatccggagctaccattcaccatcccctagggct

SEQ ID NO: 945979 - DNA, 595 bp, Homo sapiens
tcatggggatggtctcccccgtgctgttctcatgaaagtgagtgagtctcatgaaatctgatagtttcacgattgtctggcatttygcctgctggcactcactctgtcctgccaccctgtgaagaagaagcctgcttctcttttgccttttgccatgattataagtttcctgagacatctccagcaatgtggaactgtgagtcaaataaacctctttcctttataaattacccagttttgagtgctttctcatagcagtgtgacagcagactaatacagtaaattggtaccaaggtagtggggcactgctataaggatacccgaaaatgtggaaacaaatttggaactgagtaacaggcagaggttggaacagtttgaagggctcagaagaagataggaatatgtgggaaactttctaacttcctagagacttgttgaatggctttgaccaaaatgctgatactgatatggacaatgaagtccacgatgaggtggtctcagatggagatgaggaacttgctgtgaactggaacaaaggtgattcttgctatgctttagcaaaaaaactggtggcattttgctcctgccctaaaga

SEQ ID NO: 945980 - DNA, 572 bp, Homo sapiens
accacatggtagaaagttgtttgtatttccttctaaaagtcttgttttatatatgaaagttcttaatccatcgaagttaatttctatgcctgataaaagagtgagatctaatttcatttttcttccatatgggtaatccaccatctctttatgatctgcagtgacacatatataaaaattccataaatgtttagactttttttttttttttttttttttttttttttttttttttgagacagggtcttactctgtcacacagactgcagtgctttggtgcgatctcggttcaccacaacctctacctcccaggctcaagtgattctccttcctcagcctcccaagtagctggggttacaggcgcatgccatcactgcccggctaatttttgtattttttagttgagatggggtttcactatgttggtcaggatggtcttgaactcctgacctcaaatgatccrcctgcctcggcctcccaaagtgctggaattacaagcgtgagctactgcgcccaggcctaaacatgtttttaagttgcctattcattatgttaataaaagtattcaccaa

SEQ ID NO: 945981 - DNA, 548 bp, Homo sapiens
tcctatatctggcttatttcacataacataatgtcctccagtcccatccatgttgttgcaaatgacagaatatcattcttttttatggctgaatagtactccrttgtgcatatgtaccacattttcttcattcatctattgatatggacacttaggttgcttccaaatcctgacactgtgataaatatgggagtgcagatgtctcttcaatatactgatttcctttctttggggtatatacttagcagtgggattgctgaatcatatggtaattctatgtttagttctttgaggaacctccatactgttctccatagtggctgtactaatttaccttctgaccaacagtgtatgagggtctccttttttccatatccttcccagattcattattacctgtcttttggacaaaagccatttcaactggagggagatggtatctcattgtagttttgatttgcatttctctgatgatcaatgatgttgggcaccttttcatatgtctgtttgccatctatatgtcttcctttaagaaatgtcatcaggca

SEQ ID NO: 945982 - DNA, 579 bp, Homo sapiens
taaataggttaaaatatgtactttaaaagctgagaggagaatacagagtaggcttggatacagggagtggagaattttcttagagtgtcggttttacccataaatactgtgtgtagaaatttcaatgtaagaactaaagaattgattatattgtgttatacaaatatctaatgactgtttaggatttttttcctaatgagctttcaaagacttgatggagaagtgtggggggaactgcaacactctataagaggctgagctccagactcctgagaaaaaacatttactcggctgggcgcggtggctcacgcctgtaatccccacactttgggaagccgaggtggggggatcatgaggtcaggagatcgaaaccatcctggctaccacagtgaaaccccgtctctactgaaaatacaaaaaaaaaaaaaaaaattagccaggcatggtggcrggcacctgtagtcccagctactcgggaggctgaggcaggagaatggcgtgaacccgggaggcggagcttgcaggagccgagatcacgccattgcactccagtctgggcgacaagagcgaaactccatc

SEQ ID NO: 945983 - DNA, 691 bp, Homo sapiens
ctctcacttggaccatccagcggtctgtaacggtgtccttttagtcttttgcccacagaggctaatgatattttaaaatgtgaatccaagtcaaacyccaagtcacaaccctccagtggctgtttgccacacttacaataaaatgtatagtcctcatcaaggactccaaagccatatatgagctgacatctccttccctgccaccctgacctcatctcttttcttctttctttcactttcctgccccagtcccgccggcccctagctggtccttaaacccacagcatgtctcaggcctttgcagttgttttccctccaggaagctgcatgattaccctatttagaggaggcttctcttgcatcgttccccaaatgctgttccccccccctctttattccccaaatttaatttttgtcatagtagagattatttatcgactgatatgtccatctcttccactagaatgcaaggtccacaagggcaaaatctttgtttttttgactattctatttcccatgtctagaacaatatctgcatatagtcaacatgcaacaaatatttatatttaagtctcatgtctataactaacatgttttgagtgcatatcatatgccaggcatagggcaaagttatttctattatctaaacctcacaaaaatcccacagagtgagtcccttttcatattccca

SEQ ID NO: 945984 - DNA, 652 bp, Homo sapiens
ctttatttgattctcagcttggtttctgttggtgtataagagagctactgatttgtatattaattttgtatcctgaaactttgctgaattcttttatcagttcttggagctttttggaggagtctttagagttttctaggtatacaatcatatcatcagccaacagtgacagtttgagtttctctttatggatttggatgccttttatttctttctcttgtctgattgctctggctaggatttccagtactatgttaaaggggagtggtgagagtgggcatccttgtctcattccagttctcagagggaaggctttcaacttttctccatttagtattatgttggcggtggttttgtcatagatagcttttattacattgaggtatgccccttgtatgcccaattttgctgagagttttaatcataaagtgatgctggattttatcaaatactttttctgcatctattgagatgatcatgttatttttgttttaaattctgtttatgtgttgtatcatatttattgacttgtgtatgtcaaaccatccctgcatccttggtatgaaacccacttgatcatggtggattatctttttgatatgttgttggattyggttagctagtattttgttaagatttttgtatctatgtt

SEQ ID NO: 945985 - DNA, 623 bp, Homo sapiens
ctcagaagggtcaccaggcttcacttccacagtctgagagcatgtcactgtctgcagataggagagcccaccaggagcgttacagcctctttagctcccatttgcagcttgagaagccagctaggaaagtgtttcagtgatgtaccagtcaggaagctgttttggctcctttccagcctgccattcagcagaccctgagtttttgtcctgcgtccaggaagaataagttacacggacattgaagggtgagcaggtcagagaagagctttattgggcaactgaacagctctcagtggagaggagacccaaaacaggtagctcctatttacaggcaggtagtcccaaggagtgtctgagtctggctcagtctggggggttttatgggctcagaatggagtcagtgtgtgctgattgatccacgggcaggaggaactgcatgctgattggtccttggatgggcctagaaaaagcatcacttgactggctgaaaggcgtcaaagaagttctcrctctgggtcatgacttcacccaaactggcagtctcccacccaggcttcaggccatccctggtttgaaggtggggtttcaccagggacctgccccttcctgcctaggaacctgtc

SEQ ID NO: 945986 - DNA, 603 bp, Homo sapiens
caaggccagtatggctggaacataggaaacacatatggtatgacttgatgttagaaaggcagaaaggaaccacagcatgctagagttttgtgggtcatggtaaagaatytgtgtaaagacactagatggttttgaaaaggagagtgatgtagtctgaattacattaaaaatgttaatctttttgtttcaatggataaatggataaaaagtgtggtacacatacacagtggaatactattcagtcattaaaaggaatgaaaccctgtcatttgcagcaacatggatggaactggagttcattttgttaagtgataagccaggcccacaaaggctaatatcacatactctcactcatatgtgagctaaaaaagttgatcttatagaagtagagagtggaatgatgcttaccagaggctgagggggtgtgggaggaaatgaagagaggtttgttaatgggcgctaaaatgtaattggactgaaggaactagttctattgttcagcagcactgtagggtgactatagttaacagtaatttgttgtgtatttcaaagtagccagaagggaatatttggaatgctcccaacacaaagaaatgataaagg

SEQ ID NO: 945987 - DNA, 434 bp, Homo sapiens
aatagatatttattttacatgtgggttataatccaatactgctttatttatttttctgttagaattgttccatttttgaccattgggaactctctcagtcttctcctgtgtcgatttcatatgccccccacattttttaaagcacttccttactttctggcattgcaagatgcaccaggctcatcttgcatatttcccactccagtaccagcatcagccaattctccaagaagccttagtttctttccttggaaaatggtattagaaatcagtatctgggaattaggtgttcatttcactactgrggagtcaatcgttttaggcctcttccacagaaagagaagagaaatatgtatgtatatatgaatgtatatatacacacatgtatctatacataatttatctatagttacttatatctatattaaggtaaa

SEQ ID NO: 945988 - DNA, 434 bp, Homo sapiens
aatagatatttattttacatgtgggttataatccaatactgctttatttatttttctgttagaattgttccatttttgaccattgggaactctctcagtcttctcctgtgtcgatttcatatgccccccacattttttaaagcacttccttactttctggcattgcaagatgcaccaggctcatcttgcatatttcccactccagtaccagcatcagccaattctccaagaagccttagtttctttccttggaaaatggtattagaaatcagtatctgggaattaggtgttcatttcactactgaggagtcaatcgttttaggcctcttccacagaaagagaagagaaatatgtatgtatatatgaatrtatatatacacacatgtatctatacataatttatctatagttacttatatctatattaaggtaaa

SEQ ID NO: 945989 - DNA, 551 bp, Homo sapiens
ggggaaaaactgaaagtctttcctacaacctctggaacacaataaggatacccactttcaccactgttattcagcatagtcctggagtcttaattagataaatcagataagagaaagaaataaagggtatcaacacaagaaaggaaaaagccaaattatacttgtttgcagatgatatgatcttatatttggaaaaaaaattctaaaatttggccaggtgtagtggctcatgccagtaatcccagcactttgggaggccaaggtgggtgaatcacctgagctcaggagtttgagacagcctggctaacatggtgaaaccctgtttctactaaaaatagaaaaaattagctgggcatggtggtgtgtgcctgtaacgcctgtaattccagctactcgagaggctgaggcaggagaatctcttgaacccrggagggggaggttgcagtgagcagagataatgccattgcactctagcttgggcaacaacagcaaaaatccatcaaaaaaagaagaagattctaaaatttatatggaaccacaaaagacccaga

SEQ ID NO: 945990 - DNA, 585 bp, Homo sapiens
ccaccatgcccggctaattcaaaggggctacttttctaatctgcaaggagaaaaataatgatatttttgaacagacaaagagagaaaataagaggcactggcattctacagtctgtctgttctttggcyatccggcaaaaaagggatatcttaaattgatcagcagagcagggtgtcctggaaatggcatgggaatggtaaacagccaggctgagtctggacccagttctgtggcttgccacctgtgtgactgtagcaggccgcccagcctctccaagcttctcttccttatctgcaataaaatgactgtgacatctttccttcagagctgctgtgagaaggaaggagaggaacgtgaacatgcccagctttgtgtctgatacacagttggtgttcaagtgccagtttctgttccctaaaccccgtcggaacccatatttcttctttccagacaccatgccagcatagatttagaaaacaaaatcactggcttgactttctgaaaatatttactttttccagactcagccaggctaaccaagggagaatgtttagctaagtggggagaattcaacgcgaccccca

SEQ ID NO: 945991 - DNA, 645 bp, Homo sapiens
gctaaaatccacgcaagatgaataattttacagacagttcttaaaaggatctgatttctaagttctacattaaaaaactataaggcagatttggagtgagatcaatgtgaattccacattgtgttctatcattgaccattcacatcatcttggccaagtcaatgatccttttttaaccttagttttgtgtcattagagtgataatcccaccttcacaagattgtgaaaatttaaaagatgctaaataaaagcattttattaaaacaaaaaacttggcccagtgtaattaccaccaaggttgtgttgatacatgtcgtgcttaaaaatagctgatggcacacaagcagatgtcaagcagccagtcatgtaacagaatgcagcattaataccatcataatgatgtaagtaatatactgcagataacggtcttaggttaatatctctttgaacaacattgctaatgctaaagagacagtgaaaaagtgaaacattatgtttagcataaaaatgtgaagagaaaataccatcyacctaattagaattttgtatggattaactagctaatgctggttagcatttgagaatgcaatggaagacagaattatacacattcacagacacaaagtactacatattatatgtaaa

SEQ ID NO: 945992 - DNA, 579 bp, Homo sapiens
cagaaaacaatccgtgtgaagtccttggtgcatagaaaatgctatgtaaagtgagcccttactactcctatcccaatgattatttctattattagcaattactgttcataccttgttgggcagtgaccccacagttaagaatgatgaatgagctgtcctcaagaactttccaactaaaaaggagggccaagtattttcacaagacaaggcatcaggccatgttggaaagacctttaacaaacaagctttgaaacaacagataataaatgacctgatgaactctttgttaatcaggggagacaaatgcatatgaacttaaacctgtgcagtaggctgctcacacgtgttataagctaacagacagacctctgctgggatattgtgtatgccccaccccccccacccaataacatcccaagaatataatatcccctttggttagctcaggtcccccagccataaaaagaaaaagcgggtttgaccgggcacaatggctcacgcctgtartcccagccctttgggaggccaaggtgggcggatcacctgaggtcaggaattcaagaccagcctggccaacac

SEQ ID NO: 945993 - DNA, 564 bp, Homo sapiens
ctcctgttacaattcacaaggtgtcaaaaaatattggactaggagaaattttcaaagcaagatatatattccttttattctttatgcagaaaaaaatcttttttgttcccatttgtaggcaaaaaaatcatcatcatcatcaagaatgagaaaagtttttgaaaaaaacatttgcgtggtttagaggaaaaagaactttcaaaacaaagcaagaaacttgtattcccagcattctctaatcaggagttctaaaagcacattctatctgaaactcaattttttcagcaccaagggctcccaggttttctataagatgcccgaaactcatgacccactgcaagaaaggtacccaagtacatacaaaactgaaacaaaatacagttgcatctcatttcctcaccatttcagccactggagaacacctagtctccaaattaggtcagaaggataacagtttgccamgggacatgtgaagaagaaatctttccggcccagacatagtgaggaagaataaccactcgacccaaggaatgaacttagttttgttttcttttgttcttgtca

SEQ ID NO: 945994 - DNA, 545 bp, Homo sapiens
cattctggggtctggaggacagtggccttcttctcacggctccactaggcagtgccccagtggggactctgtgtgggggctcacaccccacatttcccttcggcactgccctagcagaggctctccatgagggctctgcccctggagcccatctctgcctagacatccaggcatttccatacatcctctgaaatctaggtggaggctcccaaacctcagttcttgacttccgtgtacccacatgctcaatatcacatggaagctgccaaggcttggggcttgaaccatctgaagccacggcctgagctctaccttggccccttttagccatagcgtgagtggttgggacacagggcaccaagtccctaggctgcacacagcgaggggtttgggggtgtggctcagccacaaacaaaaccattgtttcctcctagcttctggggcrcctgcagttggagaggctgccataaaggtctctgacataccctggaaatatttgcctcattgtcttggcgattaacatttggccccttattacttatgta

SEQ ID NO: 945995 - DNA, 545 bp, Homo sapiens
cattctggggtctggaggacagtggccttcttctcacggctccactaggcagtgccccagtggggactctgtgtgggggctcacaccccacatttcccttcggcactgccctagcagaggctctccatgagggctctgcccctggagcccatctctgcctagacatccaggcatttccatacatcctctgaaatctaggtggaggctcccaaacctcagttcttgacttccgtgtacccacatgctcaatatcacatggaagctgccaaggcttggggcttgaaccatctgaagccacggcctgagctctaccttggccccttttagccatagcgtgagtggttgggacacagggcaccaagtccctaggctgcacacagcgaggggtttgggggtgtggctcagccacaaacaaaaccattgtttcctcctagcttctggggcacctgcagttggagaggctgccataaaggtctctgacataccctggaaatatttgcctcattgtcttggcsattaacatttggccccttattacttatgta

SEQ ID NO: 945996 - DNA, 635 bp, Homo sapiens
ggatccgtgaggctcgggtctcatttctaattgcagtgacatgcacataacctacaattcgccatcttaaccatctaaacgtacagttagttctgtggcattatgcacaatcacattgctgagcatccatcactcaaccccatcatctccagaactttccatcttcccaaactggagctctgtccccatgaagcacaaactccctgctctgtcaccccccagcccctggcacccacggttctactttctgtctctgtgggtttgaccactcgaggggtctcaggtaagcagaatctaccgtatttgtcctgtggcgactggcttatttcactcagcaaaatatccttgaggtccatcaggttgtggcatacgtcgggattcccttcctttttaaggctgagtaatattccatcacatgtacagaccgcattgtgtttgtccattcatttgttgatgggcgtttggtttgcaaccatgttttagttgctgtgaatgctgctgctacgaacacaggagtgcaagtatctccttgagatcctgctttcaattctctgtccatatgcagaggggaagttgctgggcgctatgggagtttttattttaacttgctgggamaccgccgcactgtttttcac

SEQ ID NO: 945997 - DNA, 577 bp, Homo sapiens
gtgggctggcagcctatctgggcaccagaggaggcatctgaggccatcaggagactgtgcctgggtcaggggaaaggaaaggcggcttttcctgcttacctgttttggggcccctaacccgctgcagtgcacatacagggcaggcatgtcagtgtcctagggggacgcagtgctcttcccggcggggccagcagggggacctttccccccgggcttccagtcctccggccgccacctcaacaaggggttaacaccccctccccctcccaaacctcagggattaaaaatttatgctgtccccaggggatgtggggaggaggaggggatgtgggggacacaaaattaaaagggaaagagattatttttaatcctcttggtgggtgctgaaacaatgccgggagagcaaagccgctgagagtttgtcccgttagatccaggcgtgaaggacggactgtactacagggagcaggtaattacaaactgcacatctttctcstctccgtaagaaattcgccttaatcccatagctattgcttctccggtcaaaggtgctcagattttcataacgcccggcgct

SEQ ID NO: 945998 - DNA, 683 bp, Homo sapiens
gtaaccttttaacatttcttagcttccttgtatcgggttagaacatgctcctttagcttggaggagtttgttcttacccactttctgaagcctacttctgtcaattcctcaaactcattatctgtccagtttttttcccttgctggcaaggagttttgatcctttggaagagaagaggcattctggtttttcaaattttcagcctgtttgctctggtttttcctcatctttgtcgatttgtctacctttggtctttgatgttggtgaccttcagatgggttttttgagtggttgtcctttttgttgatgttgatgctattgcttttgtttgttagtttttcttctaacagtcaggcccctcttctgcaggtatgctggagtttgctggtggtccactccagaccctgtttgcctgggtatcaccagggaggctgcagaacagcaaagattgctgtctgctccttcctctggaagcttcgtcccagaggggcacctgtcacatgccacccagagctttcctatatgaagtgtctgtagtcccctgctgggaggtgtctccccatcagaggcacggggctcagggacccacttgaggaggcagtctgtcccttagcagagcttgagtkctgtgctaggagatcttctgctctcttcagagctggcaggcaggaatgtttaggtct

SEQ ID NO: 945999 - DNA, 585 bp, Homo sapiens
caattccagatgccacagcctcttgccgtayctccctgcttttctcacctcaacgctctaggtctaggcaggggaaggtctagacagaaaagaggactcctgagatgtctcatgagaactgtgatgaaggaactccttttccctgcttccagtgcccatagcacggagggcatccccttctcccaacatttcacacctgacctgactccagccaacccgctcgaaaatacacagtgctacttacatattccttaatgtcctttgatttcacagccttgtaggaataatacgcagggtaaagggtgccaaatataagcctggagggaagagagacaaaaataaatacgatttttcatttatcttatttaatggaaaatgtctgtcttcaatgccaagagcaactctctaagctacagaaagtgctgctgtggggcttgatttatttttatgaatgccctgaaggtgttctgctcgtggctggggcatccttgggcacctctatcttctgttaaagcccacacccacctcccttcaacctgtggtctggcaacatggaagggtggttgggggtcatggaagccaaaa

SEQ ID NO: 946000 - DNA, 617 bp, Homo sapiens
gagtttgctggaggtccactccagaccctgtttgcctgggtatcaccagcggaggctgcagaacagcaaatattgctgcctgatctttcttctggaagctttgtcccagaggagcacccacctgtttgaggtgtctgttggcccctactaggaggtgtttcccagtcaggctacacgggggtcaaggacccgcttgaggaggcagtctgtctgttctcagagcttgaacactgtgttgggagaaccactgctctcttcagagctgtcacacagggatgtttaagtctgcagaaaccgtctgctgcctttttttctgctatgccctgccctcagaggtggagctgacctgtgatgggctccacccagtttgtgcttccctgctgctttgtttacactgtgacctactcaagcctcagtaatggtggacacccctccccccgccaagctcccgcatcccaggtggatctcagactgctgtgctagcagtaagcaaggctctatgggtgtgggacccrccaagccagacatgggagggtatctcctggtctgccagttgctgagaccatgggaaaagtgcagtgtttggtcaggagtgtacccatttctccaggtacagt

SEQ ID NO: 946001 - DNA, 839 bp, Homo sapiens
tttttaatctataaaaattccctcaaaaaasgtgtaaaatgggtattttcttaccatcatactatttttctatgaaactgctttccaattttagaaaaagtgaagacagattattcaaacttttttgaatttcaaaaaataaaaaggcgcatagtgaaaagtttccttcccacctatattccccatccactcagttcccatcatcttccccaatcaggtaaccattgttattggttcctcctttcaccttccagggaatctgcatgcatcagccattacctcctctttcaaaacacaagaatgggagcacgcaatgcacactttcctacactttgctcttgtaattttgttttgtttttttgagacagggtctcactctgttgcccagactggaatgcagtggcgcaatctcactcaccgcaacctgcacctcccaggctcaagcgattctcctgcctcagcctcccgcgtagctgagattacaggcacgcaccaccactcccggctaatttttgtatttttttagtagaaacggagtttcaccatgctgcccaggctggtcttgaattcctgacctcaaatgatccacccgcctcggcctcccaaagtgctaggattataggtgagagccgccgcgcccggcctgctcttgtaacttaagatattttggagatctctccatgtcaactaagaaaagagcttcctcgttcctttctacaactttacaacctcattaaccatctgggcatggatttatctgataagtctcttgcttgctgatggacactcaaggcaataaataatcttgtacctatgttatctcacacgtgtacaaatat

SEQ ID NO: 946002 - DNA, 648 bp, Homo sapiens
ctttttctagtttcttgagctaagaacttagattataagtattttgtgctgttcattgccttcyctgcactgcttagacacatcccacatttttcatattttttattttattccattcagttttatgtgctttttatttcttttgggattttctctttgactgatggattatttaaaagtacatttcttgatttccaagtacttgaagactttcctactgtacttatgtaattttctaatttgatttcaatatagttagataacatactctgtatgatttttgcttatttaacactttaaaatttaaacagttcaccaaaatatttgttaatattctataggccaaatcttttacaatggtgtgccagtaaacccacctgacatttgctctgagggagacattatttttattatattggccaatatactacttaccctctggggaagacattacctcaaactttaaaagctgtttgctctgcaaacattcttgataaggtagtctatagcaaaacctgtaactgtcggctcacaaaatgtacagaaactgagagacccatagaaaattgtctcccaacacaaccatttgctaaaatcttattccaaattctattttgaatttagataaaattccaacaaaataaaatt

SEQ ID NO: 946003 - DNA, 594 bp, Homo sapiens
tccttgcttcatcccaatgcgtggaagcaggaataaaaatagaaagctcaggtaatagtacaggagaagaatgtggcttgaactaggagagtaggggtattgataaaagaaagaatttggttctgagcatatttcaatgatagaaatcaggatttcctgattgtttggatgtggagtataaaaataagccaggaggtttaaagtgttggacatccacaactatagaatggaattacctttttcagaaatgaccttacaattttctaaagagtaataggaaaagaagttaagaattttgttttgggtaaattggttttgagatgtctcataaatttgcaaacgaaaatgttatacatagatttagaaaataatgtttaagttgtgggaagagtttgtgactggtggagggaccgtggagaatttagggcctagatattgaagtgataacaaagaactggatataaccagagaagagaaagaggtagggagactgaaccctgggaaatactaattggcatcagattgatcaaggcaatcagcaaagaacaagatttwaaaatgcccagtaaaataggtggaggaaaataaaaagag

SEQ ID NO: 946004 - DNA, 556 bp, Homo sapiens
aaagaccccacccacaggcatggaaacccatggctccagtgggaagaggcattctgttttcatgcccaaaagttggcttttggcatgccacaccgtcctatcctgtacccatataaacctcaaaccccaggctccacagaagatgagaagaacagaagaacggcagaacggcacagcagagagaagagaaggagcatctgaatgccaagaggaattcagcttggggtggttggagaagagatctgccactggacagccaagcttcaggggaagatcatcttcccaccccatccccatccatcccactgagagccacctccaccactcagtaaaatccccgcattcaccatcctcaagtctgtgtgacctgattcttcctggacactggacaaggacctaggtaccgagggcactgagcttgttaacacttaagccgtctgtggacagcaaatctaaaagaatgcactgtaacacatgcccacttgsgctttgggagttttaggtacccacctctagatgctagcatgagtctggagcccccaaggcgctcacccca

SEQ ID NO: 946005 - DNA, 599 bp, Homo sapiens
gcatatcgtgcagaaccatctgtgaagcakgtcctagttttctctttctctgtcaactgatcttagggaacttcccataaggccactggtgcaggcttggggagagaaggcagggtggccggagtacagaccatgggcatttgagccacttcctcatgtaacttccttgtgccttcaggacctgttcaagcctgatcacatatataccacttctatttaatgatggaatgctgctgcacacaacccactttatggctagatgggtcagaaagcacccagttcatgataggcagtacaggtggcatggtgccttgatgacccgtaggcaaacattcagtttccaccaaagcccagtaacaggtctagagctgtctctcaaaaggagaatagttatctgcagaagatggcatggccttgctctaaaatcctagaggactctgctctgatccacctatgggggcctgccaaaggctccagtaagcctccctatctgccactgacacctcaagcaccatgggatctgctggatgatatggcccaagtggcagagcagcttgcacagcagcctagatctgttgcggagccttctccgcctggat

SEQ ID NO: 946006 - DNA, 794 bp, Homo sapiens
cctgcatatcgtgcagaaccatctgtgaagcatgtcctagttttctctttctctgtcaactgatcttagggaacttcccataargccactggtgcaggcttggggagagaaggcagggtggccggagtacagaccatgggcatttgagccacttcctcatgtaacttccttgtgccttcaggacctgttcaagcctgatcacatatataccacttctatttaatgatggaatgctgctgcacacaacccactttatggctagatgggtcagaaagcacccagttcatgataggcagtacaggtggcatggtgccttgatgacccgtaggcaaacattcagtttccaccaaagcccagtaacaggtctagagctgtctctcaaaaggagaatagttatctgcagaagatggcatggccttgctctaaaatcctagaggactctgctctgatccacctatgggggcctgccaaaggctccagtaagcctccctatctgccactgacacctcaagcaccatgggatctgctggatgatatggcccaagtggcagagcagcttgcacagcagcctagatctgttgcggagccttctccgcctggattccactccaaactggcagcctttcgggtcacttgataaatggcccagagtaacaaagccaaatgacgaatgtgttgcctccaaaatacaaatagacccactgggcgttgtgcctctttcttgcttgtaggaggggccaaatgcagcaacttatctttcaccttaggaggaatatctcaacaggccccacacc

SEQ ID NO: 946007 - DNA, 768 bp, Homo sapiens
gaagtagtgaaaaacaagatagccatggcctctgcttccatatctgtggtccttaaagatggccaagaattttcttgatgctctgggctggctctgtgactgctttggtcaacagcgatgtggtatcagtatattagtctcctggagctaccatagcaaaataccatagacatgggggccttaaaaacaatattaattgtctcacagttctggaggtggcaagtccaagataaggtgttggctgagttggtcccttctgaggctctgaaagagactctgtccaatgcctctccgcacatcctgatggtttgctggccatctttggcttgtagatgcatcattccatctcggccttgatctctgcatggcattctccttgtgagtctttgtattgtcttctctttgtgcacatttgtgtctctgtcacaatgtaccctttgtattaaggacactagttacgtcggatgaggcctcaccctaatgactacctcttaacttgactatatttacaaagatactatttccaaataaggtcatgctttgaggtactggtagttaggattccaatatgtcttttcaaggggacacaattcactcctaacagtcagaccagcccttaagagattgatgacttcttcttcttgtcttgaacactcgcatttgcaaattagccaccctgttttgaggaagccaaagrgcttcatggggaggcccatttggagaggacctgaggccctctggccaacagccccacctcagttcccagca

SEQ ID NO: 946008 - DNA, 602 bp, Homo sapiens
gacccaaacagttcaaatctgtgttgttcaagggtcaaagcaatatatggacagacgatagatagaagattagatagatattaatggatggatggatggatgratagatagacagatagatagcagcccaaaatcagcattctggaacacgtggcctggtagtaaagtcttggtgttggtcctagcactcacagataggccttggtttttcctgttgaacataagcagtttcatagaacatcaagatgagacaagtccactctgtgaccatgatgaaataagagaaataaagaccactatgtaatcatgtctgaacacagacaaaacacgaatatttttcaaaccacaaatgtgaccagcatcttcctatcttgtctaataagagtgacagttttttccttatcaattatatctttaacctttatctaatgttctctccttctagatttactgtgacatccaatcacaggattacttcacttcctgagagcatacaatttaaagaaagccctacttacttaaactctcccaaatcatgtaaaataattctaaatccaatagtaggttcattctaacactccttagtgagatgcttccctaca

SEQ ID NO: 946009 - DNA, 478 bp, Homo sapiens
acttctgtcatttcagccatctcagcctcagcccagttccaaacccttgctggagaggtgtcgcagtcatttggaggaaagtgggcactctggctttttgagtcttcygtatttttgtgctgattccttctcatctttgtgggcttatctaccttcagtcttcgaggttgctgccatttggatggggtttttgtgttttttttcttttgcaaaaatgaactcaagatggagtaaagaattaaatataaaacctaaaactataaaaacctcagaagaaagcctaggcaataccattcaggacatagacatgagcaaggatttcatgacaaagatgctaaaagcaattgcaacgaaacaaaaactgacaaatgagatttaattaaactaaagagcttctgcacagcaaaagaaactgtgaacaaataacctacaaaaagggagaaaacttggaatctatgcacctgacaaaggtctaata

SEQ ID NO: 946010 - DNA, 604 bp, Homo sapiens
cctgagtctggtggggacttggagaacctttatgtctagctaagggattgtaaatacaatcagcactctgtgtctagctcaaggtttgtaaatacaccaatcagcactctgtgtstagctcaaggtttgtaaatgcagttatcagcactcagtacctagctaatctagtggggacttggagaacctttatgtctagctaatggattgtaaatacaccaatcagcactctgtgtttagctcaaggtttgtaaatacaccaatcagcaccctgtgtctagctcaaggtttgtaaatgcaccaatcaatgctctgtgtctggctaatctagtggggacttggagaacttttgtctagctcagggattgtaaacccaccaatcagcaccctgtcaaaacggaccaatcagctctctctaaaatggaccaatcagcaggatgtgggtggggccagagaagggaataaaagcaggctgcctgagctagcagcagcaagctgcttggttccattccagagtgtggaggccgtgttctttcgctctttgtaataaatcttggtgctgctcactgtttgggtccgcgctggctgtatgagctgtaacactcac

SEQ ID NO: 946011 - DNA, 588 bp, Homo sapiens
gtcgcagtcgtactggctgtgcrtgagatcacccacctaggccaagagttgttaggccagtgcttctacgtctggcatctgtcagcccttgccaaaacagtggtgcggcagcgtgtcacctgccagcagcacaatgctaggcaaggtccaactgtaacacctggcatgcaaacttatggggcagccccctttgaagatctccaagtagacttcaccgagatgcccaaatgtggaggtaacaagtatttgctagttttagtgagtacatactctgggtggatggaggcctatctaacacgaactgagaaagctcgtgaaataaccgatgtgcttctccgagatctcatccctaggtttggactgcccttatgaattggctcagacaacaggccggcatttgtggctgacttggtacagaagacagcaaaggtattggggatcacatggaaactatatactgcttactgaccacagagttccagaaaagtggagcagatgtatcggactacgaaaaatagtttagggaaagtgtgtcaagaaataggattaaagtgggtataaactctccctatggtattgttcaagatt

SEQ ID NO: 946012 - DNA, 560 bp, Homo sapiens
tgtgacttgtcttaacagaaacagtgttcactctctgtgaaatatcttctcttggcttccagggcatgacagtcttggttcctgccttgctacactgaccattccttcttagttccctttacttgcttctcctcatgttttcaatgttttaatgcgggattcttcaaagttcagtccatggccttcctctcttctctgtctgtttgtttacaggataatcttacctagtctcatggcattatgcagatgtcttccaaatttaaatgtccaacttgaacctgccacatgaattccaaacgtgtcaatccaactctctaacccacctctccatttgatgtctaataatcatctcagatttgacttgtcctaaaccaagttcttgacacttctcccaaaattttgctcctcccacagtcctccagatcctagcaaacagtaactctatttttttttttttttttttgagacggagtcttgctctgytgcccaggctggagtgcagtggcgcgatctcgactcactacaacttccgcctcccggattcaagcgattctcctgcc

SEQ ID NO: 946013 - DNA, 639 bp, Homo sapiens
agccaaatcaaacagacaagaagatcaatggaaatgaagagagaacccagaagtagagacacatacctacaaccaactgatctttgtcaaagtcaacaaaaatatacactcaagaaattaccctctattcaataaatggtgctaggaaaattggatagctatacgcagaataatgaacttggacctctcattatatacaaaaattaactcaagttggattaatgacctaaatgtaagactgaaaactataaaagttttgaatgaaaagctaggagaaactcctctggatattggtctgggcaaagatttcatgactaagaacctaaatgcagcaaaccccacagaaacaaaaatagaaagatgagatttaattaaaagctttctacacagctaaagaaacaactgacagagtaaacagacaactcgcataatgggaaaaaatatttgcaaaccatgcactgacaaaaggctaatatccagaatctgcaaggaactcaaataactcaaccagagaaaaacaattaccrtttaaaaaatgggcaaacaaggcaatttacagattcaacactattcctattaaactaccaatgtaatttttcacagaattgggaaaaactcttctaaaatttctatggaacc

SEQ ID NO: 946014 - DNA, 719 bp, Homo sapiens
gaaagcaccacctcctggctgaaggccaaccaactcaggacattacagccacctccactagagcaagtcytggtatctatgtctgggagaccagaagacggatcacatcataggactctgcagacattgcccagcagcagcctgcagcctagtagccccactgggtgactagacccagaagagcaacagcaattactgcagtctggctctcaggaagccccatccctaggggaagtaggacaccaccacatcaagggatcaccccttggaacaaaaaaatctgaacaacagcccttgagtcacagatcttccctctgacatagtctacccaaatgaaaaggaatcagaaaagtaattctggtaatatgacaaaacaaggttctacaacaccccccaaagaccacattacctccccagcaatggatccaaaccaagaagacatctctgaattgccagataaagaattctgatggttgattatcaagctgttcaaggagataccagagaaaggtgaaaacctgcttaaagaaatttaaaaaataaataaataaaggatatggatgaaaaattctccagagaaatagatatcatagagagaaaacaatcacaaattctggaaatgaaagacatactcagaaaaatacaaaagtgcactgaaaagtgtcaataatagactagaacaagtggagaaagacttcagaactcatagacaaggcttt

SEQ ID NO: 946015 - DNA, 558 bp, Homo sapiens
ggcaaaagcatcagataacctataaaagaaaacatatcagaataacagcaaatttctcagcagaaccctgaaagccagaaggtattggggttctatctttagcctcctcaaaaaaagtaattgccagtcaataattttgtatccagcaaaactaagcttcataaatggaggaaagatacagtctttttcagacaaaaaaaaaatgcagagagaattcgccactaccaagcagcactacaagaaatgccacaaggaattctaaatcttgaaacaaaacctctaagtacaccaaaatagaacctccttaaagcataaatctcacagggtctataaaacaacagcacaatgaaaaaaaaacacacaaaaggtattcaggtaacaactagcatggggagtaaaacagtacctcacatgtcaatactaatgttgaatgtaaatggcctaaatgctccgctgaaaagatgcaraatggcagaatagataaaaatctactgaccgagtatctactgtcttccagagactcacttaacacataaggactcacataaacttaaggta

SEQ ID NO: 946016 - DNA, 600 bp, Homo sapiens
ttgagttgatttttgtataaggtgagaggtgaagatctagtttcattcttctacacgtggcttgccaatgattccagcatcatttgttgaawacagtgtactttccccactttgtttttgtttgctttgttgaagatcagttggctataaatatttggctttatttctgggttttctattctgttccattggtctacatgcctacttttataccagtaccatgctgttttggtaactatatccttgtagtatagtttgaatttggctaatgtgatgcctccagatttgttctttttgcttagtcttgctttggccatgtgcagtctttttttttttttttttttttggttccatatgaattttaggattgttttttctagttctgtgaagaatgatgatggcattttgatgtaaattgcattgaatctgtagattgcttttggcagtatggccattttcacaatattgattctacccatccatgagagaatgtgtttccatttgtttgtgtcatctatgatttctttcagcagtgttttgtaggtttccttgtagacatcttttgcctctttggttaggtatattcctaagtactttatt

SEQ ID NO: 946017 - DNA, 656 bp, Homo sapiens
tcatagatgtgcaagtttacctggcccagtggatctcagtgtggctgcagagtagaattgcctgctgggggtcagggagaggtttttaaaaataccagtgccaggccgggtgtggtggctcacgcctgtaatccyagcattttgggaggcccaggcaggtggatcaggaggtcgggagatccagatcatcctggttaacacggtgaaaccccatctctactaaaaatacaaaaaattagccgggcatggtggtgggcgcctgtagtcccagctactcgggaggctgaggcaggagaatggcgtgaacccgggaagcggagcttgcagtgagccgagattgcaccactgcactccagcctgggcagcagagcgagactccgtctcaaaaaaaaaaaaaaaaaggcagtgccaagataccaaagattctgacccaatccatgtgaggtggggcctgagcattagaggtttttttttctttagttttggcaggtggttctaacatgcaacaagggttgaaaatcattgatagaactctaacttcatcttttaagatgagcaaacagatccacagaggttgtataaaatagaagcacataacttccagtagtcagtgtactatgcctctttcaaagatccttgtccccaacttgtatatg

SEQ ID NO: 946018 - DNA, 616 bp, Homo sapiens
gggtggagcccccaggagacaagcaaaagaccctsagttaaaactactactaaggtctcttccttccatgcctccaaggtgaggagaaaacattaaccctgagatcaccccagaaactgttgtgtgcagcctggtagtgccaagacaaaagctacagtcagcagtcaagtgggagaggagcccacactttcatagcattgagacggagcaggctgcaaccatgaggaaatgtatgggagccacatgactgagcaagagcctgacaactgaccactgcacctaagagtcacctactaggtcatgcccaaagcttcaacactaaaaaaatctcactaacataccctcattaaaccaaagacaagtcagctacaaataaagaccctacacaaagctgcagccctgtgaacacagccagaaccaaagtcaatttattgattggactcaagctacactcccatatgcagagatgagaaagaaccaatggaagaactatggtaactgaaatggacagagcatcttatgtcctccaaataatcacactagttctccagcaagggttcttaaccaaaatgagttagctaaaatgacagaaatataattcagaatatggacagaa

SEQ ID NO: 946019 - DNA, 595 bp, Homo sapiens
caacatggatggtagcataatctcaaaaaaaattctactgagtgaggccaggcaaggtggatcttatctgtaatcctagcactttgggaggctgagscgggcggatcacttgaggtcaggagttcgaaaccaccctggccaacatggcgaaaccttgtctctactaaaaatacaaaaaattagccaggtgtggtggcatgcgcctgtaatcccagctactcggaaggctgaggcaggagaaccacttgaacctgggaggtggaggttgcagtgagcctaggtcatgccgctgcactgcagcctgggcgacagagtgagattccatttcaaaaacaaaaaaaaaattaggctttgtgaaaggagccaaacacaagaggctatgtgctatatgatttcatttataagacattctggaaaaggcaaaagtataggaacagaaatcagattagtagctaacaggggctgatggtgggaggatgggattgcctacaaagggacagtaggggcctttttgaggcatcagaaatgctttatattgggaatgtggtggtggttatgtaactatacatttgtcagactcatcaaactgtacact

SEQ ID NO: 946020 - DNA, 595 bp, Homo sapiens
caacatggatggtagcataatctcaaaaaaaattctactgagtgaggccaggcaaggtggatcttatctgtaatcctagcactttgggaggctgagccrggcggatcacttgaggtcaggagttcgaaaccaccctggccaacatggcgaaaccttgtctctactaaaaatacaaaaaattagccaggtgtggtggcatgcgcctgtaatcccagctactcggaaggctgaggcaggagaaccacttgaacctgggaggtggaggttgcagtgagcctaggtcatgccgctgcactgcagcctgggcgacagagtgagattccatttcaaaaacaaaaaaaaaattaggctttgtgaaaggagccaaacacaagaggctatgtgctatatgatttcatttataagacattctggaaaaggcaaaagtataggaacagaaatcagattagtagctaacaggggctgatggtgggaggatgggattgcctacaaagggacagtaggggcctttttgaggcatcagaaatgctttatattgggaatgtggtggtggttatgtaactatacatttgtcagactcatcaaactgtacact

SEQ ID NO: 946021 - DNA, 646 bp, Homo sapiens
tgccctggcagaaaactggagcacccatctctttatgtagaagtgagggttcattgaartatgaagtatgtaaagtgtgctaagcaggactttggcttataattataataattgttactattattaatctcacattaaactttgctcactctctctcttaaccaaaccaaagttctagaagcctcctagcgggacgggaaaggaaatgttggatcaacatacatggattgattagatgggaccaatgaggccttacagtctgtttgaggagggaaagagagagaggagaaggagacaggcaggataggtcaggttctaggggctcccatggtttgtatcttaacaatctaccattttcttttcaggccagtgtccacatcctgctcacatttgggacatctgtgaggcagggtgcctcctttttgtccctccaagaggacagttgggggacttggcctctggccgcctcaagttgggtcagcacctgctgggcctcatcctggttcatcgtgcatcaatgggagcgcacctgggttctgctgacatgtgagagcttcttcaccgaggggttcagaaaagtgtgctcatggcctgtagatctggattcaaagggagatgagaaaaataggaactgagcccgtggctt

SEQ ID NO: 946022 - DNA, 665 bp, Homo sapiens
acacagggagaagatggacatcaayatgagagaggcttcagaagaaaacaaccctgtggaccccttgatcttggacttttagccttcagactgtgagaaaataaattgctggtgtttaagccacccagagtggtacatttttatagcggccccaggaaacaaatacagctacatgaaactactttactcattatttatgattacttatataaagctctggtaattaggatagagggtatttggtgtagaaagggaagattcagtaatggaagggaaaaatggactcaccaaaataccactcccatttgaaaatgccattgaaaagatatgatgttgcctagcaaggcaggaaagcatggatgtttaataaagtggttcacattaatacaccatccatatggagaaacaacagaacttctatcttaaatcacaaattcaacttcagctttattaaagatctaattgtaaatgtcaaaagcataataaaatattttaaaaataatatggaagaatatccttactcctttggataggaaagcatttctaatacatggcagctcaagaagcataaaccacaaaagaaaagaaggaaatgtttgagaatattaatgttaagaaattctgctccttaatgtagaccataaattaaatggaaataaaagtca

SEQ ID NO: 946023 - DNA, 582 bp, Homo sapiens
ggaaattactacacccacacaaacatttgggtcccatggaaacggcaggaatgcggtctggtctaggagcctggaactggggcctgaacatctagattggtttggccccaccaccgacttcctgtgttgtcagtttacacctcgacaccacagttttgcctttggaaacaccaaagagagggtcctgcaaagagcaaatctgcgggaatggtgtgaaagctctctatttgcttaggatgctttagctttgttcccgcccaaggcaggaaaaaagatgaaatgactaaccctattattctactctgtaattctgctactgtgctgaaaggcttcgcagcgtcttgcctgtggtgggagtttggcagagaagacctccacagcccttccaactctgagattcacaatagtcagtgacttcactgaaaaccatggaattgcatgctgtcatcactggagagggcaggccattctgaatggaaacactcttattrggcatttttaaacgtaggcagtagacaaacattcctttgttgcttttctcaggaaagaaattactttctgaagacaatggcaggcacattt

SEQ ID NO: 946024 - DNA, 564 bp, Homo sapiens
gaaaaccatcactgcactctggcgctacgtttgctacttttatgtaataaaagtaatacaccatttctattattaataaatgagtaatttattattaataaatgaccgctattattactaygtttattacttcctgcataaacatggtggatgattctcagataagccatagctaggtttaccatgcaatttgttgacactggctcttaaaaataaataacaaagtgacccttactaacaaagtgacccttacaaactctacatttcttgtttccaaccatttccatatgctttacatatgttgtattaaacaaaaaacagttactattatataaaattcatgcctgataaacccatgtggaaagaggcaggaggaacaaggtggccctctttcaggatggcatgtggaaaatgatgagaccattaaggcattaagactaagggcctgtgagataggattctctataggcccccatgactgctaccctttgcgtcacctgtgtatgatagcatgaagaataatggaaagataatacttctgaaccctacaaggcaggccaaact

SEQ ID NO: 946025 - DNA, 777 bp, Homo sapiens
agaccttacctttgagctctgaattcctttcttctacttgttcagttctatttctgagactttccagggcattttgcatttctaaaagtgtgtccaaagtttcctgaatttttaattgtttttttttctttaagctatctatttacttgaatatttctcccttcacttcttgtatcatttttttggatttccttgcagtgggcttcgcctttctctggtccctccctgatcagcttaataactaaactcctgagttcttttacaagtaaatcagggatttatccttggtttggatccattgctggtgaactagtgtgatactttggggatgttgaagagccttgttttgtcatattaccagggttggttttctggttccttctcatttgggcaggctctgtcagagggaaggtttagtgccaaaggctgttgttcagattcttttgtcccacagggtgttcccttgatgtagtattctccccctttctctatggatgaggcttccttaagctgaactgcagtgattgttgtctctcttctgggtctagccactcagcgagtctacccagctctgggctggtactgggggctgtctgcacagggtcctatgatatgaaccatctctgaatctctcagccatggatatccgcgcctgttcyggtggacgtggtggagggtgcaatggactctgtgacggttcttagctttggtggtttaatgctctatttttgtgctggttggcctcctgccaggaggtggtgctttccagaaagcatc

SEQ ID NO: 946026 - DNA, 793 bp, Homo sapiens
atgttagctatgggcttatacatgacctttattgcacagaggaacattccttctatacctaatttgttgagactttttatcatggaatgatgttgaattttggcaaatgcttcttctgcatctattgagaagatcatatgccttttgttcttcattcttttaatatgatgagtaacatttattgatttgcatatattcaaccaacttcacattccagggataaaacccacgtaattgtggtgaatgattcttttaatgtacaattgcatatggtttgctcttatttttatttatttatttatttatttttgagatggagtctcactctgtcacccaggctggagtgcagtggtgtgatctcggctcactgcaacctctgcctcccggtttcaaatgattctcctcccttcagccttctgaatagctgggattgcaggcgtgcaccaccacgccagactaatatttgtatttttactagagatggggtttcaccagttggtcaggctggtctcaaactcctgactttgtgatccatcctccttggcctcccaaagtgctggtattacaaacgtgagccacagtgcctggccgggttgctagtattttattgagaatttttgcatctatcttcatcaagatattgacctctagttttccttctttttagtttatttgctagctttgttatcaggataatgcttgcctcataaaattrgttttgaaatattctctcctctttagtttcatggaaaagtttgagaaagattggtattggttctttaaatgcttggta

SEQ ID NO: 946027 - DNA, 601 bp, Homo sapiens
cattggataagcttcatgaagttcatgtccaaaattatatccaaaattgtaagtgtgtgtgtgcattgtctyaatctgtttgtattgccataaaggaatacctgaggctgggtagtttataaagaagaggtttgtttggctcatggatctgttggctgtacaagaagcatggcaccaacatctgcttccagtgagggggctgccttcactcatggcggaagataaaggggagctgaaatgtataacgattacttggcaagaaaggaagaaagggggaaggaggaggtgctaggctcttttcaagaaccagttcttgagggaagtaagagcgagaactcactcacttcttggagtggcacaaagccattcatgagggatctgcccccaccagccaaacaccttccacaggccccacctccaacagtgagatcaaattccaacatgagactttgtggagcccaacaaactatatccaaaccatagcatgcatttttctggggagagggtctatcactttcatcaggatctcaaaatagttttggacactgttaattcaaggctttcccttatcacattagcttttaagccccattcagacata

SEQ ID NO: 946028 - DNA, 608 bp, Homo sapiens
tccagaggaacacacacaccgacaggcaccagcatcccggcaggccaccaaccagcagaatgacgcagagtttgcctggggcagtcagagkgagagcccaggccgctgagcgcctgactccaggggaaaaccttcccactccatcccctcttgacttcccccatctgctaagagctacctccgctcaataaaaccttgcactcattctccaagcccacgtgtgatctaattgttccagtacaccaaggcaagaactcaggatacagaaagccctctgtccttgtaacaaggtagagggtctaactgagctggttaacacaagccacctatagatggcaaacaaagagcgaaactaaaagagcaccctgtaacccacacccactgggagctatgatattcgcccctagacgctgccgtggtgccggatccccaaagcctgcccctctgtatgctccccgagaggtttgagcagcaaggcactgaagaagcgagccacatgccgtgtgagggggacaggggaagctttcccattccatattcatccactgatggacactgaggttgattccatattttggttagtgtgaatagtgctacaatgaacatgg

SEQ ID NO: 946029 - DNA, 613 bp, Homo sapiens
gtaagacggtggtcccatcaaattatactgctgtgctttttttactgtgtcttttctatgtttagatacacaaatacartgaggcattgcttaaaaatggggatatgttctgagaattgcttccttgagtagacattatagtgtacttacacaaacctagatgatatagcctactacacacctaggctaactggtatggcctattgctcctaagactacaaatttgtgaggcatgttgtactgaatactgtaggcaactgtaacacaatggtaagtatttatgtatctaaacatagaaaaggcccagtaaaaatatggcatagaagataaaaaagggtacacgtgtatagggcacttaccatgaatggagcttgtggcctggaagttgctgtgtcagtaagtggtgagcaaatgagaaggcctaggacattactgaactactctagactttataaacacagtacagtttaggctacataacatttataaaatgtatttttccttcttcaattatgaattcactttagtttaatgtaacttgtttataaattttcaatttttttaactttttgactcttttgtaataacacttagcttaagacacaaacatata

SEQ ID NO: 946030 - DNA, 725 bp, Homo sapiens
caggaccctgtaataattgcgttaactacacaaattgtacagcatgtgtgtttgagcaatatgaaatgtgggcaccctgaaaaaagaacaggataacagcaattgttcagggaataagagagataaccttaaactctgaccgctggtgagccaggcagaacagagccatatttgtcttctttcaaaagcaaatgggagaaatatcgctgaattctttttctcagcatggagcgtccctgagaaagagaatgcgcacctaggggtaggtctctgaactggcccccacccccccagggcgtacctgtctcttatggtcgagattgcagaggtgaaataaactccagtctcccatagcgctcctaggcttattaggaagaggaaattcccacctaataaattttggtcagaccggttgatctcaaaaccctgtctcctgataagatgttatcaatgacaatggtgcccgaaacttcattagcaattttaatttggcctgggtcctgtggtcctgtgatcttgccctgcctccacttgccttgtgatattctattaccttgttaagtacttgacgtctgtcacccacacctatttgcacactccctccccttttgaaaatccctaataaaaacttgctggtttttgtggctggtggggcatcacggatcctaccaacgtgtgatgtctcccatggacaccwtgctttaaaatttatctcttttgtactc

SEQ ID NO: 946031 - DNA, 557 bp, Homo sapiens
aaatgggaggtgggggaactgggggacaccacagtccccaaaagatatcttattatcagtcactattctttttctctctccccatcttttaacaatcactaatctactttaktttccatctctatggatttgccaattttgtacatttctttaaaggaattatacaatatgtgaccttttgagtcttacctttttcacttagtataatattttcaagatttatatatatgaggctgggcacagtggctcattcctgtaattcccagcatttgggaggccaaggcaggaggaccacttgagcccaggagtttaagacctgactgggcaacatagggagaccttgtgtttacctaaaaacttcaaaagaagtagctgagtgtggtgccatgtacctgtatccctgccacttgggggcatgaggcagcaggattgcttgagccaggaaggttgaaactgaagtgagccatgatcgtgccactgcactccagccttggcaatggagcaagaccctgtctcaaaaaaataaaaaaaatcatatatgttataacaggtaccaa

SEQ ID NO: 946032 - DNA, 557 bp, Homo sapiens
aaatgggaggtgggggaactgggggacaccacagtccccaaaagatatcttattatcagtcactattctttttctctctccccatcttttaacaatcactaatctactttagtttccatctctatggatttgccaattttgtacatttctttaaaggaattatacaatatgtgaccttttgagtcttacctttttcacttagtataatattttcaagatttatatatatgaggctgggcacagtggctcattcctgtaattcccagcatttgggaggccaaggcaggaggaccacttgagcccaggagtttaagacctgactgggcaacatagggagaccttgtgtttacctaaaaacttcaaaagaagtagctgagtgtggtgccatgtacctgtatccctgccacttgggggcatgaggcagcaggattgcttgagccaggaaggttgaaactgaagtgagccatgatcgtgccacygcactccagccttggcaatggagcaagaccctgtctcaaaaaaataaaaaaaatcatatatgttataacaggtaccaa

SEQ ID NO: 946033 - DNA, 584 bp, Homo sapiens
gtattaaaaaaatcacaaacccatcccctccctgcgggtaattaatgtacttcagtctttctgcaagcacaaagtactcttccttcaggccacaacatttgataaagaaatgaatctttgagattattaattccctgggctgagattttgtttaataactgttctgtcagtgatagatctgaagaggtagggcatgtgtgatgtgtgtgtgtgtgtgtgtgtgtgtgtgtgtgtgtgaaaaagagatggagggaaggaggtaggagggactgaaacagagacagagatagagacatggatagtaggagggtagtggagtggcgaggggagggtactgtgattgtggcctagagacctggcaggctggcattacaaagcacctccttaccgagagctggagcaccggtgtgacaaatcactgcttccctccattcccacctccccatctccccacctcactgtctgtactagctgattaggtccaaatcagccaattacagaacatgatttgggaaatatttcctccttgacattctggagaamaatcccttgctgaggaaaaaaatacattataaaataaatgg

SEQ ID NO: 946034 - DNA, 671 bp, Homo sapiens
aaccacagcaacattcatgtaccattttctttgggccagccactgttmtaagtgctttaaagtataatacttaacgtgtgtaaacatgttaacccattcattctcaaaataatcctcaaggtaagtactattattatcccagtttaacatgagaaaactgcagcacagcaagttagtaaatgagagggcagggattgaacctagccagtctagttccaaattccaagtttttaatcagatgtgaaattgcctctcatacattctttaataatgtcattttagtctttattttccttaataaatgtttcaaaagattgttgtgaggattatatgatataatctatgtgagaaatttagcacagtgcctagcatgcaggaaaataccacaataaatatgagtgacaattattattaattgtaaaaatactcagactgtacaactatttttcccagtgggaaacagaatgagaagaacacatttttattttccttaaagcagttatacaagagtacccagctacagatagttaataaaaccttttttgtttttttgatggtgggaaatattgataaactatctctattatctgtgactcttcttaggattatgaagcctcacaaccatttctttcctttggagtgtttgttcatggtaagcctcagagtcaaaa

SEQ ID NO: 946035 - DNA, 671 bp, Homo sapiens
aaccacagcaacattcatgtaccattttctttgggccagccactgttctaagtgctttaaagtataatacttamcgtgtgtaaacatgttaacccattcattctcaaaataatcctcaaggtaagtactattattatcccagtttaacatgagaaaactgcagcacagcaagttagtaaatgagagggcagggattgaacctagccagtctagttccaaattccaagtttttaatcagatgtgaaattgcctctcatacattctttaataatgtcattttagtctttattttccttaataaatgtttcaaaagattgttgtgaggattatatgatataatctatgtgagaaatttagcacagtgcctagcatgcaggaaaataccacaataaatatgagtgacaattattattaattgtaaaaatactcagactgtacaactatttttcccagtgggaaacagaatgagaagaacacatttttattttccttaaagcagttatacaagagtacccagctacagatagttaataaaaccttttttgtttttttgatggtgggaaatattgataaactatctctattatctgtgactcttcttaggattatgaagcctcacaaccatttctttcctttggagtgtttgttcatggtaagcctcagagtcaaaa

SEQ ID NO: 946036 - DNA, 525 bp, Homo sapiens
aaataaagggaaagagtacaaaagagaggaattttaaagctgggtgtccaggggagacagcacatgtcagcaggttccatgatgccccgagccgtaaaaccagcaagtttttattagtgattttcaaaaggggagggagtgtatgaatagggtgtgggtcacagagatcacgtgcttcacaaggtaataaaatatcacaaggcaaatggaggcagagcaagatcacaggaccacaggaccggggtgaaattaaaattgccaatcaagtttcagccatgaattgtcattgataacatcttatcaggagacagagtttgagagcagacaactgatctgaccaaaatttattaggcgggaatttcctcgtcctaataagcctgggagcactacgggacaccggggcttatttcatcccttatctacagycgtaaaagacagatgtccccaaagcggccatttcagaggtttccccttagggatgcattctctttctcagggatgttccttgctgagaaaaagaattca

SEQ ID NO: 946037 - DNA, 580 bp, Homo sapiens
ctctaaaatgggtcatcctgcatagaagtaatttgggaaagaatgaggcttggagtaaactctgtctgactgagtttcctttctaatgatgttttaatgcccttactttctcctacagcccctttttctcccccaggttttcccagacagcttttttttttttttttttttttttgagaaaaagtctcgccctgtcatccatgctggagtgcaatggagcgatcttggctcactgcaacctctgcctcctgggttcaagcaattctcctgacccaccctcccaagtagctgggattacaggcatgcaccaccacagccagctaattttttttttttgatctttagtaaagaaggggtttcaccatgttgaccaggctggtctcgaattcctgacctcgtgatccacccagacagcttttaatagaatcctgaggtagaatccactcagagtagggttaacagagaggcaccataaccgagtggccagaggaccgggacctgaagtgcctgaacccttgcatgggtttcttgytgattttcctgctctggctccctgggccatgacaccttcctcttcttc

SEQ ID NO: 946038 - DNA, 565 bp, Homo sapiens
caggaagtgtgaagtccttccccactcttgctatacagtattgtctaatgattgaggctttaagacccagaagttatcagggtgattmttttgagccaggaattcatcaggaactgggtctgtaggtactaattctcgggcttcccatggccagtgatctcccattacagtttctgcacatacataacatgatgtgacattgagagactgggctacatgctcggctaattgcaaaaacaaatttgtttttcctggaatttctggtactggcacattcagttcatcatagaaggtttaaaatactagctcaggagagcgtttatagacttctcaaaccaagatatttacttgaggatccagtctggccccatcgattcctaaggtcacactctccccttttttccagcgaggatcaaggggattcgttagtactagctctaaggggttacatttttgtttagtacaggaagggccattttttcctttctgaaggtggactggatccttttcattttttatccaagtggcccaaatgacacaacaggagtatccacattcatttttc

SEQ ID NO: 946039 - DNA, 587 bp, Homo sapiens
aacttcaatggttatgtggggatcttcacatagcaagctttggtacttggttaatctagcatttgttagccaatgatgtcctttggtattcatcaaagttaccacagcatgggggrcctttatattcaggttttgcccaagcgttagtttatctgcttcttgtgctaacagagtcattgctgtcggggcccttagacataggggccagcctctatgtctaaaacaactagaaaccccgtctagttgttttgagagataggccactggccttggccagggccccacagtctgggttaaaactccaactgccatttcttctctttctgacacatagagtgtaaagggttttgtcaggtcaggtagctccagggctggggccgacatgagtttttcttttaactcatgaaaagctcattgctgttggttgtaatagatgtagtttatctaatctacatttttattaactgtcacccaccaaaatattgactcaaatcctgcagctatttgatttcaagttttaaattgatctggtattccctgtgggactccaattgcgtctcaatagacttgagagtcgaaagacccat

SEQ ID NO: 946040 - DNA, 606 bp, Homo sapiens
ctgtgtgcttacgggcatgggaaaggataaatgttacagggatggacaacctctttctggaaacaggaaaaggggcccacctcgggcccctcaacaaactgaggcatatctggcacagccagtgcccttacaaacatagaattctcccctgccacagcaggcagtgctgccatagacctttgcagcacaattcccatctccctgcttcctggagagccaccagaaaaggtctctacaggagttaggggacgcttacactcaggaacagttggtctaccacttgggaggtctagtctaaatttgaaaggtgtcactgtacgtacaggaataattgattctgattatactggagagattcaactagttattagttcctcaactccgtggtctgcctccccaggagaaagaattgctcagttgttgctgttaccttacacaaaactaggaagcagcacagtgaaaagaacaggaggctttggtagtactaatccagcagggaaggctgtatattgggttaatcaattrggttttttgtctgacaaaaaacctatttgtacagtaactattcagggaaaggactttgaaggactagtagatacttgagct

SEQ ID NO: 946041 - DNA, 676 bp, Homo sapiens
caatcaatcctatgaaatggattaaggccattggaagctctacgtttgaaaattctatcctaataattatgtgcttgtgctgtctccttttagtctgcagatgyggaagctgtctctggagagaaagctgctgtcgagaacaagcaatgatagctgtggtggttttatgaaaaaaaaggggggcatgttgggagaagctgaggcagggcttgcatgtctgatatgatgtaaaagagtcttggaacatgtctgtggttcagggtctaaagcccctcatggcctttggaacaccaagctctgtgctaaatggtggaagtctgccctgccacaccacaatctaagcccagggcataaaacccttcgtggcttggatggaatccagggctcagggtataaaacccctcgtggcttctggaatgggtctagacttgctggcttcttgcttctagcactcccaagctcataaaacgattgtatcttaaactataagaacatgttccccattatctcaagtggcagaatatgttccatatacttcaaaggaaatgctaaaccatcacagctatagctcatgtgcttgatgcaccacttcctttcaacccccacatcctcaccacctgcttctttgatcaccaataaatatggtgggctcccagagctcggggccttcacagcc

SEQ ID NO: 946042 - DNA, 611 bp, Homo sapiens
ctttcagggatgcagggcgagccacagtgaggctgagcagtgaccactgaattcagcaacacgcaggttggtggtgagcrgaggggaaacctgattggaatctgctaaggagactgcgggaggagagaaactggagccagaagtacaggagcttctactgaggttgtgctgcaaagtgcaagagctgtaagaatcagcaaggttgggagaagtttgcctgtgtttaaattaggagaaatcatccatgtggaggccagtgagaatggtccaagagtcctcctcaaatcactcaatacctatgcattgtggttaaccctcaaacaacatgcaggttaagagcactcaccccttgcacagttgaaaatcccagtaaaacttttcactcccccaaaacataactactaacagcctagtgtttactggaagccttactgttgggagagacacaaggtcagacataatcaggtccatgcccatttgtgtctttccccaaggtcaggcctttattgatgctatttcagtcataaaagccacaggctgcatggagttcccaaggaggcaattctccgtaccacttcgttccctcaggagtcagggctacaggctcacag

SEQ ID NO: 946043 - DNA, 611 bp, Homo sapiens
ctttcagggatgcagggcgagccacagtgaggctgagcagtgaccactgaattcagcaacacgcaggttggtggtgagcggaggggaaacctgattggaatctgctaaggagactgygggaggagagaaactggagccagaagtacaggagcttctactgaggttgtgctgcaaagtgcaagagctgtaagaatcagcaaggttgggagaagtttgcctgtgtttaaattaggagaaatcatccatgtggaggccagtgagaatggtccaagagtcctcctcaaatcactcaatacctatgcattgtggttaaccctcaaacaacatgcaggttaagagcactcaccccttgcacagttgaaaatcccagtaaaacttttcactcccccaaaacataactactaacagcctagtgtttactggaagccttactgttgggagagacacaaggtcagacataatcaggtccatgcccatttgtgtctttccccaaggtcaggcctttattgatgctatttcagtcataaaagccacaggctgcatggagttcccaaggaggcaattctccgtaccacttcgttccctcaggagtcagggctacaggctcacag

SEQ ID NO: 946044 - DNA, 292 bp, Homo sapiens
caatggtgtaaataatgcattaaaaatgggctggcaggaaatatgccaacctggttactgcctctaggaagagcgggtaggaataatcatctttttgcttcttcattmttttccattttccagttttctgtaactatgtattatcaggggaaaaagcatacttttcaaaatgaatttcatattataggagaaataaagccagttatttcccccaaataatccctggccgaggaggaccctcgagtcaaataaacagatatataaaggattctctgttactgttaagactttc

SEQ ID NO: 946045 - DNA, 619 bp, Homo sapiens
ttgatttttgtgtttttagtagagatggggtttctctatgttggtcaggtggtctcgaagtcctgacctcaggtgatttgccctcctcgacctcccaaagtgctgggattacaggcatgagccaccttgcctggccacgcatcagcgttttaaacaacgcttttttatgctcaaggattctgctggtcaagaattcaaacaaggtgtattagtctgttttcacactgctataaaaaatatccgagactgggtaatctatgaaggaaagaagtttaatcaactcacagtcctgtatggctgggaaggcctcagtaaacttacaatcacggcagaaggtgaaggaaaagcaagtactttcttcacaaggcagcaagaaaaggagagagtggaggaacagcctaacacttataaaaccatcagatctcgtgagaactcactcactatcatgagaacagcatgggagaaaccacccccatgatccaatcacctcccaccaggtccctcgtttaacatgtggggattacaattagagatgygatttgagtggggacacagagccaaaccatatcacaggacaaggcaagaatttcttctctctgctccacaatgtctgagggct

SEQ ID NO: 946046 - DNA, 845 bp, Homo sapiens
gctcaatggatactaaatattttgttccagtctccttatagggattggtttttatatggctgtattcctctgaaacaaactttcttgcttttgatctgatactccattgtcagaggctcactgaatggtagaactggaacctaatcagtcagtcactctaaatcgatcttttcatggataagaaaaccaagacttgggttaaatacgtgcatagctagagaatactttggcagggccaggactgtataacctgccaatattgccgtggatatctctacgtagaaagcatttgttttagtggagaataatggaaataatcatttttctttcggcttctctgtttaagaggcacagttgaatgctgttgatgctttgattgactccatgagcttggcaaagaaagatgagaagacagacacccttgaagacttgtttccaaccaccaaaatcccaaatcctcgatttcagagattatttcaggtaagagaagaaggatgaacaagtcatatttcttttaaatgaaagagagctaagtgcaaagttgcggtaattggccagtcctaaataaatgtcttttttctctgaaggccccatttgctctatttaatggaagaataacatcttcctctcctacttcagaaggtaaaaatattctgagctcttaaaaagaaaaataaagttggaatgctttctttcttttcttttttttttttttctggaagaagcttactttaacaaaaaaaatacaggaaggccagttgccyatgctggagtgcagtgttgtgatcatagctcactatagcctcaaactcctgtgctcaagcactcttcccgcctcagtctcc

SEQ ID NO: 946047 - DNA, 633 bp, Homo sapiens
agttcaagccgatgctcatttatcatgctgaaaatcctagagcccttaagaatgatgctaagtctgttgtgtctgggctccagaaatggcatagcaaagtctgsatgacagcacatctgttcacagcacatctcttcatagtttattgaatattttaggcccactgttgaaacctatggtacagaaaaaaagattattttcaaaatcttactgctcattgacaatgtacttggccacccaagaattctgacggagatgtacaaagactttaaggttgttttcacacctgctaacacaacattcatctgcaaccaatgaacccatggaccaaggaaatattttgactttcaagttttattacttaagaaatacattttgtaaggctataattgccatagagagtgatttcttctgatggatctgggcaaagtaaattgaaaaccttctggaaaagattgaccattctagatgccattaagaacatttgtgattcatgaatatttgtgattcatggggaagaggtcaaaatatcaacatcgtattagtcagggttctccagagggatagaactgataggatatatgtatatataaaagggagcttattaaggagagttaggtcacacgatcgcaa

SEQ ID NO: 946048 - DNA, 423 bp, Homo sapiens
ttggaaagcattcatgtggttttactgtycccaaagaatagatgtcataactaatgactgaaaggtcagatgaaggcaagggacgaccttctagtggttggaaccacctgaagatgaaacaggctgttctttaaggtagtgagtccccattccttggagcgttctcgtaaagcctgggacaagggtcacaggattcctaaccacttcaggggccttttctaaccctgggagtccctgaaatcctggactctttttagctacaacaaactgaaagacctgacgattccatcccaggactctgggattatggtctgaagtctcatgagaaatacctcattttttaaccctctactttcttcctccacctccctctcttccaaaaagagcttaagtcagtccctgtgacagaaagcagaatagaac

SEQ ID NO: 946049 - DNA, 423 bp, Homo sapiens
ttggaaagcattcatgtggttttactgttcccaaagaatagatgtcataactaatgactgaaaggtcagatgaaggcaagggacgaccttctagtggttggaaccacctgaagatgaaacaggctgttctttaaggtagtgagtccccattccttggagcgttctcgtaaagcctgggacaagggtcacaggattcctaaccacttcaggggccttttctaaccctgggagtccctgaaatcctggactctttttagctacaacaaactgaaagacctgacgattccatcccaggactctgggattatggtctgaagtctcatgagaaatacctcattttttaaccctctactttcttcctccacctccctctcttccaaraagagcttaagtcagtccctgtgacagaaagcagaatagaac

SEQ ID NO: 946050 - DNA, 699 bp, Homo sapiens
agatccattagggcatctcttactattaccatgtcctgtgattaaggtcaatgagaaactacaacagcccaattgaggcaggactacaaatgacccagacccttcaggaacaaaggtttgggtcactccatcaggaaaaaacccacgacctgcagaggtgcttgctgaaggcaaagggaatacagaatgggtagtagaagaaggtagtcatcaataccagctacgaacacgagaccacctgtagaaaagaggactgtaattgttatgagtatttcctccttcttttgttaaacacgtttgtgcatgtatacacttgaactaagaaaatatttttattatttcctttcttttatcatgtgacataagatttattgacttcacatcagcatttaagtattgctaactttatgtaatagtatgtgggttggggattcatgcgtttccagttgtacaaaggatagttgtattacattagatgtaattatgacctcactgtctttattgaaaattatgtatgatctcagggaatgtataatggttcaagttgacaaagggtggacttgtgatggttaatactgagtgtcaacttgattgrattgaaggatgcaaagtattgatccttggtgtttctgggagggtgtaggcaaaagagattaatatctgagtctggctgggaaatgcagacccacccttaatctg

SEQ ID NO: 946051 - DNA, 582 bp, Homo sapiens
gggtcattgcagagaggaggcaggactagattgcagctcccactcagatggacagagcagtgtgtggaggcccacatcatgaacttttgctccagaacaactgcaggaatagagagaatgcacagaccttctgaaagaagcggattgctcctgcaggacttgggagacaccccaaatactttgagtgcccaaactgtggaagtgggaaaggaagattgtcaaccctgaaacttacacccccactggggaacctgaaggtctagattacaagagaagattctgaccttatttggagctgagtcaatttagaaagctgagagaattacaggggtagaggaatcagcgggaaaagccctgtgggctcactgagtcccctagaaagccatttcttccctgcctcacagaggtttttgaggatggtgcccagaggcactgggagaagggcacagggagatggaaacctctagctgaactttgtaacaatctgaaccarttgagaattctcctggccagaactcaggggagggcatgaatctggtgtgcagattccacaggcagggtaagaacaaactccctacttgc

SEQ ID NO: 946052 - DNA, 615 bp, Homo sapiens
cacacatggtttatatcacaggactctgtgcagacaaccsccagtaccagcctggagcctggtagacttgctgggtggctagatccagaagggagataacaatcactactgctcagctctcaggaagctacaaccctagaaaaagagggagggtactacatcaagggaacaccccatgggacaaaagaatctgaacaacagccttgagccctagaccttccctctgacagatcctacccaaataagaccagaaaaccaactctggtgatatgacaaaacaaggttctttaacatctgcaaaaaaatcactagctcaccagcaatggatccaaaccaagaagaaatccctgatttacctgaaaaataattcagaaggttagttattaagctaatcagggaggcaccagtgaaaggtgaagccctacctaaggaaatcaaaaaaataatacaagaagtgaagggagaaatattcaatgaaatagatagcatgaataaaaaacaatcaaaacttcaggaaaaaatggacacatttatagaattgcaaaatgctctggaaggtctcagcaatggaatcaaacaagcagaagaaagaacttcagagctcaaagacaaggt

SEQ ID NO: 946053 - DNA, 647 bp, Homo sapiens
tgttattggtctattcagagattcaamttcttcctggtttagtcttgggagggtgtatgttttgaggaatttatccatttcttctagattttctagtttatttgcatagagttgtttatattattctctgttggtagtttgtgtttctgtgggatcgttggtgatatcccctttatcattttttattgcatctatttgattcttctctcttttcttctttattagtcttgctagcagtctatcaattttgttgatcttttaaaaaaaaccagctccaggattcattgattttttgaagggtttttttgtgtctctatctccttcagttctgctctgatcttaattatttcttgccttctgctagcttttgaatgcgtttactcttgcttctctcgttcttttaattgtgaagtcagggtgtcaattttagttctttcctgctttctcttatgggcatttagtgctataaattttcctctacacaatgctttgtatgtgtcccagagattctggtatgttgtgtctttgatctcgttggtttcaaagaacatcgttatttctgccttcatttcgttatgtacccagtagtcactcaggagcaggttgttcagtttccatgtagttgagcagttttgagttcgtttctt

SEQ ID NO: 946054 - DNA, 608 bp, Homo sapiens
cattggatttgatttattattagtttggtatggatttatacctgtgtctcactrtgtcagtgagagatattcgtctgtatttttctcttcttgtaatgatttgtccggttttcgaattagggaaatgctagcataatcaaatgagttaggaagtattcctccgctcaaggaagtattccttgaagtgattgtaaacaaattgtataatttctttcctaaatattttctagaaatctccagtgaacccatctgcatctggtgctttgagagtttattgatttattattcaattttcttaataaatataggcctattcagagtgtttatttttaatataaatttaggtggattatgtgtttcaaggaattgtataattgtatctaggttataaaatttgtgggcatagagtttttcataatattcctttattatcctttaatgtctatggatttgtaatgatatcttctctttcatttctaatattagtaatttttaaattttgtttagcctggcctaaaggcttaaaatctaattaatttttcagctaatcagctcttggtttatagatcttctctattgatttcctgttttcagtttcattgatctct

SEQ ID NO: 946055 - DNA, 721 bp, Homo sapiens
agtcacttctcagaccacagtggaatacaactagaaatcaattctaagaagaactctcaaaaatatacaaacacatgaaaactcaacaatcttctcctgaataatctttgggtcaaggacaaaattaagatgtaaatttaaaaacttttggaaatgaataaaaagagacacaatacaccaaaacctctgggatataggaaaagactaagagggaagttttgagcaataaatttatacatccaaaggacagaaagatcacaaattaacaacctaacattgcacctcaaggacccagaagaataagagggaaccaaaactgcaactagcagaaggaaaaaattcaatgatcagagcagaattaaatgaaattgagaccaaaaaaaagaatcaaccaaatgaaaagtttgttttctgtaaatgtaaacaaaagtgatagaacactagctagattgaccaagaagagagacaattcaatcagaaatttaaaaaaggagacattacaactgaaaccacagaaatacaattgataatcagaaactactatgaacatctctacactgacaaactagaaatcctagaggaaatgaataaattcctgaacacatagaaccytccaagattgaaccctaaaaatacagaaaccctaaaaagaccaaaatgagtagtgagattgaatcagtaataaaaactttcccaataaaggaaaacccaggaccggagg

SEQ ID NO: 946056 - DNA, 626 bp, Homo sapiens
aggaaggaggaaatactcatgccaattacagtcctcctttctgcaactggtcacatggtcatagatggtattgatgactaccttctactacccattctgtattccttttaycttcagcaagcacctcagcaggttgtggtttttttcctggtggagtggcacaaaccttcattcctgaggggtctgggtcatttgtagtcctgcctggattggcaaggctgttgggctgttgtagtttcccattgaccttaatcacaggacatggtaatactaagagacgccctaatggatctcctgtattccatgcatacttttccttacctccgttgtggagtagtagactgattgcatcttgatagtctgggtcagtcaccccagccaacactgtaactgccttcttagcctattgacttaaaggtaggaggagcccaaagtgtccaggtggcaatcttaacttccagtttaattgaatccttgttgtgtctccgggtggcagcattcctccctctggaactaggacctctaggccagcagaacgtaatatcgcgggaacaggaaacaaaaattttgctagtggatcaccaggggtgatggtgagtggtgcaacttccaattccaccccttga

SEQ ID NO: 946057 - DNA, 736 bp, Homo sapiens
cccatgaggccatttgtgcaggctrggggagaaggcagggtggcaggagtggggaccatgagcatttgagccacttcctcatgtaacttacttgtgccttcaggacctgctcaagcctgatcacatatacaccacttccatttgatgatggaatgctgctgtgcacaacccactttatggctagaggggtcagaaagcacccagtttgtgataggcagttcaggtcccatggtgacttgatgacccatagtcaaatgttcagtttccaccaaagcccagtaacaggccaagaactgtctctcaaaagaagagtagttatctgcagaatatggcagggccttgctctaaaatcctagaggcctccactgtgattcacctatgggggcctgacaaaggctccaaacagcatcatatctgccactgacacctcaagcaccattggatctgctgggtcatatggcccaagtggcagagcagcttgcacagcagcctggacctgttgcagagccttctccttttctggaccacattcaaaactggcagcctttcgggtcacttaataaataggccagagtaacacacccaaatgaggaatgtgttgcccacaaaaatccaaataagcccaccaggtgttgtgcctctttctttgttgtaggagggggcaaatgtaacaacttttccttctccttagaaggaatacctcaacaggccacacaccactggacccctagaaatt

SEQ ID NO: 946058 - DNA, 621 bp, Homo sapiens
aggtacagccagggctgtacttcccatggagccggcgagagccaggagcaggcagaagccctgctaccttccaagttggagaggagrgaactccaccctcccaagcaaagctgcagccacctggctgcaactgtggacctgggcatctctgcactcttgaggacctaggaagtcccccttcccctgcaggctcagaagggcctgctcccactacctggcctctccccactcatggaacccactccagttttggaggaaagttatggctgagcccaggcactgtcacaacccagcctgtgtgtgtgcacttggggaagcactgacatgccagccccctgccacctcggccccctctggactttgggtgccagcaagcatgggagggtggctgaaagagagctaagggtgactcgttgcaggcctgcaggcatctcttggcacaaacaacctgggtgccatgggcactgtagatgggaggttaatggtggcaggatgcagacaggctcctggatggtcaggggtgggtccccagtgaagcaccaccttcaaaagccagggatggcctgaagcctggggactgggctgttagttccacagaccagagtgagaacttatggtgct

SEQ ID NO: 946059 - DNA, 448 bp, Homo sapiens
ctcctttttctacctctttgtttcatttcccactggaaatacaatgccgtataagcttttccattcaaggcctatattgccttgaatgaaatcctagaggataacatgtcatacatgcaggctaccacttcccaagctggcacttcagctatgccttccacaggctattcagtgatctatcaggctgtcagcttgtgggtagtgcagaatgtgacatgaacagttgatcccatggttatgagcccaaatatcccttttgatataaagtttgctgcctgttctaatacaacattgtgtggggttttacaccagtggatcaaacacttaaatcttaagataatggtactgggtaaggccctgtggrcagaaaaagaaaacccatatctgggatatatgtctattcttctgagaatgaatcactgctccttccaggatggaaagtccccaa

SEQ ID NO: 946060 - DNA, 600 bp, Homo sapiens
gacctaagttcatggactataaatctgcgtaagagaccaagaagtcagagattcaaagcacccttgttgggttggaataagggtagcttctaggagctaagagcagctcgctggctgacagaggtcaaagaaacagggatcttagaattctgccaacaacagcaaatgagcttggaagtggattctgtggtaatttgttgtgcagcaatacaaaatgtatacagtctctaactggtctccttgcctctggactgattctcttccagtataacatccaaaccgccaaggatcttttaaaactacaagcctcatcatattacttgtttacaaaccttctgtggggtagaaaaaaagagagattactcacgtgtgtactattctgtgtgagaagctacaagtgatatcaaataaaaaaataactgccagccagttatgatggctcatgcctgtaatcccagcactttgggaggccaaggtgggaggactgcttgagcccagagttgaagaccagcctgggcaacatagtgagactctgtctcttctaaaaatacaaaaaattagctggtgmatgcctgtggtaccaagtatgcaagaggccaa

SEQ ID NO: 946061 - DNA, 561 bp, Homo sapiens
tcaacaaaaagcacaaacagggcggggcatggtggctcacgcctgtaatcccagcactttgggaggctgaggtgggtggatcacctgaggtcgggagtttgagaccagccyggccaacatggtgaaaccccgtctctactgaaaatacaaaagaaattagccgggcatggtggtgcgtgcctgtaatctacgcaggaggctgaggcaggagaatcgcttgaccctgggaggcgtaggttgcagagagccgagatcgcaccactgcactccagcctgggtgacagagcgagactctgtctcaaaaaaaaaaaaaaaaaaaaaagcacgaacattagaaaaatatggcattgaatagactttaaaaaggacacctgtttataatatgacagctgaaacaagagggcagaacatcacctcaatggaccacagtggggaacctgttctaggacgctgtgtgcacatacttgtctgccaatgaccgcatacccagtgttgattttggggttataaataaattttagtgagtatgcaaatttgtaaacacaaaatcctccagtaatg

SEQ ID NO: 946062 - DNA, 574 bp, Homo sapiens
gtcaaaatggaccaatcagctctctgtaaaacacaccaatcggctctctgtaaaatggaccaatcagcaggatgtgggtggggccagataagggaataaaagcaggctgtgccagccagaagtggcaacccgctggggtctccttctacactttggaagctttgttcttacgctctttaaaataaatcttgctgctgctcactcattgggtccacactgcctttatgagctgtagcactcaccatgaaggtctgcaacttcactcctgaagccagcgagaccacgaacccaccagaaggaagaaactctgaacacatctgaacatcagaaggaacaaactccagacacgccgcctttaagaactgtaacactcactgcgagggtccgcggctttattcttgaagtcagtgagaccaagaccctaccaattccggacacactaggcttaarggatcctcccacctcagcctcctaagtagctgggactaccggtgcaccaccctacccagctaattttttatttttatacagatgaggccccactttgcttccctggctggtctggacctcatgg

SEQ ID NO: 946063 - DNA, 580 bp, Homo sapiens
cttcagtatccactctaatatcctyatgcttttatatatatgtgcgtgtgtgtgtatatgggcatatacgtatacacacatatatacgtatacatacacacgtatatacataaacacatgtatgtatatatacatgtatacccatatagatacacacgtatacacgtctacacgtatatatacacctgtgtgtatatacacacatatatacatatatacatatacatatgtacacatacacacatatatacgtatatacgtatacacacatgtatatatgcacacaaatatgtatatacgtatatacatattacacatacacacacacatacacacacacacacacacacacacacacaagttgagttccaggttctctgtcaaattcttctttactactgccagtaaattactcccaacattaaaaatttgtttctcagtatactgtgatctgaatgcctcccaaagttcatgtgctaaaatttgatcattaatgcgatagtattaagaggtggggcttttagtagatgattaggtcatgaggggagagccctcatggatttataagggattaggacct

SEQ ID NO: 946064 - DNA, 580 bp, Homo sapiens
cttcagtatccactctaatatcctcatgcttttatatatatgtgcgtgtgtgtgtatatgggcatatacgtatacacacatatatacgtatacatacacacrtatatacataaacacatgtatgtatatatacatgtatacccatatagatacacacgtatacacgtctacacgtatatatacacctgtgtgtatatacacacatatatacatatatacatatacatatgtacacatacacacatatatacgtatatacgtatacacacatgtatatatgcacacaaatatgtatatacgtatatacatattacacatacacacacacatacacacacacacacacacacacacacacaagttgagttccaggttctctgtcaaattcttctttactactgccagtaaattactcccaacattaaaaatttgtttctcagtatactgtgatctgaatgcctcccaaagttcatgtgctaaaatttgatcattaatgcgatagtattaagaggtggggcttttagtagatgattaggtcatgaggggagagccctcatggatttataagggattaggacct

SEQ ID NO: 946065 - DNA, 591 bp, Homo sapiens
ggtagtggggtactgctgtaaagatacccaaaattgtggaagtgactttggaactgcgtaacaggcagaggttgaaacagtttggacrgctcagaagaagagaggaaaatgtgggaaagtttggaacttcctaatgacttggagggctcagaagacaggaagatgtgggaaagtttggaacttcctagagacttattgaatggctttgacccaaatgctgataatgaaatggacaataaagtctaggctgaggtggtctcagatggagatgaggaacttgttgggaactggagcaaaggtgactcttgctacgttttagcaaagagtctggtggcattttgcccctatcctagagatttggggagctttgaacttgagagagatgatttagaatatctagtggaagaaatttctaagcagcaaagtgttcaagaggtgacttgggtactgttaaaaagcactgagttttatgtattcacaaagatatggcttggaattagaacatatgtttaaaaaggaagcagagcataaaagttcagaaaatgtacagcctgactatgcaataggaaagaaaaacccactttctgagga

SEQ ID NO: 946066 - DNA, 832 bp, Homo sapiens
gctgaaacctctcaagacataaaacctgcagttttatygaaagatgtaaacagcaatgtacggtgtggtccaaatgaactgttaacttggggaagagggtatgcttgtgtctacaccccctcaggtcctctttggattccagcatgacgcatcaaaccacaccatggcatggctaggaaccaagccggtaccagaaatgaaggaactgaccctacaggacctgcatccccggaggatgcggcttcctcaaacaacacaggccccagacattatactgaagaagacaagtcagaagactgagcaaatcctgctccgggaacaggcaccattcactccagataatgtattccttttttattctctccctgtgcctgctacctatacctgctacactcaattaagctcatcttctaaacctgccatttttcagccctgttatctgggcagacacttccttcccagcttctaacaatgagactgcttggctggaaggggttaacttatccccagtgaggttccttagtaacagcacacatcaaactgaagcgccaagcaatgctgcaggtcgttccttgattggaaaagaatgttgctaattttactcatgactgtcttatgttatttgctaattctaggatgcaatgccagaataagagcaatgactgcctcgccccacagacctgttgttgcacatatctgcatgcttcaatcaacagaacctgatgcaaaaaaaaaacagggaagagggagatgtgggagttcggtcaagctggtgggaaaaattttaagatgaagttataggatatagacacaaaccttcttggaaggctgg

SEQ ID NO: 946067 - DNA, 599 bp, Homo sapiens
accactaatgttgagttcaaaataaatgaatttaaaaataatctacagtatttcctaatttcatattatacatcatttaaagtatttttaaacttacccaaatgaagtaatgtaaactgggctgccagttcctttgcatcttctaacgtagtacagagtttgtctggcatgaagtaactctgggatccatttgcaatagcaggaataactatcttatacaccaagagtactttcccatcttgacttgttgttgaatataaataatattctggtggtgcccagttatttttgttgcagtaataatccaaatgcattactgcagaattaaaatgattggattttaaagaatacatactaattggagtaagctttgttccaggataaaaagggtaagtgcatctttcaacttcaggcggacttgggctatgctgaccattgagacgagcaggaagagttggcagcttgcctagagtttttgggtggctctcttctttgttagcaaacacaatcagattttcagaatttggactaatctgaccrttaagatgctgtctccaagtgttttctttatttactggtttagctagtgttacctcaat

SEQ ID NO: 946068 - DNA, 554 bp, Homo sapiens
gggatttcaatatagagttaaaaaaatctggcccgtggagaatacaatctagtaaaagagatttrctatatactcaagcattctcaaaatcctaaatttaaggaagaagaattgctgatttagctttttggagttttaattcaataagaataaacacaaactatgctcaaggtatcttaccaaaccatatattacagggaataggagatgagattcacagaagcaggaaagattgtttacctttatatctcttctctccttcaactctctacttcacacctatcttcttcatagcagggctcaaaacatggctattaaatgcgtaagtaaatatttaataactacttcctgcattaaaattatattacatttggcaaggcacagcggctcacacctgtaggggtcgcagcattctgggaggccgaggcaggcaggttacctgaggtcaggaatttgagacaaacctggccaacatgacaaaacccggtctctactaaaaaacaaacaaacaaaaacaaacaaacaaaaaacaacaaaaattagccgggcatggt

SEQ ID NO: 946069 - DNA, 662 bp, Homo sapiens
gtggtcgtggcatgcagactgagaggtgcaatwcaaactaaacatccccttagaggaccaatcaataatgattccataggaatcattgcacagcacctctgcctgttttgcaatgcaaccttcccaagtaagtatgttcatttttctggccaggtccaattctgtttataaataggttgttgagggcagtatgcctcaataataggagtagatttattatagtaaatactgagaccagaaagcatgtgtaactgtgtcatagagtgattacatccaggcattattgccagccaagattgctagtgagggggtaggcaactagttgcctttcccaaacagataggcggatgttcaaatcctaaagaaatattcataacagttccttcctcatgtgggtgagatgggcctctatcatctgtaggaccaagcatccaagagctatcattactgtatacctcctttggaggggtctagccaagttacaggctgtagaagtggtggaaaaggtaaatatgcccaataagtataattgttctctgtgtcagcccttgctgaaggaatactcatggcaatggtgatcactgctatcatagctatcattaaattactcattgtgactggttgtcccactttcctcaggttttcttctgccatctgtgaca

SEQ ID NO: 946070 - DNA, 363 bp, Homo sapiens
gtggcatgcagactgagaggtgcaattcaaactaaacatccccttagaggaccaatcaataatgattccataggaatcattgcacagcacctctgcctgttttgcaatgcaaccttcccaartaagtatgttcatttttctggccaggtccaattctgtttataaataggttgttgagggcagtatgcctcaataataggagtagatttattatagtaaatactgagaccagaaagcatgtgtaactgtgtcatagagtgattacatccaggcattattgccagccaagattgctagtgagggggtaggcaactagttgcctttcccaaacagataggcggatgttcaaatcctaaagaaata

SEQ ID NO: 946071 - DNA, 590 bp, Homo sapiens
agttgcctttcccaaacagataggcggatgttcaaatcctaaagaaatattcataacagttccttcctcatgtgggtgagatgggcctctatcatctgtaggaccaagcatccaagagctatcattactgtatacctcctttggaggggtctagccaagttacaggctgtagaagtggtggaaaaggtaaatatgcccaataagtataattgttctctgtgtcagcccttgctgaaggaatactcatggcaatggtgatcactgctatcatagctatcattaaattactcattgtgactggttgtcccactttcctcaggttttcttctgccatctgtgacagcttcttgatctgtccccaggtaggtggctgtgttggacacgtgttgcttgtgacagtttaagatcctcttcagcatcagtctcgatatggctgcaaccgggggtcctcaggttcctcccagaatctcttctttggcatctggctcatgataaggtttcaggtgtcttgaaggcacmagaattggcagttgattcggtcctggagaagcacaagcataacctgtaccccaagttattattttacctat

SEQ ID NO: 946072 - DNA, 590 bp, Homo sapiens
agttgcctttcccaaacagataggcggatgttcaaatcctaaagaaatattcataacagttccttcctcatgtgggtgagatgggcctctatcatctgtaggaccaagcatccaagagctatcattactgtatacctcctttggaggggtctagccaagttacaggctgtagaagtggtggaaaaggtaaatatgcccaataagtataattgttctctgtgtcagcccttgctgaaggaatactcatggcaatggtgatcactgctatcatagctatcattaaattactcattgtgactggttgtcccactttcctcaggttttcttctgccatctgtgacagcttcttgatctgtccccaggtaggtggctgtgttggacacgtgttgcttgtgacagtttaagatcctcttcagcatcagtctcgatatggctgcaaccgggggtcctcaggttcctcccagaatctcttctttggcatctggctcatgataaggtttcaggtgtcttgaaggcacamgaattggcagttgattcggtcctggagaagcacaagcataacctgtaccccaagttattattttacctat

SEQ ID NO: 946073 - DNA, 590 bp, Homo sapiens
agttgcctttcccaaacagataggcggatgttcaaatcctaaagaaatattcataacagttccttcctcatgtgggtgagatgggcctctatcatctgtaggaccaagcatccaagagctatcattactgtatacctcctttggaggggtctagccaagttacaggctgtagaagtggtggaaaaggtaaatatgcccaataagtataattgttctctgtgtcagcccttgctgaaggaatactcatggcaatggtgatcactgctatcatagctatcattaaattactcattgtgactggttgtcccactttcctcaggttttcttctgccatctgtgacagcttcttgatctgtccccaggtaggtggctgtgttggacacgtgttgcttgtgacagtttaagatcctcttcagcatcagtctcgatatggctgcaaccgggggtcctcaggttcctcccagaatctcttctttggcatctggctcatgataaggtttcaggtgtcttgaaggcacaagaattggcagttgattcggtcctggagaagcacaagcataacctgtaccccaagttrttattttacctat

SEQ ID NO: 946074 - DNA, 644 bp, Homo sapiens
ccaccctccagctctgagcctcagctgtcatctccctgggtctgaaatccartgaagtcagagtgactgtagggaatgcatgggtgcagtgaaaaaggttgctctactgggaagggctgagaatgctggtcctaagctagggtgacgctagtccttacattcagggacaggaagagtcatgaatttccagggtaggcaagtgggttacagaaagaggctgccttagaatacccagcttcccaggtgaaattttactggaggagtcagttgagggtctatatttgacagcagaaatcatttgaaacgttttcctagattggatattttccaatgcaataaggagggtccttaaccagatgaagataagcaggggtctgtgataaacttcaagtggtctgtaaaacctctgaaatcatagtcaaaattgtgtctggggtccataccttttatcagaatctcagataaatatatggcacacaaaaagctaagagtcacttaacagtgacttgcagtggcaacacctccacccagcccccccagcagcctcagcctcatcagtatcacatcattgctgggaatattgtctcttccagcacactctcctgaaaaatttaccctattgggaagaccttcctaaatttacc

SEQ ID NO: 946075 - DNA, 527 bp, Homo sapiens
aaattcttttttcagcttcttatgatgtcttttctccttgtatgactccagtgaaatgaacgctagaacttttgttatttcaaggcttcctgagactctatttttttcagcccatgtgtctctgttcagattgagtcatttctatttaccgttcttatcttcatcatctccttcttccattgagctaattcaacaagattttttttttttacttgggtggttgtattttacttgaatttaacagaaaaaaatgactaaagtaaaagtgaagtcaatgctaatcttttttttttcttttttttttttgagacagagtcttgctgtgtcacccagatcagaatgtagtggcgcaatcccagctccctgcaatttctgcctctgggttcaagcaattctcgtgcctcagcctcccaagtagctgagattagaggcgtgtgccaccacgccccactaatttttgtgtttytggtagagacagggttttgccatgctgcccaggctggtctggaacttttgggctcaagcaa

SEQ ID NO: 946076 - DNA, 434 bp, Homo sapiens
ggctaaaaggggccaatgcagagctcgggccatggcttcagagggggtaagcctcaagcctcagaagcttccacatggtgttgagcctgcaagtgcaccgaagtcaagaattggggtttggaaacctctacctagacttcagaagatgtatggaaacacctggatgtccaggcagaagtttgctgcagggatggggtgctcatggagaacttctgatagggcagtgcaggagggaaaagtggggttggaacccccacacagagtccctactggggcactgcctagtggagctgtgagaagagggccaccaycctccagactccagaatggtagatctaccaacagcttgcaccatttgcctggaaaagccacagacactcaataccagcctgtgaaagtagctgagaaggaggctgtactctgcaaagccacag

SEQ ID NO: 946077 - DNA, 610 bp, Homo sapiens
taggatgactaaatactaaagaattagattatagggtgtattagtccattctcacactgctatgaataaataccaagactgggtaacttattaagaaaagaggtttaattgacccatggttcagcagggctggagaggcctcaggaaacttaaaatcatggtggaaggggaagcaaacatgtctttcttcacatgatggcaggaaggagaagagcagagcaaaggaggaaaagtcccttataaaaccaccaaatcttgtgaaaagtcactcactatcatgagaatagcatggggggaccaccgcatgatctaataacctcccacggggtccctcccacaacatatggcgattacaattaagattgcaattcaagatgagatttgggtggggacacagagccagaccatatcattttgcccctggcccctcccaaatcttgtctttctcatatttcaaaacacagttgtgccttcccaacagctccccaaagtcttaactcatttcagcattaatccaaaagtccaagtccatagcctcatctgagacaagtcaagtcccttctgmctatgagcctatataataaaagcaagttactttctagatacagtg

SEQ ID NO: 946078 - DNA, 597 bp, Homo sapiens
tcaagaaagatcttctatatgtatatgcaaaagttatttattaggagrtctatatacatttattcccttagaagcctttagtgtcacctctaggtaaagacaccaacacttcatttatatatcttatgaaaataaaaagactatttccaggattgacaatactgtgcatcctatattcagaccacgtagttgctactgaatgtaagttttgttaaaggacaaaactgttaaaaataactatagctacaataatgtgctaagtgatacatagtataaaaagatgcaaattgtaacatcaaaacaaaaaatgtaacaccaaaaacaaaaacatcaatatcataacatcaaaaacctataaccgctatatatatagtggttatttttatatatgtatatgtaatatagtggttatattatatctatacacacaaataatatagtgttatgtataatatatattaatgtccactgttgaacatatattatatatatatgtagtgtcttcttgctgttttcctttgtgattcaacagttttttgtagtactatgctttgattcatttgcctataataatctgttttaaagttgataacgact

SEQ ID NO: 946079 - DNA, 586 bp, Homo sapiens
taagtttattgctccctatcgtattcctaatagtaktaaataattttatgattatactgcagatgggaacatttatttactcttttccaggtactttgacctacttttgtgattgccacaaaaccttgaaatgtgtttatctcccaattttgctcatcagggcagagagcttggaaaggtagtttcttgcagaagatcacaaagctagcagattgccaagtgaagtccctaatgtaggccttctatctccaaagatcacactcttttccttatagtgggatgcctctcatgtttaccaattaaaaatgctacactttggtgaaatcacgtcttatttatcttgcctaagttaaattctaaatcacaattgtgattcaaataatcaagttatgccacggtcacaacccaaattattttgagtgggtgggtagatggtgttaaaagtgggaattttgtttgattttgtttttattgtcataatgtgttttctggctattgttacaagcttatgaattatcataattacatcttgtttttggcaaaaataaaaataaaaatccagtgacaaattggaaacttgaaggat

SEQ ID NO: 946080 - DNA, 667 bp, Homo sapiens
ctgactgaacaatggttaggctgctgaagatccagttgtgacatgagttgggagacaactcctaaattttgtagggttttgttttgttgcattatacttggccagattatttgtgtaaagtgcagcaaaaataattattttttacataggtgttttaaattagctttgatggaactttgttccatagaaggatcctcaaacaatacttttttaaagctgagcccagccatggatttgtattatcaaatacctgtgagttgggtaaactcctctcctcttgaggtcgcaagataacttagggctcctgggcctaagttatatatatatattatatatgtacactttatatatataatatatatagtatatgtataaagtatataaagagttctggggtacatgtgcagaacatgcaggtttgttacataggtatacatgtgccatggtgctttgctgcacccatcaacccttcatctccattaggtatatctcctaatgctctcccttccccagctccccacctcccaacaggccccagcgtgtgatgcccccctcccatrtccatgtgttctcattgttcaactcccacttatgagtgagaacatgttgtgtttggttttttgtttttgtgttagtttgctgagaatgatggtttccagcttcatcc

SEQ ID NO: 946081 - DNA, 572 bp, Homo sapiens
tgagggaaagatttttatgactgattcatcttcactactggttgttggtctgttcacattttctaccttgtagttcaatctttggaggttgyatgtttctggaaatatatccatttcctctaggttttctagtttgtatgcatagagatgtttatagtagtctctgatgatcttttgtatttaagtgatatcaattgtaatgtcacttttatcatttctgattgtccttatttgtatcttctctctttttttcctggataatctagctagcagtccatcaattttgcttattttgttaaagaaccaacttttaattttatagattctttgtataattttttggtttcaatttcatttagttctgctatgatctctgttatttcttttcttctgctagctttggatttggtttgttgtttttctagtttcttgaggtgtgacattaggttgttaattagaggcctttctatcttttgaatgtaggcatttaatactataaactcccccttagcggtgtttttgctgtatcccaggatctttggttcattgtgtctgtattttcatttgtttca

SEQ ID NO: 946082 - DNA, 604 bp, Homo sapiens
ctgtaagtaagcctttgttagagcctccaaggttcagtttttagctgaggcttctcacatgctccctctctctccaggccagtgggtctccattgcccagctcctgcccacactcctgcctgttgcggtgaccagagtcgtcatgtctcttgagcagaagagtcagcactgcaagcctgaggaaggccttgacacccaagaagaggccctgggcctggtgggtgtgcaggctgccactactgaggagcaggaggctgtgtcctcctcctctcctctggtcccaggcaccctgggggaggtgcctgctgctgggtcaccaggtcctctcaagagtcctcagggagcctccgccatccccactgccatcgatttcactctatggaggcaatccattaagggctccagcaaccaagaagaggaggggccaagcacctcccctgacccagagtctgtgttccgagcagcactcagtaagaaggtggctgacttgattcattttctgctcctcaagtattaagtcaaggagccggtcacaaaggcagaaatgctggagagmgtcatcaaaaattacaagcgctgctttcctgtgatcttcggcaaagcc

SEQ ID NO: 946083 - DNA, 582 bp, Homo sapiens
aaattactgcaaactttcaawcatgtagcacacctgataatatttaatcttaactttacaaaatgtgtaatttatctattaaacctgattctttcagtcatctgttacaggacatcattttcatgacatcgaagtgtttattaatttaaaaactttagaaacaaacagcatagcctatgaaagtgtctcttaatggaaaattatcaatggaaagtaagtctggcaaagaatttagtgtgagtacaaagaggaccaggttggaagccatcatggtgacatcaggtcctgttaacctactcgcagtcagacaagccaaagtacaagttccctttgggtgatcccttcgaccaacataaacacagtcccagaatcacatggccccaggtcctcattcagaggtcctcaatattataatacaatactcatcaacaaaatgagaatatagaatttaaaatttcacaaagaacttgtagactcttaagattatgtttgtagaccccaagagttgactgaacccagttaaaggaaagctggaccaaataatcttttttttattattattattatactttaagttttagg

SEQ ID NO: 946084 - DNA, 641 bp, Homo sapiens
taccagatgtacaaagaagagctggtaacattcctaaagacactattccaaaaaattgagaagggacttctccccaactcattttatgaggccagcatcaacttgataccaaaacctggcagagacacrataaaaaaagaaaactttgccgggtgcagtggctcatgcctgtaatcccagcactttgggaggctgaggtgggcagatcacgaggtcaggagattgagaccatcctggctaacacagtgaaatgctgtctctactaaaaatacaaaaagttagccagatgtgatggcaggcacctgtagtcccagctactggggaggctgaggcaagagaatggtgtgaacctgggaggcagagcttgcagtgagccaagatcacgccactgcactccagcctgggtgacagagcaagactccatctcaaaaaaaagcaaacttcaaataaatatccttgatgaacactgatgtaaaaatcctcaacataatacttgcaaaccaaatacagcagcacattaaaaagctaatctaccatgatgaagcaggctttatccccaggatgcaaggttggttcaaacatgaaaatcaataaatgtgattcattacataaacagaactaaagacaaaacccaaatgatt

SEQ ID NO: 946085 - DNA, 567 bp, Homo sapiens
ctctttgctgtataattttggtttcggttttccttacatttcctattcaaggaacattttcctgtaaaacgacatgttgagagaagcagccataatttagtagagaatagcgcgagagctattctatttttttttaaaatttgattattattatactttaagttttagggtacatgtgcacattgtgcaggttagttacatatgtatacatgcgccatgttggtgtgctgcacccattaactcgtcatttagcattaggtatatctcctaaagctatccctcccccctgcccccaccccgcaacagtccctggagtgtgatgttcccctacctgtgtccatgtgttctcattgttcaattcccacctatgagtgagaacatgcggtgtttgtttttttgtccttggtgatagtttgctgggaatgatggtttccagtttcatccatgtccctgcaaaggacatgaactcatcattttttatggctgcatagtattccatggtgaacatgtgccacattttcttaattcagtctatcrttgttggacatttaggttggttccaagtct

SEQ ID NO: 946086 - DNA, 658 bp, Homo sapiens
gatagtggggaacatggtaagaccaatgaattccatgagcgtgagccagttgccacacttattttgctgtgaattccttgatcagaagtaatgctgtgtagaataycatggcagtggataaagcattctgtaagtccaaggatggtagttttggcagaagcattgtattcacagaaggcgaatttatatccaaagtaaatgtctgtttgggtaataacaaaatgctatcccttccatgatgtaagaggtccagtataatcaacttgccaccagggagctggctggtcatcctagggaatgatgccatattggggactcagtgttggtctctgctgctggcagattgggcactcagtgatggctatagtcaggccaggcctggtgagtggaagtccatgttactgagcccaggcctagcctgcatccctgccactacggcccattttgttcatgagcttattggatgataataggagtggctagggaaagagactgagtggcatctaatgaatggatgatggcatctaatgaataatcaagtggattctatccacttgattattaaaatcctcccctgatgaggtcactgtttggtaagcattcacaagggataccaatatcttcacattttttttgcccattcagagaggtctatccc

SEQ ID NO: 946087 - DNA, 386 bp, Homo sapiens
gatgatggcatctaatgaataatcaagtggattctatccacttgattattaaaatcctcccctgatgaggtcactgtttggtaagcattcacaagggataccaatatcttcacattttttttgcccattcagagaggtctatccccatatctcttctccaaattttttgttcaccaattttccaatcatgttccttccaagctcctaaccatccagccaagccactgggtacagctcatcaatcagtatataatcacacgtctggacatctgracatttctctccaagcaaagcgaataaccagatgcactgctcaaagttctgcccagtgggaagattttccttcactactgtctttcaaggatgccctagacaggggctgtagc

SEQ ID NO: 946088 - DNA, 547 bp, Homo sapiens
gggcactcagtgatggctatagtcaggccaggcctggtgagtggaagtccatgttactgagcccaggcctagcctgcatccctgccactacggcccattttgttcatgagcttattggatgataataggagtggctagggaaagagactgagtggcatctaatgaatggatgatggcatctaatgaataatcaagtggattctatccacttgattattaaaatcctcccctgatgaggtcactgtttggtaagcattcacaagggataccaatatcttcacattttttttgcccattcagagaggtctatccccatatctcttctccaaattttttgttcaccaattttccaatcatgttccttccaagctcctaaccatccagccaagccactgggtacagctcatcaatcagtatataatcacacgtctggacatctggacatttctctccaagcaaagcgaataaccagatgcactgctcaaagttctgcccagtgggaagattytccttcactactgtctttcaaggatgccctagacagggg

SEQ ID NO: 946089 - DNA, 543 bp, Homo sapiens
ccccaagataaaactatcattatgatccgaggaaccaggaaaaggggctcctgggagtcagaccatgtgggggacatctcagagagaagtgcattggagaagggcaccccctaattatgtgtatgaatctagccaactctcgagctcatccagagctgtgagtgcacagaacagacccagagaagcataagaaaagcctggagaactgagatagaaaacaccgcccacagaaagcaaaaaggaacttgccgtctgaaccaaaacaggctgcaaaacaaaccacaaaaaatcagcatgatcacacaaagcccagagctgctcaacatattaatatgtccaagatagaatgcagaattatttgatatacaaataaccagaaaactattcccatttcccaagggaaaagacaatcaacaaatggcaaccatgagatgacccagatattgaaattagcacacaaagtttaaagagctattataactatacttgaaataartgaaaaaatggaaatgagttttcagtaggaaaatcaaaactataaaa

SEQ ID NO: 946090 - DNA, 665 bp, Homo sapiens
gtgaaaccccatctctacttaaaaaaaaaaattagccggatgcggtggcacatgcctatagtcccagctactcaggaggctgaggctggggaatcacttgaatctgggaggcggaggttgcagtgagctgagatcacgccactgcactccagcctgggtgacagggcaaaactccgtctgaaaaaaaaaaggagacagtgtgtctttgtccaccccggctgctgtcacaaagtgccacagactgggcggcccataaaccacagaaatttctccattctggaggctggaagtccaagatccaggcactggcagattccgtgtctgtgatgacctgtctccttaatgacagatgggatcttctccctgtgtcctcttctcactgttagccccctttataagggcactaatgccactgaggagggctccaccctcatgactacaccacctccccaggccccacttcctgagagtaaacactgggagttaggatttcagcagataaatctgggagcacaaatattcagtccttcacatcgggaaaggtggggcagggccacctggtttggaggtcaccttcccagcttataacaggggctttggggactggctggcagkcagcccacccaggggtgcctgtttggaatctcaggtgatgagtatatttc

SEQ ID NO: 946091 - DNA, 559 bp, Homo sapiens
cccaagataaaactatcattatgatccgaggaaccaggaaaaggggctcctgggagtcagaccatgtgggggacatctcagagagaagtgcattggagaagggcaccccctaattatgtgtatgaatctagccaactctcgagctcatccagagctgtgagtgcacagaacagacccagagaagcataagaaaagcctggagaactgagatagaaaacaccgcccacagaaagcaaaaaggaacttgccgtctgaaccaaaacaggctgcaaaacaaaccacaaaaaatcagcatgatcacacaaagcccagagctgctcaacatattaatatgtccaagatagaatgcagaattatttgatatacaaataaccagaaaactattcccatttcccaagggaaaagacaatcaacaaatggcaaccatgagatgacccagatattgaaattagcacacaaagtttaaagagctattataactatacttgaaataartgaaaaaatggaaatgagttttcagtaggaaaatcaaaactataaaaaagaacaaaatgaatat

SEQ ID NO: 946092 - DNA, 523 bp, Homo sapiens
gtcttagaaagttaaacacatagctaacatacgacccagtcattctattcttaggtatttacctaagataaatgaaagcatacaaccatataaagacttatttatgaatgttcatagcagttttatttctaatagccccaaactggaaacaacccaaaagcccatcagcagatgaatgcacaaactgtatttaaaacagttatcaaacaaattggaatattactcatcaataaaaaggaatgaatgattgatgcacacgttaatatggagaaaatagttttgctgaatgaaagaagccagacaagaaagagtacatagtgtgggattccagttatataaaattctagaaaatgtaaactaatctatagtgacagcagatcagtggttacatggggatggggtagggaacggatgggaagrcatgagagggagggattactaaggggaataaggaaacttttagggtatatggatatgttcattatcttgaaggtagtgattgtttcatgggtttatacttatg

SEQ ID NO: 946093 - DNA, 569 bp, Homo sapiens
atctgcactcacatgcatattgcagcactgtatcacaatacctaaaatatggaataaaactaawtgcccattaagagatgaatgaataaagaaaatgtggtatatatgcacaaaggaatattattaaacctaaaaaagaatgaaatttggtcatttgcagcaacatggatggaaatggaagtaattatcagacattacatttatactaatctgattaacaaacatctattgagcacttgctctgaatcaagtcctatactaatcttttggagtaggtaaatgaataagacatatttctactttcatggagcaatctgagtttggataaattaacatgtaaataaaccataacaaagtgatcaaagtaaaacaagaaacaagaacatatgtcttaggaaggatggagtaattatttgaacctggaatggaagagtactttcaggaaggtatagtggaagaggtttcatattatctgagatttggaggaataatagcagttttcatggcagacagagaggaaaaggacatttctgggtaaggaatcatatttgcaaatgtacattatataa

SEQ ID NO: 946094 - DNA, 612 bp, Homo sapiens
tgtgaaagcagccaggagggaaactgttccttgcaaagccatggggtagagctgcccaagacccatgagaatggactratagaactacagaattctcaaaactgaatttaaaaaaaccagcaccaaaccaactgattagaaaatgagtaaaaaacatgatgacatatttcactgaaaaacatatacagatggcaattaagcacatgaaaagatgttcaagatcattagcaatcagggaaatgcaaattaaaaaccacaatgagatatcactagacgtctaccagaatggttaaaataaaaagtaatgacaacaccaaaaactagcaaggatgcagagaaactggatcattcatacattgctggtgggaataaaagtggtacagcctctctaaaaaacagtttggcaatttctgaaaatattaaatatgcaacacttacatgacccagcaattacactcttggacatttattgcagaaaaataaaaacttacattcacacgaaatattgtacatgaatgtttatagctcttggtttgtaatgcacaaaactagaaacaatctaggtgtccttcagtgataattagttaaacaacctatggtacatccataccc

SEQ ID NO: 946095 - DNA, 611 bp, Homo sapiens
tgctttatctacatcagtagcctcctaaccactctcattgccttctttcttgcccttacatccatttttcacacagcagccagagaaatcctcctaaaacattaatcagatygcactcttcccctcttcccaagccttgttgtacttaagatgaaaatccaagtacatcttggcccgctttctggctccatctcccaccacgttccccttgtttatggtgccccagcaacatcagcctcacaccggctgggtatgttcctgtctcagggtgtttgcatttaatgtttttttttgtttgtttgtttttcctgaagcagtatttccccagatctttgcaagggttatttcttcacttcattcatgtctgtgcttaaatgtcactttcttaaagaatccttcctggcaactctgtctaatagtactccctgtcagctattctaaaaccaactctatgtattgacatcaatcactctctaacattctatgacacattcattagtttgtatatttattgtccatctctactagaatgtaagctcctaaaggaacgagacttttttttttttttttccagtgctctattcctagcacctcctacctggcccatagta

SEQ ID NO: 946096 - DNA, 544 bp, Homo sapiens
cattatcctaagtgaactaaggcaggaacagaaaactgaatgccccatgctctctcttatcagtgggagctaaacgcttagtgcaaatggacacaaagaaaggaaaaacagacactggggcctacttgagggtggagggcgagaggaggatgaggatgaaaaactatctattggtactatgcttattacttgggtgatgaaataatctgtacaccagactcctgtgacatgtaagttacctatataacaaatctgcacatgtacccctgaaattaaaataaaagttaaaaaaaaccaataacaacaacaaaaaaaccaaatgaaaaaacaactagggaaaaaatgtgttacatagacatcatggaatactacacagacatgaaagaaaaaatgaaatcaagtcctttgcagcaacatggatggagctggaggctatactcctaagmaaattaatgcaggaagagaaagtcaaataccacaagttctcacttctaagtgggagctaaacattgagcacacatggatataaacatgggaacaatag

SEQ ID NO: 946097 - DNA, 580 bp, Homo sapiens
aataaatgaacacatagagaatgtcttcattctcactcccartcccaagaaaccatgttctttggatccaacaaatttttccctactcctggcacacaataggggccttgagaatgaattcttttctcaaatgcccaactgtttctccaggctacacatctaaattctatccatgcaaaacttggaagattgtgaagaatgacatttctgccataaggtattctatgtaaaatgtaggtggtgatttgctaataagaagtactaatgctttaaacttaggttgtccctagttaagtttcttctgggaaaatgataactttagaagaggagaaaagtttgtgtcatctgatcggaaaaaatgtgcatggaagttcctgctgctggttgcagagtaaatgatgtgctcggcatcttacctttagtttccatgtgggacaaagagcacagcctggcaaaaggcccatggtgcttgagttggcacgtggggaaccatcagcttggtgggtgcttacagtcagagcagcagcttggtatctgaccaggtcaagggacaggcaaatctttcacctcactcctagac

SEQ ID NO: 946098 - DNA, 566 bp, Homo sapiens
caatacccactgataaaactatagtagacattgtagaagttaaagatttaaagcaaactttagcgattgaaacaggataccatgatgcaaatgcctggctggaacggattgaatattctgttcacaggttaaaygaaagtgacagttatgcttgtgtggcagggaggccagaggcccagatagtccccttcccacttgggcggtcttctgactgactaggcatgagctgcatggtgagtctctttcaaaaccccacagcctggggccacgaggcatgtaagaatctctcactgctattccctgaagttaaaggctctgtgggtcagccccaagggccctctggtctccagcttttgatgttaattgtacctcatgtctctcacgacagggggaaagattaacgtccctcagagacccaaaagaatgcagtgaaaccaagcctttccgagagcttactagtcaagttgcccttgtttattccctaggggatgcgtggtggtattgtggtggaccactgttgggtactctgtcaaagtaaatggagaagcacttgcgctctagtccaa

SEQ ID NO: 946099 - DNA, 557 bp, Homo sapiens
ccaccagggcaggagctatgatatggcccctaggaggtacacagccccctcaccagaacccaaagctgcactgcaaacaggcgtggtcaggctggggccatggaagagcccaggagactgagggatactaagrtcagactggctccatctcatggacaagacgctctgctgagctcaggtccaacatttcccctggtgttaaagtctcctatgggagcaagtcaagcctaaggggatgagcattcctggcagtgctccactgcagacactctcacaccaaaccctctgggccactgaggctggagttctgcccctaccatttctctaagcagctcttcctgccaactcaagtgtctgtgttggtcaaggggtctcctcctgccagggttccagaggactttggtgacagcaggttgttccttgcctgttcaactcaccccttccccaggagccactggaggccaggaatgagttccagtgcacaatagccctgtgtggggttcccagcttcctctgccttcagcccagcttctgtgtcttccctctgtcaactctca

SEQ ID NO: 946100 - DNA, 607 bp, Homo sapiens
actgaaggagctatacaaatggccaataaatacataaaaagatactcattattagaatgcaaattayagccacagtgagatatcactgcatacctactagaatggctaacatttaaaaagactaagaaataccaagtatcagggatgatgtgagtaactctcatatattgctgatagaaaggcaaaatgatgcagtcacttttggaaaacagctggccagtttcttattaatgtaacatacaatttccatatgattcatgtagagaaatggaaacataaatccacaaaagacccacacacaaatgttcatagaagctcattcacaataggcaaaaattaaaagcaacccaaatatccatcaattggtgaatgaataaaaaaaattgtggtaaacccatgcattcaaattctactcagcaataaaaagaatgaactgctgatccatgcaatggtatgaaggaatgtcaaatgcattgtggtacatgaaagaaatcagacagaaaagactatatgttgtatgatttcatttatatgacattgtagaaagagcaaaactaaagggacagagacacatcagcatttgaaataaaagcaattgattgaaaag

SEQ ID NO: 946101 - DNA, 607 bp, Homo sapiens
aaaacatcctagactgggtagcttctgaacaacaaaaatttatttttcacagttctagaggctgagaagcccaagaccaagttactggcagatttgttgttaggtaaaacccatttcctggtycacagatgatactttttcactgtgtcctcatgtggtgaaagtggcaaacaagctctctcaggcttctttataagggcaataatcccattcctgagggcagatccccctgatcacatccaaaaggcccacctcttaatactctcacattaatactatcactatatttttgttgtttaaccctatcacctaagacgttaggaattcaacatgaatttgggggacacaaaaacactcagaccatatcagagattaataggtagcatattttctatgaactctgaagaaggaagcatagaggaagcatcttaatcttcagaattggaggaaagtctaatgggtatttagtaacaggatcagttgggtaaaagtctagttactgaatccaggtactaggtcaagggaggactagaggaaagttttacattaagaccgattcattactttagtagcctctatttgaatctgtaaggcaaagtgctggttc

SEQ ID NO: 946102 - DNA, 646 bp, Homo sapiens
atttactttaaatgtcccatatggcgcgggcatggtggcttatgcctgtaatccgaacactttgggaggtcaaggaggatggatcacctgaggtcaggagttcaagaccagcctgaccaacatggtgaaaccctgtctttactaaaaatacaaaattagtcaggcatggtggcacatgcctgtagtcccagctcctcaggaggctgaggcaggaaaatcgcttgaacctgggaggcagaggttgcagtgagccgagatcgcgccaaagcacgccagcctggggacagagcgagactctgtttcaaaaaaaaaaaaaaaaaaaaagtcccatattagcaatgttatactctacaagtggtacgtctacagacataccgagtgtcactgtagaagagcgtggagtggcttttgtgaagaagttcaggtacatcagtgcaaaagttagctgaactagttcattcatctctatggcaacagcttccttctctttatcaacattacttatttgtgacaatttaatgtttccrtttgcaagttctccagttgcagaaaatttcactccatctttcgcacaggaaattacaacaacatctccaatatgattgagatctcagcatatgcatgcaaattcaccagcaggcatctt

SEQ ID NO: 946103 - DNA, 646 bp, Homo sapiens
gcttatttctaatattctgtatctgtcaagtttcaccagaaaaacagaaaccacactagttattttaataaagagaatatagtaragggaattagctaaacaggtgctattatttttgaaaaagtaacaagggaacacactgatttaacatagagatagtaattgctagaggcagctatcactcctgggaatagggaaactaagagaagagatgggttatcataattcagatgcccagagaagaagtatcccggggcagaagtcagatgtcaaaggagagagccctgcctggttattgctagtacttctaatggggcacaatgaagtaggttttgggaagaagaaaagttagacattggttccaaaatgtcattgcagggcaaagggccatcgttggagcaacactgagaggaagagcgggcaagaagaatggaataagtcccttttctgctcctccttgcagtctactaccgactttaacaggaagtcatctggcagggagactgtagcttgcagaattctagccctagaacatacaacacagagcacggaagactggatttggtgcatttctctacctctagcttatctttctggtaatcagttttctgttagacttctcaattaatagccagcatttattgaa

SEQ ID NO: 946104 - DNA, 602 bp, Homo sapiens
tggtgtctgttgattctcttttcccttaggagtgggtactattttccygactctttatatgtcacataattttggattataagctggacattgtgagtgctttgttgggttcttgttttaaaaggcaatgaatttagccagacccaactacatcctgcctgtctgtgatgctgatggcagatctcagttcagttctttaaacattagctgcaaacttctttcagttttctccagacatgcatggttcagtggtctaccagagacttgaactgagtctgtatacaagaatttagtgttttcccccaactctgactctcctcttttgccttctcccctactgttagtagccctggcatccttctccgggtttcttcccccagaaagatgatctttctgttaatattttactttatctctactgccaccaccatgactgtgctgctctcagggcaaatctgccagcaaaaagaaaaataataaaacacggagaatatagagaactgcttgccacatgcttcaagtttcacctcatctccaaaacttgcctgtctttgttcacttctctagagatctcattagttgtttctaatctgttattcaga

SEQ ID NO: 946105 - DNA, 602 bp, Homo sapiens
tggtgtctgttgattctcttttcccttaggagtgggtactattttcccgactcttyatatgtcacataattttggattataagctggacattgtgagtgctttgttgggttcttgttttaaaaggcaatgaatttagccagacccaactacatcctgcctgtctgtgatgctgatggcagatctcagttcagttctttaaacattagctgcaaacttctttcagttttctccagacatgcatggttcagtggtctaccagagacttgaactgagtctgtatacaagaatttagtgttttcccccaactctgactctcctcttttgccttctcccctactgttagtagccctggcatccttctccgggtttcttcccccagaaagatgatctttctgttaatattttactttatctctactgccaccaccatgactgtgctgctctcagggcaaatctgccagcaaaaagaaaaataataaaacacggagaatatagagaactgcttgccacatgcttcaagtttcacctcatctccaaaacttgcctgtctttgttcacttctctagagatctcattagttgtttctaatctgttattcaga

SEQ ID NO: 946106 - DNA, 494 bp, Homo sapiens
attctttcagcattcttagattttcttatcatgtctcagggaaaatcctagcctctcagcacccagggatctcatttttaaagatataattaggaagtccagtcaaatcgttcattaaaaaattccattttctgaaagtattgctctgtagtaacaaattttataagttgctgttttgccacgtctctcttaagatttgtatgaaataagttctttttaagtccatacgggatggggagatggttttttcacactttctacatgttatagtttactgtggaggaaaggaagatttgatgagcgttgctttggaactgagaaactgagagctgccttttatggtgcattttcaagtagcaaaggcaatacttggcctggagkaccaagaagagctgggcagtggtagtgagactttgctgcacattcagagtctgcttgggtttcatacatggaactataaatgagaaactcaaatttcaaaatataatcagggg

SEQ ID NO: 946107 - DNA, 594 bp, Homo sapiens
catttaagaggtgacttgtgtgctgttataagcattcagttttaaaaggggaaaggggcwtaaaagtttggaaaatttgcagcctgacaatgcaatagaaaagaaaatcccattttctgaggagaaattcaagctggctgcagaaatttacataagtaactaggaacctaatgttaattcccaagaccatggggaaaatgtcttccgggcatgttagagacctttgaagcagcccctcccatcacaggaccagaggtttaggaggaaaaaaatggtttcatgggccagggccggggtccctctgctgtgtgcagtctatggacttggtgccctgcattccagccactccagctgtgactaaaaagagccaaggtacagcccaagctgttgcttcagaggatgtaaaccccaagccttggcagcttccatgtggtgttgagcctgcaagttcacagaagtcgaggattgaggtttgggaacctctgtctagatttcagaaaatgtatggaaatgcctgaatgtccaggcagaagtttgctgcaggggtggggtcctcatggagaacctctgctagggcagtgaagaagggaaatg

SEQ ID NO: 946108 - DNA, 457 bp, Homo sapiens
atattttagcaaagagactggcagcaatttgcccctgccctagagatttgtggaactttgaacttgagagagatgatttagggtatctggtagaagaaatttccaagcagcaaagcatttaagaggtgacttgtgtgctgttataagcattcagttttaaaaggggaaaggggcataaaagtttggaaaatttgcagcctgacaatgcaatagaaaagaaaatcccattttctgaggagaaattcaagctggctgcagaaatttacataagtaactaggaacctaatgttaattcccaagaccatggggaaaatgtcttccgggcatgttagagacctttgaagcagcccctcccatcacaggaccagaggtttaggaggaaaaaaatggtttcatgggccrgggccggggtccctctgctgtgtgcagtctatggacttggtgccctgcattccag

SEQ ID NO: 946109 - DNA, 440 bp, Homo sapiens
tcctgtcattttcagcaccatgggtggaactggaggtcattatgttcagagaaataggccaggcacaraaagacaaataccacatgttcttacttatatatgggagcaaaaaaagatgatctcatggaggtggagagtggaatgacacaagaagctgggaaagggggtggcaagagagataaagggaggctggttaaggggtacaaacatacagttagagagaagaaaatacattctagcgtccagtaacacagtagggtgactatagttaacaataatttattgtacatttcaaaataactagaagagaagatatgaaatatcctcaacataaagaaatgataaatgctcagggagatggttatcttaaataccctgatcattacacattctatgcatgtatccaaatatcacacgtcccatgtgaatatgtacaaata

SEQ ID NO: 946110 - DNA, 634 bp, Homo sapiens
cagctgctgtgggtgagttgggggkcactgtgtggagtgagcactggacgcagagcttggaggccaagtgcctgccccgcccttacctgtctgtggtcttgggcaagtcctagtcctaggtggggtattgggtacttgtactgtgaaggtacagaagagtacctttagtatgttaccatttctgtagaaagaggaaacgcgtgcatgtgtgtgtgtgtgtgtgtgtgtgtgtacatactgtgataatatacataaaacatgtctgcaagggttcataaaaaattcaggagagagaacaagatggctgggagatacttcccttctgtaccttctgagttttggactatgtgaatgtatcatcctttcaaaaagtgaacaaaagattaattttccccttcctatctgtgcccccatccccagcaagaaaaatgggcttagagaattggatagacctgggtgtttatatcccagctctgcctaagtgaacttaggcaagcacttaacctcaaatactccatgttttttcatctccacaatagagggaatcatagtaactgtctcctatggtggttgcgaggattaaatgggattgttagcacggtacctggtgaagcattccacaaaggttcaaaca

SEQ ID NO: 946111 - DNA, 634 bp, Homo sapiens
cagctgctgtgggtgagttgggggtyactgtgtggagtgagcactggacgcagagcttggaggccaagtgcctgccccgcccttacctgtctgtggtcttgggcaagtcctagtcctaggtggggtattgggtacttgtactgtgaaggtacagaagagtacctttagtatgttaccatttctgtagaaagaggaaacgcgtgcatgtgtgtgtgtgtgtgtgtgtgtgtgtacatactgtgataatatacataaaacatgtctgcaagggttcataaaaaattcaggagagagaacaagatggctgggagatacttcccttctgtaccttctgagttttggactatgtgaatgtatcatcctttcaaaaagtgaacaaaagattaattttccccttcctatctgtgcccccatccccagcaagaaaaatgggcttagagaattggatagacctgggtgtttatatcccagctctgcctaagtgaacttaggcaagcacttaacctcaaatactccatgttttttcatctccacaatagagggaatcatagtaactgtctcctatggtggttgcgaggattaaatgggattgttagcacggtacctggtgaagcattccacaaaggttcaaaca

SEQ ID NO: 946112 - DNA, 634 bp, Homo sapiens
cagctgctgtgggtgagttgggggtcactgtgkggagtgagcactggacgcagagcttggaggccaagtgcctgccccgcccttacctgtctgtggtcttgggcaagtcctagtcctaggtggggtattgggtacttgtactgtgaaggtacagaagagtacctttagtatgttaccatttctgtagaaagaggaaacgcgtgcatgtgtgtgtgtgtgtgtgtgtgtgtgtacatactgtgataatatacataaaacatgtctgcaagggttcataaaaaattcaggagagagaacaagatggctgggagatacttcccttctgtaccttctgagttttggactatgtgaatgtatcatcctttcaaaaagtgaacaaaagattaattttccccttcctatctgtgcccccatccccagcaagaaaaatgggcttagagaattggatagacctgggtgtttatatcccagctctgcctaagtgaacttaggcaagcacttaacctcaaatactccatgttttttcatctccacaatagagggaatcatagtaactgtctcctatggtggttgcgaggattaaatgggattgttagcacggtacctggtgaagcattccacaaaggttcaaaca

SEQ ID NO: 946113 - DNA, 641 bp, Homo sapiens
tgcaaattaaattcatacttctaaataatacatggatcaagtaaatatctagaggaattaaaaaaacattttgaactaaataaaatttgaaatataacttatcaaaacctgtggaatgttatgaaagcagtgcttggagtgcttagcattcaatgcatatattagaaaagaagaaaaatctaaactctgaatgtctaccttcaaggcagctaaaggaaaaatattaaacttaaagcaaaagaaaagtaacaataaacattagaacataaatcaatggaactgaaacagggaaacaatagagaaaatcacagaaaccacaatctagttaaaatcaataaacttatagctgtgctaaccaagaaaaagagaagatccaagtaacctgttctgtgttattttctgtgatggtcagtcaggtgtggccatgagaggaaaacaacatttattatactcacaggtcctagaaataggacgcatgccatgccatacagggttacatggggaagcctcgggatagtcaggaggcagaaaacaggaggaagagaaaarcctggactagagcctctattggagtttccacaggaaaagcaaggtagagtaaacccattaggattggctactatgaataatttcagagggcc

SEQ ID NO: 946114 - DNA, 617 bp, Homo sapiens
gagttgctctgtttatatcaggcaagatgtatttcaagacaaaaagagagacaaagaaggtcattatgtaaagatacaagggtcaattcagtgacaagataaaacaattttgaatatatgtgcagccaacattggaggacttagatatataaagcaaatattattagaggtaatgagagagatagacctcaatataataatagctggggaattcaacacaccactttcagcattggacagatcatccagacagaaaatcagcaaggaaacatcagacttagtctgcactgtggaccaagtacacctaatagatatttacagaacatttcatccaagggctgcagaatacgcattcttctcctcagcacataaatcattctcaaggatagaccatatgttagcaacaaaggaagtcataaaacattcaaaaaagttgaaataatatctagcatcttctctgaccacaattaaataaaatcagaaatcaataagaggaagaattttgaaaactatacaaacatatggaaattraacaatatgctcctgaatgacaagtaggtcaataaagagattaagaaggaaattgaaaaatttcttgaaacaaataataatggaaa

SEQ ID NO: 946115 - DNA, 665 bp, Homo sapiens
  misc_feature 276: n = A,T,C or G
ccacaggagatgctggaccccaccacatacccaccatgggatgcaccccaccccctcaaccatggcattttctcaaattaaagattccaggcaggctggggcttattttccacccagtgtctagggcatattttctccttcaagtcattacaagttctacatctccagcaacccagggtcttgaaggcaaagcctgcttttcccgacagccccagagtgctcagacgcgaggtttcctctgttcagtttccatatgccccactctcgcctttggtntgggtgcagcttgtcaacattaaataaccacctcttgcggttctctcataacaattccttagatcttggaagcctggctgtggagctctgcatatgtatagatctaattttcacacaacaggctgcttagcagatggggacccagaccagcctccaacgtttagctgagagctaagacgtgggaaactaggtggcttttaaccagcccctattgctgccagcactcaaccttacagaattttcatagaggggaaagaaactcaacccccacccccaacaacaacaacaacaaaaaacgaacaacaacagacacacacacactyacacacacacacacacacaaccaacaaaaccacaattttccttgctcccccaaaccagatggcaga

SEQ ID NO: 946116 - DNA, 606 bp, Homo sapiens
tggatgagcccagtgtgaaaagaggtgctcaactattcgtctctctcactcaggaatctagtttgagaagtgagatgacattgcragtagaagctgaaaaaacttgaagaagccttgaggtataggtaggctacagtgagattatgagaggtatggaaagcttaaatatgcttgaggaatctaaaactgtaagcagaagctatgaagaaaaggaaaaaatggacagagtagaacaaaaggctaatccaggaaaacagggaaaatggtagactctctatttcagaaacagggaaaagggtggactgcctatttcagagagaaatagacaccatgtggaagagactttaggtcccaggaaattgaaaatctaggtccctaaagtatatccattaacattcaagaccctcagagaaatgcgtctcctggcttgttgcaaagccatattttcagccccaacctgcacggtatttctatgatttcaaagacaacatgccctttaaaaataacatagagtattgctcagtcaaatgttttcacagatgtttaagtctttagagaacacaaaacaaagaaaattagtgcaacggagaaaaggataaatcaaat

SEQ ID NO: 946117 - DNA, 606 bp, Homo sapiens
tggatgagcccagtgtgaaaagaggtgctcaactattcgtctctctcactcaggaatctagtttgagaagtgagatgacattgcaagtagaagctgaaaaaacttgaagaagccttgaggtataggtaggctacagtgagattatgagaggtatggaaagcttaaatatgcttgaggaatctaaaactgtaagcagaagctatgaagaaaaggaaaaaatggacagagtagaacaaaaggctaatccaggaaaacagggaaaatggtagactctctatttcagaaacagggaaaagggtggactgcctatttcagagagaaatagacaccatgtggaagagactttaggtcccaggaaattgaaaatctaggtccctaaagtatatccattaacattcaagaccctcagagaaatgcgtctcctggcttgttgcaaagccatattttcagccccaacctgcacggtatttctatgatttcaaagacaacatgccctttaaaaataacatrgagtattgctcagtcaaatgttttcacagatgtttaagtctttagagaacacaaaacaaagaaaattagtgcaacggagaaaaggataaatcaaat

SEQ ID NO: 946118 - DNA, 650 bp, Homo sapiens
aaccctgtctctactgaaactgcaaaaattagctggccatggtggttcacgtctgtaatcccagctactcaggagggtgaggcacgagaatcacttgaatccaggagacagaggttgcagtgagctgccacggcactccagcctgagcgacagagcaagactctgtttcaaaaaaaagaaaagaaaaaaaaagaaaagaatggatggattgaatgacaggttgatcctgtaaaagctatcgatgggactaaaacacaatatatgcatagaagtgaagtgctgctttaatctttgaaatggcttgcacttttatcaacattgtcatttgaccttcttcagttagcaatataaacagaatgtttactaaaatcattttggctaaaaaatatctaagataaatatttcacactaagaaggctttcttcagttgccttatgtcttataacatagagataatattcatttgtcatttaaaacaaaaaatcagactggacggggtggttcaggcctgtaatcccagcactttgggaggctgaagtgagcagatcayctgaggccaggagttcgagaccagccaggccaagatggtgaaacccccatctctaataaaatttcaaaaaattagctgagcatggtggcatgtgcctgta

SEQ ID NO: 946119 - DNA, 591 bp, Homo sapiens
ttgtgagtttcctgaggccttaccaactttgtggaactgtgagtcaattaaacctccttcctttataaattacccagccttgggcagttcttcatagcagcatgaaaatggactaatatagtaagttgatactgcagagagtggggtgctgctataaggatacctgaaaatgtggaagcaactttggaactgggtaacaggcagaggttggaacagtttggagggctcagaagaagacaagaaaatgtggaaaagttggaagcttccttgagacttggagagttcagaagacaggaagatgtcagaaagctagaaactttctagagactcgttgaaaggctttgaccaaaatgctgatagtaatatggacaatgaagtccaggctgaagtggtctcaggtggagatgagaaacttgttgggaactggagtaaaggccacgcttgctatgctttaacaaagagactggtggctttttgcccctgtcctagagatctgtggaactttgaacttgaaagaggtgatttcgaatatctggtggaataaatttctaagcagcaaaacattcaagagktgacagagcaaacaagttt

SEQ ID NO: 946120 - DNA, 647 bp, Homo sapiens
actgtagtgcctgcagcctccagaagagggagcctgggggcagagtcagggtgggagccgcctcaggaaggagggctttctccccctcttaggggcaactagttctctttaacctcgggcttgggtcttttggtaacctcattccatggattagaaggtcataatgaaggcaaaacaaaggaagctcaacgaggagggcataggctacagagaggcgcctttcattcacattcttttgttcactgtccagtgaatggaaggcagggtcattttagaggcgctgtccccagaaatatttgtagcagcaggagggctgccctgtgtggggttaaggaggggaggttaagagtagcctgtgcccagagacaaccgcccatgaggctgagaggagactgttcagtcctgagcccaccaggctgcggagcagggccagacccgcgtcgaaagaagacacaggaacaatattctgaggacccagatggccctggcccctccccctccttggggtcaccacaggccactaggccactgccccattaccctctgggggcttctcctgcaagagaacaggaggccttttcattagaggcttaagtttccytctctgcttgctcaggcacagaagcctccggcaacttgacactccg

SEQ ID NO: 946121 - DNA, 490 bp, Homo sapiens
gacacagggcaccaggtccctaggatgcacacagccaagggacccagggcccagcccrcaaaaccactttttcctcttgggcctccaggcctgtaatgggaggggctgccatgaaggtctctgacatgccctggagacattttccccatagttctgggaattagcattaggctccttactacttatggaaatttctgcagccagcttgaatttttccccagaaaatgggtttttcttttctattgcatagtcaggctgcaaattttctgaacttttatgttctgtttccctttttaaactgaatgcctttaacagtatccaagtcatctcttgaatgctttgctgcttagaaatttcttccaccgggtaccctaaatcttctctctcaagttcaaagttccacaaatctctagggcaggggcaaaatgccaccagtctctttgccaaaacataacaagagtcacctttgctccagttcccaagaagttcc

SEQ ID NO: 946122 - DNA, 425 bp, Homo sapiens
tcttaaattttaacacgatgtatcggggtatgtatatgtttgtgttttcatcccaattgatactctctggactcttttcatctgaagatttgtgtatttctccaggtctgcgaggttttcttcaattgtttggttattgtattagtccattctcacactgctataaagaactgcccgagactgggcaacttataaagaaaagagttttaattgactcatagttctgcatggctgaggaggtctcaggaaacttataagcatggcagaaggagaagcaggcatgtcatacgtggyggcaggcaagagagaagagtgaacaaaggaggaacttgccaaacacttataaaaccatcagatctcgtgagaactcactgtcatgagaccagcatgggggaaactgcccccgatccaatcacctcccacca

SEQ ID NO: 946123 - DNA, 610 bp, Homo sapiens
tcccagcacttcatgagggtgatgcaggcagatcacctgagatttttgaggacttattactacaaaaactggttggctttatattaaaatgatcawattttacatatattggggtaaataaaatagattaaataaaatatatttttaaaaataatttcactggtttctttttaatctttaaattttaatttgtatgtgtgtacctcacattgtatttcttttggacaaagctaattcagaatataaaagaactcttgaaaatcaacaataaaaagatgggaatctcaacagaaaaatgggcaacagatacaagcaggtaatttatagaaggaaaaatgaaaaaataatccaaaacaagcatatgactatctgctcaaaataattaagaataagaaaaatgcaaattaagaaaacaaaaaaatacagactggaaaatgtaagaaaattgaataatgccaagagtcactggggatttaaagaagcaggaaccttcttgcactgctggtgggagtgtggatgggtgtagccattggactgcacaatctgccagtacatagtcatattcaatataaacacatgttatggcccccaaattctacttctatatcta

SEQ ID NO: 946124 - DNA, 655 bp, Homo sapiens
ctggaaacaggagtctgggctttctgtcctgcctcctgtccctcttccagcctgctatgtctcaggcagtcgccctgggagaggtggccagacatcaagaacttggtaatagaaatgccctgyctccttgggtctccttccgctccccgctgcgttccctctctgcagtcacacattctgctctccagggacatttgcacctctcctggggccaggccacaccgcttgttctcatggttttaaccaaaatatcattaccatggtcttttacatggaagtacttgtctttggggaagtctgcatcctgcttatagcccaaggtggcatgtgtcagcttcaggcatgcttcctctgcttggaccagtgtctggtttttgacaggtacactccatagtttcctgtccagggtttgtcagttgccttgcatccttatttgtgatgtgctttttctcttctcctttctgaaatttttcagaagcacttgggaaaggtcaagggcaacacttacagtcataaatagaaagtttctccatagactcttttttctcttttgttcaatgggaactatatcatatacacaaagtactgcatataaaatacatgtaaggtttaaagaatgaaactaataaaacaatgtaatacaataacctgtatc

SEQ ID NO: 946125 - DNA, 755 bp, Homo sapiens
aaatatatttttatatttaatataaaatattttatatttatatgatatttatctatttaatatgaaatatagctatagactttataatataaaatataaagtatatatataaatatatatatacttaaagcacctgatatgcttctatgccctaaaaatgccatacttttacaaataccagtcatgcacctcataacaatatttcagtcaacagtgcaggtctcataagatcataatgaagataaaacattcctatcacctagtgacaatgaaggattcatagtgttgtagtgcaacatgcatcactcatgtgtgcatgatgatgtagtgtgaacaaagctatatacagttttgtgcagaacagaatacgatagcaatagtaaatggttatgttgttggtttatcagttgactacactgtacttttaatcattattttagagtgtaatcctcatacttattttaaaaaagagttcactgtaaaacagtctcaggtccttcaggaggaattccagaagaaggcattgttattacaggagatgatggctccgtgtgtgttgttgcccctgaagaccttccagtgggtcaagatatggaggtggaagatggtgatgttgatgakcctgaccctgtgtaggcttaggcaaatgtatgtgtctgatttttactttctaatgaaaaattttaaaagtaaaaaattaagaaaacatttttaaaatagaaaaaagcttataaaataaggatataaagaaagaa

SEQ ID NO: 946126 - DNA, 570 bp, Homo sapiens
agcaggggttatgtgactgggggctgcatgcaccagtaatcagaatggaacaggacagggatwttcacagtgcttttccatacaatgtctgggatccatagataacataaccagttagctcaggggtcgatctttaaccaggcccagggtgtggtgctgggctgtctgcctgtggatttcatttccgccttttagtttttacttcttctttctttggaggcagaaatgggcataagacaatatgaggggtggtctcctcctttagtcccccgctttgagaatctcactcattagtgggagttctcactttcattttcactacccatgtcttcttgcaagacagatcaatagtgattcatatagtacatttgtgctgaagcattttggtgaactaaggtagcgatgaagctttttatcatttgaagaagtacaggtagcaaacaagagagcagtaagcaggtttctattactattattactcctattataagagttttaaatcctcctagcactgggaaccattttccaaacatggccccaggatcatatccatgccacacttgcacgggc

SEQ ID NO: 946127 - DNA, 661 bp, Homo sapiens
tttactgtcctacctcaggggtatatcaactctyctctggctttgtgtcatgaccttgttcagggagatcttgatcacttttcccttccacaaaatatcacactggtccattatattgatgccattatactgatgggatccagtgagcaagaagtagcaagcacactggacttattggtaagacatttgcatgccagaggatgggaaataaatatgactaaaattcagggaccttctacctcagtaaaatttctaggggttcagtggtgtggggcctgtcaagatgttccttctaaggtgaaggataagttgctgtatttgcccccaccccctacaaccaagaaagactcacaatgcctagtgggcttatttgggttttggaggccacacattcgttacctgggggtgttacttggcccattaatcaagagacctgaaaggcttccagttttgagtggggtccaggacaggagaaggctctgcaacaggtccaaactgctatgcaagttgctctgtcacttgggccatagaacagagcagatctaattgtgcttgaggtgtcagcagcagagagggatgctgttaggagcctttggaagtcccccatagatgaatcacagcagaggcctctaggattttggaggaaggccctgccatcttc

SEQ ID NO: 946128 - DNA, 606 bp, Homo sapiens
tggggtccaggacaggagaaggctctgcaacaggtccaaactgctatgcaagttgctctgtcacttgggccatagaacagagcagatctaattgtgcttgaggtgtcagcagcagagagggatgctgttaggagcctttggaagtcccccatagatgaatcacagcagaggcctctaggattttggaggaaggccctgccatcttctgcagataactactttcctttttagaaagagctcttgccctgttactggactttggtagaaactaaacggttggctatgggtcatcaagtcaccatgcgacctgaactacctatcatgaattgagtgctttctgacttgtctagccaaaagtggggcatgcacagcagcattccatcatcaaatggaagtggcatatatgtgatcaggcttgagcaactcctgagggcacaagtaagttatatgaggaagtggcacaaatgctcatgatccccattccygccacactgccttctctcccccagcctgcactgatggtctcatggggagttccccaggatcaattaacagaggaagagaagacaagggccctgtttacagatggctctgcacgatatgcag

SEQ ID NO: 946129 - DNA, 615 bp, Homo sapiens
tggggtccaggacaggagaaggctctgcaacaggtccaaactgctatgcaagttgctctgtcacttgggccatagaacagagcagatctaattgtgcttgaggtgtcagcagcagagagggatgctgttaggagcctttggaagtcccccatagatgaatcacagcagaggcctctaggattttggaggaaggccctgccatcttctgcagataactactttcctttttagaaagagctcttgccctgttactggactttggtagaaactaaacggttggctatgggtcatcaagtcaccatgcgacctgaactacctatcatgaattgagtgctttctgacttgtctagccaaaagtggggcatgcacagcagcattccatcatcaaatggaagtggcatatatgtgatcaggcttgagcaactcctgagggcacaagtaagttatatgaggaagtggcacaaatgctcatgatccccattcctgccacactgccttctctcccccagcctgcactgatggtctcatrgggagttccccaggatcaattaacagaggaagagaagacaagggccctgtttacagatggctctgcacgatatgcaggcaccacct

SEQ ID NO: 946130 - DNA, 603 bp, Homo sapiens
ggcaggtttctcctgaggctgagcgggaagggcgtgctccaggccttgacccgcgtggctgctggccgtccttggtgtcccttgtcttgtasaagcatcacccgatctctgccctcatcttcttatgatgttctccctgtgtatgtgtgtgtgtccagattgtcccttctcataaggacacagttgtgtgtaatcaggggtccatcctatgcccatgtgaccttatctaaagataagtaattcaatctgcaatgaccctatctccatagaaggtcacattctgaggtcttgggggttaggatgtcaacatataaattttggtgggaaggtcagggggacagtagagaaaaggaggcagcagggcacaggccagagccttgggttgaggggtcccggggcttttctgggggactgggattcttttgcatcatttctctctgaataactcttgcagggattggcacactggagacttactctaactgtttgctgaatgaaaggacaaataatcaaataatttttaccaacaaagaaatctctggaaaggcagagttggaactcattatccctgctagttaaggctagctgtggctatcagggccg

SEQ ID NO: 946131 - DNA, 790 bp, Homo sapiens
atagaggaggagagtttggagaytgaagtggaaagaagatataaaatagacattgaagagagagagagagagaatagattgttctaactcttagggagtaatttccttgtattacatcatgcatctcccagatagagagatctcttattttcatgatgaatcaagttctctccaacattgatacctctattcattattaatgcaacaatgagtgccataaagatacctgtgaatttaaattgcataatatataaaatgttttgtagatattgactgcttttataaaataaataattctaggtacatcacaagaaaatgtctgatattaatttgcttcaaaagttctctgccaatttctctcatatgcctatctgaatatggtctgtagactcaagaagacagcctgtgatgggaataattaacatgctgggcacaagcaagtcatttgatcgagtagagttagcctctaatgccctccactgctgaccctcagctcctcttttaggaagagtaaccgcatccccactgcgggttccaccccttcatgtttacatattattatagatatttgtttccaatttcttcatccatatgtaggtgcaaataactaataaaacctcatgctaccattttcaaggttatttgctttgtaattaaaagatgacgaagttttggacatcaggaaccaagtaggaattatttgagacatcctgaagctcctatttaatattaccctttgccaaaaaaaaaaaaaaaaaaaaaaaaaaaagttcatttggcttgtcatgac

SEQ ID NO: 946132 - DNA, 632 bp, Homo sapiens; identical to SEQ ID NO: 945554

SEQ ID NO: 946133 - DNA, 632 bp, Homo sapiens; identical to SEQ ID NO: 919388

SEQ ID NO: 946134 - DNA, 743 bp, Homo sapiens
ttgaagaaagtcttggctattcttgatcctttccatttccatacaaattttrgaatcaacttatcgatttctgcacacacacacacacacacacacattcctgccaggattttgattggaattgcattgaatctatagattgatttggggaggatttacaaggtggagctttccaatccatgaacactaatttagattatctttaaatttttttattttttgaggcaagatcttactctgtcacccaggctggactgtagtggcacagtcatggctcactgcagtgtcgacctcctgcgctgaagtgattctcccacctcagcctcttacaggcacacgccaccacaccagactaatttttctattttttgtggagatggggtttcactatgttgcacaggctggtcacaaactcctgggctcaagtgatctgcccgcctccacctcccaaagggttaggattataggcatgagccaccatgcctggcctagatatttttaagtatttatcaaagatgttttgaagttttctgtgtagtgagggagctttcactgtttgggttagatttatttttaggtatttgatatttttatgatgtataaatgatgttgtccttttaattcctttccctaattgtacattggtagaaaaacatttgattcgttcctttttttttttttttttcacttttagagacagggtctcactatgttgcccaggctggactcaaactcttaggctc

SEQ ID NO: 946135 - DNA, 564 bp, Homo sapiens
gatgtggagcgccagcattttgaagagagtaagccttaagatttttgacttaaatgcttatctcattaacaaggcaaatgaagtttagtttcaaagtcatctggaaccatttgaatgatttaactccacatgtttatctgctgtgtgtgctatatttttggttattacatgatatgatggagtcacctgaaatccttttgggaataaatcagagtatacatctgcacacacacaagttacatggcacggtggcatctcaatccagaaaggaaagaaacttgatgaagtgcaactaaagaaatattttttccaattagatctcttaaattttgataagagaaatttttgagccaggcacaatggctcatgcctataatctcagtgctctgggaggcctaggttagaggatcccttgatgtcaggagattcaggctacagtgagccatgatckcaccactatactccagcctgggtgacacagcaagaccctgtctccaaagaagaagaaaaagaagaaattgttttgattgttttttttgttgttgttgttattggtacatagag

SEQ ID NO: 946136 - DNA, 769 bp, Homo sapiens
attgctgggttgaatggcagttctattttaagtcctttgagaaatctccagactgcattccacagcagctaaactagtttgcattcccaccggcagtgtatacattttccttttcctacaccacctcaccagcatctgttattttttgactttttaataacagccattctgactggtgagacatggtatctcattgtggttttgatttgcatttccctaatgattagtgatagtgaacatgttttcatatgctgttggccatatttatgtcatcttttgagaagtggctgttcatgtcctttacccatttcttaatggagttgttcattttttgttaatctgtttcagttccttaagattctagatattagacttttgtcagatgcatagttttcaaatattttctcacattctgtatgctgttttgctcctttgatagtttgtttggctgtgcatagctctttagtttaattaggtcccacttgtcaattttggttttgtttgcaattgcttttggcatcttcattatgaaatctttgccagttcctatgtccggaatggtatttcctggtttcattctagggtctttgtagttttaggttttacatttaactcttttatccaccttgagttgatttttgtatatggcaaaaggtaggggtccagtttccatcttctacaaatggctarccagctatcccagcaccagttattgaatggggattcctttccctgttgcttgcttttgtaagcattgttgaagatcaga

SEQ ID NO: 946137 - DNA, 724 bp, Homo sapiens
gcccagattggagtgcagtggtgcgatcttggctcactgcaacctccacctcccagcttcaagtgattctcctgcctcagcctcccgagtagctgggattacaggcatgcaccaccacgcccgggtaattttttgtatttttagtagagacggggtttctccatgttgaccaggctggtctccagctcctggccttaggtgatccgcctgcctcagcttcccaaagtgctgggattacagacatgagccacctcacccagcccagataatccttttacacactgtttaaaattttcaattttcctggagatagggtctcctgtcgcccagcgggtaaatgcagtggtgcgattatagctcactgcagcctcagacacctgggctgaagcctgattcttgagcctcccaagtagctgggactataggtgtgagccatcatgctttgcccttttttttttttttttttttttttgaggcagagtctcactctgtcacctaggctggaatgtagtagtggcacgatcatagctcattataacctcaaactcctggtttcaagcaatcttcccgagtagtcaggactacaggcatgccctgccatgcccaactaattaaaaaaaaawttttttttatacacatagggtctcactatgttactcaagctagtctccaattcctggccttaagagattttcccaaagcattaggattataggcatgagcc

SEQ ID NO: 946138 - DNA, 548 bp, Homo sapiens
aaaaacaaacaactccattaaaaaatgagcaaaaacataaacagacacttctcaaaagaagacatataaatggctaacaaacatatgaaaaaatgctcaacattactaatcatcagaaagatgcaaatcataaccacaatgaaatatcatctcacaccactcagaatggctattattaaaaagtcaaaaacaatgaatactggcgagggtgtggagaaaagggtatgcttaaacactgttggtgggaatataaattagttcagccactgtggaaagcagtttgaagatttctcaaagaacacaaatcagagctaccattcacttcagcaatcccattagtgggtattcatccaaaagaagatgaatttttctattaagaaggcacatgcatttgcatgttcatcacaggactattcaygatagcaaagacatggaatcaacccaggtgcccatcaatggtggattggataaagaaaatgtggtacatacataccatggtatactatgcagccatataaaggaacaaaatcatgtcttttgcagcagca

SEQ ID NO: 946139 - DNA, 598 bp, Homo sapiens
gaaacaaattccagagacgctgcttttaagaactgtaacactcactgcaagggtctgtgggttcattcttgaagtcagtgagactaagaacccaccatttccagacacgcacaatctcagctcactgcaacctccgcctcctgggttcaagcaatttttttgcctcagcctcccgagtacctgggactataggggcgcatcaccacaccctgctattttttgtatttttagtagagacggagtttcaccatattggccaggttggtctcaaaactcctgacctcgtgatctgcctgcctcggcctcccaaagtgctaggattacaggcgtgagccactgcgcctggcctgttcactgtttttgtgtaacaacttaccacaaaattaccagcttaaaaaccacattttttttcttttttttggagatggagttgtgctctgttgcccaggctggagtgcagtgtcacgatctcggctcactgcgggctccgcctcgtggggaaagccacrtgtatttattatctcagtgttcttgtgagtcaagagtctgggcatagcttaactaggccctctgtttaggatctccagaggtagcaatc

SEQ ID NO: 946140 - DNA, 773 bp, Homo sapiens
tgaaaaactgaatactgtcctacgatcaggagcaaaaccaaatattcactttcatgacttccattcaacactrtactgaaggctctatccattaccataaggtaagaaaagtaaaatataaatgccaaccagattggaaaagacaaagtaaaggtttatttgtgcatgatgtaattgtctatgtagaaaacacaataagatctataaaaagctattaaaactaagaagtaatttttaataaggctgtaaattatcagatcaatatgtacaaactttatttttaatatcagtaatgaaaaatcagaaatcaaaatcaacaaaatataccatttaaaatagcattaaaaataatgaaacgcttacagataaacctgacaaaagagacgtaagacctacacactgaaattatacatatagctgagagaaattaaagaattcctaactatattgagaactatatcatgttcatagatcagccagcacagtattaagatgtcaattcttcctaaaatgatctattgattcaacacaattacaatcaaaatttcaataggcacccttattttaattgacaggctgattctaaatttatacaaaaatgcatgagacttagaatatataaaacaactttgaaaaacaaaaacaaatttgaaagaattatgctatacaatttcaagacataatataaagatacagtaatcaaggcattagtgaaagtagaggcatgcaggccaatggcacagaataaagaacccagaaatagactcatacat

SEQ ID NO: 946141 - DNA, 461 bp, Homo sapiens
tagtgggcactgctataaggayacccaaaaatgtggaaacgactttggaattgtgtaatgagcagaggttggaacagttgggagggttcagaagaagacaggaagatgtggggaagtttggaacttcctagagacttgttgaatgtttttgaccaaaatgccaatagtgatatggacaatgaagtccaggctgaggtagtctcagagagagatgaggagcttcttgggaactgcagtaaaggtcactcttgttatgctttagcaaagatactggtggcattttacccctgcccttagagatctgtggaactttgaacttcagagagatgatttaggatatctggcagaagaaatttataagcagcaaagcattcaagacgtgacagagcacaaaagtttggaaaacttgcagcctgacaatgcagtagaaaagaaaagcccattttctggggaaaaattca

SEQ ID NO: 946142 - DNA, 461 bp, Homo sapiens
tagtgggcactgctataaggatacccaaaaatgtggaaacgactttggaattgtgtaatgagcagaggttggaacagttgggagggttcagaagaagacaggaagatgtggggaagtttggaacttcctagagacttgttgaatgtttttgaccaaaatgccaatagtgatatggacaatgaagtccaggctgaggtagtctcagagagagatgaggagcttcttgggaactgcagtaaaggtcactcttgttatgctttagcaaagatactggtggcattttacccctgcccttagagatctgtggaactttgaacttcagagagatgatttaggatatctggcagaagaaatttataagcagcaaagcattcaagacgtgacagagcacaaaaktttggaaaacttgcagcctgacaatgcagtagaaaagaaaagcccattttctggggaaaaattca

SEQ ID NO: 946143 - DNA, 391 bp, Homo sapiens
ctagataccacgcagaggcttgtgttgtcttttctcactttctcccatacatgcagagtttctctctctttgctttgagtcacataaagctagggtggagtgatacaagcacccctgtggycaccactactatgactgcactgggtcagcagtgacccggaagccagcacagcactgggtctcacccatggcctgctgtaaccactccctggctactgcatatgttcactcaaggccctgggactctataatcagaagtttgcaaatccaaccagattctgtcttcttcccttcaggtcagcaaggttcttcaggcccagggtgggtccagaagtaccatctgacagtcaggaactagagtcaaaaaccttagaagtccacatggtattct

SEQ ID NO: 946144 - DNA, 600 bp, Homo sapiens
ctcatatattattggtggcagtataaattgctataaacaaaagccatcacatacataacctatgactcaacaattctattcatatatatatatatctatatatgccccaaacaaatgcttatgagttcaccaataaacatgtaaaacaatattcataccagccctacttgtattagctgaaaactagaaataacccaaatgtccatcaacagttgaatagaataataaacaggtatgttcacacagtggaatatgtactacactgaaatgagaatgaataaaccacatgcaacaatatggataaatcttacaaagtgttgagtaaggcccagcgcggtggctcacacctataatcccagcacttgggaggctgaggtaggaggatcacttgagcccaggagtttgagactagcctgggcaacatggcaaaaccctgtctctacagaaaatacaaaaattagctggacatgatggcacatgcctgtagtccaagctactcaggaggccgaggtgtgaggatcacttcagcccaggagctcaaggctgcagtgagccaagattgygccactgtactccagcctgggcaacaaaatgagacct

SEQ ID NO: 946145 - DNA, 598 bp, Homo sapiens
aacttccttcttggccccctcctgccgccctaattcctcgcaggcatttgttgctaagagcacgccccgggcaaaccacctgcgtgcacgtctccatttccgggtctgtttcrggggaacctgccctaagatgcctaactagcaagcagtgaagcctgcaccagcccctgagcccttcccacctcctgctccagggctgtacccaccacatcaaccactctctgcaagaacatcttcttttcatctggatagaatagaaatgtgagcccacagaaagcagtgatggctggttgcactttacttgttggctgtgagtttcgtgagctggatggaatcagcatgtacgaataatagcaacaacaggaacagagaggcacgatgtttcaccacatgcaggctagctcggttcaggagctcccaagcttggtggtgcttgctcgtcaactgaaggggatggttgctaaaacacagagtgctgggccccggccccagagtttagaattcagtaggtctgggccaggctcggtggctcacgcctgtaatcccagcactttgggaggccaaggcaggtggatcacgaggtcaggagttcaagact

SEQ ID NO: 946146 - DNA, 365 bp, Homo sapiens
gaagctgctccaggtctttctcttagcttctggtgcaccccacaatcctgcatgttccttagcttgtagacatatcactcccatctctgcgtctgtcgtcacatggcttctccctggggtcctcatgtcatcctccctctgtcttcttagtatctctctctttagtctctctcttcttcttataagaacagcaatcatattggattagggcccaccctagtgacctagttttracttgattccattgcaaaatctctatttccaaatcaggtgccattcacagctaccagcagttaagattccaacatgtttttgagggacacagcttaacccataacacacaccacgttcatttccacttcagg

SEQ ID NO: 946147 - DNA, 775 bp, Homo sapiens
acacctcttctctggacctcagttccctcatttttcaaataatcctcactcacactgccccatagggaaccaatgtcttttgtaagagatgggggtttcactatgttgtccaggctggacttgaactcctgactcaagcgatcctcccacctcagcctcccaagtagctgggactacagatgtgcaccaccacatctggctttaaaattgattttcccctcttccccagccacctagtcttctttttcctcctcaaatatgctatgctagttttctagggctgccgtaacgaagaaccaaagctaagtggcttaaaaaacaaaaatgtcttcttctacagttccagagactagaagcctgaaatcaaggtgtcagcagagctgccctctcattcagggtcctaaaggagaagctgctccaggtctttctcttagcttctggtgcaccccacaatcctgcatgttccttagcttgtagacatatcactcccatctctgcgtctgtcgtcacatggcttctccctggggtcctcatgtcatcctccctctgtcttcttagtatctctctctttagtctctctcttcttcttataagaacagcaatcatattggattagggcccaccctagtgacctagttttaacttgattccattgcaaaatctctatttccaaatcaggtgccattcacagctaccagcagttaagattccaacatgtttttgagggacacarcttaacccataacacacaccacgttcatttccacttcagggc

SEQ ID NO: 946148 - DNA, 549 bp, Homo sapiens
ctctactcattctaagtacacagctcatttaaccccagaacagccctctgagatagcatggccatcaggatcaaacctgggaaacacacaccactctaagtgtgaaaacagagggaagggaragcaaggaagtgatcccaagccagcacttccacccctaggctggagggacggggtgggagtgatattcccagagcccagtggtggggcccatggaagctggaaccacagccgggagatggaggaaggggttccaggtggagaggcggcccaggtcaggacagagagagagaaaaaccctggcctctcccttcctccacccaacagatctcccattggctgagcacagctgatacaaggggagccaggaccatgcagcctatgggtcagcccctggtgacactgagcagagcagggagtagagctgagggcagtagccccacgactggcacaaggggcactattatcaatcccatcacccaaaaggggacattgtgacacagaaaaattcagcagcctgctgaggtcacacaggctcctcttaaccca

SEQ ID NO: 946149 - DNA, 675 bp, Homo sapiens
caagcagaccaaatatgataaacggtctcttgmcgtgtattgtattctctacaataaaaccccaagcagatgctaaaaatgtgtgcggctttgtgaggagataggcgtgctctgtgtggccgagattttctgagaaaggtaatttaactgcaatgcacataaaggagagaaaggcagagaagtaatttggaaagtgtacatcaagtgctttttaaaaagttgatattgttggttatttttcttttattaaaatccacagccctgtgggctgctgtcccatccttatcgggctcattcaagaccagcattgacatttctaatttgcaaatttaaagattgtcaggaaatggtttaaacacccagtatgattggggagctttttgactgtgggtgacaagagtgggctcacctctgggaagacagtaggggcaggggaggagagctgggctagatttagggagagttaggaatagctaacatttattaagcacttagtatcagatactcttctaagtgttttacacatatattttattttgtcttacataaatctgtgatttccattgtacagatgagtgtaatgagggtctggaagctcctaagcagcaaagctagccttggaacccggcactggacttcggtatcttgagaccacccctggcttccctgcctcgg

SEQ ID NO: 946150 - DNA, 624 bp, Homo sapiens; identical to SEQ ID NO: 945966

SEQ ID NO: 946151 - DNA, 574 bp, Homo sapiens
gcatggttgtgcatgcctgttaatcccagctactctggaggctgaggcaggagaatcacttgaacccgggaggtggaggttgcagtgagccaagatcacgctgctgcactcccgcctaggcgagagagcaagactccatctcaaaaaaaaaaaagatagatagatatgtaagcagatcttttcagcacaataacagtatatgtatatagcgtggaggaaaaagagacctgtaaccccattggagttggggaatcaacaggaaagccattctgggcaaaaaagtagcctgagctgaatctaacagaggagtgagtcaaatgaagtgcaggggacccacaaggcagaggagcagcctggcagaggcccccgggtgaaatggctgggtcagagaagagctgcacacacccaggttgttggggcacagttagcagggaggaagcctccaagaagaggctgaggtgtcagccagggaacgatcacagggaccttgtstgccacattaaggatcttggactttagcctgtggacaataaggaaacaatttaagtttttaaataaggccaaggcacgtttg

SEQ ID NO: 946152 - DNA, 574 bp, Homo sapiens
gcatggttgtgcatgcctgttaatcccagctactctggaggctgaggcaggagaatcacttgaacccgggaggtggaggttgcagtgagccaagatcacgctgctgcactcccgcctaggcgagagagcaagactccatctcaaaaaaaaaaaagatagatagatatgtaagcagatcttttcagcacaataacagtatatgtatatagcgtggaggaaaaagagacctgtaaccccattggagttggggaatcaacaggaaagccattctgggcaaaaaagtagcctgagctgaatctaacagaggagtgagtcaaatgaagtgcaggggacccacaaggcagaggagcagcctggcagaggcccccgggtgaaatggctgggtcagagaagagctgcacacacccaggttgttggggcacagttagcagggaggaagcctccaagaagaggctgaggtgtcagccagggaacgatcacagggaccttgtgtgccacrttaaggatcttggactttagcctgtggacaataaggaaacaatttaagtttttaaataaggccaaggcacgtttg

SEQ ID NO: 946153 - DNA, 619 bp, Homo sapiens
ttccatcatccctaatagattctttgtgcccccctgtagaaaatctgtcactttgctccaggctccagccagtcactgttttgtttttatcagtatagattaatttacattttctagaattttatatacatagaatcaaagcaactgttatctctagtttctttcacttagcagaatgagtttgagatttgtcttagttcgctcatgctgctataacaaaataacttagattgggtaatttataaacaacagaaatttattcctcccagttccggagcctgggaagtccaagatcaaggcacctgcagatctgatgtctgataaggactggttttctgcttcaaagatggcacctcgttgctgcatcttcacatggcataaggggtgaaagctttaagtttctttggtaagagcactaatttcattcatgaaggaagagccctcatgacctaatcacctcctgaagggcccacctcttagtaccccacaatggagatgaggtgttttgttttgttttgtttttaatcttttaatttaaaagtaaactttactgtggaaaatgcaawcttggggagggcagaaagatcacacacaaggctgcctcttcacacctggaggg

SEQ ID NO: 946154 - DNA, 587 bp, Homo sapiens
aagtatttttaagtgtataattgagaaacattaactgtattcatattgttcaacagcaaatctctagaacttttatatcttgcaaaactgaaactctgtagccatttaacaactccccatttcctgctccccaccagcccgactatcacaattctactttctgtttctatgagttggactcttagatacctcgtataagtggaatcatacagtatttgtctttttgtgacccaagcatttcatttagcacaatgtcttcacagttcctccatgttttagctgatgacaggatttccttgttttttaaggttgaatatggtcccgtgtgtttatgtgtgttgtctgtcacattttctttatccattcatctgctactggacatgtgggttacttctatctctgggttatcgagaatattactatgaacatggatgggcaaatatctccttgtgaccctatttyttgtgtgcaaatacgtctctgtgatcctcttttcaattattttgtatatatcccataagtgagattactggatcacatggaagttctatttttaattttttgaggaacctcatattgttgtccat

SEQ ID NO: 946155 - DNA, 639 bp, Homo sapiens
agattacactctttcctaaygtcagtgctcacatggctctggtaactctttcctccccttcactcaatggagctttttcttaccgctgctggtttctagggcctcatcatgtcttgctggttcccttacctttgtcaactataaagtctcatttcaaaatatcagctaagtatggattatatttcctaatggatccatgacttgttagcttggtgagaatcttagcttccagcttagcacatgtaactacagatcagatatttagtctcctatttttgaaagttctctgatagtgcacatttattgtctattcatagattttaggccactttttaggacccagaatctgtcattattcctatttattagctatagatattggcccaggcatgtatttatcaaatatatatttatcaaagaaaatatatatttatcaaagtgtattgaataactcaggaaatttcaggaaggctagggaatcatgcctggaaaattgggcaggaacaaagtaggacagtcatcagataggaccacagtcaaactcagtaacattagtccaatgaagagactgctacagtttccacagaacataagcaacctgtttaaattgccgctagcaatactgaacactggacactg

SEQ ID NO: 946156 - DNA, 476 bp, Homo sapiens
agctatgggtcatattttcctgcttctttgtaagcctagtaaattttgcttggctgctgaagattgtgaattttacactgttgggtgctatatttcgttgtactcctgtaaatcatatagaaatttgagaatagttaatttacttggaagtagtttgattctttcaagcttgctttcaactttgttaagatacatacagagcagcctttattctaagtctaagttgtctccactattaaggtgatctcttcctgaggattctacccaatgactgtgtaacgaaaggttttttcactctggctgttgggaacacaaactattcctagctctatgagaaccccrggaattgtttggttcactgttttctgatagttttttccccaagctatgagtcagtagtttcttcacatacatgtgcagatcagttctcagctagaaagttcaggaaagccttcttccaatctctgatggctgct

SEQ ID NO: 946157 - DNA, 534 bp, Homo sapiens
aaaatggcaacatcatgtggttagaaaaaacactctgttcagattttgccagttgtccagtttgctcacatgctgcatttacttgtcatgtctctttagtctctttttaacgtaraacaactcctcggcctttcttgttgtggcactgacactttttgaagtgttcaggccagttggtttatagactgtcttttctgcacatattagattcaggtcatgcattttcattaacagcacgtcccaagtaaggctgtgttcttcccggggcatcccaggaggaggcactctgtccattagtcccactgctagtgataacttggattatttggttaggatggtgttcaccggatttccctattataaagttatttttcctctctttatacttaactaatctttattggggagatattttgagcctgatgaatcctgtttccccacctcctttcattcttggtgagcttctgccttatacttctctttcagtcatctgggtacctccttttattttaaagacaaatgccagcctgtcgc

SEQ ID NO: 946158 - DNA, 773 bp, Homo sapiens
gaacgtacagcccacaaagtctaaaatatttattatctagctctttatataaaaagttttctgacccatattttaatacagttgactttagcaacacatatttgaactgcacaggtctacctatatgtggatttttttcaataaatatactggaagattttttgaagatttgtgacacgttgaaaaaaatatacatataaacctgtagtctagaaatatttttaaaaagtttaaaaaaaaggtcaggtatgtcctagatgcaaaaatgtatgtacatactattcatcatttgctataataaaatgtatacaaatctattataaaaagtgaaaatttatcaaaacttatgcacaaacacagactagacatggaaccatttacaactgagaaaaatataaacaaatgtaaaggtgtagcattaaatcacaactgcataaagttaactttagtgtatactatattaccgtaataatttcatagccagctcccattgctattgcagtgagctcaatctgcttaaaacaccatttcacactaatcatctctgcatgagcagtttgtctctccagtaaattgcatattgtagtaaaagatgatctcttgcagttcttatagtgttagtgtctcatgcaataccataaacctagaataacactatgggacmaatacaaagtgccactggtgaggaaggaagtgcttccaaaaagctgagactagtcatgacattacaagaaaaagttaaattattttatatgtatcatacgttaaggtct

SEQ ID NO: 946159 - DNA, 633 bp, Homo sapiens
ctcaggcggctcatacaaaatgaatgttgactgttcatgtagcggtctggaggcwggtgggcgtgggctggttgcatggctcctgctgatcagggttccaggattcctccgcctttctctttcaccatctttagcctcagagttcctcacagtgtatgatggctgctggagctcaataatcacaccatgaccaggcaggaggaaaagagagggtgggaagggcaaaggactcatcttccagatgagctagacccccttaaagatctttcctggaagctccctcttcacctaacaacttgactttctgttatgcttcatcagcaacaactacatgtgaggcggggaaatgagtccttgatctgggcattttgctgccccaaataaaaccgggattctgttggtgaggaagaaagggagactggacactgggtagagggctggcagtctctgccttggtgtggaaagggtgcacctccatgcatatgggagaagcaccagtgccttcattccctgacatcgtgtccctgaaggcacctgctgtcacaaacaccacaccatcattcccactcagcctccgcaggtttctctgcaagctcctttgtaggttggcgcagctttgacaacatccctttt

SEQ ID NO: 946160 - DNA, 729 bp, Homo sapiens
tcaactcactcgttctcctggagccaggaacaagtcctcatgtgtgatagccccatgcagkgttcccagctttctccacattcagcccagcttctgtgtcttccttctgtctactctctgcctagcagtcatgtttgttagagatatgcctgttgtctcagtccctgtgtgggagctgttccacttggttgcgtctagtaagtcatcttgccccttaatgtttcattgttttttcttttttcaaatagcctatcttcaaactgattttttctgtttgatcaattctgctattaaggaactctgatgcattcttcagtatgccaattgcatttttcaactccagaatttctgcttcttttacttcaatctccattgaatttatctgatcaaaatatgaattctgtctttgtgttaccttgaatttctttgtgtttcttcaatgcagctattttgaattttctgttgaaaggctatatatcattgttactccaggatttgaccttggtgccttatttagttcatttgttgaagtcatgttttcctgaatggtgttgatgctagcagatgttcttttggtgtctgggcattgaagagttaggtatttattgtagtcttcactgtctgggtttatttgtagccatcattattgggaaagctttctggctatttgtctggacttgagtgtcatgatctagacttgagatgcttcagagagcaccccaagctcag

SEQ ID NO: 946161 - DNA, 619 bp, Homo sapiens
cctctatcaactaatcataggaaactccccatgaggccatcagtgcgggctgggggagagaaggcagggcggcaggagtggagacaatgggcacttgagccacttcctcatgtarcttatttgtgcttttaggacctgctcaagcctgatcatgtacactacttccattcgatgatggaatgctgctgtgcatgacccactttaggttagatgggtcagaaagcacccagttcatgataggcagttcaagtaacatggtgacttgatgatccattttcacatgttcagtttccaccaaagcctagcaacaggccaagaggtgtctctcaaaaggagagtacttatctgcagaagatggcagagccttactccaaaatcctagagaggactccactgtgatttacctatgggggcctgcaaaagactccaaacagcttccatatctgccactgacacctcaagcaccgttggatattctgggtcatatggtccaagtggcagagcagcttgcacagtggcctggacctgatgtacagccttctgttctggaccctactaaaaactggaagcctttcaggtcactcaataaataagccagagtaacatacccaaatgagaa

SEQ ID NO: 946162 - DNA, 604 bp, Homo sapiens
gaatgtcttcctttgagaagtgtctgtttaggtcctttgcccactttttaatggagttgttttgttcctgtaaatttaagtttcttgtagtcgctgaatatcagacctttgtcagatcgatatattgcaaaatttttctcccattctttaggttgtctattcactctgatgatagtttcctttgctgtgcagaagctctgtagtttaattagatcccacttgtcaatttttgattttgtctcaattgcttttggcattttcatcatgaaatctttgcctgtgcctatgtcctgaatggtattgcctagattttctaggatttttatagttttgggttttcatgtaaatctttaatccatcttgagttaatttttgtataaggtgtaaggaaggggcccagtttcaattttctgcgtatggctagccagttctcccagcaccatttattaaatagggaatcatttcccccattgcttgtttttgtcagttttgctgaagatcagttagttgtaggtatgcagtcttattyctgacttctctgttacgtttcatttgtctatgagtctgtttttgtaccagtaccatgctgttttggttattgtag

SEQ ID NO: 946163 - DNA, 578 bp, Homo sapiens
cagtactatgttgagtagaagtgatgaaagtgggcatcctggtcttgctccagttctcaggaagaatgctttcaacttttttctgtttactataatgttgcctgtgggtttatcrtagatgacttttattaccttaaggtgtgtcccttctatgccgattttgctgagggtttaatcctaaaggaatgctggattttgtcaaatgctttttctgtgtctattgagatgatcaagtgatttttaattctatttatgtagtatatcacatttattgacttgcagatgtcaaaccatccctgcatccctggtatgaaacccacttgatcatagtggattatcttttgtatatgctgttggattctgttagctggtattttgttgaggatttttgcatctgtgttcatcagggatattggtctttagttttcttttctattttttttttttgttatgtcctttcctggttttagcattagggtgatactggcttcatagaataattgttggaggattccctctctatcttgtgggatagtatcaataggattggtaccaattcttctttgaatgtctgacag

SEQ ID NO: 946164 - DNA, 745 bp, Homo sapiens
gctaacaaaatgagttgaaaatggttccctctttttccattttttgaaagagtttaagaaggattggtgttaactctttaaatgtttactatcattcaccaattaaaccatcaggtcctgtgcttttctttgttgagaggtttttaatcaattattcaatttccttactcaatattgtttttcttccaagatggcagattagaaggttctccagcatgcttcacccacctggtagtgtagtgattcacactgtgaaactttattcatgaaggatcatgggaattcaaccaaaaagtaaaggacactttacatcacggggaagagaagttggtcagacagcctgcacaacaggatatggctgagaactgtgagtaaagttccaaagaggaaagaggaagagagtgtccctctgtgattcacccttccactggggaacagtgcaacccaggccacaggaaagcacattgtctctcccaatacctaaagctaacatgaggagaggctgtgagaagtaaaggctgtgagagactgtgagaagtgaaggcactaggaggttccctatgcatgttctcagatctggaaactgataggaggaaatcattctcaatccagcctcatatcaagctgggaagaatttagcaacctagcagcagcaactgccactggcattagagtctcaggctggagattggagtgttrggtctggagcaggggagaggactccacactcagaactgagagatga

SEQ ID NO: 946165 - DNA, 581 bp, Homo sapiens
caaaaactaatagaactggaggaagaaatagacaaagtcacaattatagttggagactctgacacctctctctcaataattgatagaacaattagacagaaaatcaacaagaatatagaagaactaaacaccaccatcactcaacaagatctaatcaacatttatacaacataccgctcaacaacagcagactacaaattcttttcaagtgcccacagaacacacaggaagagagaccatatcctgattcataagataaacctccactaatttaaaatattgaaatcatacaagtatgttcactaaccacagtggaatcaaagtggaaatcagttacacaaaggtaataggaaaacgtccagtccttggaaactgaacaacaaatttctaagtatccatgggtcaaacaggaaatatcaaaacaaatttgaaaaaacatattgatctaacttggccaggcacagtggctcacgcctgtgatcccagcactttgggaggccgaggtgggtggatcrcaaggtcaggaatttgagaccatcttggctaacacgatgaaaccccatctctactaaaaatacaaa

SEQ ID NO: 946166 - DNA, 425 bp, Homo sapiens
gttaaaggcgtttgaaaaacagcagatgccagaagggcactctgatctctgatcttcttttttcttcctgaaagcaggaaataaaactcccatgtgaaaggtaccctccttgtaccaggaaaaagaaagatattcttatcactagagatgaggagttggggctaagagaaatctgtgcaaacaaacactgttcaaggaacccttatcttccttgatgcttttccacagttaactgcccgagctcaagccccttggttttgctgcatttccttaatttgctgctctttgtcaagcctagtagataagcctttsgttctaactgcttctttgggtcttcagtttttttggtaaagtcttccatatatatgcaaaaaacaattgcaattcttatgcttttctcttttttaatctgttttatgtcagtc

SEQ ID NO: 946167 - DNA, 603 bp, Homo sapiens
tcacatcatctctcattttgattactgcaaaaccttccaacaagtctccctgcttagactcttgaactcctacaaccaaatctcctcactagaggaatcgtttaaaaatgtaagtcaaagtgtgggccrggcgcggtggctcacgcctataatcccagcattttaggaagccaaggtgggccgatcacgagatcaggagatcgagaccatcctggccaatatggagaaaccccgtctgtactaaaaaatacaaaaaaattagtcaggcgtggtggcaggtgactgtaatcctggctactagggaggctgaggccggagaatcgcttgaacctgggaggcagaggatgcagtgagccgagatcgcgccattgcattccagcctgggcaacaggaggaaaactctgtctcaaaaaaataaaaataaaaataaaaaatgtaagtcaaagtgaaagaagccagtctaaaaaggctgtatgatttcaaccatatcacattctggaaaagtcaaaattatgaagacagtaaaaaaaaaaaaaaaaattagtgaatgccaggcatctggcggggggagatgaataggtggagcacagaggatttttagga

SEQ ID NO: 946168 - DNA, 620 bp, Homo sapiens
ttatgttgataacattcaaaattcttctagccattttgaaatatacaataaattattgttaactacagtcaccctgctgtgctatagaacactataamtttttccttctatttaactgtaaatttgtacccatcaagcctctagtaactactattccactttctacttttatgggatcaaggtttttagctcccacatatgagtgagaacatgtgttgtttgtctttctgtgtttggcttatttcacttaacacaatgtcctccaggctcattcatgtttccacaaatgacaggatttcattctttcattctgtaggctttttcactgttataagtaatctagggataatttaaagtatataggaggatgtagataggttatatgcaaatactacaccattttgtatacagtacgtgaacatcacatgaattttgatatgtgtgggggtcctgggaacaatcctccgtggatactgagggacaactgtagttgtgtcttgctttttttaaaaaatacattcagccattttatatcttttaattggggattttaatccatttacattcaagattattattgatagatataaactgactcatgccattttgtttattgttta

SEQ ID NO: 946169 - DNA, 759 bp, Homo sapiens
aacagacattgcattgaacaagagtcaaagcaataagcacaggcaaaaatgctgaaaataattaatcatcaggaacaaccagcaataaatgaataaataataatcattaaaatcatgagataactttatacatatacatactattcataattaaaaagatggataataccaagggttggtgaggatgtagaaaaactggggtcttaattgcctcctatactgttgaaattgttcagcagtatccgctggagactaaacatatgcctaccctgtaacacagcaacctcactccatgagaaatgactgcttatgtctgacaaggatgtgcaaaaacatccacagcagctacactcataaaagatcagaactgtaagtgactcaacagtaaaatgaaaaaaattgttgtacacttatacaatggaataatacatagcagttttaaaaagccatgtgactgatcattaagctaaattcttaaaattggtacccttactgaatatatgttttaattcaattaaaaattaaataaagaggtcaggtgcagtggctcctatctgcaatcccaacactttgggggcactgaggcaggatcacttgaggttaggagcttaggcaacatagtgagaccccatctctacaaaacaattttaaaaattagctgggcatgctatcctagacacttggraggctgatgtgggaggatggcctgagcccaggaattcaaggctacaaggaactatcatcgtgtcactccactgc

SEQ ID NO: 946170 - DNA, 387 bp, Homo sapiens
tgtccaccttgtgagcagagagcccgtgctgcccttctgatggacagaactgtgaactcacagacgggtgcagtttgagctgctcgtaggattttgaggatttgtcaggagcagcagaagcaagtgcaggggagctcagagtgcagagggcaggaggggcttccccgggagatgaggtggcagtgtgtcctgggaagagtgtgtgggaggcgggcaggtgggggaggcctaacctcttctcagggttccaagatctcaaaagccaaggacaagcacccttgtccttacacctgtcaagcttgacagagccgcatctctgayaatgattgttatcaggagatggggggagagaagaggggtaggtgatgagccatcagggttatgtca

SEQ ID NO: 946171 - DNA, 720 bp, Homo sapiens
cacaactagattttattctaatttataaaacaaaaaatgattagacaagcacatgatatcaagagtcttcaacctagtggattccatttcattaagcaaaaaaaaaaaaaagaaagaaagaaaacaagtagcccttaaattttcttagctctctatagcatacattatataaaattaaagttttgcttccaaaaatatgtctccatgttgtcgtgatgttgtccagtactattagggccaaaacaccaaagacatgagaagtttaaccactgacttgtcacttttcataaaaactaaacatttccttataggtctggagtaaaatcttctaggcattttagtgctaaaagtcatttcaaattaagtgtgaaataaaagctacaaaaagtatgagttctttcaatacaaaaagctgtgtagctgaagttgtgggctcgtttgacatacataagcagtttcagtaaaatatttgctcaggtaaggaaatagaatttgtctgctgtcatttagcatacgttccagtccatgtcctgcttataccttccagaccttctaaagaacattagaatcgatatttctaaagtcttattcctgctccctctgtcggattyttatagacggtcaggagcagaaggccttagagtccatgaactccaaacccctcttcttattttacaataaaaaacactgacgtgaaggggtgttattaggtgatttgcc

SEQ ID NO: 946172 - DNA, 540 bp, Homo sapiens
caaatttcaggaccatttcaytttgactgaaaaagctggagctgccttaaagaaacttcttgggccaggcgccgtggctcacgcctgtaatcccagcactttgggaggccgaggtgggcggatcacgaggtcaggagatcgaggccatcctggctaacacggtgaaaccccgtctctactaaaaatacaaaaaattagccaggcgtgatggtgggcgcctgtagtcccagctacttgggaggctgaggcaggagaatggcgtgaacccatgaggcggaggttgcagtgagccgagattgggccactgcactctagcctgggtgacagagcgagactccgtctcaaaaaataaaaaaaagtaaaaatacagaaaagaaacttcttggccgggcgtggtggctcacgcctgtaatcccagcactttgggaagccgaggtgggcagatcagggggtcaggagatcgagaccatcctggctaacacagggaaaccccgtctctactaaaaaaataccaaaaattagccgggcgtggtggtgggc

SEQ ID NO: 946173 - DNA, 766 bp, Homo sapiens
ctgcacctgtgactttgttgacagaaacttcccaagagtggaaagacctggtattcaagacttgccacccagattcctttgtcccacagcagcttcccttgaggtggtacactcccccttcccctaggaatagaagttcctgagagccagactactgtgagtgctgttgctcttctgggtccagtcacccagtgggactgccacactccaggctggtgttggggaatgtctgcaagagatccagtgatgtgacctgccctcaagtctcccagcagtgggtaccagcacgaagggatccagttatatgacctgtcctcaagtcttccaacagcaggtaccagcaccagctctgataggggtggccggggattgatgtagactctgtgagattccttacttatagatagccttagtgtgatctctgttatcaccctttcatgcactactctggctaactcagagatcttgagtctgtccatgtgactagtttattactactataaccatcattcaagaaagccaacacactaaggctatcaataaccaaggtatttcagagtttacatcattcccctgccacctccattagagctggttatattagtggacagactcaggacctcctggttagccactgtggtgcaggcaatggtcatagctgaggtcatgcaccagctytctccctcctgggtacagtgttattctaccaggagatgctgtaatggacagtgtctgttggcctccagtcatgaggtggtacttgcaa

SEQ ID NO: 946174 - DNA, 617 bp, Homo sapiens
aggagagtgcagtcaaatgaattgtaagggagaaaatggtcctgagtccaggccaagccattgggacaaaaggaggagtcctttgtgacagaaaagagacagrccctccattatgggacaaactaatgagttgcaggcaggagaagcagcacagtcagttgtcagggatagaattgctgaccagatagaagtgctagaaggaggggagtggaggctgggcaggtgaaagcgtgcagaggacccagaggaccagaggagagcagggagctatgcgtatgatgcagcagtgatgagggctggttaggataaatcacaagaatggcttgttgtttattttttcccccagctactgtttaagtttataagtggcactatttgtctagttagaatcttactgctatatggaactcataccaaaagtcatggtgtataactgtttcgtatgtgccgtaagacagctttgagaccctctaacgacagagtcaccatctcagctttagataagaattcaaagatcctcttgaatccacccgttttttaaaaatacaaattggattatatcactcccatgtttaaaatttttcaatcatatttcatttcctttaacaaaaccttct

SEQ ID NO: 946175 - DNA, 580 bp, Homo sapiens
aagattaacaaaatagatagaccactagccagagaaaagagagaaaaagatgaaaagaagagaagaaaaaaaaaaaaagagtagraaaaaaagagagaagaatcaaatagacacaataaaaaatgataaatgggaaatcaccactgatcccacagaaatacaaactgccatcagagaatactgtaaatacctctatgtaaataaagtagaaaatctcgaagaaatggataaattcctggacacatacatcctcctaagactaaaccaggaagaagtcgaatccctgaatagaccaataacaagtgaaattgaggcagtaattaatagcctagcaaccaaaaaaagcccaggaccagagagattcacagccaaattctaccagaggtacaaagaggagatggtaccattccttctgaatctattccaaacaacagaaaaagaaagactactccctaactcattttatgaggccagcatcatccggataccaaacctggaagagacacacacacaaaaagaaaatttcaggccaacatccctgatgaactttgatatgaaaatcctcaatgaaatactggca

SEQ ID NO: 946176 - DNA, 580 bp, Homo sapiens
aagattaacaaaatagatagaccactagccagagaaaagagagaaaaagatgaaaagaagagaagaaaaaaaaaaaaagagtaggaaaaaaagagagaagaatcaaatagacacaataaaaaatgataaatgggaaatcaccactgatcccacagaaatacaaactgccatcagagaatactgtaaatacctctatgtaaataaagtagaaaatctcgaagaaatggataaattcctggacacatacatcctcctaagactaaaccaggaagaagtcgaatccctgaatagaccaataacaagtgaaattgaggcagtaattaatagcctagcaaccaaaaaaagcccaggaccagagagattcacagccaaattctaccagaggtacaaagaggagatggtaccattccttctgaatctattccaaacaacagaaaaagaaagactmctccctaactcattttatgaggccagcatcatccggataccaaacctggaagagacacacacacaaaaagaaaatttcaggccaacatccctgatgaactttgatatgaaaatcctcaatgaaatactggca

SEQ ID NO: 946177 - DNA, 588 bp, Homo sapiens
atttattcctttttgtttaaaatacaaatatttgcatttccctgatcattagtgatgttgagcattttttcatatgtttgttggccatttgtatgccctcctttgagaattgtctattcatgtccttaagcccactttttgatgggattgtttgttttttcttgctaatttgtttgagtttgttgtagattctggatattagtcctttgtcagatatacagattgtgaagactttctcccactctgtgggttgtctgtctactctgcagactgttccttttgcagtgcaaaagctctttagtttaattaagtcccagctatttgtttttgtttttattaaatttgcttttgggttcttgatcatgaaatccttgcctaagccgatgtctagaagggcttttccaatgttgtcttctagaatttttatagtttcaggtcttagatttaagtcatcgatccatcttgagttgatttttatataagktgagagataaggatccagtttcattctcctacatgtggcttgtcaattatcccagcaccatttgttgaatagggtgtcgtttccccactttatgtttttgtttg

SEQ ID NO: 946178 - DNA, 605 bp, Homo sapiens
agacctcaatccatttggtacatatcaagcaattcacccttcttataacatcatgaattttccctgcttcttgggagcacttccagcatcactagtggtactttgtatgggttccayggtgttattaaggtttatagtagtgaactaaacatgatgaaaaatacacaaaaaccatgagagacaactcttttttttttttttttttttttttgggagacagggtcttgctctgtcactcaagctggaatgcagtgacacaatcatagctcaaactcctgggctcaagacatcctgacacctcagcctcccaagtagctgagactacaggtgtgcaccaacatggagatcactttttaatacaacacataatttactggacagatgaatggttcacatggagctgttagcatcacacagtgttttaagcagatacaacactcaagctcattgcaatagcaacaacaggtggcttcaacattattatatagtacagtatgtactacagttaattgtatgcagttatgatttaatactgcatctttatgtttctttacatttctcgggactgcaaatggcaccatgtacagtctggtgtatataagttt

SEQ ID NO: 946179 - DNA, 659 bp, Homo sapiens
cttcagaacaatgagccaattaaacctcttttctttataaattacccagtctcaggtggttctttatagaaatgtgagaaaaaactaataaggaaaattggtacagaggagtgagacattactataaagatacctgaaaatgtgaaagctgctttggaactggttaatggtcagaagttggaagagtttgaagggctcagaagacaggaatatgagggaaaatttggaacttcctagagactggttaaatagttgtgactgaaatgcttaaagtgatatggacaataaagtccaagctgttgaggtctcagagggagatcaggagcctattgggacctggagcaaaggtaacttttgttatgcattagcaaagaatctggtggtattgtgcccctgccctaaggatctgtggaattttgaacttgagagtgatgatttagagtatctggaagaaaaaatttctgaacagcaaagctttcaagatgttgcttggctgcttctaacaacctaagttcacatgtgtgagcaaagaagttatgtaaaactggaacttatatttaaaaggaaagtagaccataaaagtttgaaaaatttgcaacctgtccataaatagtaggccatawcatagaaaaggaaagcccattttctggggaggaatt

SEQ ID NO: 946180 - DNA, 551 bp, Homo sapiens
tgctgaaagaaacttcccacaagtggaaagttcagggactcaaggcctgtggtcttgtttcttttgtcccatggggtgttccttaatgtggtgcactccccctccctctaagagtaggagtctctgagaacgagactactgtgaatgctgctgttctactgggtctagccacccagtggggctgccacacttcaggctggtactaggaagtgtctgcaagagattcagtgatgtgacatgtcctctagtctcacagcagcgggcaccagcaccagctctgatggaggtaggagggcagtgacgtagactctgagatttccttagttataaatagccttagtgtgttggctttttcaaatgtcagcagtagtagtaatgtacagggcatgtggacagactcaagacctactggttagckagggtgatgcaggcaatggtgaaggccgaggtcacacaaaagttttctttctccagggctctgtgtgattgttcctgcagatgttgtaaaagactggaggcagttggcttccagccacgacgtggcacatgca

SEQ ID NO: 946181 - DNA, 494 bp, Homo sapiens
actaatattcactaataatcttttttttttttttttttttttttttttttttttttttttttttttaacatggagtctccttctgttggccaagctggagggcaatggtgtgatctcggctcactgcaacttctgcctctcaggttcaagcaattctcctgcctcagcctcccacaggcatacaccaccatgcccagctaatttttgtatttttagtagagatggggtttcgccatgttggcctggcttgtcttgatctcccgacctcaagtgatctacctgccttagcctccaaaagtgctgggattataggcatgagctaccatgcctggcctcactaagaattttaaatggaaatacttacaatattttgtaatgagattctgagttaacatgaaaatcttttctaccacactgaagtttactgctattttatggtaaagttcttaraaaagttgtctaatatacaaataagtagtgcattatttcttatt

SEQ ID NO: 946182 - DNA, 777 bp, Homo sapiens
tcagtgtggatgatcgggaaggggctgtctgatgggctggcccctatgctgagatttttctttcttttttattttcatttaagatggagtcttgctctgtcacccaggctagagtgcagtggcatgatcttggctcactgcaacctccgcctcccaggttcaaatgattctcctgcctcagcttcccaagtaactgggattacagacgcctgccaccatgcccagctaatttctacattttcagtagagatgggatttcaccgtgttagccaggctggtctcggactcctgacctcaagagatccacctgcctcatcctcccaaagtgctgggattacaggtgtgagccactgtgcccggccctgagatttgaaaagcaaagagagcagctacacgatgatcagggaagatgagttggatgccaaaaatcccttgccctattcgtgttggttaaatcagggaacaagacttgcagggcaaggagcagcgagttaaggctctatgatgagggaatgctggcaacttgaaggaaaagcaaggtcacctgtgagcttcaaagtggcatggagacgaggcagggccacaggtggagggctgagcctcggggtgaggagtttgaattctatgagggatgtgaggaagcctttacagggcaagcaagggaagggcatgatayactaaatgttaagtgaatgcctccggctgccaggtggaggaaggattacagagaagctggggagaaccagggagagctgctagactccacgtggtgggcgt

SEQ ID NO: 946183 - DNA, 807 bp, Homo sapiens
atgaattctaaaatcaaaaacaagagcaaacagcaaacttatggtgaagcttgggtggaagaatagtgaaatctttgatttcactttatgaaaagttcatggagataatgccccaaagaaatcaaatgttttcaagtagaaaactcattctaagaagggatgagctaaggttaaggataaagcctgcagcggcagactatctcacattaactagcaaggaaaaaaaattcatcttctttatgccctccttaaagaagaccaatgattaacaaaagaaacaatcactaccaccacagacatctcagtttcaccagcagtgcagtggctcatgcccataatcccagcactttgggaggccgaggtgggtggatcatgaggtcaagagaactagaccgtcctggccaacttagtgaaaccctgtctctactaaaaaataccaaaagtagctggatgtggtggcacacacctttagtcccagctactcgggaggctgaggcaggagaattatttgaacccaggaagcagggaggtggaggttgcagtgagccaagatcatgccactgcacctccagcctggcaacagagtgagactctgtcttaaaaaaaaaaaaaaacaaacaaaaaaaactaattgaaaaattaaagttaagtaatttccactcaatgtgtgccaaaaactattgtgctcatatcagcttcagataacagcagaagtttcaaggaaaattttaaacaagmggggtcaagacccctgaagcatttctttaaagaattgtaacagcaggtacaacgtgattttaccagtac

SEQ ID NO: 946184 - DNA, 606 bp, Homo sapiens
aggtctcagatggaaatgaggaacttattgggacctggagtaaaagtcacttttgctatgttttagcaaagagcttgactgaattgtaccctactctagggatctgtggaactttgaacttgagaatgatgtcttagggtatctggcaaaaaaaaaaaaaaaaaaaaattataagcagcaaactgttcaagatatggcctggccgcccctaaaagcctattctcatatgtgtgaataaacaaatggcttaaaactggagttatatttcaaaaggaagcaaagtgtaaaagttcaaaaaatttgtagcctggtcatgtggtaaaaaagaaaacctcattttccagggaggaattaaagcaggctgcagaaattcgcactagtaaaaaggaggcaagtaatgattacaaagacaatgggaaaaaggcctccaaggcatttcagacacattcacaccagcccctcccatcaaaggcctcaagttctaggagggaagaatgcttttgtgggcagggtccaaggctgtgctgctctgtgcagccttgggacactgttcctagcatcccrgatgctccagctccagccgtgaacaaaaggggaccaagtaca

SEQ ID NO: 946185 - DNA, 601 bp, Homo sapiens
cttcaggaaagccccagctcctcagcctcctctcattcttttacccaggaccgtctgggggccccagctccccgacaacaggccccacctccacatctggtgagtccctgaggcttctgaactcaagggagtgcggcctcccccagggcagccctgggtctcccagagaatcccattcccctcaaagactcgagcttccctccagggagccgggcagagccagaggaggggccacagggtccccagggctctgaggctgggctggtgaggggtggggggtcaaggcagagagaaatgttggggcccagcctgggggaggagcagccgggctgatgtggggagcagggcagccccagccctcacctccccgtcctgacccagcaggccctgaggaccagcccctcacccccaccgggtcggatccccagagtggtgagtgacgggctctgagtgggaggtgggcagggtccaggggaggcaggggtgggttctgtcctaggttcagkctcctctggaggtggtgatatagacaggctcctcccctgcttgggcctcagtttctccaaatgtaaaggtgagaggcctgcgggtgggaaagttc

SEQ ID NO: 946186 - DNA, 601 bp, Homo sapiens
cttcaggaaagccccagctcctcagcctcctctcattcttttacccaggaccgtctgggggccccagctccccgacaacaggccccacctccacatctggtgagtccctgaggcttctgaactcaagggagtgcggcctcccccagggcagccctgggtctcccagagaatcccattcccctcaaagactcgagcttccctccagggagccgggcagagccagaggaggggccacagggtccccagggctctgaggctgggctggtgaggggtggggggtcaaggcagagagaaatgttggggcccagcctgggggaggagcagccgggctgatgtggggagcagggcagccccagccctcacctccccgtcctgacccagcaggccctgaggaccagcccctcacccccaccgggtcggatccccagagtggtgagtgacgggctctgagtgggaggtgggcagggtccaggggaggcaggggtgggttctgtcctaggttcagtctcctctggaggtggtgatatagacaggctcctcccctgcytgggcctcagtttctccaaatgtaaaggtgagaggcctgcgggtgggaaagttc

SEQ ID NO: 946187 - DNA, 675 bp, Homo sapiens
gtggcatccctcaccttgctttctcttgctctctctctcaccatgtgacacactggccccccttccccttcgaccacaactggaagcttcctgaggccttcaccagaagcaggtgstggttccatgcttcctgtacggtctgcaggaccatagccatataaacctcgttttctttgtacattacacagctcaggtattcctttacaggagtgcaaaatggactaagtgtcatatggtaacatttttagagaaatgaaaaagcaaaaatggaggggccgttccaagatggctgaataggaacagctccagtctacagctcccagcgtgagcgacgcagaagatgggtgatttctgcatttccaacagaggtaccaggttcatctcactggggcttgttggacagtgggtgcaggacagtgggtgcagcccaccaagcgtgagccaaagcagggtgagcattgcctcacccaggaagcgcaaggggtcagggaattccctttcctagccaagggaaaccatgaaggacggcacctggaaaatcaggtcactcccaccctaatactgcacttttccaatggtcttagcaaatggcacaccaggagattatatcccacgcatggctcacagggtcccacgcccacagagcctcgctcattgtagcacagcagtctgaga

SEQ ID NO: 946188 - DNA, 628 bp, Homo sapiens
tacttttcaacctgagctcttktccaagtcaaaggaggaaccacttaaagttctagactagggaaagagatttcaattactcgtgaatctttgttgtgcccctaacaagaatgaccataggatacccctactacgaggctttgaacagtgctgtcctaagccttatgcatctgggataggagaaaaagccaatacaggtctttgatctgcatttcacaatcttggttgcaaaagaagaaaatcagaaacattgaaagacttcatggtgcaaccatgagtctgaagcattatgtaagagcccaaattcaattggttgaacaactgattgaaattgaatatgaagacaaaataatgcaagactcaatcagtggggaaaattatgtatttatcttagaatcctatcaagttccaggtctttatatttagataaaaaatattagacctactgttatcccatcaacttcaaaggtcttaggggttagatagaaaatctgtgtatgtcttaagagtcaaagacatgcaaatcaaggtatcagatgggatgggacatgttgaccttttataagtagccagagaattaggtaacttgactttatttattaaagctttgaagtccatgatacaaaga

SEQ ID NO: 946189 - DNA, 718 bp, Homo sapiens
ctacccaaaggaaaacaaattattatatcaaaaagatacctgcactcatatgtttatcacagcactattcacaatagcaaagatatgaaatcaacctaaatgtccatcaatggatgattgaataaggaamatgtggtatatgtacacaatggaatactattcagccattaaaaaaatgaaaccatgtctttttcagtaacatggatggaactggaggccaacactttaaatgaaacaactcataaacagaaagtcaaataccacatattctcacttttaagtgggagctaaataatgtgtacacatggacatagagtatagaatgacaagcactggatcctcagaagggtgggagggtgaaagaagggtgggtgataagaaattatttcgtgggtacaatgtacattattccagtgacggacacactaaaagcccagacttctccactgtacaacctagccatgtaacaaaattgcactcataccccttaaatttatacaaatcttagaaatgcttggctgtgggaactctgtggaactagatggtctaagggaattcaggagcatcgtagtctgtgggcagtggagaatggacatatcaagggaccaccgagaaactggaattgtacagatacctgcaaaaggcagaggcagcaaccagagcaaacagatggcaagtgcaacggacctgggggcaaaagtgctgtgtaaatatggac

SEQ ID NO: 946190 - DNA, 550 bp, Homo sapiens
ggattaaagacttaaatgtaaaacccamactaagaaaaccttggaagacaacctaggcaatgccattcaggacatggcatgggcaaagatttcatgatgaagaagcaaaaagcaattgcaacaaaagcaaacattgacaaatggtatctaattaaaatgaagagcttttgcacagcaaaagaactatcaacagagtaaacatacaacctacagaatgtgagaaaatttttgcaaactatgcatctgacaaaagtcaaatattcagcatctatagggaacttatacaaatttacaagaaaaaaccccataaaaagtgggcaaaggacatgaaaagacacttttcaaagtaagaaataatgtgaccaccaatcatatgaaaaaaagctcatcactgatcattagagaaatacaaatcaaaaccacagtgagataccatctcacaccattcagaatgtctgttactaaaaagtcaaaacataacagattctggcaagattgtggagaaaaagaaatgcttacacactgttgtgggagtgtaaattagttcaac

SEQ ID NO: 946191 - DNA, 552 bp, Homo sapiens
cctgagtagttgagatcacaggtacgagccaccacgccccacttatttttgtatgcttagcagagatggctttttgccacgttggcccggctggtctcaaactcctggcctcaagcgatcctcggtcwcccaaagtgctgggattacaggcgtgaaccactgtgcccagctacaacctgacttttaaagactaaactgtgttatacataaaatcatcctaattagaaagtgaatcttctgtcatacattcaggagattctaaagattctgccataaggcttctttgttatacacaattctgtaataaacactcttacacatacatctttgcacatgctaatgattatttccttaataagattcccagaagtaggtgtgttagttcataagatatatattttaagtcttttcatacatattgtcaaatattctttttaaaaggtaacagtaatttctattttaccatcaatgtgaacaaagattttaattattttgaaataatttcacccttacagaaaaaaaataagaaaaaagaattccaatgtgcccttc

SEQ ID NO: 946192 - DNA, 608 bp, Homo sapiens
gactaccatgttgtttcctataggccctgttttccaaatgaagttatgtctttcaacattctgacacttgaggaatctgagtgtggatatctcgatgtctatcctagtccaagtttattgattttcatagatmtgtaaattaatgtgtttcatcatatttgagaagttttcagctattatttctcccaaaactttttctgctgtttttttctccaacattctgattcttgaggaatcggagtgtggatagctcagtgtctaccctagttcaagtttattgatttttgtagatatgtaaatcaatgtgtttcatcatagttgagaagttttcagctattatttctcccaaaactttttctgcttttttccctctcctctccttcttgtattcctgttatatgttgcctaatattcatcatatatgccgcatttctttgagagaatgttcatttttctccattccttcttctctctcttcttcacattgcgtaatatttatctgtctttcaatttactgattctattttctgccagccaaactactcctcaggatctctagtaaagtttttatttctattgtgcttttcaattccaggatttccattaga

SEQ ID NO: 946193 - DNA, 564 bp, Homo sapiens
aaatggtgaaaccccatttctacaaaataatacaacaattagccagatgtggtggcwtgttgctatagtcccagctacttgggaggatgaggtgggaggatcacttgatcctggaaggcagaggctgcagtgagccatgatcatgccattacagtccagcctgggtgacagagtgagaccctgtctcaaaaaaagggaaagtagagcaaagagggatagagcaacaaggcagactataaggatccactgatcacaccacctgccccccatgcccccacctcaaggacaccaatttaacaagcatctagagtaaaaacaactttataaggaccaaaaatcaggtgattactcactctatctgcttttaactgtatatcattgaaagagacactgaagaattaggagaaacagtcttgaattgccgatgccaccctgccccccatccccaggaagtagtggcgtggtatggagagcaattctgtctactcggaaggggagagcacagaaatttggatgcactgaactcagtgctgccctgttatagcagaaagtaaaaataaaaga

SEQ ID NO: 946194 - DNA, 637 bp, Homo sapiens
gcctgcatctgttattttctgacttcttaataatagccattctgactggggatagagggtacctcattgtgattttaatttgtatttctctaataattagtgattttcagctttttacaatattcatatgggatatgtgtatgtcttctttgcaaagtgtctgttcaagttctttgcccactttttaatgaagctgtttgttttttacttgtaaatttgtttaagttccttgtagattctggatctcagacccttgttggatgcatagtttgcaagtattttctctcattctgtaggtttactctgttgatagtttcatttactgtgtagaagctcttatttaattagctccaatttctcaatttttgttttactgcaattgcttgctttggtgtctttgtcatgaaatctttgccagaaaatcaaataccacaaatggtattgtccaggttgtcttccggagtttttatagttttgggttttacatttaagttcttaaaccatcttgagttaatttttgtatatgatgtaaggaaggggtccaatttcartcttctgcatatggctagccagttatcccagcatcatttgttgaatagagatcttcattgcttgttgagatcttcattgcttgttt

SEQ ID NO: 946195 - DNA, 448 bp, Homo sapiens
gggccgctgagtcatctccctatcaggaaattgtttctgccttagctaaataggtaggcaattttctgcccatttcagacagaaaacctaagtttaaaaaagattaagtgaatagctcaaggkcatatgcaaactctggcccagttaggaatagaacccaagtggttcctgacattcaatcctatggttacttttgcagaggtgcctatctttgtaatttacagatattgttcccaaattgctcactgaaaattctgcctaaatattgaaggtaaaacagctttatgtgtccaatagagagagaaagagtatatataaaatgaaatttttcccacatgaggaatgaatcactgtaaggaacatttgttcagttgtttcattataaaataagagcattcctcctggctgccacaaaatccaaatgctccattttgttactaaacactcc

SEQ ID NO: 946196 - DNA, 620 bp, Homo sapiens
aagaaagcacaagaagacaatastgttccaatccagaactaaaatgaaaacactctaccaaaccagcactacaagacacataaacagaaaaaaaaaaattatccttacaaaaactacataaaatcagaagcagtgagcacagatatcaatgtaagaccacaagagaagtgaaaagcaaggaatatgacacctccaaaggaaaactattctccagtaactgacaccaaaaaaggaaatttataaagtgcctgaaaaggaattcaaaatgatgatcctaagaaaactcagcaagatacaagagaatacagactgagaattcaatgaaaacaaaaacaattcatgatctaaatgagaaattcaacacaaatagatataaaaaagaacaaaacagaaatattgaggtaaagaattcaatgaatgaaataagaaaacaaaattaagagcttcaacaatagactagatcaagcagaagagactgatttttctaggaagaatttctaaagataaaaatgggtcttttgaaatagtcaagtcaaacaaaataaaaagaaaaaacaataaaaatgaatggagaaagccaataagacaatggaacacaaataagtgaacatatcttcgca

SEQ ID NO: 946197 - DNA, 776 bp, Homo sapiens
tgtcactagttcttatccaaaaatttcaaatgacagtgaaacgtcatctctgcattggggtgccttctctcctctgatttagccccaggatmgaagaaacctggatacctcaaataccacatgaaggaacgtcaactaggctgcaagcaacacccagatcagcttgtcagatattaaatttaaaaaatctatttttttgaacccaccaaaatttgggtttatttttgcagtggtgctatggttaatgttaaccaaaacagcatgaggtgtaaagtgactaagggttttgcagttcctgaaagatgcagtgtgattagagcactgaaagtaaagagaaaatacattggactcccagaaaattgtccaacaaaaagccctcaggacacattatgtaattctctgccttcctcccttatcctctcaactctattttagttggatatgacaaaaataacccaatttgtgtgatcaaaaaatcctaggacaggcatgttggttcatgcttgtgaccccagaaggtgggagggttgcttgaggccagccaggaattcaagaccagcctgagcaacagagtgagaaaacattttttcaaaattagctgggtatggtggtgtgtgactatagtcttagctattttggatgctgaaatgggaggatcccacgggcccaagaattctaggctgcagtgagttaagatcataccatttcactccagcctgggtgacagagaccttgtctctaaaataataataataataaatattattttaaaggaa

SEQ ID NO: 946198 - DNA, 776 bp, Homo sapiens
tgtcactagttcttatccaaaaatttcaaatgacagtgaaacgtcatctctgcattggggtgccttctctcctctgatttagccccaggatagaagaaacctggatacctmaaataccacatgaaggaacgtcaactaggctgcaagcaacacccagatcagcttgtcagatattaaatttaaaaaatctatttttttgaacccaccaaaatttgggtttatttttgcagtggtgctatggttaatgttaaccaaaacagcatgaggtgtaaagtgactaagggttttgcagttcctgaaagatgcagtgtgattagagcactgaaagtaaagagaaaatacattggactcccagaaaattgtccaacaaaaagccctcaggacacattatgtaattctctgccttcctcccttatcctctcaactctattttagttggatatgacaaaaataacccaatttgtgtgatcaaaaaatcctaggacaggcatgttggttcatgcttgtgaccccagaaggtgggagggttgcttgaggccagccaggaattcaagaccagcctgagcaacagagtgagaaaacattttttcaaaattagctgggtatggtggtgtgtgactatagtcttagctattttggatgctgaaatgggaggatcccacgggcccaagaattctaggctgcagtgagttaagatcataccatttcactccagcctgggtgacagagaccttgtctctaaaataataataataataaatattattttaaaggaa

SEQ ID NO: 946199 - DNA, 776 bp, Homo sapiens
tgtcactagttcttatccaaaaatttcaaatgacagtgaaacgtcatctctgcattggggtgccttctctcctctgatttagccccaggatagaagaaacctggatacctcaaataccacatgaaggaacgtcamctaggctgcaagcaacacccagatcagcttgtcagatattaaatttaaaaaatctatttttttgaacccaccaaaatttgggtttatttttgcagtggtgctatggttaatgttaaccaaaacagcatgaggtgtaaagtgactaagggttttgcagttcctgaaagatgcagtgtgattagagcactgaaagtaaagagaaaatacattggactcccagaaaattgtccaacaaaaagccctcaggacacattatgtaattctctgccttcctcccttatcctctcaactctattttagttggatatgacaaaaataacccaatttgtgtgatcaaaaaatcctaggacaggcatgttggttcatgcttgtgaccccagaaggtgggagggttgcttgaggccagccaggaattcaagaccagcctgagcaacagagtgagaaaacattttttcaaaattagctgggtatggtggtgtgtgactatagtcttagctattttggatgctgaaatgggaggatcccacgggcccaagaattctaggctgcagtgagttaagatcataccatttcactccagcctgggtgacagagaccttgtctctaaaataataataataataaatattattttaaaggaa

SEQ ID NO: 946200 - DNA, 389 bp, Homo sapiens
atgaaatattcagaagcccagcccagctctagaactcacccctagcrcaaaggcaatgttgggcacgctggtaaaggacctctagaatccagcagcccagacccgtttctctgtggtcaagaaaggtgggaaaaggcgtgcaggactactacatcggtgagcgtaactaatccgataagcagaggtccatgggtggttatgcaccctggaaaggaataagcattaggaccatagaggacgctctaggactaatgctcattggaaaatgactagggttgccggcatccctatgttctttttccagatgggaaacatttctcccaaggcaaaaatgccactaagatgtattctggagaattcagcccagagtgcatatacctttttctctg

SEQ ID NO: 946201 - DNA, 389 bp, Homo sapiens
atgaaatattcagaagcccagcccagctctagaactcacccctagcgcaaaggcaatgttgggcacgctggtaaaggaccwctagaatccagcagcccagacccgtttctctgtggtcaagaaaggtgggaaaaggcgtgcaggactactacatcggtgagcgtaactaatccgataagcagaggtccatgggtggttatgcaccctggaaaggaataagcattaggaccatagaggacgctctaggactaatgctcattggaaaatgactagggttgccggcatccctatgttctttttccagatgggaaacatttctcccaaggcaaaaatgccactaagatgtattctggagaattcagcccagagtgcatatacctttttctctg

SEQ ID NO: 946202 - DNA, 495 bp, Homo sapiens
attctcagatacccctgatggctatattgatgttttacaagggttaggacaaccctattatctgacatggagaracataatgttactgctagatcagacactaaccccaaatgagagaagtgccgccataactgcagtccgagagtttggtgatctctggtatctcagtcaggtcaatgataggaagataacagaggaaagagaacaattccccacaggccagcaggcagttcccagtgtagaccctcattgggacacagaatcagaacatggagattggtgccacagatatttgctaactgacgtgctagaaggactaaggaaaactaggaagaagcctaataaattagtcaatgatatccactataacacagggaaaggaagaaaatcctactgcctttctggagagactaagagaggcattgaggaagcatacctcactgtcacctgactctattgaaggccaactaaggttaaaggataagtttatcactc

SEQ ID NO: 946203 - DNA, 645 bp, Homo sapiens
catggctaacagggaccaaggcacagctcaggcygtggcttcagagaatgcaagccccaagccttggcagctttcatgtggtgttgagcctgcaggtgcacagaagtcaagaactgaggtttgggaacctctgcctagaattcagaggatgtatggaaacacctggatgttcaggcaaaaattttctgcaggtgtggggccctcatggagaacctctgctggggcagtggttctcagtggccccctggcacagagtccctactggggccctgcctagtggagctgtgagaagagaaccactatcctccagaccccagaatgatagatcaccaacagcttgcaccatgcaccgggaaaagctgcagacactcaacaccagcccatgaaagcagtcaggagggaggctataccctgcaaagccacagaggcagggctgcccaagaccatgggaacccacctcttgtgtcagcatgacccggctgtgagacatggagtgaaaggagatcattttggagctttaagatttgactgccctgctggattttggacttgcatgggacctttagccccttcattctggccaatttctcccatttggaatgggtatatttatccaatgcctgtacccccattgtgtctaggaag

SEQ ID NO: 946204 - DNA, 490 bp, Homo sapiens
tcattctgagaagcaatatggtattattgtgcccatttacagggaggacactaaggcgtggagaagctggatcctgccagtgtcagagcagggtgcatcctcggtccagccttgtgtccctgtgcctcacttacagcctgccgtcttgccatctcattttcattacctgctttccccttgcaggcagggatttgaactcagagatgctgggtggtcacagagctaacagggaatgaccactgtagtcagagggggtgatcaatggatgcatctgattcccggaaaaccctcctctggctggagggaggtgggggcagcttctgtagacagccttctgggaaggggtgcaatgagagtcctggatgtragcagagggcgctccaggtggaaggagcacaggtctagtagagggtccaggtgaaaggagtttgggtgagaacagcctgctgatagtgacatccctgacctataataataaggaaaacaacca

SEQ ID NO: 946205 - DNA, 574 bp, Homo sapiens
cttctaatactatgttgaataggaatggtgagagagggcatccttgtcttgtactggttttcaaagggaatgcttccagcttttgcccattttatatgatattggctgtgggtttgtcataaatagctcttattattttgagatatgttccatcaatacctagtttattgagagtttttaacatgaagggatgtagaattttatcaaaggccttttctgcatctatcaagataatcatgtggtttttgtcttggttctgtttatgtgatggattatgcttattgatttgtgtatgttgaaccaaccttgcatctcagagatgaaaccgacttgatcatggtgaataagttttttgatgtgctgctggatttggcttgccattattttattgaggattttcgtattgatgttcatcagggatattggcctgaaattttctttttttttgttgtgtstcttcccagttttggtatcaggatgatgctggcttcataaaatgagttaaggaggagttccctccttttcaattgtttggaatagtttcagaagtaatggtaccagctcctctttgtat

SEQ ID NO: 946206 - DNA, 617 bp, Homo sapiens
cttcaacaacagtgtgctcaaagatggtgacagtgcagtgtgtcagataggggctccaccactcaagctcagcaaagagccccagtgaccacaaacaaacctctgctacaagactttacactcgttcacttattcactcatttactgagtccataaatactttagtaagtattaaggttacatgctggggatacacaggtagacaagacacaagtggccctttcctaatggagcctttacctgaagatgttcttaattgggacaacttgaggaggtagaagagagctggagaagtaattaaggattaaggagatcctgctttttttttaaattttattattattatttttgacggagtctcgctctgtcgcccaggctggagtgcagtggtgcaatcttggctcactgcaacctccacctccctggttcaagcaattctcctgcctcagcttcctgagtagctgggactacaggtggccaccaccatgtccggctgtttttgtgtttttagtagagatgagttttcaccgtgttagccaggatggtctcgatctcctgacctcgtgatccgtcaaccrtggcctcccaaagtgctgggattagaagcatgagccacc

SEQ ID NO: 946207 - DNA, 487 bp, Homo sapiens
cagcacttaacattccaccaacactgtatgagggttagaatttccccacctctccaccaacacttgctattatagacttttaattctakctatgccagtgggtataaaatggcatctcactgtggttttgctttgcgtttttaatgataactaatcatggaaagcatcttttcttgcgcttattgaacattcatatgtcttggaaaaatatctattcagatcctttgctcttttaaatgtttttattattgggttctaatagttatttgtatattctggatattaatctctcatcagatatatgatttgcaaatattgttgccaaagtgccaggagtttggtcttgtcactcacagcacagaaagccaatcactaaaacagcaagtattgccagggaagaggctttttatttggttgatattagccacagaccaaggaagatcagtctcaaatccatctctcccaaatgactaaaattgcaggctta

SEQ ID NO: 946208 - DNA, 597 bp, Homo sapiens
acatgtacttagacactagtgcagcagaggggagatgaaacgcacagtgaacttaggagatgtgaacaccagctacagcctctaggtcagcttcatagtagagaagtacaggagccagtccactcattccttcttccttcttctgtcatcgaagcagtcagatacaagagaagccattatggctggtgaagcaaactcgcgtttattgtcatggattaggtgaactaagccagatggaaagagcagaggagtgggctcaggcattcatttcacttccctgtttcttcctgcgtttctatgcagaaaaatcctctgattgtgacaggaaacttgtgaggcaggatgctgtgcccacaggacagtgctgcctggccaggacccagaccaggagaatgagcccctctggaaggcatctccccttcccttattaacttctgaaaaccactctgcaggggcatatctcatgtgcagagccttartcacatctgggaccctgaatgccagagacatgaaggttagcctcaccagaaacgaccataaagatcgtgctggaggccaggggataaaaagaatacagagaaaaccaactcatgaaat

SEQ ID NO: 946209 - DNA, 600 bp, Homo sapiens
aagcacagtaaagcaaaacacaataaaaggagatatggctgtatcttgaaaaggatgagagctttgggtaaggacagtgttaggttttgaagggaagggaagggttaaagaaagacagagagagagttggcggctctacagcaaagcaggttttatgtccagcacaagactgtggaggtgggggactagcttaataccagaacccgctgccgcttacaggctggggtacttataggtatgggcgggaggggtctagacggtattacttgctgcccggcaggacgttgataacatgttcctgtggtcaggcggttttgccaaggatgttccttgggccttttgcccagcggggtgtgataagaatgtttcttgggcccactgtccagcagaagacgatagggatgttcctgtattcacgtggttaggcaggatgtttctcacagttctaacccccgtggaatgcttcactttgaccaaggtctacaaaatggaaggggggcttacaaaatggtgcacctyggactaacagataggaaaagtctatggccttttgcctggaactgctttttctcacccaagcttcgtcaacaagaattttag

SEQ ID NO: 946210 - DNA, 649 bp, Homo sapiens
tgcgtaggatggaatatagcagccctagaagaaatttaaacccaattatgggaatttatattaaacaacttactggggagctcgactgcaccaaaattatctaagacaaaagaaaaagaagaaatctgctgattaacttgttaaattaaaggaaatatttactgggcaattatattcttgagtatgcttccaaaaaagagcaagcttttatagctggcatgtggttttgagatttaataaaggtaatttgcttggaatagaaattaattcttaatagtggtcagaatagcagctcaacaatgtaaaaaccttataaacacccagggaagctgtggttttttggagaccttatttcagggacagagatccctttatttaagggtcagaactgagaaggaatcttagagggaataaagaatgtaagggacacagaatgcttagggatgcaacaaaatcactgcctcactttgtgcagtctgatgggggtgagatgggccccacagaaagatgaacatgcayggaggaaaagcatccctggaagcacaggactccactagctaatctcatatctcagtgtatactttatatcattttttttctgtttttttctaagaaagaggacaatcaattgaaacatttggaaacaggc

SEQ ID NO: 946211 - DNA, 604 bp, Homo sapiens
tccctttttgcagataatatgatcttagatctagaaaaacctaaagacttgaccaaaaccactcatagatctgatagataaataaattcagtaaagttgcaagatataaaatcaacacacaaaaatcattagcatttctacacaccgataattaattagctgagaaagaaatcaagaaggcaatgtcatgtataatagctacaaaaaatgcataggaataaatttaaccatgaaggtgaaaaaatctctacaaggaaaactacgaaacacagatgaaagaaattgaagaggatagaaataaatggaaagccatcccatgcacatgttttggaataattaatattgttaaaatgatcatacttcccaaagaaatctacagattcaatgcaatctctatcaaaatcctgatgtcatttttcacagtaatagaaaaaacaatccaaaaattcatacggaataaaaaaagagcccaaataggcaaagcaatcctgagcaaaaagaacaaagctagagacatgacactatctaacttcaaattacasaaataaaccaatgaaacacaatagagaaaccagaaataaatccacatatttatagccaactg

SEQ ID NO: 946212 - DNA, 534 bp, Homo sapiens
ccagtggaacagaatagagaactgatatggttggctctgtgtccccacccaaatctcatctcaaattgtaaaccccatgtgtcagaggaggggcctggtgggaggtgataggatcrcggggaaagatacccccttgctgttctcatgatagtgagttctcatgatatctgatggtttaaaagtgtggcacgtcccccttcattctctctcctgctgccatgtaagatgtgccttgcttctccttcaccttctgccatgattgtaagtttcctggtgcctccccagccatgcagaactgtgagtcaattaagcctcttttctttataaattacccaatttcaggtatgtctttatagcaatgtgagaatgaactaataagaactcagaactaaaatcacacacccacaactatctgatctttgacaaacctgacaaaaacaagcaatggggaaaggattccctattcaataaacggtgctaggataactggttagccatatgcagaagattgaaactggacctcttccttacacc

SEQ ID NO: 946213 - DNA, 534 bp, Homo sapiens
ccagtggaacagaatagagaactgatatggttggctctgtgtccccacccaaatctcatctcaaattgtaaaccccatgtgtcagaggaggggcctggtgggaggtgataggatcayggggaaagatacccccttgctgttctcatgatagtgagttctcatgatatctgatggtttaaaagtgtggcacgtcccccttcattctctctcctgctgccatgtaagatgtgccttgcttctccttcaccttctgccatgattgtaagtttcctggtgcctccccagccatgcagaactgtgagtcaattaagcctcttttctttataaattacccaatttcaggtatgtctttatagcaatgtgagaatgaactaataagaactcagaactaaaatcacacacccacaactatctgatctttgacaaacctgacaaaaacaagcaatggggaaaggattccctattcaataaacggtgctaggataactggttagccatatgcagaagattgaaactggacctcttccttacacc

SEQ ID NO: 946214 - DNA, 652 bp, Homo sapiens
cagggataatttgatttcttctccaatttgaatgccttttatttctttctcttgcctgactgctctggctaggacttccaatattatattgaatagaagtggtgaaagtaggcattcttgtcttgttccarttaaaggaaatgcttccaacttttcctcattagtatgatgttggctgtgggtttgttgtatatggcctttattaatttgaggtatgttccttctatgcctcatttgttgagtttttatcatgaaggggtgctgaattataccacatgctttttctgtgtctactgagatgattatatggttttatccttaattctgttgatgtgatgtatcatgtttattgatttgtatatgttgaaccatccttgcaatccctggtaaaaacccacttgatcaaggtgtattatctttttgatgtactcttgggtttggtttggtagtattttattgagtctatttggcccatattcttcagggatattggtctgtggttttctttttttgtgcatctttgtctggcttggtatcagggtgatacagtcctcatagaatgagtttgggagaattttctctcttcaatgttttgggacagtttcaggagaattagtgttactatttccttatatgcttagtagaattcagc

SEQ ID NO: 946215 - DNA, 622 bp, Homo sapiens
gtcgatttacatgcaaggttaatattgatatgtgaggttttatttctgtcataatgttaattattacctagttgctttgtagtctcaattgtgtaatagctttataagatctgtgagttttgtacttttgtgtgcttttatggtggcaagtatcgtcctttcatttctatgttcagaactactttgatcattccttgtaggtctggtctagtggcaacaaattccctttatgtttgcttttctgggaaagactttatttctccttcatttatgaaacttagcttagcaggatacaatatcttggctggcaggtttttttccttaagaagactgaaaataggaccctactctcttctggcttgtaagatttctgctatgaagtactttataggtgattagatgcttctctcttgctgcttttaaaatttttttccttcctagtgactttggatagtctgatggcaatatgactagttgagatttgtcttgcaaagttcaacaaggcatgttgttctctgagctttctttaacctctcagtctttctttatgtmtaagtctctagcaagactggggaaattttcctgaattatttcctcaaataggttttaaaagatttttaca

SEQ ID NO: 946216 - DNA, 606 bp, Homo sapiens
tccaatttctccaccacttaccaacactgtgattgtccatctttttttttaattttgagacagggtctcagctctgttgcccaggctagaatgcagtgatgcaatcacaggtgactgtggccttgacttcctgggcccaagcaatccttccacctcagcctccagagtagctgagactacaggcatgcgacaccatgcacagctaatttttaaattatttcttggtagagactgggtctcactatgttgcacaggtctcaaattcctgggttcaagcaatcctcccagatttggcctcccaactcaggcctgggattacaggcatgagtcactgtgcccagcctatccatcttttttattttggctatgctagtgggtgttaagtatctcactgtagttctgacttgcatttccctaatgactaatattttttcatgtgcttatcagccattaatatatctttggaaaaatgtttattaaagtcctttgcccatttgaaattgggttatatttttattgttgagaggtaagagttcttcatatattctggatacaagtctcagtatccagtaagatatatrctttgcaaatattttctctcattct

SEQ ID NO: 946217 - DNA, 427 bp, Homo sapiens
ttatagataacacgggcaaatggaaaaccatctcatgcrcatgaattggaagaatgaatatcaatgactatactatccaaagcaatctacagtttaagtgcaatctctatcaaaataccaatgtcatttttcacagaattagaaaaaaaaatcctaaaattcatatggaatcaaaaaaagagctcaaatagacaaagcaatcctaagcaaaaagaacaaatttggaggcatcacattacctgacctcaaattatactacaaagctacagcaaccaaaacagcattgtactggtatcaaaatagacaacagattgacagaacagaatagagaacccagaaattaaatcacacatccacatccacctgatctttgacaaagttgttgtcaaaaacatgcactggggaaagggcacccttttcaaaaatg

SEQ ID NO: 946218 - DNA, 427 bp, Homo sapiens
ttatagataacacgggcaaatggaaaaccatctcatgcgcatgaattggaagaatgaatatcaatgactatactatccaaagcaakctacagtttaagtgcaatctctatcaaaataccaatgtcatttttcacagaattagaaaaaaaaatcctaaaattcatatggaatcaaaaaaagagctcaaatagacaaagcaatcctaagcaaaaagaacaaatttggaggcatcacattacctgacctcaaattatactacaaagctacagcaaccaaaacagcattgtactggtatcaaaatagacaacagattgacagaacagaatagagaacccagaaattaaatcacacatccacatccacctgatctttgacaaagttgttgtcaaaaacatgcactggggaaagggcacccttttcaaaaatg

SEQ ID NO: 946219 - DNA, 567 bp, Homo sapiens
atcctgccctttgtgggataattggattgtcttgacttttttattccatctcttycacttaattttgctgaatataactctagattgataggtttttctttcaatactttcaataactcacttcactctcttgtttatatggtttctgactagaaatctatgctaattcttattatcgtttctctatagataaggcattatttcccctatgggttctttcaaatatttttctgtctttggttttctaaagtttaaatatgatgtagttctcctacttggtgttctctgagcttcctgaatatttggtttagtgtttgtcattaatttggaggaagttctagccattatttcttccaatgttctcctactctgttctctcttcttcttcaggtattccaattaggcatgtgttatgccttttgattgttccttagctcctcaatgttgtgttgttttgtttgtttgttttacttgtttgttactttgcacttcgggttgggaagtttctaatgaccaatttttaggctcactgattttttcctttactgtgccaagactactaatgag

SEQ ID NO: 946220 - DNA, 678 bp, Homo sapiens
cttgaaacaatacctggtctccaaataataccttttatatagacctggaatttacttccaattgtctgatttcctctggtcctcacagcagttctgtgaggaaggtattaaggttcctagtattaaggaaggaagctgaggctcagagggcttagtagctttcttagagtcacattaagacaggaaaagggggctgaatgagttatacggaagtatgtattgagcacctgctgcctgccttggtgtgcgtggccctgaaaacaggtccgtatattaggcattgccatcgctatggtgtaatttttacagataagcaaactgaggcacagtttaagcaccttgcttaagcaggaatggctggtccaggatatgaaccgaagtcggatggcaagctcattggtttccactattatcatttgcaaagaaatctggatgtgaagaattctataaatcctcagagaatgctgagcgctcttcagacctccttacagagaagagggaatcactcagtggctggagtgggatgtgggaagacctgggaaagtacaaagaagtgacaggattcagaagccatgggaagtatcagaaaaatccatcagggctcagcmcaagcaacagaaagtgttgtagggattttatgcagaaaggtgcttaagacgtggctttaggtttcgagaa

SEQ ID NO: 946221 - DNA, 768 bp, Homo sapiens
ttcccattgccagagggaggaaccgccccctcaaccccaaacaatggtgcagcctctcagtcctccatgcaattagcaaggtccaatgaactaggaagggaaggaatgcgctaagagtgatgagactccctatgcctgtatggggatctgcggaggcaaaaaactgagacataacagggccccgagccacaggatgtgacaaatgatccccaccttttgcctctgagaacaatagagaaggagatttttgtgggcaggatctgatcacaattcacatcacttattcactccctcattcaatcactatttattgagccttatgtggactaggcaccacaccaggcacaggagtagatacagcagatacagtggcagatgtagtccttgttcttggagagcttacatgcttattgaaaagacaaaaaataaataaataaacagataaaaagaatgagtactacgaataaaatgcacgaccaatggaattgaggataagatgtggggtgcaggggagattggacttcagttggtagaaaaggcttctttgaaagacactgaggccgggaacagtggctcatgcctgtaatcccaacactttgggaggccgaggtgggcggttcacgaggtcaagagatcaagaccatccyggccaacatggtgaaacgccatctctactaaaaatacaaaaattagccaggcatggtggtgcatgcctgtaatcccagctacttgggaggctgaggcaggagaattgcttgaaaccgggtg

SEQ ID NO: 946222 - DNA, 663 bp, Homo sapiens
atgttacaggaatgtaagggtttgttgactttctatatgctgacttcataagatgtcactccatgacccttagacgtataggtgtcaraagaccttcacctataatcacctgtggcagggcactgtggggatgtaccatcttataggagtggacatggggctctggaggcagagtgacttgcctgagaccacatggatggctggggagttcattctgactgcaccccacgtcttttcactccaagtctggagctgcctcccctgctcctacacggcctattattagcaccatgggagcccaccaagcttcttcctgcctcagccagttaccatgctgtctgtccagagacctgcactcacggccccctaagttgctcttggcaatgcttctccttccctccaattgctattcctgctggtggctgctcacccaatcccagaccaccaccctccaggcctggtcggctctgtgctaatccactggaccctggctgctttggggctgggacacagacggcccattgcatcctggtttctgagaggagactccctttggccagccccaggttcaaatctagctcatctatttaagagaggcagaggacatccaccccactcacagctcccaacagaaacatcccttgcggcattctctgtggcagg

SEQ ID NO: 946223 - DNA, 606 bp, Homo sapiens
tcagagaggtaaattctcatacctgagcaacagatttttaagggagggcaacactcccatactgtaccctgaatgagctgtagcttcactctgcaccctggagaaatctctacatactgctgctttctgtacagagactgagtgtccactcacgccagcctggtgtgggctcaacaggaccagaggctggtggagtggacaaagattcgaagacacttggaaattcactcggtatagaatcagagacctgggttcaaatccaagtggtgctactttctaaaagtgtgatctggggcaatgaaatcaatgacaatgatttaactgtcccagttgtgactcagtttcttcctctctaaatggggctataataattattattacacacttaatttagtgattatcctgatccaggcattgtgtttagcatttcacattatactaactcatgtaatcctcactgcaaccctatgaggaggtattgttattattattattaggaggaggagggggagtattacagataagttactgcccacggtcacacagctgctgtcmccgtggcaaatctgggatgtccaccaaggcagcctgcagcctgctccagaa

SEQ ID NO: 946224 - DNA, 595 bp, Homo sapiens
ggtcaaggtaattgagtttcatcatcaaggtaattgagcttttgtcatctatactatcctcacctgtactctaagtgtaagggactgagagtaccaattgtacttcataagaattgtgaggattacatgagttaatatttacaaagcacttagatcagtgtctgacatgtgtaattgctatgtgttagctattattatttaaatcatacatgtattcaaagattttaaagtgcttttgtaggaaaaatacttaattcatgtaaatacagtacgtaagaacccagttggaaataatacattctagttacatggtaatgtgataaccttttaaaaagcataaaatataacagctaaaaagaactatactgctaataataagtagtggtacatgtaggcaagcaacaggacacaacatagctagtaaataaatcctcactcactatatatgaaagcaaacaccagtaaacattggtatccaaacctgtgtccccaagaacaccctcaggtttgatgattcactaggaaatctcacaggactcagcrtctagtcttattcatggctatgatgtattacagtgaaaggatatagagcaaa

SEQ ID NO: 946225 - DNA, 727 bp, Homo sapiens
gcaagggagcagaggccagcaggggctgcctggagcctggggactctaccccaaccctagcagcgggaagagagggcggggccctcacctgctcaaactcgtcagtgatggtcttgggctcctcgtgcctctggaaccacatcatgtacttggtgtggaatcgccatgactgcttctttagggccttggctgccagatactgtgccttagtgccctgggggaggaacagtggagagggggatcagggggccccaaactgggtggggagccaggggaatggggcaggacatcagggctgaaccccggcccccgccacagaccacagttgggctggacaatcctcttggagatggggctgggggcacagaacataccaatgctgatcaggagaaggaaaatgagacaggaggtgaaaattgctttcagagaagctttgagaaggaagaaaaactaatgtgtgatgagagctgagagaggaggcatttagaaaattcccaagtgggaatgagggtggaggtcactcatgactcactgggggttgggagggggctggacaggctccccagtggtctccagggaggcctgagaatgtgccratgagcagagtggggtcggcctagactggggctgctggagcagggctggggaggagccgcgggtgagccagtgggcaactggaagcggggctgaggtgtgcctcagtagaccagcctcgctgtcaacccaa

SEQ ID NO: 946226 - DNA, 699 bp, Homo sapiens
agaatgtgatctcagctccctgcatggatagcatgatgcagatgcttacccaaaaccctaactttgatgcttagatgccacttttttggggaatccctaagtgcaggagcagctctgcctgcagctctcagtcttcttgtaacagatgcagaatgtggagtcactctcactttttgtcaattcttgcagatgctgttgtagatacagcagggactggagacttagtggactgaggcttctggctggtacccagccttgatttctttgggatgtttcagactccagcacccttggcagacagcagcttcaggtctgtgcccaagtctcccagctctttcccagccatgccaggcacaacttccctaacaggtcttctgatgcccagcagtagttcatgaagtagatgacccagcttttggctggatgtggaaactcactggtgcagacactagaagtgaaatttcagcagcaactgcaactggagcagctcaacaacatgagctcaatggtggggccaacctgtaggccctgattgccaaaggagaagacagcaactcagctattgagagactcctgagctccctgctctcttattcccttcgcctgtgcctyctgcctctccctcacttgatgctagcattcggttcctctgtcacatcttatcctctgcagttttctgtcccttctctcttctctctc

SEQ ID NO: 946227 - DNA, 607 bp, Homo sapiens
atcccttatagacaagcaagtgctgagagattttgtcaccaccaggcctgccttacaagagctcctgaaggaagcagtaaatatggaaaggaaaaaccaataccagtcacagcaaaaacataccaaaatgtaaagaccatagacactatgaagaaactgcatcaactaatgggcaaaataaccttcgagcatcataatgacaggatcaaattcacacataacattattaaccttaaatgtaaatgggctaaaagccccaaataaaagacacagactgacaaattgtataaagagtcaagacccatcagtgtgctgtattcaggagacccatctcacgtgcaaagacacacataggctcaaaataaagggatggaggattacttaccaaacaaatggaaagcaaaaagaaaagcaggacgtgtaatcctagcctctgataaaacagactttaaaccaacaaagatcaaaaaagacaaagaagggcattacatgaaagtaaagggatcaatgcaataaaaagagctaactatcctaartatatatgcacccaatacaggagcacccagattcacaaagcatgttcttagagacctacaaagagacttag

SEQ ID NO: 946228 - DNA, 640 bp, Homo sapiens
actgcctgttgccacctctactgctaaaatttttattccagccaccaccatctcttacctgggtaactgcaacagtctgtcatctacactygcagtttcccctcttgttctatttacagcagcctatccttcacacagtaaccagaaaatctttctggatcttaaatccaaacccttccttctcctccttaaaaccttcaataccagaccacatgtggtggctcatacctataatctcaacactttgggaggccaaggcaggcagactacttgaaaccaggagtttgagaccagcctggacaacatcgttttgcccatctctacaaaaaatacaaaaattagccaggattgatggtgcacacttgcagttctagctacttgggaggctgaagtgagaggatcccttgagccctagaggtcaagtccagcctgggcaatagggtgagattctgtctcaaagaaaaaaaaaaaaccttaaatatcttcccactgcaatcaaaatataaatccagaatcctccaagatcctatatattttgacccctcatgctccttgggcctcatttccctgcactgtcccatttattctctatctttaggcacacgcactctcagacatgcctgctcacaccctggagcct

SEQ ID NO: 946229 - DNA, 475 bp, Homo sapiens
gaaaaactttcctgtataagtacctacagtgttggttgcgtagggtgctttgtcttttattctggtggggcataacaatgtagtctttctgtaaactttttggttgtaatcagaatcaatggtgtccstgagaccctcagtggcctgggctgtagttggtagtggagactgtgtgaggctttgcttgagactaggtatgccagacaagctggtcatcaaggaccagtggtagtaggagtggagtggacaggcccttgggcttctaaatggcacatttgtgagggtaatagtggtggtaagggcactcatggtagcagtttctagtgggccagtccttgggcctttaagtagcttactgaggtgctagcagttgcagcagtaggctggatgggaaggtgggttctctggctcctagatatatgtgtggcattggcagtttagttgcagctgctggccaactctcaagcccccatgt

SEQ ID NO: 946230 - DNA, 642 bp, Homo sapiens
acacacacacacacacacacacacacayacagagttgacccttgaacaaagttttgaacttggagggtctgtttatatgcagattttcttccacttctgccatccctgagagagcaaaatcaaccccttctcttctccttagcctactaaatgtgaaaataataatgaagacccttaggatgacccacttccacttaatgaataacaaatatattttctcttcattatgctttccttcacattttcttttctctagcttactttattgtaagaaaacagtatataacacatacagcatacaagatatgtgttaattgactatgttattggtaaggcttctgtttaacagtagttgtattagtcagagttctctacagggaccaaagtaataggatagatgtatacataaaggggagtttattaaggagtattgactcacatgatcacaaggtgaggtcccacaataggctgtccgcaagctgagaagcaaagaagccagtccgagtcctgaagctgaagaacttggagtctgatgtttgagggcaggaagcatccagcatgagaggaagatgtaggccagaagactaaaccagtctagttttgccatgttcttctgcctgcttttattctggtcatgctggc

SEQ ID NO: 946231 - DNA, 646 bp, Homo sapiens
gaaaaatgcagcagaatggacattatcttgtgttttattccaggagagtagagaatacaaatttcagagctgaagaaaaagacatttatcccgccagctctggggcgggaagcaatatgctttatacttcatttctattctaaccatcaggtctccaacagtttccccttaaaatacaaaaatgaaaataaattgcattcaaatgtacaatgaaagataagaaagatctggtttgtttttgttatttctttatagttcaaatatgtctgaggctctttttttcagaatgacaagtgctcatggtctaaaatgcagtcagtctgtgtctcccagatggtttagcaatcagcaagttgctgtgctgcattttgagggtaaaataaagtcaggtgggggcagggtcatgccagcattcttgtacagactacataggggacaaaacacacaacctgattggggttagggtccacgttcactcaatggcatgatgaaatcacatattatcctcaggggtcctyccagagatgctcccaggaattgcatggctccactctattcccaccactctctaaacatcaagtccagcctaacataagactggtaaatgtcaagaattttgtctcctttcaaaaatgtcttcatgtaa

SEQ ID NO: 946232 - DNA, 563 bp, Homo sapiens
ttaataattttaatgaagaaggattgactgggtggcatgtggagtgggactgatattgggcatgrtatgtgtagtttgatgagcaggggatctctcaccatctgttttatatggcctgggttcactgtggtgcagctacaaaagactcccaaagctttaccgagttggcaaaatggttctatagcttgaaagacattgttttcatggtgacctccctcacattcatggattatttgaattttgtagacactagccagaccaaatgtcaactgtactagaggctaaagcttttctcttgggtaagctcaagatacactacatgaagccctagtttcttggagctacagcttagctaaagaaatataatgcatacagctaggcatggtagctcacacctgtaatctcagcaccttgggagactgaggcaggtggatcacttgaggtcaggaattcaagaccaccctagccaacatgttgaaactccatctctgttaaagacacaaaaattagccaggtgtggtagtgcatgcctgtaatcccagctactcaggaggctgagacag

SEQ ID NO: 946233 - DNA, 563 bp, Homo sapiens
ttaataattttaatgaagaaggattgactgggtggcatgtggagtgggactgatattgggcatggtatgtgtagtttgatgagcaggggatctctcaccatmtgttttatatggcctgggttcactgtggtgcagctacaaaagactcccaaagctttaccgagttggcaaaatggttctatagcttgaaagacattgttttcatggtgacctccctcacattcatggattatttgaattttgtagacactagccagaccaaatgtcaactgtactagaggctaaagcttttctcttgggtaagctcaagatacactacatgaagccctagtttcttggagctacagcttagctaaagaaatataatgcatacagctaggcatggtagctcacacctgtaatctcagcaccttgggagactgaggcaggtggatcacttgaggtcaggaattcaagaccaccctagccaacatgttgaaactccatctctgttaaagacacaaaaattagccaggtgtggtagtgcatgcctgtaatcccagctactcaggaggctgagacag

SEQ ID NO: 946234 - DNA, 739 bp, Homo sapiens
ttgagctgggcctggtggtgtccacctgaagtcccaactacttgggaagctaaggtgacaggttgccttgagcccaggagtgccttgagcctgggcaacagagtgaggttctgtctctaaaacaacaaaaaawttaaaaaataaataaaatttttaaagccatttttgaaataatcaagaactgtgattctggactgggtgtcagatgacattcaagtaatactgtaatctttgttaggtatgatatgctgtgttctgttaaaacaaacagggaaaggagtacaaagggaaggaaaggaaaggaacgcttatcagttggaaataaatcctaaaatgctttgggtaaactaaaaatgtcagccagggattcttttttttttttttttttttttgagacggagtctcgctctgtcgcccaggctggagtgcagtggcgggatctcggctcactgcaagctccgcctcccgggttcacgccattctcctgcctcagcctcccgagtagctgggactacaggcgcccgccactacgcccggctaattttttgtattttttagtagagacggggtttcaccgttttagccgggatggtctcgatctcctgacctcgtgatccgcccgcctcggcctcccaaagtgctgggattacaggcgtgagccaccgcgcctggcctcattttaaaactaattcctaattcactatcccctggatctgccaggacaacacaggctctttag

SEQ ID NO: 946235 - DNA, 556 bp, Homo sapiens
aaggccttgcttccaaaaaaagatatgccagtggccaaacaagcatatgaaaaggtctcaacatgattagccatcagcaaagtgcaaattcaaaccacaatgagataccactacatacccattcaaatggctaaaattaaagatcaacaatactaagtgttgaagagaatgtgaaacaactgaaactcccacacattgttcttgggaatacaaaatgattgtatcattttgtatcttgtgaaagaatgttcacagtagctttatttgtaataaacaagtgtgtcctttaattgtactggtggttatgcaagtatatacatttattagagctcatagggttgtaacactttaaatgggtgcattttattgtatttaaattatggcagaatagagttgatttaacaacaaggaaagctgtttctcttaaaggtaaacattaacttactatatgactcaataactctactcctaggttttgttscaggagaaatgaaaatgtgtctgcagaaagaatgttcacagtagctttatttgtgataaacaaaaactgaaaaca

SEQ ID NO: 946236 - DNA, 412 bp, Homo sapiens
gcctctttccctttcgtaagtctcccccaggggtaaaggttttctgtgccrtgtcatggtgccaaggaaacatctgctgccctcacacctatctaaggagccagggctctgtctgcctagacaaagtatagtcatctttttgaagtttggccacattcttgggtgctccacccaggacacggtgcatcggttcttccacccagggttccagtaatcattcttagattttctcatctttcctctacactcatttcttagagtatgtgtgtatgggagtgtggtttgggattcctccttaaggacccacagttgtctcagttaacttgccttctaactcccttttgcccaacgtgggaatccatccagtatcaagggcactcaaactccttgttcatgccccagtctggtcctc

SEQ ID NO: 946237 - DNA, 412 bp, Homo sapiens
gcctctttccctttcgtaagtctcccccaggggtaaaggttttctgtgccatgtcatggtgccaaggaaacatctgctgcyctcacacctatctaaggagccagggctctgtctgcctagacaaagtatagtcatctttttgaagtttggccacattcttgggtgctccacccaggacacggtgcatcggttcttccacccagggttccagtaatcattcttagattttctcatctttcctctacactcatttcttagagtatgtgtgtatgggagtgtggtttgggattcctccttaaggacccacagttgtctcagttaacttgccttctaactcccttttgcccaacgtgggaatccatccagtatcaagggcactcaaactccttgttcatgccccagtctggtcctc

SEQ ID NO: 946238 - DNA, 568 bp, Homo sapiens
actagtcccaatggtagccctgggttttcaaggtaggtctgtctaactccaaatcctttgctataagtcggtgattttcaaactttggtgtcaggactcctttatactcttaaaaattattggagattcctaaaagcttttggaatgcgggttatatctgttaatatttattatattgggaattaaaactgaggaaaacttaaaagtattatttcacataaaatagcaataatgagaacacatggacacagggaggggaacatcacacactggggcctgtcggtgggtgggggttaggggagggatagcattaagagaaacagctaatgtaggtgacaggttgatgggtgcagcaaaccaccatggcacatgtatacctatgtaacaaaactgcatgttgtgcacacgtaccccagaacttaaagtattataaaaaatagcaataatcaacccataacatattaacatatataacttttagagtaaaaattaagtatattttcccaaagaaaaaagtggcrtttttaattttttttacatattgcaatattctttattgtctgcctta

SEQ ID NO: 946239 - DNA, 552 bp, Homo sapiens
atacttatagcaagatgcatcagagtattctaatagctgaggtcttgcagatctgattctgccaactgctctttctgcctctagcatatgttggtcctgtatgtgttctgtatctcttttgtatgtattatgaactcatatttttttgaacttatctgtgatcattccttttaatttaagctgaaggtagcttacatcatggaggatttgcccttgtatcaagtaactgcaggtatcaccagcctggggctattttaaattctgagtgaagttgaaattttttaggtaggaattttgggctgctatgagggccaacttgtagatacaaaaattctcagggttgatatttaacaccaggattgaaatttcccttttggagatctggttttgtttttctactccacctgaattttgagggtgtagtttctttggggataggcagttcctgctctgtgtgggaccatcttctatgtgcctcacttcttgggatggcttgtcattgacttctmtcctctatggcctgtgtgttagtccagtctcacactgatatga

SEQ ID NO: 946240 - DNA, 651 bp, Homo sapiens
gactagaagaaacattgaagggatgctccaagacattggtcttggcagatttttgggctgtgaccttaaaaacacaggaaacaaaaccgaaaactgacaaatggtataacatcaaactgaaaagcttctgcacaacaaaagaaacaatcaacaaagtgaagagacaatccacggaatggaagaaaatatttgctaactatccatctgacaagggatttataaccaaaagatctgactagatatttctcaaaagaagacaaacaaatggccaacaggtatatgaaaaggtgctcaacaccactaaccatcagagaaatgcaaatcaaaactataatagatatcatctcacaccagttaaaatggccttcctcaaaaagattattatctaataaatgctggtgagaaaatggagaaggaggaacccttgtacactgtgggtgggaatgtaaattagaatatccactatgaagaacagtacggaggttcctcagaaacactaaaaataaaatcaccatatgatccagcaattccatttctgagtacatatccaaaagaaagkaaatcaatatatcaaagagatatctgcagcagcttggctcacaggggattgggtcagggtgggaagccacacaccttgtgttcctaatctag

SEQ ID NO: 946241 - DNA, 578 bp, Homo sapiens
ataggtcttggaaactgcaactttaagagaaacgttgtataacaaaatcagttttaccataggctaattgatataaacaatagttaagtttctacagtatatttatggtcacaaaaatcaccaaacttctaaatacttctaatattaactattgaaataaatgtaagctatatgtagaaatgtataaaaagaaagattaataaaaagaagtacgattattgtttatctgattattctacttcagggttgtgggtgtccagagctcaccccagcagctcagggaaccagccctgggcaggacgccatcccattgcagggtgcactcacacacaccctcgcacttacttagatggggactatgtggacacaccaattcaccgaacatgtgcaactttgggctgtgggagcaaacaggaggacccagagaaagcccgcgcagataaagggagcatgcgcaaactccatatagatagtggcccccggcagggaattgatttttttcttcatcaaagttataacaaaayaacattatttgaggacatgctgtacatagacagcttcatttggaaatgaaaacc

SEQ ID NO: 946242 - DNA, 478 bp, Homo sapiens
tgttctgttctttgaggatcttcggatgggaaaggctcaactgtttcatctctgtgtagcctttgtatataattgggtcaataatgcacagtagagctttttgctggcagacccagatgggtgatggagggcaacaacacatccccagtgaaacgaccacaggcggcaattctccacaatcttggcagggccaaggacgtgtgtagttggaaaaatgccaattcatcaagcccattggttttcatatcacaaactatagaaaatgaagctctgctaagtctttggtaggcacgcaggttgaataacatgtaagggatgtctgtaataaaaagttatcaaaggctactttacaagggttcattctgaaagcagcaataaagtcaaatttccccaagctccaatcctgttactgaaaagctkttttatggatgtagagtcacgctaatgtaactatctgtgatgatgaaaatggaattga

SEQ ID NO: 946243 - DNA, 549 bp, Homo sapiens
accatttgcaaagcttctccctactcccaacacacacaccttcctccttcttcctcttctccctttccctctccctctccttttcctgccctttrctgtacaagaatgccttgaataaacaaaacctataaaaaaggaatataaatttggcagtgattatttaattggcctttgatttcatgacaggcaaaaataagttggccctcatatatatatatatttttttttgcaaaaaatgatactttaaatactaaaggatttaaaggatgcttggtaaatatttgttggcttaattcatgaaacatgtggatgttatgtgaaaatacattatctgtatcccaggaataaaaaaaaaaaatatcctttttctggcctagagcataatacttcagccctggggaccccactcacctggtattctacgtatatggtgcccctgcagcagccctgggctcattacaagtaacactgattcttaggtgttttttgcctttttaccaatctctttagaggaagcagatggaaatttagaattttaacagggaatgt

SEQ ID NO: 946244 - DNA, 670 bp, Homo sapiens
atggctccagacccaggcatccctatgctctcaggggctcaggaagcctccttcccccacaagctcagaagtgcctgctcccactccctggcctctccctatscctagcacccactctggtgtggaacacagttgtggccgagcccaggtactggtgcaacccagccaggtgtgtgtatccttggggcagtactgaggcaccagccctctgctacctcggccccttcagactttgggcactaatgagcatgggaggaaggctggggtgctgagggcagcttgacgtgggcctgcagacagcctgggcactgcaaatggcctgttgatggtggcaggaggcagacaggttcctaggtgggaagaagcaggtccctggtgaaaccccatcttcaggccaggcctaaaacctaggggcctggctcccagttccaggtggagttcatgacccagagtgagaacttccttgatgccttttggccagttggatggtgccttttccatgaaccaatcagcatgtacttcctcccttctgagctcataaaaaccccagactcagccagactcagagactcatcaggattacctgcttgtggataggagctacccactttgggtctcctctatactcgttgggaatacctgcctatgaataggagctacccactttggg

SEQ ID NO: 946245 - DNA, 695 bp, Homo sapiens
gtggagaatactacgccttttggcaggatcccgcaaagttytggggagcaacaaggccactgcattcctcatggatagcagggtgtggcaggagaactgaatgcagaaaatgaaatcctgctggcaagtcacacaaaacagatggcagagtacatgggcacatctcatagacatttcaagaactcacagcaatttggaagctccttttatcttgacccccatccccttggggcagtatttccaacacccatggagaagcgagccggtgtctccaatgcccccagtcagccatttggtcctggatgtcttggggactcctgcttgctgcctccactgtgcacagctaggcataaatagccagtcttccaagctgtgctcacttaagatgggattggaggcaccattctcagccaggtctctttcttaaaagagggagtatctgagtcctactagatgctaggcattggagacagaatgcaaataaaaagatgactagaacatagatcatatacattaggagcctccagcctcgccaaacctcttgaaatagttttaagacagggtttcatgctgtcacccaggctggagtacagtggcgccatcagagctcactgcagcctcaatctcctgggctcaagcgatcctcccacctcagcctcccgagtagcttgggactacaggtgcatgccaccata

SEQ ID NO: 946246 - DNA, 796 bp, Homo sapiens
ggctttcccagctctctgctctggctgtgagggagatctgagtcaggtggcttaaaactaccagttrtggccgggcgcggtggctcacacctgtaatcccagcactttgggaggccgaggcaggcatatcacgaggtcaggagatcaagaccatcctggttaacacagtgaaatcccgcctctagtaaaaatacaaaaaattagccgggcgcggtggcgggcgcctgtagtcccagctactccggaggctgaggcaggagagtggcgtgaacccgggaggcggagcttgcagtgagccgagatcgcgccactgcagtcctgcctgggcgaaagagcgagactccgtctcaaaaaaaaaaactaccagttatggccgggcgcagcagctcatgcctgtaatcccaccattttgggaggccaaggcaggtggatcacttgaggttgggagtttaagaccagcctgaacaacatggagaaaccccgtctctactaaaaaatacagaagtagctgggcgtggtggcgcatgcctgtaatcccagctactcaggaggctgaggcaggagaatcactcaaacccgggaggcggaggttgcagtgagcagagatcgtgccattgcactccagcctgggcaacaagagcaaaactccctctcaaaaacaaacaaacaaacaaacaaaacctaccaattatgggattagggtctggacttttctttccttctgtttctaatgggagcagcctgaaaggaatgtgccagctctagggattccaggctagcttgggtctgctcatcc

SEQ ID NO: 946247 - DNA, 438 bp, Homo sapiens
aaaattaaaggggatagctgttactagatagtaagatatatttyaaaattactctaatttgggaatttgataccaacataggaatgagaaaattgattactgaaccagaaatcagaatttatcatatactgattggtatgtgcaattggtaggaaaaggaaagattaattaaatagtctgggaacaaccggcttgaaactaatatactaaaataaattccacagggattaaatacaaaaataaaactacaatagaactcaaagaaaatacaagtaaatattttcccatttaccagaactcatccatatggctcaactcaaccgcaggggaggcttgaaaacgtgtgtggctctttgggaagcactcactgttactgccatagatacctaacctatttctaggaatgagggaaaggatgaaacaaaggattgaaaccga

SEQ ID NO: 946248 - DNA, 438 bp, Homo sapiens
aaaattaaaggggatagctgttactagatagtaagatatatttcaaaattactctaatttgggaatttgataccaacataggaatgagaaaattgattactgaaycagaaatcagaatttatcatatactgattggtatgtgcaattggtaggaaaaggaaagattaattaaatagtctgggaacaaccggcttgaaactaatatactaaaataaattccacagggattaaatacaaaaataaaactacaatagaactcaaagaaaatacaagtaaatattttcccatttaccagaactcatccatatggctcaactcaaccgcaggggaggcttgaaaacgtgtgtggctctttgggaagcactcactgttactgccatagatacctaacctatttctaggaatgagggaaaggatgaaacaaaggattgaaaccga

SEQ ID NO: 946249 - DNA, 648 bp, Homo sapiens
catgggccatttacaaagaccaactacattctgagccataaaacaattctcaatatatgtaaaaagattcaagtcatacaaatatgttctttgaccacaatgaaattaaattagaaatcaatagaagagagataactgaaaaatatccaaatatctggaaactaaataacatgcttctaaataacccatagttcaaagaataaataaaaagggaaattactaaatattctgaactgaatgaaaatgaaaatacagtatatcagaatttgtgggatgccactgatggaactgtatagcaccaaatgcctattttacaaaaaaagaaatgactcaaggcaatgacctcaggatccatctcaggaaataaataataaaaacaagagtgcacattaaactcaaaggaagcagacaacaggaaataatgaagatcaaaacagaaattgataaaatagaagacagaaaaacagtagagaaaatcaacaaaaacaaagctggtcccttgacaagaaaaataaaatggagccaggcatggtggctcacgcctgtaatcccagcactttggaaggcgggacagttggatcacctgaggtcaggagtttgagaygagcctgaccaatatggtgaaaccccatctctactgaaaaatgc

SEQ ID NO: 946250 - DNA, 597 bp, Homo sapiens
agttattaacatatctaaagataaaatatatagatgtaggtgtgcttgctgcttgtgtggatggtggtatagtatggggggagaagagggaaaagcagaaaatgtagaataaaaatagaggggtagtgaagyaaaccttgacattgcccacacaagtacgtatcaggaggcaagaactcttaaataataaattagcctttcatttttagaatgcttccaagttgaaagttctcaagcccctaagaattctctttagtaagtatctaagttaatgagtgttcattctagctgattgcaagttctgtcttctatggccttctctttccctagtatttctgattatccctggaaaattcttacatattccacaaattgatgctggcttcacttatcacctttcctacagacacaagctctggtcttctctttttgatgttgttttctcttttccagtgccacttcactccagtgtgaactaacatttctttcttaatgtcctaaatattttctaactctaatctgtagaagctatcagatctcttctgtgaagtaatatagcattctggttaaatgtgtggacactgatactatgtctta

SEQ ID NO: 946251 - DNA, 615 bp, Homo sapiens
gggacaggctgcctcagatatttcttaaatgcctttaggcctttttttttcattgattcagatattagcacttggatcccctttagtcatgtaaatctctccagcatgtagttgctcctcaaccccacttgtattcttcccctgaaagtattctttccttctctaccacactgccaggttttgactttttaaaacttttatgctcttctttcctttcaaatataagttcccactttaagtcattcctttactcccttatctgatcattggctgttagaggcagccaggtcatgtcttgaatactttactgcttagaaatgtattcttccagatactttaagtcattactcttaagtttaaacttccagagaaccctaggacatgagcttaatgcaggctttttttttttttttttttttttttttttttttttttttgcttgggcataatatgagtgatctttactctagtctcaaaaactttctcatttcygtcacagttcttgtcagcctggcttcactgtccatatttctaccagcattttggttacaaccacttaacaatcctctaagaagtttcaaactattccctacatcttcttgtcttcttctgagt

SEQ ID NO: 946252 - DNA, 615 bp, Homo sapiens
gggacaggctgcctcagatatttcttaaatgcctttaggcctttttttttcattgattcagatattagcacttggatcccctttagtcatgtaaatctctccagcatgtagttgctcctcaaccccacttgtattcttcccctgaaagtattctttccttctctaccacactgccaggttttgactttttaaaacttttatgctcttctttcctttcaaatataagttcccactttaagtcattcctttactcccttatctgatcattggctgttagaggcagccaggtcatgtcttgaatactttactgcttagaaatgtattcttccagatactttaagtcattactcttaagtttaaacttccagagaaccctaggacatgagcttaatgcaggctttttttttttttttttttttttttttttttttttttttgcttgggcataatatgagtgatctttactctagtctcaaaaactttctcatttctgtcacagtycttgtcagcctggcttcactgtccatatttctaccagcattttggttacaaccacttaacaatcctctaagaagtttcaaactattccctacatcttcttgtcttcttctgagt

SEQ ID NO: 946253 - DNA, 572 bp, Homo sapiens
tttgtgatcttgggcaagtcggggagcgtcgaggagccacggtgccttcatctgcaaaatgaggaggtcagatggggtgttggctccactctcttttagcgctaatgatccggctccttaaagtcaattgcttcctctgctcctatcaaagaagtgaggcagagagaggtggggaggggttgcctgctcggatcaaagtgttgcctcccagagcccttgccttcagcctgtgggattttctcatcctgcctcttaaaaactaaaaggaagagaaatgtgacaattgaagacctttgtggattctggggtgggacttgatcaatacttgatcacctactcagagcctaagcataagctcctctttggggaactagagaggattagtcaaaagaaagaagaaaggaataacaataatcataaagagacgattcatttccagctcttaagaaagtcatattctaattgctcagtaaagcataacattatcgaacccttactatgttctaagaaatgartgttagataaatgtggtatatcatttaattctcttttaaaatgctaaatactttcct

SEQ ID NO: 946254 - DNA, 653 bp, Homo sapiens
attagacaacacagctaaaatagaaaacttaatagaaagaccagaaaataaggaatcttcaaatatcctttttttttaaaataacagagttggaacataggaaagaaaagttgaaatgtcaggatcaatccagaatatctaacatctgactaatgctaattacagaaagataaaacagagaggagaaattatcaaagacataatcattatttttgaaaaaattttctagaaggaaagaacacgagttccaggattgaaagtatacaggaaaaaaaatgatgagaaaacagccatagaaagttatatcagagtaaaatttcaactcattgggataaggaaaaaatttaaagcctctatggaaaaaaattaaaattttcttccaaggattggatcaaaatggcatcagacttctcaacagcaacacagaatattagaaaacaaagaagccacatcttcaaaattctaaaagtaattttaacatagaccactatacccaaccaaactagccaaataatgtgaagatagaagaaaggaaaytttagttaagcaagaactcacaagttttatgttctgtgcaccatttcttaggaagctggaataggttatgctccatcaaaacaatagattaaacaataagcaagcaagcaagctag

SEQ ID NO: 946255 - DNA, 561 bp, Homo sapiens
ctggaggcagggagatcagggaggaggctctcgtacttctccaggtgagagaagacatcagcttgaaccagcaggacagtggcagggaaatgtgaagaaagggaagatttgagaaataccttggtccaagaggtgcatcaccctgtggttggctggaggagggtgggagagggagggcctaggctgactcccagggtcctgaccatccaggtatttgcctggatggtgatgccattcactggaatggaggacacaagagatgatgagagaggtttttggggaaaaagggtaagttcaggtttgagctcccagcatttgacataggtggacatgggtgagaaatctaagaaaaatattcagcaagcagttgaactgaaggcttttaaatacagaagagagaaattggaggtgtagatggttgtcaaagtcatagaaaaggagtggtatccgtcaggggcacgtgcaacaacagaagaagcttgagggcagaaccccgaggaacaccaacatgtkggggggggacacgtaaaggtgtctgcaaaggagaacccagagacatag

SEQ ID NO: 946256 - DNA, 633 bp, Homo sapiens
aatgactgcatcatctctctagcaagggttcagaactgggctgaggctgagatggctggaatgatacccaatacaargagctaaaaaccataataaaacaatgcaagatctgacagacaaaatagccagtctagagaagaaaataactgacctgatagagccaaaaaacacactacaagaatttcttaatgcaatcacaagaattaatagcagaatagaccaagcagaggaaagaatctctgagttcaaagactggatttctgaaataagatcggcaaacaagaatagggaaaaaataaataaaaagaaagaacaagacctccaaggaatatagaattatgtaaaaagaaaataatctgtaactgattggtgtcccagaaaaagatggggaaaatggaaccaacttggaaaacatagtcaggatatcatccatgaggactttccaaaactcgctagaaaggccaacattcaaattcaggaaatgcagagaacccaagtaagatacttcacaaaaagatcatcctcaagacacataatcattagattccccaagggtgaaattaaagaaaaaatgttaaagacagctagaaataatagttaggtcacctacacaggaagctcatcagactaaca

SEQ ID NO: 946257 - DNA, 633 bp, Homo sapiens
aatgactgcatcatctctctagcaagggttcagaactgggctgaggctgagatggctggaatgatacccaatacaaggagctaaaaaccataataaaacaatgcaagatctgacagamaaaatagccagtctagagaagaaaataactgacctgatagagccaaaaaacacactacaagaatttcttaatgcaatcacaagaattaatagcagaatagaccaagcagaggaaagaatctctgagttcaaagactggatttctgaaataagatcggcaaacaagaatagggaaaaaataaataaaaagaaagaacaagacctccaaggaatatagaattatgtaaaaagaaaataatctgtaactgattggtgtcccagaaaaagatggggaaaatggaaccaacttggaaaacatagtcaggatatcatccatgaggactttccaaaactcgctagaaaggccaacattcaaattcaggaaatgcagagaacccaagtaagatacttcacaaaaagatcatcctcaagacacataatcattagattccccaagggtgaaattaaagaaaaaatgttaaagacagctagaaataatagttaggtcacctacacaggaagctcatcagactaaca

SEQ ID NO: 946258 - DNA, 758 bp, Homo sapiens
agaatgggacagagtacaaaagagagaaatttttaaaactgggattccrggggagacatcacatgtcagtagtttccttgatgccccacaagctgcaaaaccagtaagtttttattagggattttaaaaggggagagaatgcatgaatagggtgtgggtcacagagatcacgtgcttcacaaggtaatagaatatcacaaggcaaatcgaggcagggtgagataacaagaccataggacccaggcaaaattaaaattgctaatgaagtttcaggcacaattgtcattgataacatgataacatcttatcaggagacagagtttgagagcaaccggtctgaccaaaatttgttaggtgggaatttcctcatcctaataagcctgggagcactatgggagactggggcttatttcatccctacagtctcgaccatagaagacggccacacccaagggggccattttagtggcccaccctcagggggcgcattctctttcttagggatgttccttgctgagaaaaagaattcagtgatatttctcccatttgcttttgaaagaagagaaatgtggctctcttccacctggctcactggtggtcagagtttaagattatctctcttattctctgaacattgctgttatcctgttcttttttcaagatgcccagatttcatattgttcaaacacacatgctctacaatttgtgcagttaacgcaatcatcacagggtcctgaggcgacatacatcctccttgg

SEQ ID NO: 946259 - DNA, 603 bp, Homo sapiens
cctcattcattctgttctcctggtttcaaattctctatatcctttctattgtcatgaaaattaaataaaaggcatatggggcttagtactgaagctgactcgcggttacactcaattaagtgtgaactgctattaaacccatcactccccacttctcttccattagatatctctgactggtctaattacattgaagtctcctatttggctagtcctaccaaagtactgacatctctcaatcagctatcttactgaataaagtatcagtgttttcgaacttaaaaaagcaaagttggtagacatctctcaagtggctgtagaagtgcaaagactcctccattctttgaaagaacaagtctctacctttaaaaacattcttatttgttcagaagaacaacttctattatagacatgctttgctcttttaaaggtgctattaaaaattatcccattttacaaacttggttttaacctcattttacatgcgagaaactaagtgagagaaattaaaatggcttgtacaagaacacataagaaatcactcataatgccrgactgtggactgaggtttccagactccctctagacttggcaaacttaaga

SEQ ID NO: 946260 - DNA, 603 bp, Homo sapiens
cctcattcattctgttctcctggtttcaaattctctatatcctttctattgtcatgaaaattaaataaaaggcatatggggcttagtactgaagctgactcrcggttacactcaattaagtgtgaactgctattaaacccatcactccccacttctcttccattagatatctctgactggtctaattacattgaagtctcctatttggctagtcctaccaaagtactgacatctctcaatcagctatcttactgaataaagtatcagtgttttcgaacttaaaaaagcaaagttggtagacatctctcaagtggctgtagaagtgcaaagactcctccattctttgaaagaacaagtctctacctttaaaaacattcttatttgttcagaagaacaacttctattatagacatgctttgctcttttaaaggtgctattaaaaattatcccattttacaaacttggttttaacctcattttacatgcgagaaactaagtgagagaaattaaaatggcttgtacaagaacacataagaaatcactcataatgccggactgtggactgaggtttccagactccctctagacttggcaaacttaaga

SEQ ID NO: 946261 - DNA, 587 bp, Homo sapiens
tctattattgtatttttgatctaagataagctgtcttttttaaacaacttgttatatctrtaagatgttttttgtaagcctcatggtaaccacaatacaaaaacctttaatagattcactaaaaattaaaagcaaagagttaaaacatactaccagagaaaatcacttacccacaaaagaagggagcaagaaaggaagaaggaaaaagaggcgttacaaaacaatcagaaaacaagcaacaaatggcaatagtaagtccttacttatccataataacacaatgtaaaatggacttaaatctccaattaaaaggcatacagttgctgaatggatgaagaaacaagacccaactctatcctacctgcaagaaacccacttcacctataaggacacacataaactgaaggtgaaaggatagaaaaagatattctatgcaacaggaaaccaagaaaaagcaggagtagctatatttatgtcagataaaatagactacacgtgaaagactgtaaaaagagacaaagaagatcactatataataataatggggtcaatacagcaagaggaactagcagttataaatatgtatg

SEQ ID NO: 946262 - DNA, 587 bp, Homo sapiens
tctattattgtatttttgatctaagataagctgtcttttttaaacaacttgttatatctgtaagatgttttttgtaagcctcatggtaaccacaatacaaaaacctttaatagattcactaaaaattaaaagcaaagagttaaaacatactaccagagaaaatcacttacccacaaaagaagggagcaagaaaggaagaaggaaaaagaggcgttacaaaacaatcagaaaacaagcaacaaatggcaatagtaagtccttacttatccataataacacaatgtaaaatggacttaaatctccaattaaaaggcatacagttgctgaatggatgaagaaacaagacccaactctatcctacctgcaagaaacccacttcacctataaggacacacataaactgaaggtgaaaggatagaaaaagatattctatgcaacaggaaaccaagaaaaagcaggagtagctatatttatgtcagataaaatasactacacgtgaaagactgtaaaaagagacaaagaagatcactatataataataatggggtcaatacagcaagaggaactagcagttataaatatgtatg

SEQ ID NO: 946263 - DNA, 610 bp, Homo sapiens
ataagagtagaagtggaaattgactatttaggtggcttttttcttttttgttctttttattttaggtgacgtttttctaggccacaaattgtagtggcttgggccaaggagatattagtggagatgatgataagtggttccattctgtatgtaccattgatccttgaaaacacaagagttaggggtacccctgcacagtcagaaatcagtgtattacttttgactgcctcagaacttgactactaatagcctcctgttgactggaaaccttacagataacataaacagttgataaacacattttatatgttatatgtattatatacagtattcctacaataaagtaagctggagaaagaatgttattaagaaatcataaggatgagaaaatacatttactgttcattgagcagaagtggatcatcataaaggtctttgtccttgtcttcacattgagtgggctaaggaagagaaggggttggtcttgctgtcttggatggcaatggcagaaaaggtggaaggggaggcaggagaggcaagcacactcagtgtaacttttattgaaaaacattcrtgaataagcagacccatggagttcaaacacatgttg

SEQ ID NO: 946264 - DNA, 626 bp, Homo sapiens
ttctcagtaatgtgaaagcctaatgatttaccatgagaactctcatataattgccctgtttgataagagaaatgagcaggaggaaggttgtggtgaaggactctgctgaagctttcccagggattcrtctagtaaagctttgactttctcaaaatattctcagaataaggagatactgtcattctccagaaagtcaaccagcaaaatgacttgagctttccaataaactcttgccaagatctttgtgctctcctcatccacttttgttttgactggacatttccgcctcttggtagccattgctttgattgtatttgttttctggattttactggtaaagtcatgtgttatctcctcttataattcattgaagaaatgcttatggtcttcgttcttcctatttaaatttttagggaaagttctgctcttgtctgtacttgatcttggtgacacagtttgggcatccattaagtgaaaagcttactaaactttaatcattcagttagattcatgtaaactgaaccaactgagaagtctgcagtgttggttattgtgtgagctgctaatcatcacacctcttctcctgggtataaagaagatgaatttattccttgcaatatgatgtg

SEQ ID NO: 946265 - DNA, 654 bp, Homo sapiens
atttaattacaatctgggtaaactgaacaaccagtgtcactgtcattcatctgtggctatgtagcatattttgatagaaggtaattgaacttttgccatcaaataacaaacaggggagaggctgtttgattggtgagcaaaggccaaactttggactcacagagggctgaactcttatcctaattgtgccataaaataacgtgatttttctcaagccagcttacctctctgagccagctttctctcgcataaaaaaggagagtaatagccactgttcactgggtaccatgtacgtaagactgtgcctcagcgctccacattgccttactaaatgacataaagtgaacagcacacacacaaaagacctattgcaccagttaggataagccaacttcaaacatctgtcacccggagacagagcagttctggagctggctaattcagcagctcaaagtaatttttatagcgatactctctgccattcttaacatgtaaacaatgacactatcatagtctcaggtgatggcagcagtttgaggagacaccagtggattttctrtatctctttttatcttataaaagagggagttcttccctacccccacacaggcacctctgtagatcccattggccagaaatgggtcacatgtttat

SEQ ID NO: 946266 - DNA, 576 bp, Homo sapiens
ttcaaaagccacaaagaccgtccccttccagtatggagcctaagggagccctaaggaggctaaggaaaaaggacccaatgggaccgcagagggaagggaactcagacagagaggagttttgggtcttaaagggcaagagaggggctgcctggctgacagggtaagtcttgaacatgtttcccatcttctggattctgtgttcttggctgaccaaatgttagggtctttaatccttccttctgccactctccacaaagaagaaacctattcctgaattttgaaatcttgcattatagaaaacaaaattccttgggattccaattcagactgttcgttgagctaccactgctacacttgcctaatcataacgccagtgtttttgtctttaattcattatcatttaatttttaaacctgagaaaaaagcaaattttaccaaacaaagaaatgtttatgcaattaattaacttkatcatcaactttttttttttttttttttttttttttttgagaccgagtctcactctgtcacccaggctgggatgcaattgcacgatctcggctcattacaacctcc

SEQ ID NO: 946267 - DNA, 540 bp, Homo sapiens
cttgcaccatgggaatcaacactttacaaattagacctgccccaaccccaaaggkggttgttaaccatttaccagcacaccactgccgagatgctcacatggctaatctttgcttttaccatctctgtccttctgccacacttgcagtggcatttatgagtacccatcacctacaagacccaatcacctaaattgagggtgttgggacaattttttttctggttaatctgacacacctggtccatgctaatatagtttagaatagaggctgcaacccagttgcccatgtattaaattcagcctgacaacttattttacttggcccctgtaacatttgtttaaaaagtgaatttcctgccccaattttaaatcgggtagatttcacatggaaaatctgtgtttttgacttctcttaaaagaaaaaaaatcagaagatctggcaataattggcaaccatccttgtactgagacagttggctgaagctgaggtacagcaagccctctgcacttgccatgcatttttcttttcaccctagtccc

SEQ ID NO: 946268 - DNA, 431 bp, Homo sapiens
caagaatggaaacctaagttctctacacaaagaaaacttgagatgggatgtctgcataaagcctgaagcttcaaaggactgtctgaattcrggtcccagaataaacactgccactgcccgagggatgcagggagtaagccagacaaccactttggaataagtcacctccgagaagttagacgcccaggcctgctctgtgcatgggcatcaagtccaaatgcacacagttcacacgccgtagaaatcctgaactgagaaacaaacctaaaaatgcatccttgaagtctttagggcactgagcaaagacaaactcaaaacctctcaatacagatgtatttacagcttagggcatgtgttagacaattactactagagataagctcagagtaaaagaaagattacaaaacaaagaagaaacaactctttgcctg

SEQ ID NO: 946269 - DNA, 732 bp, Homo sapiens
caaaaggaataacatgtacatggtttaagaaatcctggtcattgctcctggcaggtgtagcctatggmcttgtcttttttcgtttaccacatctggctttgaaaaaagaccagccagatgttcacaaagcagtgttcgccattcttcataaagtaaaacaatgtaccatggtcaaatgtgaatgcatgtgtaggtttaaaagcttatgctcttggtttggtaaatgtttaaaagatgttacatcctatatgattacaccaagttctgtaaataaagccccaagtggtacaggtacaggaagatgagacatctgcctgtcagccaacactgtttctccttcttgctcttctttcctctctctctgtcttctatgtcttggtcccacttttatttctagccctctttttaagctgcatcatgttgggctctttttaacaaacagaacacttgaaatccaatctcagctcagccattaagcctgtggatgaccttgggcaagtcactcaactgccaccacattgccccccttcacctcccaggcagaaagcaaaacactgcccatagcaccgctttcctgggtcactcgaatagaaaatatgcttgcgaggtctgctctgtgggggatttcagacgttgactcagtggttccgctgacatttattaagcacttttttgtgtgctgggcattattccaagatgaaggggacaatacccagagcatgtggtcatgag

SEQ ID NO: 946270 - DNA, 620 bp, Homo sapiens
tccaggtaaaacacacaactgtgyctctccagggtggcagcaagagagaagggatttgcagggattccataaagctattgacttaagatgttagttacattctgagagcagagacaggcacaatggttaaatgactgccattttgaggaaatattgactctgaccagtggattccgtggcttgtttcacaatgcctggacacaatggcctgttacttgcacgtgtgtgtgcacatgcacgcacatacacaagcaatcagttaataattaaagccttgcttatgtgtccgcattgaaaaatgcttccggctttcatttcatgtcatactgtctcccacttcaccctcaaatgcatgctttgaaggaggattatttctattttgtatgctctggaaattaactgatagatgtgtgcatttctatcccccgcttctccatttgtgtccctccttaccttttattcttgtctgctctctgctcctccctcctgattttcaccaacttgtttctttgctttaaatctctccctcatctgaggctgcttgtcttccctgccccactgccccctccacttccctttctccttcttctgtattcctttctgactcctttttctcctcg

SEQ ID NO: 946271 - DNA, 498 bp, Homo sapiens
atctctttttctggccataactcccactgagcagggctgtgtctgctacacccactgtgtcaccaatagtttcatctcccagactttccaaatcatcttccctctttctttcccttctccccgactccccttcatggcatctctgtatgattagctgcctatttaactatctgttcccctgctgggtcaggagctctcaggggaaggaccatatctgacccaccacccagagcccagggacaggcaagagcagagactgaatgaatgaatgactgtggatatatgatgcattacctgacatatgcttagcagtatgagggtctgccttcccaggacagcacctgtggtccaggatcagtacctcagccaccctcacctccagtcccactgcccccttgacayacagcaagtgcttggtgaatgcctgttgtctccacctggactgagcaataatagagtagtaatgtcaggtggttaaaggcatggcattggagtcac

SEQ ID NO: 946272 - DNA, 635 bp, Homo sapiens
gcaattgtattgaacctgtataacaactttaggaaattaacatatttactgagtttgtttacaatccatgaatatattatgtctctccatttattttgatctttgatttcctgcatcarcactttctagttttcagcatacatgccccgttttgttgttacgcctaggtatttcatttttaaagtgattgtaaatggtatcatatttttattttgttgttcatgtgttcatcactggtaaatagaaatacaagtgatattattttatttgttatttatttaattatttatttttaaaagactttattttttagagcaggtataggttcatgacaaaattaagcgggaagtgcagagattttccatatatcctctgccctacatgtgcttaacctccctcattatgaacatcccccaccagattagtacatttagtacaactgatgaacttgcatggacacatcattatcactcagcttccatagtttacattagtgttcactcttggtgttgtacatttctacgtgtttgaccattgtataatgaccagtatccaccattatagtatcacacggaagagtttcactgcactaaaaatcttctgtgctctgcctgttccccccacactctcctata

SEQ ID NO: 946273 - DNA, 424 bp, Homo sapiens
cccactcagattgagggtgggtctgcctctcccagtccactgactcaaatattaatctcctttggcarcaccttcacagacacacccgagaacaatactttgcctccttcaatccattcaagttaacactcaatattaaccatcacactgcactactgttagagtaagttaaaaaaaaatcctgacaataccacgtgctggggaggatgaagagcaacaggagctgccatgcttttcttgtgggagtggaaaatgggatggccactctggaacacattttgatagttccatttaaagttaaacatctaggaccatatgactcagccattcaactcctgggtcacttcaaaataaagaaaaacttaaggccatagaaaaatctgtacgcaaatgttcataacacctttatttttaacagcaaaaa

SEQ ID NO: 946274 - DNA, 531 bp, Homo sapiens
acacttcaggatattatccaggagaacttccccaacctagcaaggcaggccaacattcaaattcaggaaatatagagagcaccgctaagatactccttgagaagaataacccccagacacataattgtcagwttcactaaggttgaactgaaggaaaaaatgttaagggcaaccagagagaaaggtcaggttacccataaaggggagcccattagaataacagcagatctctctgtagaaaccctgcaagctagaagagagtgggggccaaaatacaacattcttgaagaaaagaattttcaacccagaatttcatatccagccaaactcagcttcaaacacaaaggagaaataaaatcttcacagacaagcaactgctgagggattttgttgccaccaggcctagcttacaggatctcctgaaagaaaccctaaatatggaaaggaaaaactggtaccagccactgcaaaaatgtaccaaattgtaaagaccatcaacactatgaagaagctacatcaactaatgtgcaa

SEQ ID NO: 946275 - DNA, 597 bp, Homo sapiens
agttctccacttaataattttataatgacctcctttctctcttcttacagtttttgtcatgaaaggtgttttgtctgatataaatatagctactcctgctctttttggtctcccttagtatagactaccttttttcatcccattgttttcagtctatgggtatctttatagatcaaatgtgtttcttataggcaacagataattgggcctcacttttcttctctgtgttatcttgaaatcattggttgaagtatcctttcattaagaatgctgaaaataggcccccactctctcctggcatgtaagatttctgctgagaaattcattataaacttcatggggttccctttgtatgtgacttgacctttttctctagctgcctttaacccttttcccatttagaaaaaaaagtgcagctcgctgccagcactcatttaattttatataaacagactctgaggctaaagcaaatctgactgattttaaatgtgaaaatagagtataaaaactgttcttggagttatttctaaacataactaacatgagaattgtctgaatcatcagaatcrcctatttcagaaaactcattaaataaat

SEQ ID NO: 946276 - DNA, 546 bp, Homo sapiens
caatttaacaaaagacttaactattctaaatatatatgcaccaacgcaggagcacccagattsataaaacaagttcttcaagacctacaaagagacttagataacaacacaataatagcgggagacttcaacaccccactgacagtgttagacagatcatcaaagcagaaaactgacaaagatattcaggacctaaacacgatactttaccagatgggcctaatgggcatttatagaacattccacccagcaacaactgaatatacattcttctcatctgcacatggcacatgctctaaaattaagtatatgcttagccataaaacaattcttgacaaattcaaagaaaccaaaaacatatcaaccacactcttgaaccacagcacaataaaaataagaatcaatattaagagggtctctcagaactatacaattatgtggagattaaacaacctactcctgaatgacttggataaacaatgaaattaaggcagaaatcaagaaattcttttaaacagtgaaattaaggcagaaatcagattcttt

SEQ ID NO: 946277 - DNA, 585 bp, Homo sapiens
aggatcattgaggccaggagtttgtgaccagcctgggcaacatagtgagaccctacctctacaaagaattaaaaaatattagctgggcatggtgatatgcacytgtagtcccagctacttgggaggctgaactgggaagaatgcttgagtccaacagtttgaggttacagtgagctgtgatctcactactgtgctccagcctgagtaacagagcgaggcactgcctataaaaaagcaaacaacaacaaaacaaccctagacagaggccctaagtacctaactgccctaccaccaccctttcccaaccccaccttgcatttagcagtagtaaatttataaacctggcttatttgaagacagcaatgttctataaatatgttttactttggaagcaatattagtagagtttgcttaaagagggcataagtctaatgatggcattatataatcaatttaacttttaaagcaatatagaattagactgtttaaaagtttaatatgattttgtccataatcttatgtaagtttgtttatttattaggttttgatacttatagaggactcccttcaatttccaatggaaat

SEQ ID NO: 946278 - DNA, 585 bp, Homo sapiens
aggatcattgaggccaggagtttgtgaccagcctgggcaacatagtgagaccctacctctacaaagaattaaaaaatattagctgggcatggtgatatgcacctgtagtcccagctacttgggaggctgaactgggaagaatgcttgagtccaacagtttgaggttacagtgagctgtgatctcactactgtgctccagcctgagtaacagagcgaggcactgcctataaaaaagcaaacaacaacaaaacaaccctagacagaggccctaagtacctaactgccctaccaccaccctttcccaaccccaccttgcatttagcagtagtaaatttataaacctggcttatttgaagacagcaatgttctataaatatgttttactttggaagcaatattagtagagtttgcttaaagagggcataagtctaatgatggcattatataatcaatttaacttttaaagcaatatrgaattagactgtttaaaagtttaatatgattttgtccataatcttatgtaagtttgtttatttattaggttttgatacttatagaggactcccttcaatttccaatggaaat

SEQ ID NO: 946279 - DNA, 737 bp, Homo sapiens
gtctcattcatatgcttttggtgcactatggcaaactagacactttgtgaactatatgaaccactcagttgaggttgtcttaagtcatagtttctcagaggtcctgaagctgaggaaggggatggcctctttttcaatgtgaaaagtggaaagcctgaggaggtgaagaaacaacatcttgaagacaaatttatttgaaagtaaatattttttcttctgtcctatttagtactactatttgcaccttgcatcctttcccatcactgctatcattgtagcctctggagaagaaagttgctggctcctgtttagaaactttgtaacactgctctaactcctattactttagcttatgtatcactgattttttgttttttaagaaattcctcttaacaattcctatgtattttatattctccatatattatatacataaattcctctctctaaatttatatatatatatatattctcacatatacagttgactcttgaacaacatggatttgaactgcgcaggtccacttacatgtaatttcaaccaaatgccaatagaaaatacaatcaatttttgcaggatatggaatccgaatataaaggagggctgactttttgtatcctggkgttctgcagggctgactagaggacttgagtatacacggctttgggtatacatggatgtcctggaaccaatcccttgggcatacgaggggatatatttcaagtgcttatcatat

SEQ ID NO: 946280 - DNA, 568 bp, Homo sapiens
tatacttcccccaaagcaggaattagttcatttccttccttcattgttacactgttgcattcttctccctattatcctttggtgaatacaataaaacaccttctataagtaatgggcgtatatctccctttctcctaaagttagccaaagtggagcatgattagcaagcagtttttttgtatcaaaatactaggacaaccctggaattctaaaaataaccagtcagtggaaaactgtgttgaggctagcatcaattggattctgatacaacaaaaatgtcttgagttcctagtaagtacaagattcatttgctaaactccatggaggatacaaaaatgattaagatccagtaacagagctgagcccaattgacacctgtaatcccagcactttgggagactgaggctggaggattgcttgaacccaggagtttgagaccagcctgggcaacataggggaaaccctgtctctacaaaaaataaaaaagaataaaatcagccaggggctgtggcttgcacctgyggtggtcccagcaacttgggaggctgaagcaagaggattgcttgag

SEQ ID NO: 946281 - DNA, 582 bp, Homo sapiens
aggatggaacagaaaggctatgacctaatgctactagactaagtggcgaaaaccagcaaggmctgtctgtctagattcttcttggcctctctgagcagcgttccttccttctgggtgtggggcaggaccttctctggaatgaggatcttatgacctgcaatcaagcaggtcagataatttatttaagtctagtttttacacagaaaggagggaaggggttagagtactattttcaggttttatggccggctttggtgaaaagggggtctgttttctttttttttattattatactttaagttctagggtacatgtgcacaacgtgcaggtttgttacatatgtatacatgtgccatgttggtgtgctgtacccattaacttgtcgtttacattaggtatatctcctaatgctgtccctcccccctctccccaccccacaacaggccccggtgtgtgatgttccccttcctgtgtccaagtgttctccaaaagcaatggcaacaaaagccaaaactgacaaatgggttctgttttctacaacccactttggggaagaaggattctaatgtctacagcaagcct

SEQ ID NO: 946282 - DNA, 787 bp, Homo sapiens
tgaataccacagtcatgacttgggttctcagagcagttaatattttgaaacccacaggtttgggatatttggaaacagatggctgattaagaacctgattccaggcagggcgcggtggctcacgcctgtaatcccagcactttgggaggccgaggcgggtggatcatgaggtcaggagatcgagaccatcctggctaacaaggtgaaaccccgtctctactaaaaatacaaaaaaaaattagccaggcacggtggcgggcgcctgtagtcccagctactcgggaggctgaggcaggagaatggcgtgaacccgggaagcggagcttgcagtgagccgagactgcgccactgcagtctgcagtccggcctgggcgacagagcgagactccgtctcaaaaaaaaaaaaaaaaaaaaaagaacctgattcctgtcttacagtatgaaatggtgtattagtcagggttctctagagggacagaactaataggatggacgtatatatgaaagtgagtttattaaggagtactgactcacatgatcacaaggtgaagtgccacaataggctatctgcaagctgaagagcaaggaagccagtccgagtcccaaaacctcaaaagtagggaagctgacagtgcagcctttggtctgtggtcaaaagtccaagaataaaaaagctaaagaacttgggagtccaacgtttgagaasaggaagcctccagcacgggagaaagatggaggccagaagactcagccagtctagtttttccacgttcctctgcctgctttt

SEQ ID NO: 946283 - DNA, 581 bp, Homo sapiens
atggcctggaagggttagatcttagggcctcaaagscccaatgtagggatctggccatcatcagagtcagtaaggcagttgcctgaggagtgacgtggcccaccatcagggatgcagtgatgaagctctgcaaactccttgccctgtgtcctcatacaagagtcaccactgctctgtgcctcggttgttccttctcttaaatggagacaataacaagacctgctttatcctcctattacgaggattaatgatgtaaggggccaggcatggtggctcacgcctgtgatcccagcacttttggaggtcaaagtgggaggattgcctgaggctaggagttcaacgccagcctgggcaacacagcaaaaccttgtgtctacaaaaataaaaaataaaaataaaaagccgggtttggtggcacgcacctgtagtcccagctactcgggaggctgagatgcgagggagggtcgcttgagcccaggaggtcaaggctgcagtgaactttgattgcaacactgcatgcccgtctaggtgagagagtgagatcctgtctcaaaaaaaaaaaaaaaaaatctaatataagt

SEQ ID NO: 946284 - DNA, 746 bp, Homo sapiens
cagctgagaagtcaaataggggacaaggagstgacccagaaatgattactatcaagacttctttttacttatggccaaatggacaaagtagggaggtgatgttatcagaacccaggagctggaaccatttggcaggaaggagaaccatggttggggctgccctgctggagctgggaccatggaggtgaaaccattgggggaggtgtggatgttgctcagggattccacctgaaacaggtggagggccagagatgccctggtttctctcttcatccctccctctagtctcccactggtgcctcccaatggttgcatttatctggaagccagaagagcctgggaaatatggttccctgggatgtagagcaagactgggaagggtagggattggatctgagcccaaaaaggagaatgctcagcataggggccaatgaaagctcctgcaagagtagaggtgagagatgatggtgcctcaagtcatagtggtggagatggagaaatgcagatagagtgaagtctaccttggagctaaaaccaacagggcatgggtgtggtggcaaaggagagggaggaatcagagaatctgacgttgtttttccacaagcaactgttagacaggatagttttcaagtcaaatcaacatatagggctggagtgtcagcacaccagggttctctcagaagatttccctgctccttaactcagccagtgaaatacttgagggctccagagcctcttctttgatg

SEQ ID NO: 946285 - DNA, 735 bp, Homo sapiens
tacttgtaaatgtctcttgtctctcttagccgagttccctgagggcagggtctgcttgacactaccttcacattctgctggcaggaaggggagtgctccagagccagggccctgaaagtactttacatcatgattttaccactcactaactctgcgatcttgggaaaataaccacacctcaatgtcctcaactataacatgaggatagcactccttataaggcagatatgaggaccaagtaagaaaatgcttctaaaacattgagtgtgatgcttgggaaatatgctgagcctaatatggttgataggtaaaattttttaaaattaaaaactaattctaaagtataggaacaaaatatattgcatacatatttcaataccatgcaaattattttaaactgtgatataggattaaaataaatctagtaaggaaagacaggaggaatgagcttcacattcttacccaaccatctgtagaaatattaaaattagaacatttttatgacagagaattgtcatgttcgttgaactgaattgtgaaaaaaaatggtcaggttctgtttaatgtaactattcctatgagactaattaaagtctgaagctctgtttctttttttggaagccatgtctgcttaaaatgagctctaattgtccctatttacacactgactgcagagtgcccakcctgcagcagacaactctgtaattagctccattcaagaacaaagcagtgacc

SEQ ID NO: 946286 - DNA, 614 bp, Homo sapiens
atacattttaggactgccactctcccagttaggaactgttaagaagacagttgagaagcttttgtttttaaatcctgaggaaagcagcaatgatcacaatgaaaacttggagtgcctctgtgagccaggctttctcacacataccatctcacatagtttaagtgagagaatgcaaggtcttgaagagaaaatgggatttggttctaagggatgaggttgcgggtgggctaggaaacaactggaaatctcggaattagtgggggatggttctggttcttatatagaagagaccagaatctccctctaatacggtgtcctgatgaggttgactgagataaaaatgaatcctaggaggtatggccttggctgctacagaagaatttccactggcttagttgtttatagggaaaactgatgctctgaacaactgaccaacccacttttaaatgttccaactggactgaaacaacgagcagggtctgatcaamtatgctcacagaaaaccagagcccctagtccagatttctggcctgattaaactctcaaggatttgttcagctctagggtgggggagggccttcccagtcatgactgatattggttgtcttgctaac

SEQ ID NO: 946287 - DNA, 568 bp, Homo sapiens
tgacgctgcccaatcgcctcagaagccccctggaccatcacagacgccaagcttcaggtaactctcacagtggagggtaagtccatmcccttcttaatcaatatggagactacccactccaccttaccttattttcaagggcctgtttcccttgcctccataactgttgtgggtattgacggccaggcttctaaacctcttaaaactccccaacgctggtgccagcttggacaacatacttttaagcactcctttttagttatccccacctgcccagctcccttttttggttgagatattttaactaaattatctgcttttctgactattcctgggctacagccacacctcattgccaccttttctcccagttcaaagcctccttcacatcctctccttgtatctccccaccttaatccacaagtataggatacctctactccctccttggcaacaaatgatgcaccccttatcatcccattaaaacctaatcacctttaccccactcaacaccaatgtcccatcccacagcatgctttaaaaggattaaagccagttatcactcacc

SEQ ID NO: 946288 - DNA, 568 bp, Homo sapiens
tgacgctgcccaatcgcctcagaagccccctggaccatcacagacgccaagcttcaggtaactctcacagtggagggtaagtccatacccttcttaatcaatatggagactacccactccaccttaccttmttttcaagggcctgtttcccttgcctccataactgttgtgggtattgacggccaggcttctaaacctcttaaaactccccaacgctggtgccagcttggacaacatacttttaagcactcctttttagttatccccacctgcccagctcccttttttggttgagatattttaactaaattatctgcttttctgactattcctgggctacagccacacctcattgccaccttttctcccagttcaaagcctccttcacatcctctccttgtatctccccaccttaatccacaagtataggatacctctactccctccttggcaacaaatgatgcaccccttatcatcccattaaaacctaatcacctttaccccactcaacaccaatgtcccatcccacagcatgctttaaaaggattaaagccagttatcactcacc

SEQ ID NO: 946289 - DNA, 619 bp, Homo sapiens
ctgaccaaaatttattaggcgggaatttcctcttcctaataagcctgggagtgctatgggagactggagtttatttcatctctgcagcctcgaccataagagacgacccacgccctcggggggccagttcagagacccacccccaggtgcacattctctttctcagggatgttccatgctgagaaaaagaattcagcgatatttctcccatttggttttgaaagaagagaaatatggctctgttccgcccggctcaccggcagtcagagtttaaggttatctctcttattccctgaacaattgctgttatcctgttcttttttcaaggtgctcagatttcatattgctcaaacacacatgctgtacaatttgtgcagttaatgcaattatcacatggtcctgaggcaacatacaccctccttggctgacaggattaagagattaaagacaggcataagaaatcacaagggtattgactggggaagtgataactgtccatgaaatcttcaaaacttatgtttagagattgtagtaaagacaggcataagaaattataaaagtattaatttagggaacyaataagtgtccataaaatcttcacaatccacattcttctgcc

SEQ ID NO: 946290 - DNA, 631 bp, Homo sapiens
tgactgccagagcctggagggttggcactgggggccttgtttatctcgctgttcctggcatccagctcagagtcaggcctgtgcttagtgctgatccagggcctcagggggattgtttgttaaccaccctgttgagtaccagtatcatatccgtttcccattgctgctgtaacaaacgcagtgcctgaaacaacacagttattctcttagggttctggaggtcagaaatctgaccagactcaatctcactgggctaacatcaaggtgtgggcagggctgtgttcctcctggaggctctcaggaggagtctgtttcctcgccttttcccgcttctagaggccgcccactttctttggctcatgggccctttctgtctttaaagccagaaatgttgggctgcgtccttctgacactgctgtcaccctggctctcttctgcctctttcttccacttttaaggacattggtgtttacattgcacccaatcagataatccaggataatctactcttttgagatcagatgattagaaaccttaattgcatctgcagcattaattcctctttgctgcgtacgataagaacayattcacagattctaggcattaggatgtggacatctttgtgggggtt

SEQ ID NO: 946291 - DNA, 726 bp, Homo sapiens
agtccagtctcatctgagacaaagcaagtcccttctgcctactagcctgtaaaatcaaaagtaagttagttacttcccagttacaataggggtaccagcattgggtaaatataaccattccaaatgggagaaattgggcaaaacaaaggggctacagttgccatgcaagtctgaaatccaatagggcagtcattaaaccttaaatttccaaaaatgatctcctttgactccgtgtctcatatccaggtcatgctgatgcaagaagtgggctcccatggccttgggcagctctgcttctgaggctttgcaggagcaaagcccctctcctggctgctttcatgggctggcattgagtgtctgaggcttttccagatgcatgatataaactgtcagtgggtctaccattctgggttctggaagatggtggccttattttcatagttcctctaggcagtgccccagtggggactctgggtgtgggctccaaccccacatttcccttccatactgccctagcagaggttctccatgaggacccatcccctgcggcaaacttctgcctggacatccaggcatttccatacatcctctgaaatctaggtggaggttcccaaacctcaattcttgacttttgtcygctcacatgcccaacaccatgtgtaagctgcaaaggcttggggcttgcaccctctgaagccacagcctgagttgtactttggctccttt

SEQ ID NO: 946292 - DNA, 211 bp, Homo sapiens
aaggtattcactgcttaaaatgatggggttgtcctggaaaattgcattgttcacaaagcagcaaagactraaacacaagttgaactaatgatcagaaagcatatcctagtaagactgtaactaaaactctaagggtcttctctgatttcctgtctgtaaaatggacatgataacttcaaatctatttcacggtcacataccaaaatagata

SEQ ID NO: 946293 - DNA, 532 bp, Homo sapiens
acccctaagatgcacatgtgccaagtagactcaaaaagcataagacaggcctggaaaactgaaatgatattggaaccaccagcctaagaaggagaatcagaacttgtggtctgaacctacctagccaattgcctgcttaaacaataaagaaataaataacattctgcagaggatttaataggacctagaatctatcaacatgatattaaaaatattctggatacaaaccaaaagcattcaacatacaaagaaacaaaattatctaaccaatatctaagaaaatagatactcagcagataccaagcctgagataacccagatgttgggattatcaaagaccttaaagtagctattataagaataatccattagataaagataaacacattgaaatgaatgggtatataaaagttttcagagcaaaattaaaactataaaaaagaatcaartggaaatttgagaactgaaaaatcagaaaaatttactggatgggcaaaatagcataatggagatgaaagagaaaagagccagt

SEQ ID NO: 946294 - DNA, 584 bp, Homo sapiens
atgtatacatattgaatcctgtagtttaaatatgtgtaatttaytggacattgattatgtatcaatacaactattaaaaaataagtgctgtctaaaagccatgccaggaagctatggcaacatggtagtgtcctcaggaaacctgatgggacagaggtctgggacttgattctttagcccagttgtcttgccactctcattctagaaagggagactggcttaaaccagagtgtgaggaaacaggatcatgctcatagcactggtctgatagttttagtcatcctggggtacttttattccacttacttactggccttttaaagtaagttccaggcatccaccagtatttgcagagaagtgatctagagagaaaaacagcacaggtaatttgatgcccaagctggagtgatataagcacaaaactataaggtaggggcaggtagtttggaggccacagggtacagcagttgagaaggtagaggaaggtctaaatggcccagaagccatctccctctccatgggagttggtctgtcctctccttgataggatgggacagggaatcaaagtcccaggtgccttccag

SEQ ID NO: 946295 - DNA, 646 bp, Homo sapiens
aaagctagaccagagaagcccctgtgcacaggttgagaaggcccctcatccccttgcccatctaagtttatgcaatgatattgtgcatcttcctaaacatcaaccccatttttcaagttgcactgggcaaaaactatccaatgcaatgaaagggagagagatttcattattgctccctttctctcacaccccacatccaattctgggaaatctagtactgctccacctttgaaaagtttttagaattcagctacctcttaccagctccatgctactgcctcagaacaagtctctatcctcatcctcttccatgccttattgccatgacctccgtattgcttcctcttttattgccctgcacatagcacccagagtgatccttctgaatagcgctcctgtactctgaacccttccgtcacgtaacagcccacaaggtgccatgcatccatgcattaaggccccgtactgtctttcttatcttctctccttccagcctctccttcaacctgtctcctccagtcagtcccgctggttttcttcctgcctccggaacgtgccacatctgtggagacctttcacttayagtccctcttcttggaatgctttttacctgtatttattcatgacaagttttctcactttactc

SEQ ID NO: 946296 - DNA, 747 bp, Homo sapiens
tgtagataacacattgaagctcggtcaatccaaatgtccattaactggtgaatggataaacacagtgggatacgatggggcrccgctgagcaatggaaaggagggaagtactgatagacacaacatggatgaatccaaacacattatacttggcaaaagaagctggagcagaggacccagtgttgtgtgattccatttctatgaaatggccaaaaaaggcactggaggtgggaagcagaggagtggttgctggggctggggtggggctggagtgactgctaaggggtatgtgagtgctttctgggtgctggaaataatctaagactgaactgtgaagaaggttgcacaactccacatttactaaaaaattactgaactgtgcacttcaagtggtgaggggtagttatgtaaatcatacctcaataaagcatttagaaaacagaacaaagctaggccaaggagggtgggtcatgaggtcaggagatcgagaccatcctgactaacatggcaaaaccccgtctctactaaaaatacaaaaaattagccgggcgtggtggcgggcgcctgtagtcccagctactcgggaggctgaggcaggagaatggtgtgaacctgggaggtggagcttgcagtgagctgagatcgtgccactgcactccagcctgggtgacagagtgagactccgtctcaagaaaaaagaaaaaaaggaaaaagaaaacagaacaaagctgaagccctggagggtga

SEQ ID NO: 946297 - DNA, 380 bp, Homo sapiens
cccaactccaggggaaagaccacctacccattccatcccctttctggctccccattcacctcgctgagagctaccgccactcaataaaaccttgtactcattctccaagcccatgtgtgatccaatttttccagcacaccaaggcgataacccaggatacagaaagccctctgtcctcgggataaggcaaagggtctaattgagctgattaacacaagctgcccagggacgacaaacttagaagagcacaccgtaacacatgcccactgggagttcaggagctgtaaacattcacccttagacgttgctgtggggtcggagccccacaacctkcccatctgcccgctccccctagaggtttgagcagtgggccaccaaag

SEQ ID NO: 946298 - DNA, 600 bp, Homo sapiens
cctgtctgttagaaggaaaactaacaaacagaaaggaatagcatcagcatcaacaaaaagaacatctacaccaaaatgccatccgtaggtcaccaacatcaaagactaaaggtagatgaaaccaaaatgaatgggagaaaccagagcagaaaggctgaaaattctaaaaaccagaacgcctcttctccaaggaatgcaactcctcaccagcaaggaaacaaaactggatggagaatgagtttgaagagttgacagaagtaggcttcagaaagtcagtaataacaaaattctccaagctaaaggagcatattctaacccatcgcaaggaagctaaaaaccttgaaaaaaggttagacgaatggctaactagaataaccagtgtagagaagagcttaaatgacctgatggagctgaaaaccacactacgagaacttcatgaagcatacacaagcttcaatagccgatttgatcaagtggaagaaagratattagtgattgaacatcaaattaatgaaataaagtgagaagacaagattagagaaaaaggagggaaaagaaacaaacaaagcctctaagaaatatgggactatatgaaaagac

SEQ ID NO: 946299 - DNA, 616 bp, Homo sapiens
atcttttcttgtgcttattgaccatttatataccttccctggagaaatgtctactcagatcctttgcccattttaacacaagccccttatcagatatatgatttakaaaagtcttctcccattttgttgtctctccattttcttcttggtgtcctttgaagcacaaaagtttttcattttcatttagcccaagtatctattttttatgttattgcttttactttgggtgttatatctaggaaaccattggctaatccatggtcaagaagatttatgcctatgttatcttctaagagttttatagttttatctcttacattaaggtctttaatccttttgagttaatttttgtatatggaatgaggtagaggtttaaaattcttttgcacatggatatccagttgtcccaaccccatttttttgaagagtgttctttccctcattgaattgtcttagcacctatgttgaaaatctgttgaccataaatataaggtttatgtctggaccctgcattctattccattgatctatctttttgtcctcatgtcagtatcacactgtcttgattaacatggctttgtaagtaagttttgatatcaggaaatatgagtcctcc

SEQ ID NO: 946300 - DNA, 673 bp, Homo sapiens
gctacttcactttgcacttttatgttatggagatggcttcttttcttaaccctcatgaascaacctgtgctagcttcaaacttttttctgcagcttcatcacctctctcagccttcacagaattcaagagaattaggatcttgctctggattaggctttggcttgaagacattttgtgactggtttgatcttctatttggactactcaaattttgtcccatttcagcagtacggctgctttgcattcttatgattaatgttttcactagagtagcacttttaacctacttcacaaatttttcctttgcatcacaacttggttaaatggcacaagaagcccagctttcagcctgtcctgacttacgacatgacttccccactaagcttaatcatttctagcttttgattaaaattaaagatgtgcaactctttctttcagttgaagactttgaggttgttgtggtgttattaattgtcccaatttcaatattgctatgtttcaggaaataaagagcctctccttcaaggagaaggggcaagatgggaaaatagcaagtcaatggagcagtcagaacacacaaaacgtattaagtttgccatcttatgcagatgcagtttatggcgtacagaagcaattacaacagtaacgtgaaagatcatggattacagatca

SEQ ID NO: 946301 - DNA, 585 bp, Homo sapiens
tatccatgggatctcttgtgaaagcccatttgcagggagctttcacatccgacatcacctttgatattggtgaattacaaaacaaaattcttgatttaaataaacaaattccagagtttcagccttctttagaagactggactgaattccagcaaggcctggagagcgtcaacccttggacctatctaaagcaccacattaacatcttatatatagttcttggaataatgttgttttgtctctgtcttctgttcatagtctgtaaaatcggatggactgccaatcggagaatgaaagctacccagcctggccttacattctttcacttaatacataaacaagaagggggaaatgttgggagccaaaaaggccaaagggatggtgaccaactcagcattccactggaggctacatgatcaaacagcaaactgtttatcatgaatacagaatgtgggcaaactcgcttctgtgcctgcccagaaggtttgctgagggccatcgctccctggccccggctccttgactggttatctactgggacatctagagcctattgttygaggaatgcagtcttgcaagcctact

SEQ ID NO: 946302 - DNA, 600 bp, Homo sapiens
caaggctcagaaagagtcatttgagtcacaaagatactaataggatgcatgggtttggatgtcagatttaggtgacccccagtactatgtccttttaaggatacaacactgctccaagatttattttattggtgattaccatctctacacagaagcctggggaaggaataggaaaggatgcactttaaataatctcaagttttcctccttcagctcttcttcagtaacgcaacactcaaagggtatactaggaaagaaaagcctcccgtttagggcacatgagccacatctgacttcaggattggattctgaagaaagtcactatattagtcttctcaggctgctataacaaaatatcacagactgagtggcttaaacaacagacatttatttctcgtatctctagaggctgggatgtccaagatcaagttgccaattgagtcagcttttggtcaggctctttctggcttgcaggctgcctrcttcttagtaagtcctcacagggccttttcttggtatgcacacagagaaagagaggctgttttcctcttacaagaccagcaattctatcagattaggcccacatcctaggacctcatt

SEQ ID NO: 946303 - DNA, 630 bp, Homo sapiens
gaggtctggaagggccctgaatgtaggaggttttgtccccgtggagttggggtgcaccaccctctcagcacatggatgagttcttcacctttctattggcctctaggtgttcagctctctggaagctccccaaaccctatcctttggggtttttaatggaaccttcattataggcaaaattgacaaccacgtagaaaggtgattggacaaaaagggtgtgatctcatatgtgagttcatacactgatgaggaaagccagggaggccagacctgttcagattcttcttggtctctctgtgcagcattccttcctccagagtatggggcaggagcctctctggaagcagggccttttgatccacaaccagattagagtcctgccttcagcaggcaagaggaggacaggaaaaggggagagagagagagattcagttttctgaggcctgaagtgccccaagattataacaaaagactgtaacaagtgtaacaagggctatgggagttatgagccaggaacttcggacaaaagcctatttcatacatgtatgatgattatatatatacacatacataatatatattatgaytatacataatcatagtatcacaataagcatatgtataaatatt

SEQ ID NO: 946304 - DNA, 588 bp, Homo sapiens
agttccatcaccagagcacactcagtcctccagtgtgagctagtcctgctccccgagctccgccagggctctctaccatctgagatgtcaagggcccggcaggagaaatccaaacggagcctcaggtgtcaggaagacccctaggcctgggggacaggtcagtacagtgccccggacagatccacagggccctggtgctaacagaatgtggggttcgggtcacacctgagcctcttaacctggagcttttggagctgtggctcttctgagttccttccctctgacttcccttggggaaactgaggcagcaactctcccacacctattctcagctacatctgcaacttgagggatttgtgcaaatggcagggaggtctttaagttaagaatctcacttgattcttcttataattaaacagtcagagccctgcttggccacaaggaaaaggaggccttgggacctgtcctgactcagtctcatgccttctatttgggcaagggcccttgtccttgctgtccacaccccttyggtgcagtgcaggacagatggccttgctcccaccagggtcactgtggaagtccaagaaa

SEQ ID NO: 946305 - DNA, 570 bp, Homo sapiens
ctgcctgcctcagcctcctaaagtgctgggattacaggcatgagccactgcgcctggccctagactgcactttaataatcactgacctgtaggattatagctgatatcatccccaagttatatgcatcatcatatatttttaaatttaaaggttataagatttaataggcaaatttcaggtgggatggtgaagtagatatgatctcatgatctaggtcacctccttccctgcctaaagtatatgattctccctctcatttgcaggcaagagtaacagctcaagactgtatttcctttccctgtgcttcattcgctatgggaggggctgcctcccagtgcccgctgccaggcctggtgccaggctgagaccaaggccccaagtggctgagtggcattctgatgcaggtggctggaggacttgcaacatcctgagtcctctcccctctcagcccccatgattagcagttggtgcaaatggattcagagggcagagatagccagacagtgaccatggctgaagcagrcaggccaagacagagctttccaaaaatgactcagcccagcccaaag

SEQ ID NO: 946306 - DNA, 576 bp, Homo sapiens
cttagtctcagcgggtatgtgggttgaaggttgtacttggtgagtgagaaatttccagaccctacaatctgacctccaggactgactgacagcttgctcgccagtcaggccctgcttactaccttcctgttcctcacctgcgggggttgcctcttctctaggggaaattagtttctgcctcttttctaaaaatgtgaaaattagcaagtagcaaccactgtgtaagtgtttaacagccccggagtgaaatgactgatgtaagtacaaaggacttttgtcgccagttgaagtgacttttatttaccttctgttcaaggtcaggaaagttatattgctgctttagttacgatgcttttgaacattgttcaaagcatgataaacttcttatctgagaatatttattcaccactcttgagagtttattgtagcaaagaaagcaaatagactgagattccttgcagagttctttgtgaatcagcaagaggaggggatgggagtcctgtkgtgaggctttcttagtagttacaggactgggaatgatattttgttatgtagcgtaattgtctttgggtaatt

SEQ ID NO: 946307 - DNA, 560 bp, Homo sapiens
ctggtgggagcaaggccatctgtcctgcactgcaccraaggggtgtggacagcaaggacaagggcccttgcccaaatagaaggcatgagactgagtcaggacaggtcccaaggcctccttttccttgtggccaagcagggctctgactgtttaattataagaagaatcaagtgagattcttaacttaaagacctccctgccatttgcacaaatccctcaagttgcagatgtagctgagaataggtgtgggagagttgctgcctcagtttccccaagggaagtcagagggaaggaactcagaagagccacagctccaaaagctccaggttaagaggctcaggtgtgacccgaaccccacattctgttagcaccagggccctgtggatctgtccggggcactgtactgacctgtcccccaggcctaggggtcttcctgacacctgaggctccgtttggatttctcctgccgggcccttgacatctcagatggtagagagccctggcggagctcggggagcaggactagctcacactggaggactgagtgtgctctggtgatg

SEQ ID NO: 946308 - DNA, 546 bp, Homo sapiens
ctatctctactaaaaatacaaaaaaaaaattagccaggcgtggtggcgggcacctgtagtcccataytcaggagactgaggcaggagaattgcttgaacctgggaggcagagcttgcagtgagccaagatcaagccactacagtccagcctgggcgacagagtgagactccatctcaaaaaaaaaaaaaaaaaaagacaaagctaaactgtgtgggagaagtctggattatggtttcctttggcgggggagagaggacatagtgattgggcggtcactggagggacttgtagggcgctggtagtattctattcttgatccagtgattattttgtaggtatattctctttgtggaaattcattgaactggatacttatgatttgtgcacatatctgtatgtaggttatgcctcaattaagagtttacttaataacatgtagccaataacaaagataataattagttgaccagtacacatctggtgtatttccaggtgtcaaaaattatgtgtgctttcttggcaaagccagactcataccttcctct

SEQ ID NO: 946309 - DNA, 546 bp, Homo sapiens
ctatctctactaaaaatacaaaaaaaaaattagccaggcgtggtggcgggcacctgtagtcccatattcaggagactgaggcaggagaattgcttgaacctgggaggcagagcttgcrgtgagccaagatcaagccactacagtccagcctgggcgacagagtgagactccatctcaaaaaaaaaaaaaaaaaaagacaaagctaaactgtgtgggagaagtctggattatggtttcctttggcgggggagagaggacatagtgattgggcggtcactggagggacttgtagggcgctggtagtattctattcttgatccagtgattattttgtaggtatattctctttgtggaaattcattgaactggatacttatgatttgtgcacatatctgtatgtaggttatgcctcaattaagagtttacttaataacatgtagccaataacaaagataataattagttgaccagtacacatctggtgtatttccaggtgtcaaaaattatgtgtgctttcttggcaaagccagactcataccttcctct

SEQ ID NO: 946310 - DNA, 626 bp, Homo sapiens
cctattggatattctattctgttcactacctggacaatgggatgattacaagcccaaacctcagcatcatacaatataccaatgcaacaaaccagcacgtgcaacctgcagcctaaaattaaaatttttwaaaaaattgggtggacacggtggctcacgcctataatgctaggactttgaaaggtcaaggtgggaggatcacttgagctcaggagtttgaaaccagcctgggcaacaaactgagacctcatctctgcaaaaaaaaaaaaaaaaagaaaaaaattaactggccattgtggcatgtatagtcccagctactcaggaggatgagacaggaggatcgcttgggcctaggaggtcagggttgcagtgagccatgataatgccactgcaattgagcctgggtgacagagtaaaacttcttcatgaaaaaaaaaagagaaagaaatgacaatagaaatatatgtctcaaaaatttttaaaaaataggccaggtgtagtggctcatgtctgtaatctgtgcactttgggaggccgaggtgagcagatcacttgaggtcaggagttcgagaccagcccggccaacatggtgaaaccccgtctctactaaaaatacaaaaattagc

SEQ ID NO: 946311 - DNA, 586 bp, Homo sapiens
tgataaagggcatttataaaaaaaatatacagctaacatcatatttaatggtaaaagactgaaagctctccccctaagatcaggaacaagacaaggatgtctgctctcaccaatactattcaacattgtactgtagcgttctagccagggccattaggtaaggggaaaaaaagcaaataaaaggcattcagtttagaaagaaagaagcaagattgtctttgcaggtgacatgatcatttatgtagaaaatcctatgaaagagttaatatgtgagtttagtgaggtttcaggatataaccccagtttccaaattctactgtatttctctctgctagcaacagtcagaaataaaaatcttaagaaataccctttacaatagcgtgaaaaacttgaggataaatctgacaaaaaatgtgtcagccgtgtacactgaaaactacaaacatcattgagagaaatgaaagaatayctaagtaaatggaaagagacatgggtttacgtgttgggaggctcagtattaagatgtcaattctctaccaaactgatctatcgactcaatacaatcccagtcaaaatcccagtcaaa

SEQ ID NO: 946312 - DNA, 435 bp, Homo sapiens
gaaacccgctgtggaacatggacctttctccagtgcagaggggccacggggccctgggaagggagttggagggttacagccctggtcatggcagggagacgcaggaactggaggcaggaagagctgtgttcatccccacagggtgcccctccgctcaggaatttgtgcaatagaatggggtgagctaatggggtcacatttagggaaaggagtctttctgtccacccaacacacatctcatcctatgcacacgcttctccctttccccattgtcctctctatgatgggaaactaatgcttccctaggcgggtgattgagggagaggasgggttggtctgcttgtgtctctcctttctcccctccctcaagtctcctgcctgcctttctgctgctctgttcagactctcacttcctgcagttctgcagtcagtttg

SEQ ID NO: 946313 - DNA, 569 bp, Homo sapiens
aaagctcaatagcaagctaacaattgcttctcaaaagaggaataagcttttccagcctctggcagtttctgggtccaaaacatgaaaagtaccctctttccatcttgtttctgcctaaggctccaattagcatgttgatctacgacagttactcgcagttcatcaggcccatcccatataggccatagatccagggccagttgcactgcttgtttagcttgttcaaaagccatgctgtctttctctccacagtgagagtcatacctttttctagtggctgcattcagatgttgtaaaatgttacccaagtaaggaatatgatgtgttcagaatccaaacaagtcaatacatttctgggcctccttcttagtggtaggggttgcaaattatagtattttagccttagcctttggtgaagtggactgtttctttgcattccataggatgccaaagaattttacactttgtgcrgatccttaattttactaggcttaatttcccatttttgagataggaactgggtttttacatgctctaagccccggctgactagttcttcagttttaccc

SEQ ID NO: 946314 - DNA, 774 bp, Homo sapiens
aaatattgtagcttccacctgaaaatctacttgccaccaccaagttttgattcagtagtaccaggtagtaaaattaggaaacctacaaattgaaagtattttcttttcttttcttttcttttcttttcttttcttttttttttttttttgagacagagtctcactctgttccccaggctggagtgcagtggtgcaatctgggcttactgcaacatccacctcccaagtttctcctgcctcagcctcccgagtatgtgggactacaggcacacatcactatgctccgctaatttttgtattttcagtagagatggggtttcaccatgctggccaggctggtctcaaactcctgaccttaggatctgcctgcctcggcctcccaaggtgctgagattacaggcatgagccactgcaccaggcaaattggaagtattttctaaatatttagaaatctctgttacaaatttgtattttgttattaatttactagaatattttatcacatcatctttcctgagcacattactagcttgtaattggagaatgtgagcaagattcatgttatttatttttgataaaacaggtattgttgtctcaaagccagacctcatcacccatctggagcaaggaaaaaaaccttygactatgcagagacatgagatggtagccaacccctcaggtaggtgtgagtgaaaatgaatacaacagacaacacagtaagaagtccaaggtcaaaaagaaagccagtccttaaggtgtgattctggaagctgt

SEQ ID NO: 946315 - DNA, 626 bp, Homo sapiens
ttagcctaagcaaattagtgcagaaacagaaaaccaaataccacatgttctcmcttataagtgggaactaaacattgggtgcacagggacacaaagatgggaacaataggcactggggattacaaaagtggggaggtaaggaggggacccaggcttggaaaccaactattgatggccgggtgcagtggctcatgcctgtaatcccagcactttgggaagctgaggtggactgatcatgaggtcaggagttcaagaccagcctggccaacatgatgaaatcccgtctctactaaaaattagccggacatggtggtgggcgcctgtaatcccagctactcaggaggctgaggcaggagaatcgcttgaacctgggaggcagaggttgcagtgagccaagatcgcaccactgcactccagtctgggcaatacaagactctgtctgaaaaaaaaaaaaaaagaaagaaaaagaaaaagaaaactgcctactgggcactatgttcattatttgggtaatggcttcaattgaatcccaaacctcaccatttatgcaacatactcatgtaacaaatctgcacatgtacctcctgcatctaaaataaaattttttaaaagaaaaatcttttgaa

SEQ ID NO: 946316 - DNA, 463 bp, Homo sapiens
ccaggaggtcgagatcagcctaggtaacacagtgagacccctatctacaaacaatcttaaaaaaaaaaagaaagaaaactagcatggtggcacatgcctgtagtcctgtctactcaagaggctgaggcaggaggatcacttgcacccagggttttgaggctgcagtgagctatgatccagcctgggtgacagagccagaccctgtctcaaaaaaaggagtgtggaagactttgcagatgtcataaagctaaggatcttgagatgggaagatgatccgggattccccagatggacccaatgtcatcacaagggcccttataaaagagaggtggtgggatgccgaggcgggtggatcacaaggatcatgaggtcaggagattgagaccatgctggccaacatggtgaaaccmcgtctctactacaaaaaaaaaaaaaattagctgggtgtggtgtaatcccagct

SEQ ID NO: 946317 - DNA, 649 bp, Homo sapiens
ctatcatgcttttatgtttgggacattgcataaggtattcacttgtggaactgataacttcctktttacttactaatgataacggccagcatttatatggcacttcctctcaggtgcagctctccctagctcattcttcctcatgaccctatgaaatgaggcctattattatcagcatgttaaagatgaggacacacagaggtgaggtaatttgtccactgtcacacagcaagaaagtggcaaaggcaggatatgaaccaggggctgactggtttcagtcagggcccttaccctctgtggtctctcaaaattaatttcttcttcttctttttttttttgagacagggtcttgctgtctcccagactggagtgcagtggcatgactatggggaactacaacctcgacttcctggactcaagcgatcctcctgcctcagcctcccaagtagctgggagtacaagcacacaccaccatgctgggctaatttttgtttggacagggtctcgctatgttgcccaggctggataaattattattattattactatttttgagacagagtttccctcttgtcgcccaggctggagtgcaatggtgtgatctcggctcactgcaacctctgccttccggattcaagcgattctcctg

SEQ ID NO: 946318 - DNA, 730 bp, Homo sapiens
actgttggtgggcacctgagttgattccatgtctttgctattgtaaatagcattgcggtgaacaccactgtactaagttatagatctatcatgcttttatgtttgggacattgcataaggtattcacttgtggaactgataacttcctgtttacttactaatgataacggccagcatttatatggcacttcctctcaggtgcagctctccctagctcattcttcctcatgaccctatgaaatgaggcctattattatcagcatgttaaagatgaggacacacagaggtgaggtaatttgtccactgtcacacagcaagaaagtggcaaaggcaggatatgaaccaggggctgactggtttcagtcagggcccttaccctctgtggtctctcaaaattaatttcttcttcttctttttttttttgagacagggtcttgctgtctcccagactggagtgcagtggcatgactatggggaactacaacctcgacttcctggactcaagcgatcctcctgcctcagcctcccaagtagctgggagtacaagcacacaccaccatgctgggctaatttttgtttggacagggtctcgctatgttgcccaggctggataaattattattattattactatttttgagacagagtttccctcttktcgcccaggctggagtgcaatggtgtgatctcggctcactgcaacctctgccttccggattcaagcgattct

SEQ ID NO: 946319 - DNA, 563 bp, Homo sapiens
gttcaaaccacaagtgggtactccaaccccagccctatcctttaacaatcatggtaccccaagccwgtcatctattccagttctctgaagctgcatttgaaccagctagagaagtctaccctgctttctccataaagcctcattatgtaataaacattttcaggccatttgagtgtatggcatcatcattatcaatatccaaaccaaacctcaggtagactttagacaagttccagtacagtgggcaaaagttaaaattaccaaaaaaaaggtatgaaggtgaatatatgaaatttctagtcagtctgccaaaagaaaacaatactcattttgtgtgttcattcttgagaaaatgtatgaagattagtattttcagattaatgtcactaatacgaaaaagacattattacagtatttttacccttaacctcatacctttttacatcttatttttcatattactatattggtatacttcatataaatgaaagtgcatgccatgggtcttatttggcatacacacaaaaaggcacatagaaatataataatatggtggccaggca

SEQ ID NO: 946320 - DNA, 576 bp, Homo sapiens
tctctattctgttctgttgctctatgtgtctatttttatcccagtagcaagctgttttggataccattactttctagtatattttgaartcaggtagtgtaatacccctcagtttggttctttttgctcagaattgctttggcttttttggatcttccgtagttccctatgaattttaggagttttttttttttttgtttttgtttttgttttttttttttagacaaggtctctattgcccaggttggagtgcagtagtgcgatttcagctcactgcaacctctgcctcccaggctcaagcgattcacctgcctcagtctcctgagtagctaggaccacaggtgcatgccaccgcacctggctaatttttgtattttttgtagggatgggttttgccatgttgcccaggttggtctcaaattcctgagctcaggtgatccgcccatcttggcctcccaaagtgctggaattacaggcacaagccacctcacccagccgtaggattcatttttttctatttctgtgaataatgtcttttgatattttgaaagagaatgtgttgaatatgtacattgc

SEQ ID NO: 946321 - DNA, 700 bp, Homo sapiens
ttctctgggggactgcctcagccctcccagccaccatcctcttcctgtgggtctctgagatccacgtgtgacggtggctctgcctcggcccagatggcctccaggccccatgtggctcctctgggccacctcatcttgcctgcagtggcctccctttgggcctgaggaggtggccttgggcctccccgatctctgcatccccccaaggttggagctcaggggtggctggtggagtctctctaacgagcctgaaaggcggcctcatgcagtgggtgggatgagcccagcctcagtttccctaatgtccatgctgcctcagagcaaggtgggacaagagtgctcacagactctgagggccacaacgccagcatcatacggatgtggttcatggggacaagtgagaaacagtgaagctctccttctccccaggagcagtggatccgctagaatccctgggccaaggcttgagccacagtctctgggcctgggggcggagggggcacctctgtattggatggctcttctttctcaagcactccatggtttctccaacctacaccccactgccaggccctgctgggtcaggccagkatggcagcgggacctacagcgtcgctcccggcccctccagggcatgtgtccctgtggcctgcagggcttaggactgcagccactgggggtccctgcgatcaggaaggcc

SEQ ID NO: 946322 - DNA, 839 bp, Homo sapiens
tccgttagcatgagatgaatgctgccaggtctaggttcttcctttcaggacagcaaattccctcaggctctgagtggatccagaagcgctgtctggaaatcagggactagggtcaaaaaccttagaagtctatttagtattctactgtcttgctgctagggtggcactcaaaccaaagacacagtccttcccattattcctccaccccttggcaaaagcagagcagtcttatcctgtggccaccatcaccagaggcccatggggaatactgccagactactgtcaatgttccctcaaggcccaagggctgttaaatcagtctgtggtgagtaatgtctggcctaggattcacccttcagggaagtggactctcctctggccagggccaagggtcaagtcctggaatcaggtaccccaagacatgacttggtattctattcccctgtggccaagctggtacctgaggtcagcaagtctcagaagcccatccaaggcccttgctgtattacctgggtatcgctgctgcttattcagggtccaagattcttcagatagcaggtgatgaatgttgccaggactgggtccttcccttcaaggcagtgggttcccttcttccctaagatatgtctagaaatgtctccctggagctaggaggtagggcctggaatgggggcctcacaattctgactggtgtcctgtcctgctgcggctgaactggtatgcaaratgcaagacaatattctccctactctttcctctcttctactcaagtggaagaaagggatctcttttggagccacgaattgtacagcctggggttgaggtagtggtgatgccag

SEQ ID NO: 946323 - DNA, 604 bp, Homo sapiens
gcctgtaggccttggagagcccaaaccaatcaggrattgaaaggatccccaacatagcacaactgctctaccaaaatgcagcactactccttctttaagcaggtcccagatcccgttccttctgattgggtgagacctcccgacctgggtctccaaccacctcctacagttgcatttgaattggcaacaagtcagtatccacctgggatggagctcccagaggaaagggcaggctgacatatttgctgttttgcagccttaactggagtggaccaccagcaaactgcaacagccctatgaagaagtggccaggctgttaaaaacaaacaaacaaacaaacaaacaaacaaacaaagaacactaaaacccaggttgtgtgaccacgaaaaggtcagcaacctcaaagattgaagataaataagcaaatacacatgaaaaaaaatcagcacaaaaacattgaaaactaaaaagccagagtgccctcttttctccaaatgaccacaacaccactccagcaagggttcataacctgggtgaggctgagatggttgcaatgacagaagtaggcttcagaatatggataaaaatgaattttgctgagcta

SEQ ID NO: 946324 - DNA, 609 bp, Homo sapiens
gagcaccaagtccctaggctgcacacagcagtgggtgcctgggcctggaaaccatttttagctcctaggcctctgggcctgtgatgggaggggctgcagtgaaggtctctgacatttcttggagatattttccacattgtcttgatgattaatattcacctccttgttacttatgcaaatttctgcagcaggcttgaatttctccccagaaaatgggtttttcttttctattgcatcattaggcagcaaattttcccaaatctcatgctctgtcacctcttgaatgctttgctgcttagaaatgtcttccaacagctaccctatgtcatctctctcaagttcaaagtttcacaaatctctagggcaggggccaaatgctaccaggcttgttgctaaggcatagcaagagtcgcctttgctctagttcccaacaagttcctcatctccatctgagaccacctcagcctggacttcattgtctatcacyatcagcattttagtcaaagccattcaacaagtctctaggcagttccaaagtttcccacatcttcctgtcttcttctgagccctccaagctggtccaacctctgcctgttacccagttccaaa

SEQ ID NO: 946325 - DNA, 602 bp, Homo sapiens
aaggagaaaactaaaaattcaaagtaaaaacatctttaaaagacatccctacaaaagtagatttcttttcacattacacggtaaataatgcgaaagaacttgagttcattcttaattcccytttcaaccaaaagaatggtgcaccttcttgtattattactgaaaggcaaaacagagagccagacgggaaaacggtagaggctgtgcaatggaatgaaggccacagggagaatcctataagccagtgctcatcaaatattctttttttttatttttttgagacagggtatcactgtcgcccaggctggagtgcagtggctcgatcttggctcactgcaagctccgcctcccgggttcacgccattctcccacctcagcctcccaagtagctgggactacaggcgcctgccaccacgcccggctaattttttgtatttttagtagagacggggtttcaccgtgttagccaggatggtcttgatctcctgacctcatgatccgcccgcctcggcctcccaaagtgctgggattacaggagtgagtcaccacgcccggactcatcaaatgttttatagtggaacttttctgtctcccctgcctcc

SEQ ID NO: 946326 - DNA, 627 bp, Homo sapiens
gttctcttttttacaactgtttacatggtacattgtttccattttttactttcaataaattatttttttcattcttttttttctttaacttttatttcaactttccggtgtacatgggcaggatgtgcaggtttgtcttgagtctcttatagacagcatatagttgaatcatagtttgttttaatccattctgcctatcttttgattggagtttaatccatttacatttaaaataattactgctaaggaaggacttccttccttcatttttctatttattgtctttgtgccttatagctttttgttcttcattacctgcatttatttcttcctttgtgtttagtggacttttttcatagtgaaatgtttaaactcctttctcattgtttttgtgtgtatattcaatgactctttcttttggggttgtcatgaggattacattactatcctaaagttataacattgtaatttgaatttataccagcttaactttaaaaaaattaggctgtcgcaaaggtaattatggttttttattaaaagtaatggcaaaaaccgcaatcacttttctcaaaatgwtttctgaacctggacctctctctagacatttatagtcactttctaattttt

SEQ ID NO: 946327 - DNA, 609 bp, Homo sapiens
ggtctttgctttatcttctgtgcagtgatgactccctacagtgagatgaatagtctggccaggtctgtaggtaatgtatattcttgcccttgaaaaagggaaaacttaagttgttgcagtcctatgattcaggcaagaactgtgatactgctttgttgacatgctttgacctgcagacctctgaatgaacactcttcatgctatctttgcataaagagttgttgctttctagcttttttggttagtgtccactgcctctatccagaaggctctcaactcagtgactcttttaatcacccacagaaatatgggatttttgtatccactaaataccaaaaatctatttattaagacagggagttctcattctttttgtctacgcatgtaatacacataatgttttctttttcataactatgcttttggcataagaccacactggttgacccttacaattatgattaggttttcagttaacctaatgaacacccatcctyttcagaattttaatttgtagtctgtagccaagatacaaccagtctgactgcatgcttccctcactttgtttcctataattttctcacccttctgactttcagaagaaaaagt

SEQ ID NO: 946328 - DNA, 596 bp, Homo sapiens
gctagaatataagcaagcagaaaaatgtgaaaagagagactgccytagcctcccaacctacatctttctcccatactggatgcttcctgccctcaaacactggactccaagttcttcagttttgaaacttggactggctctccttgctcctcagcctgcagacagcctattatggaaccttgtgatcatgtgagttaatacttaataaactcatatatatatatatatatatataaaatattccattagttatatggaatatatattatatatattccattagttatatataatatatattccattacttctgttcctctagagaacactgactaatacaggagtgcaaatgtcttttgatatattctttttggggggtatatacccaacagtaagatttatggatcatatggtaattctatttgtagttttttgaggtagctgtatattgttctccatagtagttgtactaattagtaattttactaatttacatttccacaatagtgtatgagggttcccctttctctgaatccttgccagcatctgttattgcccgtctttttgataaaagccactttgtggtcagataatat

SEQ ID NO: 946329 - DNA, 637 bp, Homo sapiens
atgtcagctgagatttatgtcagaatccaatgcaattgttagaacaaacaactttactttgatttcaacacaaattttkcaccgaggtttatcaagtgtcttgaatctgtttcaaaagagaattttctcaaattctttatcctctggccatgaatgtgtgagttctttgctcagccacgcattaatttggtttttgccagtgttaggaaaagtatgcaaccccaatctatctgttcatatctcagcctcctaggtttcttaaaaattttgtttaatgtttccaatggtaaatacgcctctgcttagagacttctttcctttttgtttttgttttgttttgtttgtttgtttgagatggaatcttactctgtcatccaggctgaagtgcagtagtgcgatctcggctcactgcagcctccgcctcctaggttcaagagattttcctgcctcagcctcccaagtagcagtgataacaggcatgtgccaacttgaccagctaatttttgcacttttagtagagacggggtttcaccatgttggccaggccggtcttgaactcctaacttcagatgatccacctgcctcggcttcccaaagtgctgggattacaggcatgagccactgcacccggccccaa

SEQ ID NO: 946330 - DNA, 637 bp, Homo sapiens
atgtcagctgagatttatgtcagaatccaatgcaattgttagaacaaacaactttactttgatttcaacacaaatttttcaccgaggtttatcaagtgtcttgaatctgtttcaaaagagaattttctcaaattctttatcctctggccatgaatgtgtgagttctttgctcagccacgcattaatttggtttttgccagtgttaggaaaagtatgcaaccccaatctatctgttcatatctcagcctcctaggtttcttaaaaattttgtttaatgtttccaatggtaaatacgcctctgcttagagacttctttcctttttgtttttgttttgttttgtttgtttgtttgagatggaatcttactctgtcatccaggctgaagtgcagtagtgcgatctcggctcactgcagcctccgcctcctaggttcaagagattttcctgcctcagcctcccaagtagcagtgataacaggcatgtgccaacttgaccagctaatttttgyacttttagtagagacggggtttcaccatgttggccaggccggtcttgaactcctaacttcagatgatccacctgcctcggcttcccaaagtgctgggattacaggcatgagccactgcacccggccccaa

SEQ ID NO: 946331 - DNA, 565 bp, Homo sapiens
cagctggaggccatcatccttagccaactaactcaggaacagaaaaccaaatactgcatgttctcacttgtaagtggaagctaaagatgagaccatgtggacacatagaggaaaatagcacacactggggcctattagacagtggagggtggaaggagggaaaggattagaaaaaataactaatgaatactaggcttaatacctgagtgatgaaataatctataaagcaaacccccgtgacacacatttatctatgtaaaaaacctgcacatgtacccctgaacttaaaagttaaataaagagtaaaacctgtacattgaaaactacaaaacattactgagagtaatttttaaagacataaaaagtgatagacataccgtattagaatattggaagaccaaatattttcacaatgacaattttccccaaaattgattttataatttaattcaatctctatcaaaacttcatcaggctttcttgtggaaattgacaagctggtcctcaaattkatatggaaatgcaaaagacctaggttagccaaaacaattatgaaaaataacaa

SEQ ID NO: 946332 - DNA, 619 bp, Homo sapiens
tttcctttgctttgagcttggaacctttcccttccacgtgagcttttgcacacacagacacacacatcctacttcctccaaratgttgttctgtcagtaaccctccttgaatgatggacagtagatctaaagggagaatgttgcaggcagaggaagagcaacagccagctcttatccagggtctaagggggcccccgcccaatgccttcctgtcatccaggatacaaagtccaagccctgagcctggaactcaataccttaatccgatttactgtttctatctcatctacttctgtctttcctacgcacctcacgaatcaaccaacatgtattgagggctttactatataccaggcatggaccagccctaggggaacagtagttaataagacagacacagtcacacagtccctgtcctcagagagtctacagcccatcagggatggagaagagagagatggggtagagatcacaggaaggctgcccttctctgaaccagtaagcattcggaggaggagcctagggccacctatcctcctggtttctgtgcctctacccatctattgtatccagcctccaacaatcttcacctcctggtatccacatctggtgtagttcc

SEQ ID NO: 946333 - DNA, 583 bp, Homo sapiens
tagttttaagtcaggtagtatgatgcttycaagtttgttctttttgcttaggattgtcttggctatttgggctcttttttggttccatatgaatttttaaatagtcttttctaattctgtgaagaatgtcaatggcagtttaatgggaataacattgaatctataaattactttgggcagtagggtcatttttacaacagtgatacttcctatccttaagaatggagtggttttccatttgtttatgtcctttctgatctgatttttttgaacagtggtttgtagctctctttaaagagatccttcacttcccttgttagctgtatttctaggtattttcttctttttgtggcaattgtgaatggaagttcatttgtgacttggctttctgcttgcctgtttttgatgcatagcaatgctagtgatttttgcacatcgattttgtatcctgagactttgctgaagttgtttatcagcttaagaaggttttgggctgagacaatgtggttttctagatacaggatcatgtcatctgcaaataaagataatttgacttcctctctttctatttgaatacccttta

SEQ ID NO: 946334 - DNA, 737 bp, Homo sapiens
ggctccttgggaaaaaaagcacctctttgacccaattaaaggcatattgtatacaatatggccagttcccttggagttgagcaacttggtggccctttttggggacaggaaaaatatctcatctctgtatmctcatcatagtagagtgtcatcatttaatgaacaaataaatataaggaagaaagtgataagaaaaataaacaacatgttccatgaactcagaagaattagagaacgccttcaactggagaaatgagagaaaggtatacagaagtctgagtgaggatatgtaaagcaggaaatagcatctattgtagaccctgtgtatagcaggcagcctccagcatggcctacaatgatccttgcctctggatattcatgccctgtgcattcttctcatgctttttggctgaatataatgacataattacttactcagaatgaataacatagatgtggtgaaagatctcttccaagattagatttaaaagatactgtgacatctgctttgatcactctctccctcaatcactctgagagaaaccaggtgacacattgtgggctgtctcatggaagggccttatgtaaaggaactgatgtctccagtgtcagccaatctccagccaggacctgaggccttgcagcagtcacagaagggagcttggaaatggagcctttatgagtccaacctcaagatgatagaagctccagcagatacctggattgcaaccctgtga

SEQ ID NO: 946335 - DNA, 579 bp, Homo sapiens
actttgggaggctgaggcaggaggatcacttgagaccaggaatttgagatcagcctgagcagcatgttgagaatctgtttccaccaagaaaaaaaaaaaaaaaattagccaggtgtggtggcacgtgcctgggaacacagagatgaatgcagttggagtggagcaagacaggagaatggtctgagatggtgaagagacacgtgaggccaggctgtgctgacctggtgagatcctgggagaagagtttgcacttcattcctagtgcgatcagaagccaggggagggttggccacaggagagtgacatgatcatcttcactgattgctgttgaaaaagacggttctactctttgaccactggctttgtaaagaggttttcaaggctcagagatggcttgtattgttatattaggagaggtttgatggtagccgacctggtagtggatgttctgtttcaggtgccataaatggggccatacatcaaacccattgaytttctacttcagagaccccaagagccatacaaccctaaccctcagtgcccctgcgtaaagttagacagacatcgtttattggggtt

SEQ ID NO: 946336 - DNA, 560 bp, Homo sapiens
caccacttccagatgacagccttgtcttctatttctagctaggttgctgctgctatacatggaaattctggatcctccattttaggaccatgaattgatagaaaactggctctcatgctgctacctaggtgtttgttgaatgaatgaatgttgaatatgattaacaacagtgctatcattcaagcagcccaggtactggaataagcactttattgcttcttttttaaaatttttttatagagaaggaaatggaggcattgaaataccaagacatactgaatatgagagcaattcaacaactatgtacagcacatatacagatgtaacacatgttagaagacaggactttggatggaaggattaatttgcagcactgatgtttcctaagaaaatggtcagcaagaaatttcttttggaatgttctttgttttttcttttttgttgtttgtttttgtttttttctgagacagagtttcsctcttgtcacccaggccggagggcaatggtgcgatctcagctcactgcaacctccgcctcccgggttcaagtgattcccctgt

SEQ ID NO: 946337 - DNA, 633 bp, Homo sapiens
tagccaatcatgaatcaatgttattttcttaggccaatgagaattcttgacaatttgtatcagtccactctccrccccctcccccagttttgtctttaaatattcacttgtaactgctcttaattggagtgtatattcaggaaaacatgaatctatgctcccagattgcaatctcaagcttgtcccaaataaactctttccttgtattaatttggtccagctttttgcttttaggttgacagcagaataccaaataaagtacttgaatggaatttggcagtttagttttataaaaaacaaaatatctttatacaatataactcattcctatgggtcagatagcagtgaaagctgagggaaaagacagtcatgcctcctgtctcaagagatctcacagttattggttcattttgtggaatataagtgatatatcttattgccccaatatattcaaactattttaaattcaatatgtaattaatatctaaacaagtattaagatatttaaattcatttttatacaaaatattccaactcctgtaagtgttttacacttacagctcattcactggggattaggcacatttcaagtgctcagtagccatgcatagataattggtgctataacaaaca

SEQ ID NO: 946338 - DNA, 633 bp, Homo sapiens
ggagttgcagtggcatgatcacggcttactgcagcctcaaactcctgagctcaagtgatcctcccatctcagcctgcygagtaacttgggccacaggcacgcaccaccatgcctagctaattttttattttttgtagagacggggtctcactactttgggttatctttttgctgttttcatggtgtcctgtgaaacacaaaagtttttaattttggtgaaatccaattcatctaccttttgttttgttttgttttgttttttgagttagcgtttatctcttgttgcccaggctggagtgcagtggcgggatcttggctcaccgcaaactctgccccctgggttcaagtgattcttctgcctcagcctcccaagtagctgggattacaggcatgcaccaccacgcctggctaattttgtatttttagtagagatggggtttctccatgttaatcaggctggtctcgaactcccaacctcaggtgatccgcctgcctctgcctcccaaaatgctgggattacaggagtgagccactgcccccagcctactttttcttttgttatttgtccttttggtaccatatctaagaaaatcttgcctgagcaagtcacaaagatttatgcccatgtctttt

SEQ ID NO: 946339 - DNA, 602 bp, Homo sapiens
gaagatgtcctctaagaacttttataactagagacaagaagtcaatgcctggcttcaaagcttcaaaggacagtcagactctcttgttagaagctagcgtacatctagtgactttaagttgaagccaatgcttatttactgtttgaaaatcctagggcccttaataattatacttagagctgggcacaagggctcacaccagtaatctcagctactcaggaggctgtggctggaagattgcttgaggccagaaatttgagaccaacctgggcaacatagtgagacctcctctctaaaaacagacaaataaatgaaaaactttgccctgtgtggtagtatgcaccagcagctgcagctactcaggaggctgaggaaggaagattgcttgtgcacaggagtttcaggcagcaatgagccatgatcatgccactgcacttcctcctgggtgaaccaagcaagactccaactctcaaaaaaaaaaaaagttatgcttaatctactctacctgtgctctataaatggaataacaaaggctggatgacagcacatttgtttacaacatgktttacttactcaatattttaagcccactttagagatct

SEQ ID NO: 946340 - DNA, 600 bp, Homo sapiens
gagagctgagcatgctgaccttctggctcaggtctgwgaactaaaaataaagtcctaagcctcccaaccaactaagctgacacccttggccaagaggaccccagagaaaccttaaaaactgagttcccagtcatgatagaacaggaggtcagatatgccctgttataccccctctcttttgtggtttagacacaactgaccagcattaatgtcaaaacagagatcgtaagcctgatggaatggactctatagcaataagataccagagtatgaacaggacctaaggccatgcctggtatgaattaagtcacaacccctatacttaaataataaactgtgttctagctgccacaaggttttcctttttctctagcagctaaacaagccctggcctggagataagcaacactgaaacaattgccgaccatctactgccagacaccaactaactggcctcttgcagaccatctactgccagacactaactggcctcctgttccaccagccataactacacttttgatcagacaagagactgatttcagtaactctccaggtaagaccaccaaccatggactggttctgcctggtttacagagg

SEQ ID NO: 946341 - DNA, 600 bp, Homo sapiens
gagagctgagcatgctgaccttctggctcaggtctgtgaactaaaaataaagtcctaagcctcccaaccaactaagctgacacccttggccaagaggaccccagagaaaccttaaaaactgagttcccagtcatgatagaacaggaggtcagatatgccctgttataccccctctcttttgtggtttagacacaactgaccagcattaatgtcaaaacagagatcgtaagcctgatggaatggactctatagcaataagataccagagtatgaacaggacctaaggccatgcctggtatgaattaagtcacaacccctatacttaaataataaactgtgttctagctgccacaaggttttcctttttctctagcagctaaacaagccctggcctggagataagcaacactgaaacaattgccgaccatctactgccagacaccaactaactggcctcttgcagaccatctactgccagacactaactggcctcctgttccaccagccataactacacttttgatcrgacaagagactgatttcagtaactctccaggtaagaccaccaaccatggactggttctgcctggtttacagagg

SEQ ID NO: 946342 - DNA, 563 bp, Homo sapiens
tttccttcatttcaaccttggtgaatctgacagttatgtgtcttgcagttgctcttctcrgggagtatctttgaggtgttctctgtatttcctgaatttgaatgtgggcctgccttgctaggttggggaatttcccctggataatatcctgacgagtgttttccaacttggttccattctccccgtcactttcaggtacaccagtcaaaggtagatttggtcttttcacatagtcccatatttattggaggctttgttcgtttctttttactcttttttctctagtcttgtcttctcactttatttcattaatttgatcttcaatcactgacatcctttcttccacttgatcgaatcagctattgaagcttgtgcatgcatcacaaagttttcatgccatggttttcagttccatcaggttatttattctagttagccattcatctaaccttttctcaaggtgttagcttccttgcgatgcgttagaacatgctcctttagctcagagaagattgttattaccgaccttctgaagcctgcttctgtcagctcgtcaaagtcat

SEQ ID NO: 946343 - DNA, 573 bp, Homo sapiens
caggctggaatgcaatggtgtgatcatagctcactgcagcctcaaactcctgggttcaagtgatccttctgcctcggcctcctgagtagctggaactacaggtgtgcaacttcatgcccagctaatttttaaaaatttttgtagagggtcttgctatgttgcccatgctggtcttgaactcttgacctcaagagattctcctgcctcccaaagtgttgggattataggcatgagccactgtgcctggccaatttcttttctttccatctgtaggtttacctggggctctaagttctaagaatcccaggtctgttactcccaaaatttcactgaggccacagatctaccccgaggtagatcaataagttcaggttgaagtgtcatgttttcacctgccaaaggcttcctctgcattcaaaataaaattcgcactctacacctggcctgcctacgactcacccccttgctgagttgtagccacactcatttcttgttatttattaagccaayctgctgcacgcctcagaggcttctacttcctgtttccctgtgtctagaatgctcttcctttaa

SEQ ID NO: 946344 - DNA, 575 bp, Homo sapiens
ttcttgggtggtgtgcagggcatagagctcccaagaagttatgtcctttgtctttggcaaccagggcaggtagagaaagaccaccagggcctccacctctgacttccaactgccatagaaggcccaaccccagtctcagccctactccactccagtacaacaggtgggggcaggcataggtgtgtctgagctcgaattctccttgggcagggcttgttgtggctgctgtaggggatggggggtgtggttcccaggccaatggagttatgttcccagggggattatggctgcctctgctcagtcatacaggtcaccaggtgatatggtttggctgtgtccccactgaaacctcaacttgaattgtatctcccagaattcccatgtgttgtggagggaaccagggggaggtaattgaataatgggtgatggtcttttccatgctattcttgtgatagtgaataagtctcatgagatctgatgggtttatcagggtttccgcttytgcttcttcctcactcttctcttgccgccatcaagtaagaagtgtctttcaccttcagccatgattctgaggc

SEQ ID NO: 946345 - DNA, 809 bp, Homo sapiens
ccactttatggttagatgggtcagaaagcacccagttcatgataggcagttcaggttggagggtgacttgatgacccatagtcaaactttcagtttccaccaaagcccagtaacaggccaagagctctctctcaaaaggagagtggttatctgcagagatggcagggccttgctacaaaatcttagaggcctccactgtgattcacctatgggggtctgccaaaggctccaaacagcatacctatctgtcactgacacctcaagcaccgttggatctgctgagttatatggcccaagtggaagagcagcttgcacagcggcctggacctgttgcagagccttctcctgttctggaccccactcaaaactggcagcctttttggtcatttgacaaatgggccagagtaacacacccaaacaaggaatgtgttgcctccaaaatccaaataggcccactaggcattgtgcctctttcctggttgtaggaagggccaaatacagaacttatccttcaccttagaaggaataccttaacaggccccactacactggaaacctagaaattttattaaggtagaaaatccattaattttaatcatatttatttcccatcctctggcacacgaatgtttcaccagtaagtccagtgtgtttgctaattcttgctcactggattcaatcagcataatgtcatcaatgtaatgggccagtgtgatatcttgtggaagggaaaagcaatcaaggtctctccgagtaagattatgacacaaagccagagagttgatatayccctgaagtaggatggtaaa

SEQ ID NO: 946346 - DNA, 600 bp, Homo sapiens
agactctgaagatctctggaactggctcactcgctaggcagcactctcttttgtaatactctgtctactccgccctatgaactttaactcctgtggcctcgtcagmtccccagttttatcttctcaactttagagtgactgccaggctttgtctgtgttttatctccttttgctatgacctagaaactctagggtattcataggtctcatcacatgtttcacatctcttaaggaatcactatcttttattacttgatgtttgaagtcttgaaaatcgtttcataaatattgttcatttttttgttgtttatgtgtaaggtaaatctgctccctccaaatttacccttcatcttcactggaaacagaaatctttgtatcattcttttttaaatatactaaatctatgtaacctgtacataatgattgaaatcctgatgtttccctttaggccagttccaatatctttccagattctatatgatatattgaatttagaatataatataaataaaaggtacgaattttgtgaataggcaaaactataagcagaagcttagagatgtgtgaaagtacattgactgtacacatgtacttatccat

SEQ ID NO: 946347 - DNA, 606 bp, Homo sapiens
tagggctgcgcccaccagccggcaacgtccaggaaagggccacaggagaaatgacacccgtgcaatgcggagtgtcccggctccrcttccccgcagggactcgaggtgcgctccttttcctggccacggtttagggaggctcggagatggacacctcggcagtatctggcgaccctcttctcactcgctccgcccactcctgctctccagggtcccagccaagggcccgaaccctcggagtcctagtgagccttggccgctttgtctgggatcaggcttatcctcctagcccacggcccgggagggaacaaagagcctcgaccctcaagctctagcctctgcctctcatcggagccccatgcgcccattcatcacctttctaaagacccctttgtctgcctggcaagcacaggtctgcaagggatgcccacgcccctgcccaaagtcctgcttttctaacaactgagctagattggattttcaagccacccagtcttgtgtaaacgacctcataccggtcttttttaccccctcagaatagaccatgtatagattcgttgatgcatgacgaccattccagcccattccttgctagctttttcattc

SEQ ID NO: 946348 - DNA, 464 bp, Homo sapiens
ttcaatgcttcattttcagcactggacagctcttccaagtggaaaataaaaaaaacctcggagttaatctgcgctatagacygagtggagctaatagatatttacagaacattatccaacggccacaaaatacacatttattttctcaacacatagatcattttcaaggacagaccaactatatgttagttcacaaagcaagtattaagacattcaaataaattaaaataatatcaagcatcttctctgactacaaaggaataaactagaaaccaataacaagacaaattttggaaactacaaaaatacctggaagttaatcaatatactcccatatgaccagtgggttaacaatgtataaggaactcaaacaaatctataggaaaaaatctaataatctgttttaaaaatgggcagagaagtgatgataccccagttactatgatgtgataattacacactgc

SEQ ID NO: 946349 - DNA, 650 bp, Homo sapiens
tattttaagaaattgccgcagccaccccagccttcaagcagccaccaccctgagcagtcagcagccatccacatcgyggcaagaccctccaccagcaaaaagattacgactctctgaaggctcagatgatgttagcactttttcttttctttttttttttttttagcaataaagtatttttaaattaaggtgtgttcatttttaaagacaaatactaccacacatttaataaactacaatataggataaatgtaccatgtaacgtatagtgtaaacataatttttatatgcactaggaaaccaagaaagttgtgtgactcgctttattgcagttgtctggaaccaaacccacaagcatattgagttgtattgtaaaaggtatttcttaatgtgggttaaggtcacaaaagtttgaaacccagtaggttagatgatgtcttagttccctttcatcgcaacctcattttgtattgttttgaatccttagctcagacccccagccagtaaatcatctgctctgagacaaacactaagaataaaagaagctgggaagcttttaacctgacctaagcattgtcttggaaacagtaaaatgcagccccttccagacctcttttctcagtatctttggggcggggctttggaacctg

SEQ ID NO: 946350 - DNA, 680 bp, Homo sapiens
gtaagggaataacacctcaaaagagcatacatacaactttgtatgtatttcattctttttttatggctgcatagtattccatggtgtrtatgtatcacattttctttattcagtccatcactgatgggcacctaggttgattccacgtctttgccattgtgaacagcacaacaatgaacatatgagtccacatgtctttttggtataatgatctgttttccatactcagtaatgggattcctaggtcaagtggtagctctgttttaagttctctgagaaatctccagactgctttccacagtgtgtgaactatttgcattcccaacgacggtgtataagtgttctttattctctgcagcctctccagcatctgttgttttttgacttttttttttgagatggagtttccctcttgttgcccaggctggggtgcaatggtttgatttcgggtaactgcaacctctgcctcctggtttcaagtgattctcctgcctcagtctccctagtagctgggattacaggcagatgccatgatgcccagctaatttttgtatttttagtggagatggggtttcaccttgttggtcaaagctggtttcaaactcttgacctgaggacatctgcctgcctcagcctacaaaagtgctgggattacagatgtgagccaccatgcatggcct

SEQ ID NO: 946351 - DNA, 450 bp, Homo sapiens
tgagggaggaggattgctggagcctgggagttttggctgcagtgagctatgattgtaccactctagtctagcctgggtgacagagtgagaccccaattctttgtttttgttttttttttttcagacggagtcttgctctgtcacccaggctagagtgcaatggcgcaatatcggctcattgcaaccttcgcctcccgggttcacaccattctcctgcctcagcctcccgagtagctgggactacaggtgcccgccaccacgcctggctaattttttgtatttttagtagagacggagtttcaccgtgttagccaggatggtctcgatctcctgacctcgtgatctacccgccttggcctccgaaagtgctgggattacaggcgtaagccaacgcrcctggccttttttttttcttttttttttgagacagggtcttaccctgtctccctg

SEQ ID NO: 946352 - DNA, 626 bp, Homo sapiens
aagactgaagtcctcaaaaagatggctacagcttgcagctgttgttcaccacaactcagataaaggaggcttgtgcgtgtgtaaggatgtgctactcagttcatgtattaagagaagctgctgaaatgaactgatgccaaaaaaggcatgctgtcatgctctgaccaacttaatatcataatcagaaaatattcaattaacaacaacagatagccctctgttctgaaaatggtccctttgttctcccagtatttgccatgataataatgaggtctttcagcagaggcagcatcagtaacgttcatgtcagaaacctggggctcacacatccgctccccagcggtgcgctctgcctttctggaccctggccatggaatgcacaaactgtgccgttaccaggcagccagttagtggccacagctaactgtaacattagcagagctttcccttgaaggagaaaaacaaagcaactacctcagaaaatgtgaatacagttttctctgaatcaagcatccatataaatcacttgaaattgaaaggtatckgtcaggtgcaatggctcacacccataatcccagcacactttgggaggccaaggtgggcggatcatgaggtcaggagtttga

SEQ ID NO: 946353 - DNA, 579 bp, Homo sapiens
tcagttaactacaggaagtcactgacaactaaataaagtagtaaaattacatatgagcaaattagattagtagtagagatagaaattatatatttttwaaaaaccaaaaagaaactggagctggaaagtacataactgaaataaaaagttcattagaagagttcaacagatttgagcaagcagaagaaaggatcagctaagttgaagacaatcgaaattatccagtcttaggaccagaaaaaaaaaaaagattaaggaagatgaacagagcttgaaaggtttgttagacaccatcaagggtaccaacatatgcaacataggagtctccaaagtagaagagaaaaggaaagaggcagaaaaaatacagtgttcgcccattatcagcagttgtgttttctgcactttcagttacctctgggtaaccacagtccaataatattaaatggaaaattccagaaataaacaattcacaagttttaaattgtgtgtagttctcagtagcatgatgaaatatcattctgccctgctctgcccacccaggacatgaatcattcctttgtccagcatatccatgctgta

SEQ ID NO: 946354 - DNA, 532 bp, Homo sapiens
tgacagggtgctgattggtgtgtttacaacccctaagctagacacaaaagttctccaagtccccacagagcactgattggtgcatttacaaaccttgagctagacacagagtgctgattggtgtatttacaatcccttagctagacataaagattctccaagtccccaccagattagctagatacagagtgctgattggtgcatttacaaacctcgagctagacatagggtgctgattggtgtatttacaatcccttagctagacataaagattctccaagtccccaccagattagctagatacagagtgctgattggtgcatttacaaacttcgagctagacatagggtgctgattggtgtatttacagtcccttagctagacataaaggttctccaagtccccaccagmttagctagatacagagtgctgattggtgcatttacaaacttcgagctagacatagggtgctgattggtgtatttacagtcccttagctagacataaaggttctccaagtccccactagact

SEQ ID NO: 946355 - DNA, 568 bp, Homo sapiens
tggtccctgccttaagtccaagctacatgggaggctgaggtgggagggtcacttgagcccaggagttcaagactagcctgggcaacatagggagatcccgactacaaaaaattaaaaaattagctgggtgtggaggcacttgcctgtagtcccagctacttgggaggctgaggcaggagagttggttgaacccgggagatggaggctgcagtgagccaagattgcaccactgtactccagcctgggtgacagagtgagactccatctcaaaacaaaacaaaacaaaacaaaaaacaaaaccaaacaaaaaaacccccaaaacctaggagtgcctctatggtgagagtatgtttaactttaataaaaactgccatattgttttctgaagttgctgtatcattatgcattccactagcattgaacgagagttcctgttgcaacttattttaattttatttatttawttgtttttttgagagagagtcttgctctgtagcccaggctgagtgcagtggtgcgaacactgctcactgctgcctctaccttccaggctcaagcaattctccca

SEQ ID NO: 946356 - DNA, 635 bp, Homo sapiens
ggcagtcagtcctcctcactcaccagaggacacacacaggggagaagccctatgtctgcagggagtgtgggcggggctttagcaataagtcacacctcctcagacaccagaggacacacacaggggagaagccctatgtctgcagggagtgtgggcggggctttcgcgataagtcacacctcctcagacaccagaggacacacacaggggagaagccctatgtctgcagggagtgtgggcggggctttagagataagtcaaacctcctcagtcaccagaggacacacacaggggagaagccctatgtctgcagggagtgtgggcggggctttagcaataagtcacacctcctcagacaccagaggacacacacaggggagaagccctatgtctgcagggagtgtgggcggggctttcgcaataagtcacacctcctcagacaccagaggacacacacaggggagaagccctacgtctgcagggagtgtgggcggggctttagcgataggtcaagcctctgctatcaccagaggacacacacaggggagaagccctacgtctgcagggaggatgagtaagtcattagtaataaaacctcatctcaatagccacaaraagacaaatgtggtcaccac

SEQ ID NO: 946357 - DNA, 460 bp, Homo sapiens
gcaacaggctctgtgttaacctcccacttcagtgactgcacctgcttagtctcctctgctagctccatgtcctctaagccatctctgcactcagagctcagccctacctgctctcttcttctccatctacaaattttttcccgccccatggtttgaagtactacatggaaaggactcccaaattcatacttctggttctgaggggccccctgggtttcagccttacttgtgtatccaaagcccttgttatggaccaaatgtctggccttctcccccacctccctgcccaaattcaaatgctgaaatcctaaccctcaatgtgatggtattaggagtgggggccttgagaggtaattcgatcttgaaaatggagcccacattaatgggattagtttccttaytgggagagaccagagagctagcttcctctctctgttctctaccatgtgaggatacgatg

SEQ ID NO: 946358 - DNA, 596 bp, Homo sapiens
caccaatggcctcatagtggtggcyatcattctagacagttttcatttctgagcctgcacactcagggacagtgaaataaaggaagtgtgacaaggaggagaatgtgcgtttgtgtgtgtgtgtgtgtgtgtgtgtgtgtctgtgcctgcacgtggacttgtgaccaaagtgatggctttgggtttcactccctggggttaagatgagagtaatgccagttaatgaactattttaaaggctcaatgtggctgctgtatagtggatacattaggtaggcaggagtgtgaacaaggacaattcagtgagtgctgaggtccagggagaagaatgctggcttggatgaggatggtaagggggaaggaatagtgtctttgggtttactttgaaggtagaactggggccatctgcagatggcttggatacgaggagtgagaggaaaaagtccagtatggctcctcctagagttctggcctgggaaagtgggtaaatggagtatcatttacctagaagggtaaagagggggaaagttggtttaggaggccatcaagagctctattttggtcatgttttgtttgagatattcattaattcaaat

SEQ ID NO: 946359 - DNA, 578 bp, Homo sapiens
ccgctaacaagagagtcagcctgtcctttgaaatttgaggccaagcattgacttctcctctctagttatggaagtccaggatagcactttccaatagaaggctgttttctctgcctagaaaatctgttgttgaatgcagccaccttcatcaattattgttgggttttctagacaacttgctgcagcctctacatcagcacttgctgctttaccttgctcttttatgttatggagatgccttctttccttaaacttcatgaactagaactagaacttctgctagcttcaaacttttcttctgcaacttcctcacctttctcagcctccatagaattgaagaattcttggttaggctttggcttaaaggaattttttgactggttttatcttctatccagaccactcaaattttctcaatatcagcaataatattgctttcttaccattcgtgtgttcactggaaaagaactttactatccttcaggcacttttattttgcctttacaacttggcygtttggcccaaaatgcctacctgtcagtccatctcagctattgacatgccgtcctcaccaagct

SEQ ID NO: 946360 - DNA, 477 bp, Homo sapiens
actcagtttcttttaattaaatattttattttggggtcatgtaaatcacatgcagttgtcatcagtaatgcagagagcccgtgtaccctctacccagctttccccagtggaagcatctgcaaaacgatagtgcagtgtcacagccaagacatctgccaggatgcggtcaagataccccaatccctggggcctcacgtgctgccctgtgtaccgcccctccctccatagcccccggcagctactgatctgttcttcatctccagaactttgtcatttcaagaatgttatgtaaatggaatcaaacagtatataacctttcgggttgacttttttcattcagcataaccccctgaggtccatgcagattgttgctgtatcagtagttcatagatrgtttcattgctgagtcgtgttttatgacatggacgtaccacagtgtgtttaaccactgaaagacatctgggtcctttccagttt

SEQ ID NO: 946361 - DNA, 682 bp, Homo sapiens
  misc_feature 226, 227, 228, 229, 230, 231, 232, 233, 234, 235, 236, 237,238, 239, 240, 241, 242, 243, 244, 245, 246, 247, 248, 249,250, 251, 252, 253, 254, 255, 256, 257, 258, 259, 260, 261,262, 263, 264, 265, 266, 267, 268, 269, 270, 271, 272: n = A,T,C or G
  misc_feature 273, 274, 275, 276, 277, 278, 279, 280, 281, 282, 283, 284,285, 286, 287, 288, 289, 290, 291, 292, 293, 294, 295, 296,297, 298, 299, 300, 301, 302, 303, 304, 305, 306, 307, 308,309, 310, 311, 312, 313, 314, 315, 316, 317, 318, 319: n = A,T,C or G
  misc_feature 320, 321, 322, 323, 324, 325: n = A,T,C or G
acaccaaaattcatatcttgaagctctaacccctaatgtgaggatgtttggaggtgttgcctttgggaagtgattaggtttagatgaggtcatgagggtggggccccatggtggggctagtgtcctgaaaagaagagaaataaagggcagagcatgctccctctctctctctctctctctctctctctctctctctatccacccccatccctctgtctttctgccnnnnnnnnnnnnnnnnnnnnnnnnnnnnnnnnnnnnnnnnnnnnnnnnnnnnnnnnnnnnnnnnnnnnnnnnnnnnnnnnnnnnnnnnnnnnnnnnnnnnccagaaccatgagaagtatattagtcaggactctctaaagggacagaactaataggatagatgtatatatgaaggggagtttattagaagaattgactcacacaatcacaaggtgaaatctcacaataggctgtctgcaagctgaggagcaaggaagccagttccagtcccaaaacctcaaaagtagggaagccgacagtgtagccttcagtctgtggctgaagtcccgagaagccctggcaaatcactggtgtaaatccaagagtccaaaagcataagaactcagtgtctgatgttcaagggtaggaagcatccaacacaggagaaagataamaactggaagatccagcaagtctg

SEQ ID NO: 946362 - DNA, 593 bp, Homo sapiens
tgtaatcacaagttctggaaattagaatgtgcwcactactagggaccattattctgcctatgttgtaggcagaatatatagccaatatatataatagctatatattaaaaagttggtttctgccaaaaaactgaccttgtccctaaggcttcagagcaaaggattttctgcatagtgaacagtttagctgatgaattgagattggaaagttgatcagatgtgaaggttcatgaatgaaagcttcagtctgactcttttaggctgacaacctcctacctgctcagagaaacactgaacccacaggtttgttttgactcaaatgttacaaacactaagaaacagagaagcagacatggaagctgtttgcagacttttgttttttctattttttagtgtttttgttttcacttttgttttccccgtttattgaagccattgtttaatttctacccattccctatctttttagctttctctcaaaaccaagagggaaaaagaaaacctatactacacatactcccttcaaaggtccaagaattctaaaagattttttcccaaaccaacagtgtactgtaagaccaacttttacaggc

SEQ ID NO: 946363 - DNA, 575 bp, Homo sapiens
ttcctggcttatctgggcatagaagactcagaaccccactggacagcctatctcactgttatgtagctttggtatttaggcaagcctttttaaattatttatttattatttatttattttgaaatggagtcttgctctgtcacccaggctggagtacagtggcacaatctcagctcaccacaacttccgcctcctgggttcaagcaattctctgtctcagcctcccgagtagctgggactgataggtgcctgccatcatgcctggctaatttttgtatttttagtagagacagggtttcaccatcttgggcaagttggtcttgaactcctgacttcataaggcccaccttggcctcccaaagtgctgggattacaggcgtgagcctgtggtggctcacgcctggcctagacaagcctttttataatgtaccataatctgcctcctaatggctcactgctttccaatgcttcaaattcctgcctcaacattactagctgtgtcactgtggttcagaggctwattttttttggtgccttgttttcctcacctgtaaaatgcctatggtaagcattgt

SEQ ID NO: 946364 - DNA, 683 bp, Homo sapiens
caggctgtctctctctcacaggctgtgatcatctcaaggcttgactgggtaaggctctgcatccakactcactcgtgatggttagcaggagtcagtttctcactggttgttacctcagtttcttcccaaatgggcctcttcacaggacagacagcccacagcatggaaccttgtttcatcagagaagagccagagagattgcagcaatctggaagtcactgtcttttataacctaatctcagaagagccatcccatcacttttgctgtattctgttcattagaagtaaatcactaaggcggggatcattgggagccattttctttttttttttttttttttttgaaacggagtctcactctgtcgcccaggctggagtgcagtagcacgatctccgctcactgcaagctctgcctcccgggttcaagccattctcctgcctcagcctcccaagtagctgggactacaggcgcccaccacacctggctaattttttgtatttttagtagagacggggtttcaccgtgttagccaggatggtctcgatctcctggcctcgtgatccgcccgcctcggcctcccaaagtgctgggattaccggcgtgagccactgcgcccggccactgggagccattttcaaagctgtctgccacaactcttgtctggccattgctagagaggttg

SEQ ID NO: 946365 - DNA, 563 bp, Homo sapiens
gcctcccgaagttctgggattacaggcgtgagccactgcgcmcggcctaatattttactttttaaaaataggcaagaaatggcaaagatgactacttaaatatggtactaatgctgtgctactttcttgaagcagtgcaggtattcttgatgagtgtagagacaatctgacttggtatattttttggatcttatttatgatttggaagaaaacaaatatttaccaatacatttagaatcagaaaggactttgctggttgccatttttaaagtcaggccagtagctgcagactgcaagtattttttctggtttctttgccacatttttctgtcatctcagcctttggaaaactaccatctgggtcttcaagctgtgtacttatcagtggtaaccactgtggatagcagaggcctttgaggcctttttctgaggttacagctttgttgacggggctcatttcttctaaacacttgttcccttcctgatctaacatatattctgaccgtctagtgttgtgatcaacagggatttgaagggttatcttgttgtcaaagatcgtgact

SEQ ID NO: 946366 - DNA, 598 bp, Homo sapiens
tagattctagctcccatttaaaaattgttgaaaaacttcatttactgattagagcaactcatagtactagtgagttaaccaatactagggataaatattaatttaaatatrtttaaatatgatttaattaacgattataaattaaatattcaattaaataactaacttaaccacaataattgttatgcctttcctatacatcaggcattaagaattatctcatttaattctttctgtaattctatagtataattttattattgttagccttttatagatgaggaaaatgagccctgaagaaattatgtagtataccattggtttcatatatagcaaatttcaatttcagaattctggttacactatattacctctacaacagatagactctactgtcaatgtttctaagaatactaaagacagaaggatatttatctatttattaattacaagacaaatttctatgtgacatatatttaaaaaaacttcatgtgatgtaattgtaaatagcttatatttaaatattaaatagtttgaattataaaaataattgaattaaattttaaattaaatatttaatttgctatagaaatttaac

SEQ ID NO: 946367 - DNA, 598 bp, Homo sapiens
tagattctagctcccatttaaaaattgttgaaaaacttcatttactgattagagcaactcatagtactagtgagttaaccaatactagggataaatattaatttaaatatgtttaaatatgatttaattaacgattataaattaaatattcaattaaataactaacttaaccacaataattgttatgcctttcctatacatcaggcattaagaattatctcatttaattctttctgtaattctatagtataattttattattgttagccttttatagatgaggaaaatgagccctgaagaaattatgtagtataccattggtttcatatatagcaaatttcaatttcagaattctggttacactatattacctctacaacagatagactctactgtcaatgtttctaagaatactaaagacagaaggatatttatctatttattaattacaagacaaatttctatgtgacatatatttaaaaaaacttcatgtgatgtaattgtaaatagcttatatttaaatattaaatagtttgaattataaaaataattgaattaaatyttaaattaaatatttaatttgctatagaaatttaac

SEQ ID NO: 946368 - DNA, 554 bp, Homo sapiens
ctctggtgcctccttgactagcttaataattgactttctgaattctttttctggcaattcagagwttattttcttggtttagatacattgctggtgagctggtatgatcttttgggggtgttaaagaaccttgttttatcatattaccggaattgtttttctggttccttctcatttgggcagaatatgtcagagggaagatctgggattcaagggctgccattcagattcttttgtgccacagggtgctcctttgttgtggtgttctccctgttcccatagaaatggggctttctgagagctgaactgggtagtaattgtttttgctcttctgggtctagccactcagggtcccggctggtactggggagtgtctgcaaagagtcctgtgatgcaatcagtcttcagatcttgcagccgtgaataccagcacctgcttcagtggaggtagcaggggagtgaagtggactctgtgagggtccacagttgtgtttttgtttagtgggctggttttgtgttagttggcctccagccaggaggtggacttttaagag

SEQ ID NO: 946369 - DNA, 563 bp, Homo sapiens
agaattgcagggacaggaaacaaaaattttgctagttgatctttggggttaagggttaaggaggagccwtttccacttctacccctgtgattcccagagccatggatcctagcaattggagaaatggtaccatatttttgttgctgattcaggacatgtaccaccttcgggaggacattatctcagccatacaattatcctacactgtgctgtaactgaattttcaaaaggtttcattattttatcaagccatctgcttcagggtgatgggaaatgtggtaataccagtgagttccataagcaagagcccattgccagatttcatttgctacaaaagaagtttcctggtcagtaacaatgatgtgtggaatatcacagtagtgaatatgtgtttctcttaagtccacagatggttgttttggcagaagcattgcaggcagagaagaaaaatttctgtccagggtaaatgtctgtttcaatgagaacaaaacactgagcttcctgtgatgccagtataatcaacctggcactaagtgactggctgatctagacatggaatggta

SEQ ID NO: 946370 - DNA, 622 bp, Homo sapiens
tgcattatcccctaacaagcaagtcggcctatattttgaagctctgaaacccaggcactgatttctctcttgctatcaaagtccttctaatagaagtctattttgtctacattaaaaacctactgtttagtrtagacacctgcatcaataatattagctagatattctggatagcttgatgcaacttctacatcagcacttgacgattcaccttgcacttttttgttaaagagatagcttctcaaacctcatgaaccaaccactgatagcttcaaacttttctcctgtagcttcatcacctctctcaatcttaacagaattgaagagagttagagccttgctgtagattaagctttgcctaagggaatgttatagctggtttgatcttctatccagaccactcaaattttctccctatcagcaataaggttattttcacttttttatcatttatgtgttcactggagtaacacttttaatttccttcaataaattttcttttgcattcacaacttggctatctagcttggtacaagaggcctagttttcagtctatctctgcttttgtcatgccttcctcaataagcttaatcatttctagcctttgatttaaagtaagtga

SEQ ID NO: 946371 - DNA, 579 bp, Homo sapiens
gtcatttttaagatacaagaggttgtcctggtgtggtggctcacacctgtaatctcagcagtttgggaggctggggtgggaggatcgcttgagtccacgagttcaaggccagcctgggcaatatagggagaccccatctctataaaaaataagaaattagccagacatgggatatggtagtgcaaggtcagggtctcaagactatcctggctaacacggtgaaaccctgtctctactaaaaatacaaaaaattagccaggcatggtggcgggcgcctgtagtcccagctattcagaggctgaggcaggagaatagcatgaacccgggaggcggagcttgcagtgagccgagattgcgccactgcactccaggccgggcaacagagtgagactccatctaaaaaaaaaaaaaaaaaaaaaaaggtgggtgtggtggctcacgcctgtaaccccagcactttgggaggacaagaygggcagatcttttgaggccaggagcttgagaccagcctgggcaacatgacaaatacccatctctactaaaaatacaaaagttagccaggtgtggtagggtacacct

SEQ ID NO: 946372 - DNA, 558 bp, Homo sapiens
catatctgatctgatgtgggataaaagaatatctttcaatttctgagatgtgtgaggatttcttttctcacagaggactggatgtttggytgtgtgcttttcttgttttcttctgctgagaattttgagaattcaggaaggacaagagaaaagaaggagctcaccctgcaacttgtgtgagggcaagcagaaacaggaagaatgtgaacgactctttccagtagaaaggatgaggagacaggaaaggtttcaaagttgtgatcccaaatttatcatgaccccaaatgtatcatacagttccattctctaggcctttaagacaaacatttcctattgctctttagagaagcatttgaagcctaaattctgataccacttcccactccccaattccctcagcacatctcagatttctgtttttaaaaatctctagccatgatgatgggatatgtgtttgttggtacattttttttcagagcccagtgtcattgctgggctgggtggcagccgaggccttcagggactaaacctcttgtcttaagatcctgaaaatggtcc

SEQ ID NO: 946373 - DNA, 595 bp, Homo sapiens
tccacattcttcttagtacatggatccttcttaaggatagagcgtatgttaggtcacaaaacaagtcttaatgcattcaaaaaaattgaagtaataccaagcatcttctctcacaacaatggaataaaactagaagtcaataacaagaggaattttggaaactatacaaacatgtggaaattaaacatgtgttcctgaatgatcagtcggtcaatgaagaaattaagaagacattgaaaaatttcatgaaacaaatgataaggaaaatacagcatactaaagcctatgtgaggcagcaagtgcctacatcagaaaagaaaagaaatacaatatattacctaatgatgcatcttaaagaattagaaaagcaaagcaaccaaacccaaatttgtggaaatcatcattctcagcaaactaacacgggatcagaaaaccaataccacatgttctcactcataagtgggagttgaacaatgagaacacatggacacagggaggggaacatcccacactggggcctgtcagggggtggrgggctaagggagggatagcattaggagaaacagctaatgtagatgatgtgttgatgggttga

SEQ ID NO: 946374 - DNA, 253 bp, Homo sapiens
taattttttttaccactatgaacaacgatgcatagaaatgcaacttatattcatttcccggcttgagcccagctgtctaaaaaattccaccagcagytacgactgacagacagctatcccagcgcttgggcgtgctgacatgtggttgtgtgagtgccagcttgttaattaccggctctctcttccggcctggctgccgagtaaccagccacaaggaccttaatcactgctggggcctggaagggcctgcttc

SEQ ID NO: 946375 - DNA, 715 bp, Homo sapiens
ctggccatgttgcccaggctgacctcaaactcctggcttcaagcgatcctcctccctcagcctcccaaagtgctgggattacaggcatgaggcactaggcccgggctctcccactttcttcactacctccctgagcctcaactgcgtcatctgtaacatggggccagtaatcgttgtcaacatgaagagctgttgttaggagccaatgaaataaaaataaatttaaaacaacttagtacagaaatagcattccctttgaagccttgctctctgccttccaaaatgggaagtgtcccttcttatccggctggttgaggacctatgacacagaggtgctgttctaggcactgggaatagaacagtgaacaaaatgaacaaaaatccctgcccttgtggaacttacaattagtgggagacagaccataaacaagacaaataagtacattataacctatattagagaaggtaaatacaatagaacaaaacgaggcaacagaggaggggttggagcactgattgggaagggctgcagttcaaacagggcagtctgagttggtctcaccaagaaagtgacttgaaggaagcaaargagtgagcaaatattcaggataacagcactgctcaggaagaggaaacagcagtgcaaaggctctgaggtgggactgcactgttcgtgttacaggaacagtaaggaggccagagtagctgtgttagc

SEQ ID NO: 946376 - DNA, 198 bp, Homo sapiens
attttggtatgtgaccgtgaaatagatttgaagttatcatgtccattttacagacaggaaatcagagaagacccttagagttttagttacagtcttactaggatatgctttctgatcattagttcaacttgtgtttyagtctttgctgctttgtgaacaatgcaattttccaggacaaccccatcattttaagcagtg

SEQ ID NO: 946377 - DNA, 655 bp, Homo sapiens
tagtgcagtcagatcaggatggaaggtctgtgctgtgggcccaagccaggggttcgctgtctggtgatgagcagcggggtgtgtatgggacccatgggagatggactggcctcctctccttgggtcaactgcagcttgttggaggtatggataaggtacttagggtttttgctccttcattattccaaggatggtaagggcagttccactgcagagggtgtagcagagaggctttcatttgcccctggaggctctgtacagggaattgctgggttgctactggcttaatagctctggttgggtgtgtctggaggcccaggcctggaggacctgccagatgaggaaatacggaaacagacacccatgtaaccatctggccacttttccgtagggctgctgtgaaatgcttagggcccactccagtccgtagttgccttggattttctagaacctggaagtatcaccagtgaagtctgcaaaatggcaaagatgccagcctgcaccttcctgtgggagctttttcccagggaggtataggcctgttgctggcccaaaggaaccaataggatgtgacyggagaccccatttgggaagtcccacccagtgaggaggaacaggatcagggacccacttaaagaagcagtctggccacctt

SEQ ID NO: 946378 - DNA, 817 bp, Homo sapiens
tacagcccctttccaggacatctcaaggacagyggtgaagggaaatcttccaaatggacagaaatttgagcagtgcacctgattgtgcactttgcatggaaggagacatggccagatgtgcgattatataccaattaattggctgtagccaatggtttggctggagggtcagggacttggaagaagcatgactggaaaattggtgacaaaggaatttggggaagaggtatgtggatggacctatctgagtggtcaaaatctatgaaggtatttgtatcctatgtgagtgttcacccatgggtgacctcggcagaggaggattttaataatcaagtggatatgatgacccattctgtgacaccactcagctctttcctgagccacccctgtcatcacctaatgtgctcatgaacaaagtggccatggtggcaggtttggaggttatgcatgggctcagcaacatggacttccactcatcaaggcagacctggctacagccactgctgagtgcccaacttgccagcagcagagaccaacactgagcccttgatatggcaccattccttggggtgatcagctagctagctcatggcagtttgattatattggacctcttccatcatggaaagagcagaggtttgtcctcactggaatagacacttactccagatacaggtttgcctaccctgcacacaatgcttctgccaagactatcatccatggactcacggagtgccttatccactgtcatggtattctacacagcattgtctctgaccaaggcattcactttatggctaaagaaatgcggcagtag

SEQ ID NO: 946379 - DNA, 436 bp, Homo sapiens
aaagacagcagatggttggtgagttcttgcctattctgtggttctgtatcttttaaatggagcatttaggccatttacattcccatgttagtawtgaaatgtgaggtactgctgcattcatcatgctttttgttgctggtgtaatttggttttttgtttttgctttttaacttgtatttttgttttgtaggtcctgtgtgattcatgctttaaagaggttccgtttctatgtgtttccaggatttgtttcaagatttagagctccttttagtagttcctgtagtggtggcttggtaatggtgaattctctcagcatttgttcgaaaaagactgtatgtttccttcatatatgatgcttagttttgctggatacaaaattcttggctgaaaatagttttgtttgaggaggctaaagatagggccccaatctcttcta

SEQ ID NO: 946380 - DNA, 473 bp, Homo sapiens
tgggctggtactgggggttgtctgcacagagtcctgtaatgtgaaccatctatgggcctctcagccgtggatacttgtgcagttttttggggggtctcccaggtcctgcaggagcagttggcttccttcagagtgtctgtgggtcctctcctgtaccacaatttctttatccagtctgtcattgatgggcatttaggttgattccatgtctttggtattgtgaatcatgccacgatgaacattcatgtgcatgtgtccttatggtagaataattagaattctttggggtatataaccagtaatgggattgctgggtcaaatggtaattctgttttaagtyctttgagaaattgccaaagtgctttccacaatagctaaactaatttacattcccacatgaaatgtataagcattccctttttttctgcaactttgacaccatctgttaatttttgactttttagtaatagtca

SEQ ID NO: 946381 - DNA, 615 bp, Homo sapiens
caggatgggtgtgtttgaccggttccgcagagccacgtgcagcacggctcgaccctggggattacggtcaggatataaagactgycccccccaaccccaggcagccatgctcccagctgggcatggtgccatagctcggccctctatccactagacaggcaggccctgaggtctctgttagcaccataaccttgttccaagaacccactgtatgcttagaggagtaggagctccccaaggacttatgtgctgcagacagtcaggaggagaggaggggacccatatatgcctaggacaggccccgaaggcctgccagagatgctcagggcatgaacagtgagagaaaagaggaacagtgagcaaaggcagagaatggcaacaatacatgtcagaaacaagcaataaatgctttcagaggccgggcgccatggctcacgcctgtaatcccggaactctgggaggccatggcaggtggataacttgaggtcatgaattcgagaccagcctggccaacatggtgacatcctgtctctactaaaaatacaaaaatcagccaggtgggggtggcacacacctgtagttccagctactcaggaatctgaggcagagaatcgc

SEQ ID NO: 946382 - DNA, 756 bp, Homo sapiens
aatcaggtttaaatagcttcagatcccctctggcttcaaatcattttygttttttgagacagggtcacactctgttgcccaggctggagtgcagttgcaatcatagctcactgtagccttgaccttgacctcctgggctcaagcagtactcctacctcagcctccagagcaactgggactacaagtgtgtgccaccacgcctggctaattttttattttgttaatttttttgtagagatggagtctcacatgttgcccaggctggtctcaaactcctggcctcaagtgaccctcccacctcagcctccagaagtgctgggattacaaacgtgagccactgctcccagcctggcttcaaatatcttgaaggggaggtgtgtcccctgcccgcagcatggctttgggattcaggcaccacaaagccagatctctgtgcttccctgctgtgccccaattccagtttgggtgattttacatcaggtcctttctctcttactttcccatattttgacctaaacagacttatacgaatataaacacatagcccctaggtctggagtcaatggctgctttcccagagttaagcacaggtcaaaataggtggcaggaggtgctagctacatgcacacactcccatgcagcctgcagtgactttctgcaaacccttcaagtgtctcagcaaacctgagaaatgcagtgaagaagctctcttaggacacagagagccctacgtttatccagacagacactccatta

SEQ ID NO: 946383 - DNA, 451 bp, Homo sapiens
accactgcactccaacctgggcaacagagtgagattctgtctaaggaaaaaaaaaaaaaaacctaagaaaccaacaccaacgaatacattactattaaccattctccagacttgatttgggtttcaccagtttctgcattaatggccttttttttttttttttttttttggtttcaggatccagtctaagacaccgcattgcattgaatcgcctgctttcttagtctcctctggcctttaacactttctcagacttgccttgttcacagccttgatagttttgaggagtactgggcaggtatttcgtagaacatctctcagtttgaatttgccagttgtgtttaggatgggactggagttaggagtctttgggaggcatgcctgggaggtgacatgcccctctcccttgtcttgcattaattctgggggtrtgtgatattcacatgacgtc

SEQ ID NO: 946384 - DNA, 717 bp, Homo sapiens
gagaccccatgtctattaaaaataataataaataataaaataatttagccaggcacaggggtgcacacctgtgatcccagcaacttggaaagctgaggtgggaggatagcttgaacccaggaggtcaaggctgcagtgagctatgattgtgccactgcactccagcctgggtgacagagcgagacctcacctctaaaaaaaataataggacggggcgcggtggctcacgcctgtaatcccagcactttgggaggccgaggcgggtggatcacttgaggtcaggagttcaagaccagcctggccaacatggtgcaaacccatctctactaaaaatacaaaaaaattagctgggcgtggtggcgggcgcctgtagtcccagctatttgggaagctgaggcaggagaatcacttaaacacaggggaggtggagcttgcagtgattgcgccactgcactccagcctggggacagagcaagactccatctcaaaaataaataaataaacaaaaattagctggatgcaggcacgcacctgtagtcctagctacttgggaggctgaggctcccaagttccagaatcactggaacccaggaggcagaggttgcagtgagccaagatcacgccactgcactccagcctgggtgacagagtgagaatccatcgcaaataaataartaaatataatattaatattaaaacttaagggagttgatgaaa

SEQ ID NO: 946385 - DNA, 557 bp, Homo sapiens
tgctttgtgattagtccattcatcacacagagataaacctttcttttgattgtgcatcatagaaacactgttttgtagaatctgtgaagggatatttgggagcacctgaggcctgtggtgaaaaaggaaatatctccacataaaaactagtaagaagctttctgagaaactgctttgtgatatatgtactcatctcacagagttaaaactttccttttagtgagcagtttggaagcactgtttttgtagaatctgtcaagggatatatgggaatgcattgattcctatggcgaaaaatcaaatatcttcacataaaaactaggaagaaactttcagagaaactgctttgtaatgtcagttccgtctcacagaggttaagcattcttttgattgagcaattttcaaagacagttttagtggaatctgtgaaaagatacttgggagcgcattgaagctcatggtgaaaaaggataaatcctcagaaaaaactagaaakaatctttctgattaactgatttgtgatgagtccattcatcacacagagttaaaccattctt

SEQ ID NO: 946386 - DNA, 425 bp, Homo sapiens
cccatctctactaaaaatacaaaaattagccgtgcatagaggcaggcgcctatagtcccagctactcgggaggytgaggcaggagaactgcttgaactcaggaagcggaggttgcagtgagccgagatcgcaccactgtactccatccagcctgggcaacggagcaagactccatgtcaataaatacatacatacatgcatacatacatacatacatacatacataaatggggggacacaggagctagaaggtggagtgagaaaggtctctgtgggagtgtgagggtggggggcaggtgctgagccaggacacatagtactcactctggaacattccaggggggcccagatcctccagaccaaaactggaaaagctcagaggcctggataggacacaaagaaaaatggttggtcagtcccctgtg

SEQ ID NO: 946387 - DNA, 761 bp, Homo sapiens
cagtggtgcccaggccagcctgaggcccaaggagaggagacgcccaaacctgcaaggaggtaagmccgggctgcaaggcagcacctaggggcccctacagacaagaaatgcccaaggctagggccacctgggcaggatgagtcctcagtgggacggccgtccgtctcccatttcctgccccaaatccccagctcgtcggccatctcctcctagagagaggactgaaaggctctggggggagcaggagacctctccatactattcttgcaattccctgtgtctctataatttttttttttttttgagacagagtctcactctgtcgcccaggttggagtgcagcagtgcgatcttgactcactgcaacctccgccccccaggttcaaacgattctcctgcctcagcctccagagtagctgggattacaggcacacaccaccacatccagctaattttttgtattttaggagagatggggtttcaccatgttgcccaggctggtctcgaactcctgagctcaggcaatccaccacctcggcctcccaaagtgctaggattataggcgtgagccacctggcccggcctataattatttctaagtaagaaagttaaataagatattccaggtggggtaaaagaaataagttacgctaggaaacaagccagacacaaaggtcccatatctatgcaaaatacccagagcagacagacagaaaagcaaattggaggggccaggggctgggcggggggaatggggagtg

SEQ ID NO: 946388 - DNA, 601 bp, Homo sapiens
tgtccttcaacgaggtcactwctggtgaggagcagcggcgcgggccctggaggtttcagagcgcttttccctgcatgactccttctgttccagtgcatgccatggggtgaatctggtgtagacgtagctttgaatttattaagtattttgtaaaagataagttgtggtcataagagagttggagctaagcaagacttcttagatatttaattggacaaaaacttaacctatatgccaactctagacacatttaattggttaattgttggtaatggctacaggaaacggaataaaattgaagcggcttcattgttctgaagccattactgcactgggatatccagagagctgaaggagggtcccgggggcccctgggctccaggtccatgggtttgcctcgcataggcctgggcttgtgcttgagaactgccatgcagtgagctccagtatgcccccgggttctagatttccaaataaaagagcatttcggaaagttttaagactctcttaaggaacagtggtgaggtgccaacgtcctcactgtccagcttcacggtgggtcctcgggaggaaggggatggaggtggtgctgcctcagtgc

SEQ ID NO: 946389 - DNA, 597 bp, Homo sapiens
caaagaacaaggctcctgttaccaacacggagcacagaaaggtctcacctgcaaggaggcatgattctactattgatgactagaagggagactggggtccctgaccctcaagttctccccaccrtggccccatccccaccaagggtgctatgcagcctctgatcctgccctgccagcccaacgtccagaagcacacaggcagcaacaagcatcagaaccctcaggaacagcagaaccagaaagcccagtccttccactgactccgatccagtccttctaggacagcctggacttggtggatgttctgagacatttaaaaaattactaggccaggcacggtggctcatgtctgtaatcccagcactttgggaggccgatgcaggtggatcacgaggtcaggagatcgagaccagcctggccaacgtggtgaaaccccatctctattaaaaatacaaaaattagccgggcatggtggcacacacctgtaatcccagctacctgggaggctgaggcagaagaatcgcttgaacccgggaggcagacattgcagtgagccgagatcgcgcactgcactccagcctgggcaaaagagcaaga

SEQ ID NO: 946390 - DNA, 565 bp, Homo sapiens
gatgatgagcattttttcatgtgtcttttggccacataaatgttttcttttgagaagtgtctgttcaagatatggattcttaagagcaatgtctggttttgacttttcgactgtagttttttatccccctttctcaggaagctttgagtcttagaatgttgcctataaagagaatttgggatcattaaaattgatttactgaatggttttcatgatcataaccagatatatggtgcccaaggacagaagaagaaattagcccttgttcataccaaagccacttacacgcataaatctaaaggaaaaaacgatcattttggataaaaaatgatgcacaaaaagttatagaatataaatgcaaagtagcccgggtttatgttatgcttggggaaagaaaaggaaaacccaagtttaagattgtaaatggatggagcatgtggcttggaaaatgtcctctcttctcctgttactgacacctactgtgtgcctggtaccgaaccaagcacttacacacagaatcaacttttacccatacaaatcyctgcttgatgggaattaccatttc

SEQ ID NO: 946391 - DNA, 642 bp, Homo sapiens
catctttggtcctataattttctttgttttggtggcggggtcttactctgtcacccaggctagagagcagtagtgagatctcagctcactgcaacccccacctcccgggactcaaacaatcctcctacctcagcctcccgagtagctgggactacaggcacataccaccaggcctggctagttttttgtatttttttatggagacagggttttaccatgttggcccaggctggtctccaactcctgagctcaagcaatccacctgccttggcctcccaaagtgctgggattacaggcatgagccactgtgcctggcctcaaaactctattataatcaccccctcactcccactttagagatgaggaagcagcttcagagaagttaagcaacttggccagggtcttgcagacaggaagtgggaattgcatctggagcctgtgactgtggttctgatgcagggctgtctttcacatctaggttagatctgaagttgcctttctttgtggctaagagatgtaattctgaaaaaatgttcctttgttctggaacagytttatttctgaagattagtagctcaaggcatgcacatcctgtgagcaggaatagagcacgtcattgactggtgtgggggcgggggtgat

SEQ ID NO: 946392 - DNA, 440 bp, Homo sapiens
ccctgcaaagccacggggcagagttgcccaagaccgtgggaacccacctcttgcatcagcatgaactagatgtgagacctggagtcaaaggagatcactttggagttttaacgtaagactgccccactggatttcggacttatatgggccctgtaacccctttgttttggccaatttctcccatttggaacagctttatttacccaataactgtacccccattgtatctaggaagtaactagcttgcttttgattttacaggctcataggcagaagggacttgccttgtctcagatgagactctggactgtggacatttgtgttaatgctgagatgagttaagactttgggggactgctgggaaggtacgattggttttgaaatatgasgacatgagatttggagggccagagacagaatgatattgtttggctgtgtcc

SEQ ID NO: 946393 - DNA, 445 bp, Homo sapiens
ttgggaggctgaggtgggaggatggcttgagcccaggagggagagggtgcagtgagccaagattgcaccactgccctccagcctgggtgacasgcccagaccctgtctcagaaaacaaacaaatacaaatgagtttgtcaatacaatttacctcaaccattaaatactatttaatccttctcattacaagaaaaccaattcaaatatctgggttcttgctttactgttcactcactaacctgctttattttgccaaatccgcctcttgaagtttattcatctgtaaaatgcacatttctatagtccctactttaacattctaattctatatataaggaaagtatatctgactatggacatcatcttgcctaaagtgacttaactgaattacaaaagtatctctataaagtgcttttttttttttaaccaataattactcctcgag

SEQ ID NO: 946394 - DNA, 622 bp, Homo sapiens
aaatcagtgtaactggaatatatggcaccttaaatatttgttgtttctttatgctagaaacattcaaattattctattctagccatcttaaaatatacaatgaagtattrtaaactatatcaccctactgatagatcaaacattagatcttacttatttatttatttgagacagggtctctctcactctgtggcccaggctggagtgcagtggcatgatctcggctcactgcagcctttgcctcccaggttcaagcgactctcgtgcctcagctacccaagtagctgggattacaggtgcgcaccaccatgcccagctaatttttgtatttttagtagagatgggggttcatcatgttggccaggctggtcttgaactcctgacctcaagtgatctgcccacctcagcctcccaaagtgctgggattacaggcatgagccaccgcatccagctgaaacattagatcgatcttcttctattaaactgtatatttgaatccactagtcaaactctctttatatcccctcccccttacccttcctagcctctgataagcaccaatctactccttatcttcacaggattcttttttatctcctacatctcagtgagaacatgtgat

SEQ ID NO: 946395 - DNA, 582 bp, Homo sapiens
ttggcctctagcaaggcacttgaaaattatgtccaaaccaggactcttgatttccattccccactcaaaacctgttcttcaccttgtccacctgatctcaacaaatgggagttcaattcttagacatgtgcaggccagagaccttgctatcatctttgactcctttctcagaaatcccaatttactctatcggcaaagcctgtgggccttcattctagctgttccctttgcctggaatgttttctcctgatacccacatggctaactcctctatctcctttaaggctgtggttaattaaatctcttcttttcaataaatcctaccctaactatcttcaacattccctctcactattccagcataccccggcctctctcacccgggctacaccttctcctggctcctctaccctactgcacactaccttttaacatactatatagtttacttatcttatttattgkctacccccgccagcttgaatgtaaactccatgaggacagggaactttatgcagtttgttctttgtgtcccaactgcctagaacaaggtctgacatgtaacaggtgcttagtaaatat

SEQ ID NO: 946396 - DNA, 737 bp, Homo sapiens
aggccagcaatacactgccactgtccttctcaggagtctatcagctctccaacactatgtcataatttasttcacagggatcttgctcaccttttttttccacaagctataacagtggtccattgcattgatgacattatgctgattggacttagtgaggaagaagtagcagctactccctagacttatgggtaagatatttggatgccagagggtgggaaataaatttgacaaaacttcaggtgcctcctacgtctgtaaaatttctaggggtccagtggtgtggagcatgtcgagacatcccttctaaggtgaaggaaaagttgttgcatctagccccctcctacaaccaagaaagagacacaatgcctagtgggcctctttgaattttggaggcaacatattcttcatttgtgtgtgctacttggcacgtttactgagtgagctgaaaagctgctatttttgagtgatgtgcagacgagagaaggctctgcaacaggtccaggctgctgtgctagctgctctgccacttgagccatgtaatacagcagatccaattgtgcttgaagtgtctgcagagagagatgctgtttggagcctttggcaggcccctacagatgagtcactacacaaaccctttggattttgaagcaaagccctgtcatcttctgcagataactactctccttttaagaaatatctcttgatctgctactgggccttactagagactgaat

SEQ ID NO: 946397 - DNA, 590 bp, Homo sapiens
cctcctgatttctgagtcacatactgtaccaactgagctaggaagaatcttcctgtaggactctcatcccacctgtaggccatttctggtttacttatataaatttgcataggacaccaattgcttttccttctgtagtaaggccatccaatcgtatcattgaagtcaatgatcaaatgctactaatttttaaggagaactctccctatttggcattgtctttaaagaagttgtcttaaaataatccaccatagaatttttgagctaaaaacaaacacctaagatcatttgatttacatctcatgttacagacaaaaatgtttaaacttatccaacatcacacagctaattagccacagctaggcctacactcaagaatttattctcaggccaggcgcagtggctcatgcctataatcctagcactttgggaggctgaggctggcggatcacttgagctcaggagttgaagacctgggcaacatggcaaaaccctgtctctacaaaaaatatgaaaattatctggaygtggtggcacccacctgtatagttccagctatttggggcactgaggcaggaggatcacttgag

SEQ ID NO: 946398 - DNA, 758 bp, Homo sapiens
gacaggaggtgcagctcaggtggtaatgtgagtgatggggagtggctataaatacatgggaagctttgctcactcacctgctactcacctcctgctgtgtggcctggttcctgacagaccacggagtggtactagtttgtggcctgggagttggggacctctggcttatggaggtcaggtaatcaatggagggttttttttgttttgttttgtttttttctggaggcagagtctcactctatcctccaggctggagtgcagtgatgcaatcttggctcactgcaacctctgcctcctgggttcaagcaattctcatgccacggcctcccaagtaactgggattacagacacctgccaccacgcctggctaatttttttttttgagttggagtttcactcttattgcccaggtgggagtgcaatggcacaatctcagctcactgcaacctccgcctccaggttcaagcaattcttctgcctcagcctcccaagtagctgggattacaggcatgcgccaccatgcccagctaattttgtatttttagtagagacagggtttcaccatgttggtcaggctggcctcgaactcctgacctcaggtgatctgctcgcctcagcctcccaaagtgytggggttaaaggcgtgagccacgacgcctggctcaatggagttttaactcaggttcatctcacagtggattgttaaaccctcctgtgatcatttccccagtttccaaatgtgtaataagaatagatat

SEQ ID NO: 946399 - DNA, 581 bp, Homo sapiens
gtatgaaaccaaaaaagaatgcaaagagtcaaagcaatcctaagccaaaagaataaagccaggggcatcatactacctgacatcaaactatattacacagatgcaataacagaaacagcrtggtactggtacaaaaacagacttacagaccagtggaacaagtttgagaactcagcaatatggtcacacacctacaaccatttgatctttgacaaagtcgacagaaacaagcaatggtaaaaggactctctattcaataaatggtggtcggagaattggctagccatatgtggaggattaaactggaccccttccttgtatcatatacaaaataaactcaagatggattagacttaaatgtaaaatctaaaactataaaaaccctagaagaaaacctaggaaatgccatcctggacataggccctggcaaagattttatgatgaagacccctaaaataatggcaacaaaaacaaaaattgacaagtgggacctaactaaactaaagagcttctgcatggcaaaagtaattgtcaacagagtaaacagacaacctacaaaatgggagaaaatattagcaact

SEQ ID NO: 946400 - DNA, 565 bp, Homo sapiens
gggacaatttggaaaaacttggacataaaatacatagcctagaaatatcaaaaacaattttaaagttaggtatgtcatgaatgcataaaatatatgtagacactataatagtgtattttatcattgactaccataaaatatgcacaattctattatagaaagttaaacattatcaaaacgtatgcacccaaacacttacagactgtacatggcatcatttgcagtcaagataaatgtaaacaaatttaaagattaagtattcaatcccaattgcatacaattaactgtagtgtatactgtactactgtaataaatttgtagccacctcccattactattgcagtaagctcaagtgttttcagcatgctctaaaagcctcttatgatgttcatcacctcagagtgagcaatttgtctttccagtagattgagtatcacagtagaaagtgatctcctgtagttctcacgtatttttatccagtttaatgtgataccataaactttccataatatcgtggggccagtacaaagmgccactagtgatgctttcttgttatgcactgtag

SEQ ID NO: 946401 - DNA, 565 bp, Homo sapiens
tcatctcactagggagtgccagacagtgggcacaggtcagtgggtgcgcgcaccatgtgcgagccaaagcagggcgaggcactgcctcacttgggaagcgcaaggggtcaggaagttmcctttctgagtcaaagaaaggggtgacggacggcacctggaaaatcgggtcactcccacctgaatactgcgcttttccgatgggcttaaaaaacagcccacaacgagattatatcccgcacctggctcggagggtcctacgcccacggagtctccctgattgctagcacagcagtctgagataaaactgcaaggcggcagcgaggctgggggaggggcgcccgccactggggaggggcgcccgccattgcccaggcttgcttaggtaaacaaagcagccaggaagctccaactgggtggagcccaacacagctcaaggaggcctgcctgcctctgtaggctccacctctgggggcagggcacagacaaacaaaaagacagcagtaacctctgcagacttaagtgtccctgtctgacagctttgaagagagcagtggttctcccagca

SEQ ID NO: 946402 - DNA, 663 bp, Homo sapiens
aggatgcggtggtgtgtgcctgtaattccaggtacttgggaggctgaggcaaggggatcacttgagcctgtgagttcgagaccagcctcagtaacatagcaagaccccattaaaaaaaaaaaaaaaggaaaaaagaaatcagaagtagaaagtcaggtgcagtggctcactcctgcaatccctgcactttgggaggccaaagcgggtagatcacctaaggtcaggagtttgagaccagcctggccaacacggtgagaccccgtctctactaaaatacaaaacttagccaggtgtggtggcaggcgcctgtaatcccagctacttgggaggctgaggcaggagaatcgcttgaacccaggaggcagaggttgcagtgagcctagatcatgccattgcactccagcccgggtgacaagagcgagactccatctcaaaaaaaaaaaaaaaaatttcttcctgaattaaacgtgggctgtcacctttattcccatagccaggcaatgatttcctgacatggcccgtaactgtcctcaygtggcagccccacacagaagctagttaaaatgaaaccatggccctgcgaggaagtgccatcctccctcacattccacaagcatttgctgagcaccagctttttgccaggctttgggttaggcactgggg

SEQ ID NO: 946403 - DNA, 605 bp, Homo sapiens
aggctgaggcaggagaacagattgaacctggaaggtggaggctgcagtaagctgagatcacaccactgcactccagcctgggtaacagagygaaactccatctcaaaaaaaaaaaaaaaaaaaaagaaagaaaacattatgctaagcaaaaagtgagacacaaaagaccacattttgtatgatttcatttatataaaatgtcaagaattgggccaggaatggtagctcacatctgtaatcccagcactttgggaagctaaggcaggaggatcacctgagcccaagagtttgagaccagccagggcaacatagcaagaccctgtctctacaaaaaataaacaaattagctgggcgtggtggtccgcacctgtggtcccagctactcaggatcacgccactgcactatagcctgggtgacggagggagacactgtctaaaaacaaccccctcaaaaagaagagacacatctatagagacggaaagattagtgcctgccaagatgttcaggagggagaactggggagagaccatttcatgactatggggcttatttttggtgtgacaactatgttctggaattagtggtgatggctgtactacactgt

SEQ ID NO: 946404 - DNA, 380 bp, Homo sapiens
gaaatcaggaggctgaggcagcagaatcgcttgaacccaggagacggaagttgcagtgagctgagatcacaccactgcactccagcccagccaacagagcgaaactccaactcaaaaaaaaaaaaaaaaaccatcagaccttgtgagacttatttaccatcactattgcgagaacagcacagaaaaaccctgcccccgtgattcaattaccttccactgggtccctccaacgacacatggggattatgggagctacaattcaagatgagatttgrgttgggacacagccaaaccacatcagacatgatttgtttagccctaccaagtcgcatgttgacatctgatccccagtgatggaggcgggcctggtgggaagtgtt

SEQ ID NO: 946405 - DNA, 641 bp, Homo sapiens
caaatagttacagtgggcggggcatggtggctcaacgtgggagttcaagaccagcctggctaatatggtgaaaccccgtctctactaaaaatataaaaaattaggccaggcgcggtggctaacgcctgtaatcccagcactttgggagacctaggcgggtggatcacctgagttcaggagttctagaccagcctgaccaacatgatgaaaccgtctctaccaaaaacaaaaaaattagccaggtgtggtgggaggcgcctgtaatcccagctacttggggggccgaggcaggagaattgcttgaaaccgggaggcggaagttgcagtgagccaagatcgcaccatcacgccatcacactccagcctgggggataagatcgagagttcatctcaaaaaaaaaaaaaaaaaaaaaaaaaacttagccgagcgtggtggcacttgcctgtaatcccagctactcaggaggctgaggcagaagaatcgcttgaaaccgggaggcggaggttgccgtgagccaagatcgtaccactgcactccagcctgggmgacagagtgagactccatctcaaaataaataaataaataaataaaaatagttacagtggatagaaaggaagggactcttgtccctgctgtttgg

SEQ ID NO: 946406 - DNA, 649 bp, Homo sapiens
gcctgctgcagctgtgaagctggtcctttcagccgtatgcagcatcctaggtctgatgtcccctgcactcatgtcagagcacacagcccatgctaagggatctctgcctccccatgtcactccccgcactggcctctcctgagaccatctctttcacacactttcacacacctcccctgccccaagattcctcactggatgaaactagcctgtctcatgtcctgggtgagcctctctcatgtcctgggtatgttcacgtgcaccctcaacactcccagttggggtggcaagccactcttgccaccctgccagcaagctctaccttgctgcacttgctgctctattggcccatttcctcatttttttccagttccagtgttagtggggacttgaggtgcatccaaattggcaagccactcctgatgcccccagccactctgggttggattagtgttcattctccgggaggtgatcaagctccccttcatcctcatgggatgggctttgctgccttgggcacttkctctttactgcagttcctgaagtgctggtatcatcctgcagccccattcccagttccattgcactgccaggcagggtgtcagaatatggggagagctggtttctatccagttgaagctcccctgtg

SEQ ID NO: 946407 - DNA, 545 bp, Homo sapiens
ctttgctgccttgggcactttctctttactgcagttcctgaagtgctggtatcatcctgcagccccattcccagttccattgcactgccaggcagggtgtcagaatatggggagagctggtttctatccagttgaagctcccctgtggtgtgccttggatgctgggtctctcctagccccagagctctagtctcacaggcaaaggagacagtaaatctgtcatctccaaccccaggcaagccccccacccccaagaaatgtagtgggatttttaaggaatcagagagaccattggggttcaggaggatattcattaattatttaggtgcaccagccgtcggattaacatccaaaggactgagccctgaacaaagagttaagttaccttttaagcatttagtggggtggggggagatctctgcagagggaagcatactacagaagtgagaaacaaagccagttattcaattgaggtatgcattacatcatttcttacttttcaaggagaaacatgttttgygacttgagtttgtctgtctagtgac

SEQ ID NO: 946408 - DNA, 410 bp, Homo sapiens
tcctgctcccagactccatttcccagcattccctcgcagtcagagcccttaggccgggaggagcaagagcctcaatggtttctggsaaatgtagtccagctgcgatgccgcgtttaaggtaccgggacttacagttccgagacagggactgctcaggcgcgttccgggacccggcggaggaagggaaggcctggctgtccagcggaatccgcctggacgcacggaactcgcggacccgaccggagcaggtgggtgcaggccgggccagacaggctagcagaagctccgggggcgggcccaagttgggtctggttgggagtggggagggcgctgtgggtgacgccccgccccctcttgtcattccctgagtcccacctagtatcagtgcggctcagacgactcggcgcgca

SEQ ID NO: 946409 - DNA, 410 bp, Homo sapiens
tcctgctcccagactccatttcccagcattccctcgcagtcagagcccttaggccgggaggagcaagagcctcaatggtttctgggaaatgtagtccagctgcgatgccgcgtttaaggyaccgggacttacagttccgagacagggactgctcaggcgcgttccgggacccggcggaggaagggaaggcctggctgtccagcggaatccgcctggacgcacggaactcgcggacccgaccggagcaggtgggtgcaggccgggccagacaggctagcagaagctccgggggcgggcccaagttgggtctggttgggagtggggagggcgctgtgggtgacgccccgccccctcttgtcattccctgagtcccacctagtatcagtgcggctcagacgactcggcgcgca

SEQ ID NO: 946410 - DNA, 460 bp, Homo sapiens
caggaaagaaaggaaaattcrtttgaaagagacccaagcgggcacctgaagatccaagagagaaaagagagcaaaagaagactgcaaaaagagagcctttcaccttgatcccaggactttttgggctcacctcttcccatgattcttccctttagggtgggctttccacatgcccagtgcttgcaccctttggcattgagcacagcgcagtgtgtttaaggagttatatgcatgcccacgtgagcctttcttcccttttctggtggagttgcccccagaagatcatacttcaccacttttgtctcttgacacgtatgtccaggaagttgcttctccctggggtttgcattcaattgacattttgatgttaatgggtgtggaccattagtaagtggcctctccctcgtgctgccaaactgtcatttttagaaaggcaatgcaataaccaccgaaccatcac

SEQ ID NO: 946411 - DNA, 560 bp, Homo sapiens
cacgccttgaggcccatgggatctttctgtgccccagtgaggcccttcccacctcaacagataaggtgarcccatccctgctcacctggtgggattcaaaatcagatctgaggaggaatccaaagacccgagcaggcgccctgaagctcctcctccaccggtaggagttggctcaaggaggtcctgaggacaggactccgggagtgcggccctggggtgcctacagccctctctcccacgtcgccgcctaccggaccggggatccagccaccgccagggttgcagccaaaggcccctgcctctgcgctgccgccattgcttaaaggggcttcagcctgacttccagcagcggagcgcgagtcggcctagccaatgcgcatgcgcgaagcgccagccaattctcccatcacagtgagtcccacggttgcctgagtaaccactccctgaggcttggcaaagcaggagccctccatggcagtgcttgggtgtcggggctttgaggctctggcctgacctctccacgggggcgacaggaaggtctccggatgccaggagtctcc

SEQ ID NO: 946412 - DNA, 654 bp, Homo sapiens
catcactgcactccaacctgggcaacagggcaaaactccrtctcaacaacaacaacaaaaaaagaacgtagcccaaaaatgtgctgtgttgggtgtgcagagttttttgtttgattgatttcttttgttttaatagttgccaacattcaaaaagtagaggattttatagaaaaatctagtctttttcttcacatatttacagtgggctggagccccacagtggccacccactgagacagggcattagtttcctgttcaccatggtcacgtgctcccagctcagtgcacacaggcatgctcctgcctggcacccacagacagctgaatttggagcacatgctttatttctcctctgtttgcccctctctctccctgaggatgtgctattgcctctgcacatcaaggtttattccttctctgcttatagatgttatattactggcttatattgattttatcctaaaagtgttctcaaaggatttctactgttgatttagccaaaacattcactattccctcaaaaattgaaagtgttcatctgaggatgtttctaaaacttgatttctagtgctttctttgctcctatagaagttattagtacacttttaaaataacttttcatatttgaagaatattcagttattgccttatgcc

SEQ ID NO: 946413 - DNA, 723 bp, Homo sapiens
agaggatgtcttaccctgaaatcagcatgttcttaggagggacataaaatggggttgtatgctgactcagactgagggtagctcaaagttcaggagcctgagggagggagataagcttaagaagagttcgattaagggatattttattttaggctaagtgtggtggctcatgcctgtaaacccagcactttgggaggctgagacaggcggatcacctgaggtcaggtgttcaagaccagcctggccaacatggtgaaatcctgtctctactaaaatacaaaaattattgggaggctgaggtgggcagatcacctgaggtcgggagttcgagaccagcctgaccaacatggagaaaccccatctctactacagaaaaaaaaaaagaaaaagaaaaatcaggtattgtggtgcatgcctgtaatcccagctactcatgaggctgaggcaggagaatggcttgatcctgggaaatggcttgaaagtttgtggtgagccgagatcacaccagtgcactctagcctgggcaacaagagtgaaattccatttcaaaaaaaaaaaaaaaaaattagccaggtgtgttggtgggtgcctataatcccagctacttgggagggtgaggcaggagaattgcttgaacctggraggcagaggttgcagtgagctgagattgctccactgcactccagcctgggtgacaaagtgaagaaatattttgagcgctga

SEQ ID NO: 946414 - DNA, 607 bp, Homo sapiens
ttcttaagattagtttattgggtgttttggttttacttatgtattataattttagacaatttgcagttmtttttgtacactttaagtcaatttaaggtttaattaagagataaattatgcatatctatcataatcagattacatttgtatgtgtatttatctataaatatgaccccaattttagttatggcttatattctttcttagctgatttttgatggtagttttatcttgtctaagtgagtacttatggagatagtcttattatcaccatgtgtttaacaatgaatatatatttgcttttgtgagagacacttctatgatttgaaagtaaatttcaaaaagatacataattctgttttttttttttttttttttttttcagtttttctttaaaaaaaattgcttaaaaacacgtaatataaaatttaccaccttaaatctattgaagtgtgcatttcagggccaggcttggtggaggctcttatttgtaatcccaggattttgagaggccaagactggaggatccatggagcccaacagtttgagaccagccagggcaacatatggtgacacctctctataaaaaaaataataataatagcca

SEQ ID NO: 946415 - DNA, 667 bp, Homo sapiens
tggtggctcacatctgtaatcccagcacttttgtaggctgaggcaggcagatgtcctcaggtcaagagtttgaaaccagctttgaccaacaaggtgaaaccccatctccactaaaaatacaaaaattagctgggcatcatggcatctgcctgtaatcccagctactagggagactgaggcaggagaatcacttgaaaccaggaggcagaggttgcagttacccgaaatcaaaccattgcaccccagcctgggcaacaagagggaaactccatctcaaaaaaaaaaagtcaaaaaacaacagatgctggagaggctgcagagaataaagaacacttatacaccgtcgttgggaatgcaaatagttcacacactgtggaaagcagtctggagatttctcagagaacttaaaacagagctaccacttgacctaggaatcccattactgagtatggaaaacagatcattataccaaaaagacatgtggactcatatgttcattgttgtgctgttcacaatggcaaagacgtggaatcaacctaggtgcccatcagtgatggactgaataaagaaaatgtgatacatayacaccatggaatactatgcagccataaaaaaagaatgaaatacatacaaagttgtatgtatgctcttttgaggtgttattccc

SEQ ID NO: 946416 - DNA, 614 bp, Homo sapiens
catggtgtatacgtctcacattttatttatycagtccaccattgatgggcacctaggttgattccatgtgtttgctattgtgaatagaatggcaatgaacatacgggtgcatgtgtccttttgatagaacgatttactttcttttggatatatacccagtaatgagactgctgggtcaaatggtaggaacttttatttttacccctccccaacaggggattgctgcttttcacaagggtttatttttgccccctctacttttggacttctatgtgccagtgcagcgtcaattgatccactcatttgacaggcattttctgagcacctgctgtttgtggtattgtgccaagcactgggctattacagcacataagataggtgcactttgggcctttttggttcttatatactaatgagggagacaaacccaaaataagcaagatatgttaattaacatgattataaatggctattaaacctctgaagaggataaaaatcaagtgctaaaatagaaaatagcagggtgggtggaggcaattaaaacaaagtggtcagtgaaaagtatggtaaggagtttggaattcattctaagtatggcactatgtgctattcat

SEQ ID NO: 946417 - DNA, 542 bp, Homo sapiens
cattcttcacagaaatagaaaaaacagtcctaaaactaatatggaattacaaaagacccggaatacccaaagctatcttatgcaaaaagaacagaactggccaaattactttacctgactgtaaattgtactgtagagctgtagtaacaaaaacaacatggtacaggcataaaaacagacacacagactaatggaacagagtatagaacccataaacaaatccacatacttagagttaactcatttttgagaagggtaccaagaatgtacactgtggaaaagacagtctcttcaataaatggtgctgggaagactggatgtccatatgcagaagaatgaaactggacccctgtctctctatatatatacaaaaatcaagcaaatggattaaagaattaaatataagacctcaaatacgaaactactacaagaaaacattggggaaaatctccaggacattagtctggrcaaaaattcctttcttgagtaatagcccacaagcacagacaaccaaagcaaaaattgacgaatggaatcatatc

SEQ ID NO: 946418 - DNA, 632 bp, Homo sapiens
taattttttgtatttttagtagagayggggtttcaccctgttagccaggatggtctcgatctcctgaccttgtgatccgcccgcctcggcctcccaaaatgcgggggttataggtgtaagctactgtgcctggccctaaactggttcttgaaaaaggtggcagatcaatacgcccctgcaaagcagggggaaaaaacaaacatttgctatttaataacctaggcaggaaagataagctaaaaaaaatcaaagagaattattcctatttcataccaacattctctttttttttttttttgagacggagtctcactctgtcgcccaggctggagtgcagtggcgcgatctcagctcactgcaagctccgcctcccgggttcacgccattctcctgcctcagcctcccgactagctgggattacaggcgcccgccaccaccccaggctaatttttttgtatttttactagagacggagtttcaccgtgttagccaggatggtctcgatctcctgacctcgtgatccgcccgcctcagcctcccaaagtgctgggattacaggcgtgagccaccgcgcccggcccatacaacattcttaagtctagataatgggaactaataagttcccaaaactg

SEQ ID NO: 946419 - DNA, 479 bp, Homo sapiens
gacacagggcaccaggtccctaggatgcacacagccaagggacccagggcccagcccrcaaaaccactttttcctcttgggcctccaggcctgtaatgggaggggctgccatgaaggtctctgacatgccctggagacattttccccatagttctgggaattagcattaggctccttactacttatggaaatttctgcagccagcttgaatttttccccagaaaatgggtttttcttttctattgcatagtcaggctgcaaattttctgaacttttatgttctgtttccctttttaaactgaatgcctttaacagtatccaagtcatctcttgaatgctttgctgcttagaaatttcttccaccgggtaccctaaatcttctctctcaagttcaaagttccacaaatctctagggcaggggcaaaatgccaccagtctctttgccaaaacataacaagagtcacctttgctccagttcc

SEQ ID NO: 946420 - DNA, 761 bp, Homo sapiens
ggcaacatatgtagatttggaagatgtgcctgtcaggagcctatttggcctgtaatcccagcactttgggaggccgaggtgggcggatcacctgaggtcaggagttcgagaccagcctggccaacatggtgaaaccccgtctccactaaaaatacaaaaaattagctgggtgtggtggtgggcacgtgtaatcccagctactcaggtggctgaggcaggagaatcacttgagcccaggaagcggaggttgcagtgagccaagactgtgccattgcactccagcctgggtgacaagatcaaaactccatctcaaaaaaaaagcctatttgtttgagggacaggaacctcagaagaaaagaacatatcctcaaggaagaggaagccagagcgataagcttgatggaagaatagctaatggctattcatattagaactgcaatacattaatatccctacttctttaccctttaccatgtaatgctgaaaaaccctcccactccgatgctgggcccagcctgcgagatggtagcaggcgcagcctgtgagatggtagcaggcccagcctgtgagatagtcaacagggacttgagaaagcattttggcctttccacctgtgctcctgcagctctgccttcgccatgmaaccatgcccaggctagcctgctggagggagaatgtggagcagaactgagtcagcccagccaacctccagacctgtgcagccccaaccaacagccaactatcccccagtcccgtgagtg

SEQ ID NO: 946421 - DNA, 582 bp, Homo sapiens
atggcgtatatatgccacattttctttatccagtctctcmttgtcaggcatttgggttgattccaagtctttgctattgtaaatagtgctgcaataaacatacatgtgcgtgtgtctttacagtagaatgatttataatcctatgggtatatacccagtaaagggattgctgggtcatatggtatttctggttctagatccttgaggaatcggcacattgtcttccacaatggttgaactaatttacactcccaccaacagtgtaaaagtgtacctatttctctgcatccttgccagtatctgttgtttccagactttttaatgatctccattctaactggtgtgagatagttacctcattgtggttttgatttgcatttctctaatgatcaatgacaataaactttttttcatatgtttgttggccgtgtaaatgtcttttgtttgttttgagatggagtcttgctcttgtcacccaggctggagggcagtagggtgatcttggctcactacaacctctgcctcccaggttcaagcgattttcctgcctcagcctccacagtagctgggattatatatgca

SEQ ID NO: 946422 - DNA, 582 bp, Homo sapiens
atggcgtatatatgccacattttctttatccagtctctcattgtcaggcatttgggttgaytccaagtctttgctattgtaaatagtgctgcaataaacatacatgtgcgtgtgtctttacagtagaatgatttataatcctatgggtatatacccagtaaagggattgctgggtcatatggtatttctggttctagatccttgaggaatcggcacattgtcttccacaatggttgaactaatttacactcccaccaacagtgtaaaagtgtacctatttctctgcatccttgccagtatctgttgtttccagactttttaatgatctccattctaactggtgtgagatagttacctcattgtggttttgatttgcatttctctaatgatcaatgacaataaactttttttcatatgtttgttggccgtgtaaatgtcttttgtttgttttgagatggagtcttgctcttgtcacccaggctggagggcagtagggtgatcttggctcactacaacctctgcctcccaggttcaagcgattttcctgcctcagcctccacagtagctgggattatatatgca

SEQ ID NO: 946423 - DNA, 566 bp, Homo sapiens
cagagaatataaagcaggcagaaaaccgtgtaaaggagagactggcctagcctcccagcctgtatctttctcccatgctggatgcttcctgcccttgaacatcagaccccaagttcttcagttttgatactcagactggtcctcattgctcctcaagcttgtagacagcctactgtgggaccttgtgattgtgcaggttaatacttaataaactcccctttatatacatatctcctattagttctttccctctagagaaccctgatacaccaacttaaagtcggattccttgaattataaaatgactattgatgtaaacattcctggaagttgttaatattaacaatctacttttgtgagttaggcaaataaatggctggtctacctgctctaatttatgcccatccttgaaagttaacaaaattttaatactgtataagatcccatgggagaaattaactttggatttcccccttaagaatacagtaaaaggccgggtgtggtggctcacacctrtaatcccagcactttgggaagctgaggtgggtgaatcacttgagcctagg

SEQ ID NO: 946424 - DNA, 641 bp, Homo sapiens
tgaggggtacagacagtaagttattcttagcagaggagagggaataaataccttttgcacgtggggcttccggttttttgggcacagccacagatrctttcttttcaagtacaacttctttaggagcttcaggaactttgaagatattagtatcttttagttagaagctataaagggggaatatcgactccacatttacccaagcaaatacaacttgtgagatcggcggacacttctatacagtctttccccagggccccccgactgacaatgtgtaatgatacctacctttaggaggtggagcttctggctttttggcaggaggcaccggtactttcttttctgggaccacttccttcggtggcagcacttcaggcacttcaaagatatttgtaatttgtgtttagaaaaggtgaaaatgatggatgccttttgcatataaacacccaccaagatattttggatagtgattgacatttgttttctttagaattatatcatctttatgtagtaggatttttaacatgtaatttcctagttaaaataacagttatttttctcctatagtttgtatagctttggcattaccttcagggggaggactttccggtttgggaggaatagcttcaggcaccttcttt

SEQ ID NO: 946425 - DNA, 620 bp, Homo sapiens
accctccagggcagtcctatgactgtttcttgcttcctgccctctgatgtttagaggtgggtagccctgggctcctcccaggtctggacatcatcatcccagctagaggcatggagcccccccaatcacagaggaagagacagtggtataagaggctccttggtggggtgtggtggctcacgcctgtaatcccagcactttgggaggctgaggtgggacaatcacttgaggtcaggagtttgagatcagcgtggccaacatggcaaaacctcatctctactaaaattaaaaaaaaaaaaataattagccgggcctggtggtgtatgcctgtaatcccagctactcaggaggctgagacacgagaatcacttgagcctgggaggtgaaggttgcagtgagctgagattgcaccactgcattctagcctgagacacagagtgacactctcttaaaacaaaatagaaaaacaaaaaagactccttagattcatactggaytccggcctcggttccactggtcataattcaactactttgcatctctaagtctctgtttaacttcaaaaggaagttagccttttccttgcagaggtgctgaggattaaatgagataatacttgg

SEQ ID NO: 946426 - DNA, 608 bp, Homo sapiens
aaagcactgaattatatcatgatacaatcatcaattgtaccatgaatcaccatcagcggtggtcttttagggatatgaagaaggggttttcacaatacatcgcatgacacaccatcttccaaatctctaaacatttctctccacagcccagtcctctccatagttgtccaaatccctccctcttttctcttgttgtctccaaaactcaaaaccatgctctgactttctatatcctgccctccccttcttggaccatctgggaagccccctgcttccccagggtgtcccctcctccccttctgggatcagtcatctttcctcaaatggaccagttcggcctctcttagtttctccaactctgcatctcaacctttctcccttcactacacaataatgtccaggaggcaaagagcccacaaacctgggaacctccctttccagaagggaggttctggaatgactacaaatatttggttatgattttcttccctgccacgcctgttttcatgggcagtgctgagccccggtcctggcagagctcagamccaggctctcatgagctggggcaagtggggcctagggaacctctgggttgaggaccttgcacc

SEQ ID NO: 946427 - DNA, 440 bp, Homo sapiens
ttcggtttcaatcctttgtttcatcctttccctcattcctagaaataggttaggtatctatggcagtaacagtgagtgcttcccaaagagccacacacgttttcaagcctcccctgcggttgagttgagccatatggatgagttctggtaaatgggaaaatatttacttgtattttctttgagttctattgtagttttatttttgtatttaatccctgtggaatttattttagtatattagtttcaagccggttgttcccagactatttaattaatctttccttttcctaccaattgcacataccaatcagtatatgataaattctgatttctgrttcagtaatcaattttctcattcctatgttggtatcaaattcccaaattagagtaattttgaaatatatcttactatctagtaacagctatcccctttaattttt

SEQ ID NO: 946428 - DNA, 440 bp, Homo sapiens
ttcggtttcaatcctttgtttcatcctttccctcattcctagaaataggttaggtatctatggcagtaacagtgagtgcttcccaaagagccacacacgttttcaagcctcccctgcggttgagttgagccatatggatgagttctggtaaatgggaaaatatttacttgtattttctttgagttctattgtagttttatttttgtatttaatccctgtggaatttattttagtatattagtttcaagccggttgttcccagactatttaattaatctttccttttcctaccaattgcacataccaatcagtatatgataaattctgatttctggttcagtaatcaattttctcattcctatgttggtatcaaattcccaaattagagtaattttraaatatatcttactatctagtaacagctatcccctttaattttt

SEQ ID NO: 946429 - DNA, 650 bp, Homo sapiens
gcatttttcagtagagatggggtttcaccatattggtcaggctcrtctcaaactcctgacctcaggtgatccaactgtcccgccttccaaagtgctgggattacaggcgtgagccaccatgcctggctccattttatttttcttgtcaagggaccagctttgtttttgttgattttctctactgtttttctgtcttctattttatcaatttctgttttgatcttcattatttcctgttgtctgcttcctttgagtttaatgtgcactcttgtttttattatttatttcctgagatggatcctgaggtcattgccttgagtcatttctttttttgtaaaataggcatttggtgctatacagttccatcagtggcatcccacaaattctgatatactgtattttcattttcattcagttcagaatatttagtaatttccctttttatttattctttgaactatgggttatttagaagcatgttatttagtttccagatatttggatatttttcagttatctctcttctattgatttctaatttaatttcattgtggtcaaagaacatatttgtatgacttgaatctttttacatatattgagaattgttttatggctcagaatgtagttggtctttgtaaatggcccatgtg

SEQ ID NO: 946430 - DNA, 610 bp, Homo sapiens
aatttaatccacatcctaaaaatccatataagaacatgataattatgtttttcaaagaaattcaatctatttcaaaaagtggctgctgtttgggtttacattcgtgtatgatgacgcagatgtttacaygctcaaagtacaactgcatatccaatttcacaaaagaagttaaaacagttttaggttttagaaataacgtcacaatagtcttttgctcaagttaagttgctaccctgaatgtcttcttccccaaaggcatctacaggaagcagttgagtcactttctttcccttggcttaggaagtctcttacttctaccatacacctttaactttcactttcttgtctttcctttgcttgctacctgcgtgtgcactaaagtcatcatttcttttcaaatccaccaagtgttttgaataaataatggtcaacttggctgtcacttaggaattccccaccaaaccttgtctcttacatcacactctgcgccctgaactgcaaccccaggacaagttctgacctgacccagtctggcccaggctcctggggcaccatgttccagcccttggctcccacacatcggaatgaaagattggatttcattacactc

SEQ ID NO: 946431 - DNA, 622 bp, Homo sapiens
gcttgtccgaagtcagacaaccagaaggtccagttgatgccaaagctggcgtcttgaaagagccaccatctccttttggggtgatgaaaaagttttggaaccagacagaggtagggcttgcacaacactgtgaatgttctgaaagccactgaattgtacactttaaaatggttcaggccaggtgcggtggctcacgcccgtcatcccagcactttggaggccgaggcaggcagatcacctgaggtcaggagttcgagaccagcctggccaacatggcggaaccccatctctactaaaactacaaaaatcagccgggcgtggtggcgggcgcctgcaatcccagctactggggaggctgaggcaggagaatcgcttgaacccgggaggcggacgttgcagtgagccaagatcgcgccactgcactccagcctgggcgacagggtgagatctgtctcaaaataaataaataaacataaaaaggttcattttatgttaaatgaattccaccacaattaaaaaataaaaaacaaaaaagtcgccatattgccaagaatgatgagcccaggagcatccyaaagtcaagctttacaataaaaagacaatgcatttggcgcgcaaagcc

SEQ ID NO: 946432 - DNA, 726 bp, Homo sapiens
  misc_feature 668, 669, 674: n = A,T,C or G
tttgtatttttctgtagagacgtggtttcgtcatgttgcccaggctggtctccaamtcctgggctcaagcgatccacccatcttggcctcccaaaggccagaattttgaattttctttccttttttttcttagacaggtctcactctgtcacccacgctgccaggctggagggcactggtgcaatctcagctcactgcaacctccaccgcctgtgctcaagcaatcctaccacctcagccaccgaagtagccgggactacaggtacacaccaccatgcccgactaatttttttttttttggtagataatggggttttaccatgttgcccaggctggtctcaaactcctgagatgaagtgatccactgacctcggcctcccaaagtgctagaattacaggtgtgagccactttgcctggccgggaattttcaatttgctactagccacattgaaaaatgtaagaaagaaaccagtgccatttattttaatagtattttatctaatccaatatatgcaaaatattgtcatttccacaatgtaatcaatgctaaaaggtactgacgaggtcctttacattcatttcttttgaacccagccttagaaacgctgtgtgccctccgggtatacggcacacactgatatggctgggtgcgctttcaggcgctcanngtgancacgtggccggcaacagcgcaggtctagacagaacatgaaagcgtctgaaag

SEQ ID NO: 946433 - DNA, 594 bp, Homo sapiens
tcattgcagcctcaacctcatggactcaggtgatcctctagcctcaacctcccaagtagctgagattacaggtgcataccatcacatctggctaatctttatttttctgtagacatggggagcctcattatgtttcccagcttgtgtcaaactcctgggctcaagtgatcctccctctgtagcctctcaaagtgctgggattgcaagcatgagccactgtgtccagcccagacttgttatttttcagttttgaactatttcttagtgactcttgaacttcctcattgttaagtgagaggtctagaaatcagagcgtggtgaggacccagaaccacacccgatgctctgttctctcagaggggcccaaatacctctgtgcagacagcggcagggtagagggactgtccacactggaggtcagcagcacccctgagacctgaatcaggctgagggtcaagagctggagaggatggagcggggtgggctcacacaccaggcagcagggatgggttcccagcagggtrgtataagtcaggcttggtgcccaaagtaggaatgattctattctgccagagggtcacagactaggccacc

SEQ ID NO: 946434 - DNA, 625 bp, Homo sapiens
catcagtcccttccaggcgtcatgcagtttcctctttctcccggtttccttgcttccttatctctcatcttgctgtactgtacatagtgtcttaaggttcctcaaacctattttcagcacaagatgggggcacagacaaattagtcacatcccttatgtgtgttctgggaatcctctgcttgtctgtgtggagggcagggagtgcgcaccctcccacccatcaagggttcttgattctttttccatcttgagccaccgcgaggctgagtcaaccgaaatctgctttcttgcgatgctgtgacaagttggcccccacagtcaggctcctgctcacagactcagttcttccactcagaaggctttgaaatacagcatttcaaagctttattcacaaagatgtttagtggagtattacttataatatcaaaagactggaaataacctaaatgtccaacaagggagggtggttatggaaattatggtagttatacttgatggaatattctgcagttatgtmaaaatgcatatgaaatcttgttaaatgggggcggggaactaacttttaactgagatttgcttgtacctatgtaaaccctttgcataatgaaaaaataaagagtaaata

SEQ ID NO: 946435 - DNA, 749 bp, Homo sapiens
aaatagctctcttaaggttcaaaaattgatatggcagtttaacctttttcatttgtatagacctaggtggtgctcatgaccctgaagagcaaaaagcatatcaaatgtaaaggcagagtkaatatgatcagagaggatcaagggtctttgggatacactacgtgaaggtgttgcagttctcaggaggtacgggttcagattgcatttataaggctcaacagtagggctcaggctaaattttattttattgtccatcctgattagtccctgtggtagcagtatttttgtttcacaactccttccttccccaagcttgctatggtttactatagataaagtacgcttctccacctaattcacgttgggcatggtcaatacaatgtgggtggatgtatcatatgctatatctgaccagagactttatatgagtttgtgaaatttggcatgacctcctgcatttctgccttttgctttgaggagagaatgccccaagtagccattgcccatttagcctgggtcctggaatgagaaacacataggaaagacccaaacctaagcccaagtgagcctggacaacccacatgcagtgcacagaccagtgagtgaaaaataaatatttgttcttatgaatcactgacatttgggagttacctgttgtgcaacactattgcattaaatcttgactaatacaatcattgagaaactaattgttctcatcagtgcctattgtgaacaatcaaacagactag

SEQ ID NO: 946436 - DNA, 655 bp, Homo sapiens
ggagggatagtttgatcaacaggaaagcatatgtaaaagcacaaggtgaacatgtgaagtaccacatgagcgctatagcgtgttgcttttataatggccagttagggagagttcaccaaggaggggagaatggagggcaagtttgagtagttgttgagggaagaaaaggatttgcacatatatagaagaggaaccacataaataaaggtgcagaggtgtgggagatggaagaattgagagagatttagctcttgagtgtggctggggtggccctcgtgtgctgcaaaatgccagagagactgtggtccttaacatcaggcatttgctctataggcaataaggagccgtggaaagctctagagtagggtagtgacatgcacagtgtggtatgttaagatggccactctggctgggctggggagacaactcaagggaggaagaccagttaagaggtgactacagtgttccaggcttcagataatgaggacctggtgcaggtggtgccagtgacaacgtgaggtaaggtatggaaatgggagtcactagtaaaatgagttgattggcttccagaggaggtgagctcctgaaagcttagtggcaggtcagggttcctgaaaacctcacttcmcctgcctgatggccatctcctctcctc

SEQ ID NO: 946437 - DNA, 583 bp, Homo sapiens
aagacacatatttatcaccatacacttttaaagaccaaaaggccaaaagttggtagggatgcgtccttttctgtagtctctaaagaatttttgtttttcttgccaattttggcttctatagattgctcacattctttggatcatatccgtcttccatctttaaagcaaagaatggggccgagcgcggtggctcatacctgtaatcccaatactttgggaggcctaggcaggtagatcacctgaggtcaggagtttgagaccagcctggccaacatgttgaaaccctctgtgtattaaaaatacaaaaaaattagccgggcgtggtggtaggcacctgtaatcccagcaaactcaggaggctgaggcagtaaatcgcttgaacccgggaggcagaggttgcagtgagccgtgatcacctcattgcactccagcctgggcaacaagagcaaaattccgtcttaagaagaagaaraaaaaaaaagcaaagaatagttatttctcaatttacatactgtaactgactctcctgcgaccttctcccatttattattactccagtgattacattaaatcccagataact

SEQ ID NO: 946438 - DNA, 674 bp, Homo sapiens
tgtttttgacactaccagtatctctaactttaagtttaatcattttcacattaaattactatattcttggtaacatggactttattgtattcttcaaatatrccaagttcatcatcatctttgagtttttgcactgcctgtgccctctgtctaccatactatagccacaaaagtttgcatgtttggcttcttcagtttatccagatatgatccaaaatgtcagctcttcaaggcctttttttattattaaacacaaattggttactcccaatccagagtcacagtttatcatttcacttttcgttttagtttttacagagcagtatctcttcctgaaactatgctgtttattttctaccttaacggcggtctatttttactaggttgtatctcttggagagcagatagaccttatctgcctcaatactttctttcttcagttcctagaatagtcctgacaaatgggaggtattcaatgattgcagtacttggaaataaacaaatcaatttcagataaaattctacagtctatttttattctttttttttttgccctttttcaggctatgtgtttattaaacacctttttcatggaagctttcacttcctggttatgaagggtataaatgacaggattcaacaaaggaagaatcactgtgtggaagagagaaacc

SEQ ID NO: 946439 - DNA, 786 bp, Homo sapiens
ccagtgctaggacctgctgtacactggtgggggactagtggattcccagttccacatgaggcctccagtcgtccggcgccccccaccaagccaagcacctcggccagttccctaatcaaacaggaagggcccagtctcttcaccagtctgcaaatcatccttgagctgccgtgtccccgcggggctgggttgagcaacagtattttgccccctcgggtattttccggaattgctgctgggggtacaattgcctccacagagccaacagcattccattgggtttcctctcagtttcctcccgagcaaccccggctgcaagtaaatccatccacatctgcatgcgggtcacccgctggggtccctttttatttcgtggggtggttacctgtgaagggggcaccttccccttctttatggcgcggattccccaatcccgctgatggccttctgcctcctcaagggctgccatagcagtagtcacttcatgtatgtggcaccccacatatggagtaagaacagcagctagagagccaaaagcactcagaggctgccagtcagcacaagatccctcacgtgggagataaaatgttcatcatctggcctctagggattcagatccaacatagcctgccgcatgcccatctccaggagtacctgtaccaaatcagctatgattgycattgactcataatttctggtatctctccagcatccttcctaacagtccatatggctgccatcagccactcgattaacatgtgatcaccttgcccttgtgccaaccat

SEQ ID NO: 946440 - DNA, 786 bp, Homo sapiens
ccagtgctaggacctgctgtacactggtgggggactagtggattcccagttccacatgaggcctccagtcgtccggcgccccccaccaagccaagcacctcggccagttccctaatcaaacaggaagggcccagtctcttcaccagtctgcaaatcatccttgagctgccgtgtccccgcggggctgggttgagcaacagtattttgccccctcgggtattttccggaattgctgctgggggtacaattgcctccacagagccaacagcattccattgggtttcctctcagtttcctcccgagcaaccccggctgcaagtaaatccatccacatctgcatgcgggtcacccgctggggtccctttttatttcgtggggtggttacctgtgaagggggcaccttccccttctttatggcgcggattccccaatcccgctgatggccttctgcctcctcaagggctgccatagcagtagtcacttcatgtatgtggcaccccacatatggagtaagaacagcagctagagagccaaaagcactcagaggctgccagtcagcacaagatccctcacgtgggagataaaatgttcatcatctggcctctagggattcagatccaacatagcctgccgcatgcccatctccaggagtacctgtaccaaatcagctatgattgtcattgactcataatttctggtatctctccagcatccttcctaacagtccatatggctgccatcagccactcrattaacatgtgatcaccttgcccttgtgccaaccat

SEQ ID NO: 946441 - DNA, 649 bp, Homo sapiens
tgtgttcgctagcctctgcctttggtgtcattggaggcagggatctctctgtggctccaaagccatagaatcatcctgggcactggcgatgccacagcttggcctccttctgttagcaatgagaagcaggaaaggctgacaaagccaggggaacattgggggaaatagggaggtggagggagatcaggagctgcttcccaagaaagacctgtgtagtcttcagtttgagacctgcaatgaaacagctcttgtggccacagcaggtagtggaggcaggtgtcccagtccccagagggtttcagagggccacgttcccatgggccatttggcttggagtgctctctgtgataggttgcatgtgcgcatcaaatctctggagattttttctgagatggtgagatgagaccaaggaacgcttgttggctttcttctctgccccatacccacagaacccactccatctccctggaggtgtaacccctgttcgttggagaaaacctaagtccatttcctacttcattctctctgattacgcctcagcactttttcctttgkggtgagggtagagtccaactgtgcctctagtcccaaagctccaaactgctcagacccaccaggcagtggcctaaggcagcgaattcgtgtgcct

SEQ ID NO: 946442 - DNA, 550 bp, Homo sapiens
aaacctctttcttttgtaaattgcccagtctcagktatgtctttatcagcagcatgaaaacagactaatacagtaaattggtactgggagtggagtgttgctgaaaagatacccaaaaatgtagaagcaactttggaacggggtaacaggcagaggttggaacagtttggagggctcagaagaggatagaaaaatgtggaaaagtttggaactttctagaaacttgttgaatggctttgaccaaaagcctgatagtgatgtggacaataaggtccaggctgaggtggtctcagatggagttgaggaatttgttgggaactggagcaaatgtggcttttgttatgttttagcaaagaaactggtggcgttttgcccctgccctagagatttgtggaactttgaatgtgagagagatgatttagggtatctggaagaagaaatttctttttttttttttgagatagagtctcactctgtcagccaggctggagtacaatggtgctatctcggctcactacaaactccacctcccaggttcaagtgattctcc

SEQ ID NO: 946443 - DNA, 574 bp, Homo sapiens
cccagctctctcaggagagagggagcctgtctcactggttcatgggatcctgtgacaggggactcttccttaatctctaagacaaayagggaggcactttgggctctgaaatcctgtgattcctgggaaggtctgatttggatgtgtttcttcccaccttggtggtggtggtagtggcgggatctcctcactttgtggtgaggagctgacagtgaccccaaagctccttccatgtcattttctgctcctccaacaatcccatgagatggggatcccaccagcatcttgctgttagaggtgggaatgttggggctcagaggggtttagttactcacttgctcaagctcacacagctaggaggaagcagagctgggactgaagcctaggattctgtttttgtttttgttttgagacagagttttgttcttgttgcctaggctggagtgcagtggcaggatctcagctcactgcaacctctgcttcccgggttcaagcagttctcctgccttagcctcctgggtagctgagattacaggcacccgccaccatgcccagctaattttttgcattttta

SEQ ID NO: 946444 - DNA, 722 bp, Homo sapiens
accttgagaaaattacttcccctttgtgaccctcagtctcttcatccctaacagggataataacagtcgttgatgataggaatataatcatcaacaatattaaatgtcctcaacaygtgaatattaaatgagataaaatgtataagcacccagcaccttacatacatattgctagatcctttcttttctctctctatctcttttttttttttttttttttgagacggagtcttgctcttgttgcccaggctggagtgcagtggcatgacctcggctcactgcaacttctgcctctcgggctcaagcaattctcctgcctcagcctcctgagtagctgggactacaggcacccgccaccatgcctggctaattttgtgcgtttttggtagagacggggtttcaccatgttggccaggctggtttcgaactcctgacctcaagtgatctgcctaccttggtctcccaaagtgctgggattacaggtcatcccggagctttcctgagtccttgtgggctgcccctcctccctcttctgcatcataacattctctggctgagcttttcctgcaggcctcatcacttgctccctgtgtccagctcggggccagacacaggtggtgtccatctcccactcccatctctgcctgtcctcactacatcatgtccctcctgaaccaaactccttctccaactcactggccaaggaaaataataataatgac

SEQ ID NO: 946445 - DNA, 640 bp, Homo sapiens
gcactttccttgggaaccaagtgtgatatgaatcactaatttattataacataaaaaattttcatgtttttggatatactaaatttggtgcagagttagtgaaacctaacgatgctagcgatctacataastatacacttcatagttaacaaagtatatgtataaacacttggactgtataatctctctgtgaagttatttataattatgtatattatgttaacattacttggagaagcaattctaatttagagcattgagaaggtccttaatctttcagtttgccaatttgaaccatgaatttcacacagagaggtgggaggatggatctgtaagtaggtatgtagagagatataactcatttgagatttaatatatatacaaaccaatgactgggcctgcagatgatcagattgaaaggacttggaagtatgcatataaagatctgaaacagtcagagaagcatgatcagaaaatacacacaataagacattaagaatatactcatgaggccgggcatggtggctcacgcctgtaatcctaccactttgggaagccaaggtaggaggatcttttgaggtcaggagttcgagaccagcctgaccaacatggtcaaacccagtctctactaaaaatagta

SEQ ID NO: 946446 - DNA, 535 bp, Homo sapiens
ggtggctcacgcctgtaatcccagcactgtgggaggctgaggcaggcggatcacctgaggtcaggagtttgagaccagcctggccaacatggcaaaactgcatttccactaaaaatacaaaaaaattagccaggagtggtggcgcacgcctgtaatcccagctactcaggaggctgaggcaggagaattgcttgaacccaggaggtggagattgctgtgagccaagattgcatcactgtactccagcctgggtgacagagtgagactccatctcaaaaaaagagaggaaagaaaggaaaaagaaaggaaagaaagcaagccaaggaaggattcactgaagaggcaggacctggagatgccgcctgagtaaacaaagccagatggccaagggctgcaagctggggtgtccctgctggagcatcccagtcagtacacatgagctcccacctcaccccctacatcagtgaccaccaagacatggtcccggctgtgccaaracctcaaacccctcccttccctaggacagcagggtagc

SEQ ID NO: 946447 - DNA, 569 bp, Homo sapiens
tggcagatcatggccagactgcttcttttttttgttgttgttggagtctcactctgttgcccaggctggagtgcagtggcactatcttggctcactgcaacttccacttccaggattcaagccattcttctgcttcagcctcccgagtagctgggactacaggtgcccgccaccacacccagctaatttttgtatttttaatagagacagggtttcaccatattggccaggctggtcttgaactcctgaccttgtgatccacccaccttggcctcccaaagtggtggaattacaggcgtgagccaccacgccaggcccagactgcttctttaagtgagaccccaatccatccctcctcaatgggcagggcctcccttcaataattttagtaactccagccaatgtttcatggaaagaactctgatctttctcggtggagtccctcaggggaggggtggccgtgrtcttcacagttcagtgacttaccctttcctgactgctggatctggagagttcaggtggtctggaggagggggctttcccccagcgcagcatacctactccaccaa

SEQ ID NO: 946448 - DNA, 626 bp, Homo sapiens
aaatttgcaggagaaaaacaaaacctggtcttttctaggatctatgtgtttccttaatgtcttagcacaagcgactctgttttggtttggtttggtttggtcttttggggcctagtgcatgaactcagtccaaaacaattgcctcctatgcttttgcttaaaaagaaaattcccccctttttgataaggttctcacttaggtgagagtgtgaccaaaacttagggccttagcaccactctcagttactattatttcgggtttctggtctcaccacatcattcataggttatggtgtcctcatggtcacacatttctttcagctcttgtcattctaattgaagagagaccatttgacattctagcaatggctgcgtggaagcacttaaaacctttgagagaatacagtgtaccagggaaactattattatgactatcgggaggataataccaagagtttggagtatgctctttacccaggttacccataaaccaaaccacctaaaattaaatagatcaaaaaatgagctwaagagtctacttacttaactaagcaatctcttcatttatcctctacagctaaatctctatagtcttcatctgatgtatttctccataggccacaagt

SEQ ID NO: 946449 - DNA, 471 bp, Homo sapiens
ttttgctggagactgggatgccaagtgagccagtcttcaagactcagtggtagtagcagtaggctgaatgtgcatgtccctgggccccagggcagcatatgctggtattggtattagtgggtccaagcaggccaaatattgggcttccaaggagtttactcaaatgccagtagtgacaatggtgggctaggtggatgggtgggttagtgggccccttgacagctgatgtaatttgggcaatggcaatggcagtgggaggtcaaccctctagttcccaagtggtgcatgctggtgatggtggtggctgcaattggctaagcaggccaatctccaggcccataratggtgtgtgccagtagatgccagctgaagtagtaacaactgagtgactaggtccaccttcagatcctggaaggagtgttcatgtgccaatgatgatggaatgggttgggcaattccctgatccccaga

SEQ ID NO: 946450 - DNA, 567 bp, Homo sapiens
aacacaacactggagtggctgggccacaggacatcaaatccctaggctgcacacagcatggagaggccrgacccagcccatgaaacaacattttcctcctgggcctatgggcctgtgatgggagggcctgctgtgaaggtctctgacatggcctggagacatttttctcatggtgttggggattaacactaggctccttgctacttatgcaaatttccacagccagcttgaatttcttctcagaaaaatgggtttttcttttcgatcacatattcaggctgcaaattttccaaactttatgatttgcttcccttataaaaccgaatacctttaacagcacccaagtcaccttgtgaatgctttgctgcttagaattttttttcttccagatacccaaaatcatctctcttaagttcaaagttccacaaatctttagggcaggggcaaaatgtaaccagtctttttgctaaaacataactagtgtcacctttgctctagttcccaacaagtttctcatctccatctgagaccacctcagcctggaccttattgttcatatcactatca

SEQ ID NO: 946451 - DNA, 567 bp, Homo sapiens
aacacaacactggagtggctgggccacaggacatcaaatccctaggctgcacacagcatggagaggccggacccagcccatgaaacaacmttttcctcctgggcctatgggcctgtgatgggagggcctgctgtgaaggtctctgacatggcctggagacatttttctcatggtgttggggattaacactaggctccttgctacttatgcaaatttccacagccagcttgaatttcttctcagaaaaatgggtttttcttttcgatcacatattcaggctgcaaattttccaaactttatgatttgcttcccttataaaaccgaatacctttaacagcacccaagtcaccttgtgaatgctttgctgcttagaattttttttcttccagatacccaaaatcatctctcttaagttcaaagttccacaaatctttagggcaggggcaaaatgtaaccagtctttttgctaaaacataactagtgtcacctttgctctagttcccaacaagtttctcatctccatctgagaccacctcagcctggaccttattgttcatatcactatca

SEQ ID NO: 946452 - DNA, 628 bp, Homo sapiens
caacacaacactggagtggctgggccacaggacatcaaatccctaggctgcacacagcatggagaggccggacccagcccatgaaacaacattttcctcctgggcctatgggcctgtgatgggagggcctgctgtgaaggtctctgacatggcctggagacatttttctcatggtgttggggattaacactaggctccttgctacttatgcaaatttccacagccagcttgaatttcttctcagaaaaatgggtttttcttttcgatcacatattcaggctgcaaattttccaaactttatgatttgcttcccttataaaaccgaatacctttaacagcacccaagtcaccttgtgaatgctttgctgcttagaattttttttcttccagatacccaaaatcatctctcttaagttcaaagttccacaaatctttagggcaggggcaaaatgtaaccagtctttttgctaaaacataactagtgtcacctttgctctagttcccaacaagtttctcatctccatctgagaccacctcagcctggaccttattrttcatatcactatcagcgttttggtcaaagccattcaacaagtctctaggaagttccaaactttcccacattttc

SEQ ID NO: 946453 - DNA, 579 bp, Homo sapiens
gataagagccagaagaattctctggattaccaggcagagactcttgttctcttcccttactttctcccaaacaaatggagtctctctctctctctctctttgtactgagccacctagagctggaggagaggtgacacaagctcccctgtggtcaccacaactgggactgttctcggtcagacccaaaaccagcatagcactgagtttcacccaaggcccacagtaaccactgcctggctaccacttatgtttgatcaaggccccagggctctacaatcaacagatggtgattccagccaggtttgtgtacttcacttcagaccagcaagttcctcagggccccaggtaagtccagagatgccatctagaagccagggactggagtaaaaatcttagaaatctacctggttctctattctacttctgctaagctggcactcaaaccacaagacaaaggtcttcccactcttccyttccctttccacaggcaaaggagcctcttgccacaggccaccactaacaaagagccactgggagtactgcccagctactgctgatgttcacttaaggcccaagggc

SEQ ID NO: 946454 - DNA, 657 bp, Homo sapiens
aagctagactggctcactgaaaagtcagctatgctgtcaattgtgagataacaccctgaaagaatgttgtctgtcttacaagctgcagtatatgctttgaaccagagatccctatatggtgccatctcccatacmaccaaaacatacgtgtctggcaatcaaaggtgaaagtgagagaaacacactattatacgtagtaaaacactagcagaattttttgcttcccattcagcaacctagagttcttctggtttggaggtcttggttcccaagagggaattaaaggatataacaatggttccattgatttggaagatagactgccgcttgaccatttggggtagcttacaccactgaaccaataagaagaaagggttactctactggctgaagtgattgatcacaattgccaatgagaaatttggttgctgctacacagtgggggacaaggagagctatatctagaagcctgcatacttttcatgcccaatagtaaagtttagttgaaaactacagcaaaaaaaagaaaaagtcaagactcttggggagtcatactcttcagaaatgatggtttgggtcagcctactaggataagaaccccatctagttaagcttctggatgaggacaaaaaaatgaatgggaagtagagaaggaag

SEQ ID NO: 946455 - DNA, 755 bp, Homo sapiens
gctcctgtattattttattgtgattgttagattttttgtattgaattatttaatggtctcccaaatctcgatgatcttcattcctatccataatctgaattctatttttgtcatttcagctatttcagcccagttaagaatccttgctcagaaactagtatagccattttcagggaataagacactctggctttgtgatttgctagagttcttttatttgttctttctcatctgtgtggatgggtttacctttaactgtggtataaattgaagaccaccagtagacttcttttttagatgctttcagagggccaaagctttttgcagggtccttatttttagctgaattcttgtcattgatatcacagaagggtatattaacaaattatttttggtgttgaaattttgggctgcaatccagtaggtggtacttaagtgtaatggccagtaggcaagcttttgctcagtcacatggcttctctgtatttcttcatgactatagccatgctccttctcagcactctgaaagtaagagttcctctctcacttcagtgctggctgaagatgtcaatttaacactgctgggctgtgtatctcagctctggggcaatgtcaggctttatgttccctcccaagcttagaggtaacaggggaaaggaactttgcagtggttgtgayagagagtctttcacttatcttttggggctccatcttgagaggtgtggagctgctatcagtcagtgtgatcaacttgg

SEQ ID NO: 946456 - DNA, 609 bp, Homo sapiens
actgtgaccattgcttggttactgccgaggttcactcaaggcccaaaggctcttcagtcagcaggtggtgaatccagccaggcttgtgtcctatccttcaggaaggtgagctccccttcagcccagggtaggtcctaaaatggtatgaaggagcaagggcttggagtcagaaaccttaggaatctactaggcactctgttctatagtggcttagctggcacccatgctgcaagacaaagtcccttccagtcttccttcccctttcctcaagcaaaaggactctctctctatggccaccactgccccaggcctgaggtgactacagcctggctactcatgatgttcactcaagggccaagggctctttagttggcttgtgtggaatgctgtgtggcctgggtatctctcttcaggacatcctagggcaggccctctggactgggatgggcccagaaatactgtccaggagccaaaatctagaatcagtgaccccaagaacttgcttggttgtctaccccactgtggctgagctggtgcccaagctgcaaaacaaaawcccctttactcttccctctcctttccttgagcagaagatatctctccccaaaa

SEQ ID NO: 946457 - DNA, 541 bp, Homo sapiens
cttatttaggatatgtgattattatagcaagtctggtgtacatacaagattttgaatgggcacagatgacctttagtwagtgcttggctgtgataagaggcagtcctgactgcagatcaggctgtgtggaccccagccttgcatgtttacagaccttcatgtcttattcttacagggtatcagaagaacacctactggggaaacttataaattagtaaaaggtgggcattctccccgcccatcttctgtctgtctgccaggactagcacagcactttgaagtcattcacatagaatcccaacttaagagggtaaaatcctcctcaacagactgaaaataagtttaaattccctttgctatattaactcccctgaggaaagagtcttagatcaatgtccaacactaaaaacagttttaaatcagcaagtgagaattaaatctgaagcaattgataataatgtttcattcattcctctcctttggccccgtccaccctactgctaaatccaggcatcaaagagaagagggacataattatctc

SEQ ID NO: 946458 - DNA, 741 bp, Homo sapiens
cctcctacaaccaagaaaggggcccaacgcctagtgggcctattcggattttggaaaaaacacattcctcatttaggtgtgttactctggcccatttatcaagtgacctgaaaggcttccagttttgactggggtccagaacagaagaaggctctgcagcaggtccaggctgctgtgtgagctgctctgctacttgggccatatgatccagcagatccaatgggacttgaggtgtcagtgccaaatagggatgttgtttggaacctttggtaggccaccataggtgaatcatagcagatatctctaggattttggataaaggccctgccaccttctgcagataactactctcctctagagagacagctcttggtctgttactgggctttggtagaaactgaatgtttgactatgggtcatcaagtcactgtgtgacctgaactgcctatcatgaactgggtgctttctgacccatctagccataaagtgggttgtgcacagcagcattccattatcaaatggaagtgttatatacgtgattgggctcaagcaggtcctgagggcacaagtaagttacatgacgaagtggctcaaatgcccatggtctccactcctgccayactgccttctcgccctcagcctgcaccaatagcctcagggggagttccctatgatcagttgacagaggaagagaagactagggcctgatttacagatggctctgcatgatatgccggcacc

SEQ ID NO: 946459 - DNA, 536 bp, Homo sapiens
gtcctcgacttttttttttttttttttggcaatttttcaattaccatttcaatcttgctgcttgctgttggtctgttcagagtttctrcttcttcctggtttaatctaggaaggtattgtgtttccaggaatgtatccatctcttctaggttttctagtttgtgcgcataaaggtgttcatagtagccttgaataatcttttgtatttctgtggcatttgttgtaataactcccatttctttttgaattgagcttatttggatcttctctcttgttttcttggttaatcttgttaatgttctatcaattttatcttttcaaagaaccatctttttgtttcatttatctttttttgtttcaattttatttagttctgccctgatctctgttatttcttttcttctgctggatttgggtttgatttattcttgtttttctagttccttgtggtgtgaccttagattatttatttgtgctctttcagactttttgatgtaggtatgtaatgctatgaactttccttttagcaccgtttt

SEQ ID NO: 946460 - DNA, 536 bp, Homo sapiens
gtcctcgacttttttttttttttttttggcaatttttcaattaccatttcaatcttgctgcttgctgttggtctgttcagagtttctgcttcttcctggtttaatctaggaaggtattgtgtttccaggaatgtatccatctcttctaggttttctagtttgtgcgcataaaggtgttcatagtagccttgaataatcttttgtatttctgtggcatttgttgtaataactcccatttctttttgaattgagcttatttggatcttctctcttgttttcttggttaatcttgttaatgttctatcaattttatcttttcaaagaaccatctttttgtttcatttatctttttttgtttcaattttatttagttctgccctgatctctgttatttcttttcttctgctggattygggtttgatttattcttgtttttctagttccttgtggtgtgaccttagattatttatttgtgctctttcagactttttgatgtaggtatgtaatgctatgaactttccttttagcaccgtttt

SEQ ID NO: 946461 - DNA, 595 bp, Homo sapiens
ctgaaattgtaaaactactggaagagaatatagggacaaaactcaataacatttgtttgggtgataattttttggatatgaactcaaaagcataggaaacaaaatcaaaaagagatacatgggattttgttaaattaaaaagcttctgcacagccaaggaaaacatcaatataagcagacaacctacagaatgggaaaaaaatatctgtaaatcatgtatgtgctaaaggggattaatatccaaaatatacaagaaactcaaataattcaacagtaagacaacaacccaattaaacattggtcaaaaaatctgaatagatatttcttaaaatttacaaatggtcaacagcaatctgaaaaaaaaatgctcaatataactaataatcagagaaatgcaaatcaaatccacaatgagttagcactatactaatgttagaatggttattatcaaaaagacaaaagayaacaagtgttagtgagacatggagaaaagggaacactgaacccagttggtgagagtgtaaattagtatagccattatgaaaaacagaattgaggttcctccaaaaatcaaaaacagaactaccacatgatc

SEQ ID NO: 946462 - DNA, 566 bp, Homo sapiens
tggcgctctctagaaggaagatgccatatcaacagatttcattatgaaaagtctacacatataaacagatgctcacatcctgaaattactctgaaattttagatagaaaccttaaattactgactcattcattgatttgtagcaagtttagttttggattctgcatgcttttcaagatcagttgtatgcaaaaattggatgtgctctatggataataaatagcatgtgttaaaagtaaaagataagtatgtttagtctagtctagactaatcacttgttaactctctgtcaaggtgacaatcgggctgcagatgtgtgtgtatgtgccatacacatttgaacaagtctgaaaaaataagagctaagttgaaatgtgatagactgcacttaagagctgaatttttccagcaatgaggcataaggaggttaacacagggtagggatgccggcatattacaaaaagtgctggccaaaggctgggtgaattaaaagccatccatctcttagctgctgaggagctcagcttcactgtcacttyacgaccaaaatgctgggagttcactgtt

SEQ ID NO: 946463 - DNA, 575 bp, Homo sapiens
aattactgtatatattatatatgctaagaatgaacaattgggacataaaattttaaatatgattcaaaataacataaaagtataaagtagttttaaatctctcaaaatatattgcagaatcaatatgctgtaccctgtaaaacactgatataagaaatcaaagaagacttaaataagtgaaaaggtgctgtgtttatggataggaagactttaaattgtgaagatacgaattccgcaaagctagtcattcattgcaacttaaatcaaaatctcagtcatttatttttgtttttgttcatgtttttattttgagttactgacaggataatttatttgcaaaaaaaaatctgacaaaaaccgtatagaatacctcaaacctcaaaactcaacaataagaaagcaaacaacactttttaaaagaaattagcaatctatttgaacagatatttcagcaaagaaaactttcaggtgtyaaattagtccataaaaatatgctcaacatcaacatcactggtcattagagaaatgcaagttaaaaccacaatgagatacagcatcattactcatcgataaaa

SEQ ID NO: 946464 - DNA, 544 bp, Homo sapiens
taagattataatggagcagaagaattcctatcacctagtgacagggtagctgtcataatatggtaacacaatgtgttactcacatktttgtggtgatgctgatgttaacacatctaccacgttgccagttgtataaaagcctagcacatacaatcatgtaaaatacagaatacctgataaagattgtaagcgactatgtcattggtttatgtctttactatactatacttttagtcattattttaaagtatactccttctgtgtgtgtgtgtgtgtgtgtgtgtgtgtgtgtgtgtgtagatttaaaaagttaactgtaaaacagctttagacaggtcctttaggaggtattccagaagaaagaattgctgtcacaggagatgacagctccatgcatgctaattgcccctgaagaccttccaagtgggacaagatatggaggtggaagacagtgatactgatgatcctgaccctgcataggctgaggccaaatgtttgtttgtgtgctagtttttaaataagtagtccaaaaaatttgaaaaag

SEQ ID NO: 946465 - DNA, 597 bp, Homo sapiens
aaagaaacactgagaagaagctatacartctgataatcattaaaagtttcaatagcatagtaagtcaagaaatcagttgcaaatggttaagaaagctccatgtcaccttaatatgagccttcttgctgtctgctcattgtactccttcataactacaaaaacaagttaaataatgtagactatgattagagactccccagaaatgataattttcagcatttcgggtccagaaggataatttggcaaacgctattgattggtctaacacatctacaggcccttacccagtcctcagaataaattcccattccaaatgtaggatgacagcagagttccgctcctcaacccaaacacagaagaactcaaagaggaaatgtttttccccttaaataaatggcacctttgatgttttccagcaacttctgtggttggaactatttttcaaatagttggatgacagcagctctttatgaaacttaaggtatgacaatcaggtttattttgggaaaatctatgggcaatttactaacatgttcagaataaaacctgaacttttgggtacttgggttcttaaatagtttattttttgaacaaagt

SEQ ID NO: 946466 - DNA, 617 bp, Homo sapiens
tggacttggactttcgggtttatgccagaatgagttaagtctttggaggactgttgaaaaggcataaatgtgttttgaaatgtgaggacacgagacttgggaggggcmaggggtggaatgatatggtttggctgtgtccccacccaaaatctcatcttgaattataacccctataatccccataatctccacagctcaagggcaggtccaggtggaggtaattagatcatggaagcagtttcccccatgctgtcctcatgatagtgagtctcatgagatctgatggtttcctaagcatctggcatttcccctgcttgcactcactgtgtcctgctgccctgtgaaggtgcctgattcccctttcccttctgccatgattgtaagtttccttaggcctccccagccatttggaactgtgagtcaattaaacctctttcctttataaattacccagtttcaggtatttctccatagcagtgtgagaatggactaatacagtaaatataaaccaattcttttaagtgaatataaagtaaatataaaccaatacttataagggcactaattccattatgggggccccacacttatcatcatttcatctaactttaataact

SEQ ID NO: 946467 - DNA, 722 bp, Homo sapiens
ctgtaatcctagcactttgggaggcygaggagggcagatcatctgaggctgggagtttgagaccagcctgaccaacatggagaaaccccatctctactaaaaatacaaaattagctgggcgtggtggctcatgcctgcaatcccagctactcaggaaggctgacgcaagagaatcgcttgaaccccggaggcagagattgcagtgagccgagatcatgccactgcactccagcctgggcaacaagaacaaaactcagtctcaaaaaataaaaataaaaaataaaaataaattccatgcccaaatgtgaatctgatagcaaaataagctgtattgtttaatgcattaaaataaaatataagcttgaaatgccaggcacagaaaatgatagcaagtcaccaaatatagtatctttcttcaagttagtacctcatttacacccatctcacatcttacatccatctctagaaacaacaatcacaaactgtctagaagttcattcatttttaaatactttggatacttacttggagatcgcccaaatttttaaatgacacaattctttaatggaaagcataagagatctccttacttggtacatgtgttctgatccaactttcctagaacgcctgttcaatttcaaacaagtttcattaaatattgaaatattgaaacttccatcatcttctaagagatcaacttctaaaagacaagagagagagtt

SEQ ID NO: 946468 - DNA, 700 bp, Homo sapiens
cgatctcggctcactgcgagctctgcctcctgggttcaagcgattctcttgcctcagcctcctgagtagctgggrctacaggcgcctgccaccacacccggctaatttttgtatttttagtagagacagggtttcaccatattggccaggctggtcttgaactcctgaccttgtgatccgcccgcctcagcctcccaaagtgctgggattacaggcgtgagccaccgctcctggcctattcttttcttttcagagacaaggtctcactctctcctctcgccccgcctggagtgcagtggtgtcatcatagctcattgcagcctcaaactcctgggctcaagcaatcctcccacctcagcctcctgagtagctgggatcacaggtgtgtgctacctcacccagctaatttctaatttttttttgtagagactggatctcactgttgccttgaactcctgggctcaagtgatcctcctgcctcagcctcccaagtgctgggattccagaccagccattttttttccttaatcatgcattcctgttgctagtttcacatcagtcccctggtttaataagaaataaaatattttcttcacacttttgaaaagacctttcttctttcataccccttctccctccaaaagggacaaaaattctttaatttcataaggagggtaggtaagtaacttgaggatgtgaa

SEQ ID NO: 946469 - DNA, 602 bp, Homo sapiens
tttgacaaagcagacaaaaacaagcaatgaagaaaggactccctattcagtaaatggtgctgtgaaaactggctagctataygcaaaagattgaaactggacctctatattttaccatataaaaaatcaattctagatggattaaagacttaaatgtaaacctaaaactataaaaactctataagaaaacctaggcaatactattctggacataggccctggcaaagactccaagatgaagactccaaaagcaactgcaacaaaaacaaaaatagacattgggacataattaaactaaggagcttctccacagcaaaagaaacaatcaatagaataaacagataatccacagaatgagaaaaaatatttgcaaactatccctctgacaaaggtcttagtatccagaatctataagaaacttaaagaaatcaatgagtgaaaaacaaatagtcccatttaaaaaaaatagtcaaaggacatgaacagacatgaacagatacttctcaaaagacaacacacacatggccaacaagcatatgaaaaaattttcagtatcactaatcattagggaaatacaaatcaaaaccacaatgagatacgat

SEQ ID NO: 946470 - DNA, 639 bp, Homo sapiens
gaagtgtcatgtggagccttgggcctttctatgcctgactccgctggaaaccttgtccgctgggggttgcagcctccagcccaagcagtttacagggtaacctcctcattacactgcccacattcctctccttctggccccagcctgtcttccccatttgttccactacccaaaccctagtgattcccaaaggaaaaagaaacatgtatgtatgcttgtgcacgcatgtatgtatttatgtgcatgcgtgtgtgcatgtgtgtgtgtatgtattctgggaagtttgtctttgtacagttaagaaatctatttcaccttatttcatctaataaagtgaaataggtttcttaactgtacaaagaattcgtaggcaagtataaattataaattttcaaaattgggaaattagtatattgtatatctgaaacttatctcccaatagaccaagacactttgagtcctcctccaccccattaggtatggtctacttttatattttagtgccttcccttctgacacttcctcaaactggaytgttccacacaacagttctctgcgtctttcaaggcacagttcaaatatctcctttgtgaaacttttccttatacttcttggtaggcaagtatcttagtctattcc

SEQ ID NO: 946471 - DNA, 562 bp, Homo sapiens
gtattagttagtgttctccagagaaagagaatatatatattccaaatatacatatatatattccaaatatacatatatatatattccaaagaaatagaatatatatatatgtccaccatgtatacacacatgctggacaccccagaaaagcctgcatttcagtgtaggtctaaaagcagggaaacaaactgatgtctgaattcaaaggctgtcaggcagccagaattctcttttttgcgggggaaggtcagcctttttgttccattcaggcctttgttctattcagctgattggatgaggcccactcacattaggaagggtcatctgctttactcagttcactgataaatgataaatcatccaaaaacatcctcacaaacacacccagaatagtgtttgaccaaacacctgggcacaccctgtggcccagtcaagttgacacatgaaattagtcatcacacaatgtaatggcaggtagggaggagggaggaragaaggggagggcagtataaggatccacatctccccattttatacagtggggagacactagaacttccta

SEQ ID NO: 946472 - DNA, 765 bp, Homo sapiens
ttcacccttgtcctgcctctagtcctcgctctgccaatccctggctggacgaccttggtgggccacctcactcatctctagtgaaatctctcatttttagkgcatcacagtttatggtttgttttatgctctccatctaggaaaagcctccacgggagagccaagcagggaatgcagagcaggtgaaagtatctccccatttagcagatgagcaaactgaggacccagagacaggaaaatcaaccagccagaggcatacagtgaggcaggggtgttacccggggaccttcaaactgcactctcaagtgccccacaggagtcccaccagagacaggatgtctggcccccacccctgcctccaccgacgcaggtccaaatcagtccccctgcctccatcaggttcgtattatctccgtagtccatctgtcaagttttcaggtccaaccaacattttgaggcacccacaccaaattgtggtacattaatcctcccaggcatgtggcagtaggttgtgttatcctcattttgcagatgaggaaactgaggctctgagaggttacgtagctcatccagtatcacaagctaatcagaggcattgctgactggcctcaaactccagtactccttccttgccctgccaccccaaccctgaagcccaggtgaccagcccatggggacaactgtggcagcccaggttctaggcctgcctccctgcacacatacaccgcatgactgggtagcttccaagttcctgcttccctctgg

SEQ ID NO: 946473 - DNA, 692 bp, Homo sapiens
tctcaagaggcatttccctctcccccaactctgctgaaaaagtgcttgtcctgtaacccaaaagcaggttagttgctcatcgcatgtacagtttaattaataagaaagaggtctgattttaaaaatttaaaaaatgaatttattcagaagctagtttggaggaaggggcacaaagtatcctgtctttaaatgtgcctcgtcacctttggagcagaaaacagttatttttataagataggggaggaaatgagtaaggacaggggtacctcagttagcttggtgtcttgtctatcggacagttgagctggtgctttcctgggcagaagaaagttttaaaattggccaagcaggtggacaaaagttccgagtcaacccaggaaggatggaagtttccaggcaaacctctggaggtgaaagttccatggcaggtatgctttgttctgcaaactgactgtcgacagatcaaggagagatctgcaggagtacataattagaaaaacttgccctggaggtaatgtctggtgaaacagaggtgtaaggttatatttgcatttttgaaaagctaaataggaaacagggagctgggaaaatgagaaagtagagagacagagcaaaaaatrattaaactacctctaaaaaaatgaggagacttagttagagtcccagacaccaataatttccatgttgctaac

SEQ ID NO: 946474 - DNA, 692 bp, Homo sapiens
tctcaagaggcatttccctctcccccaactctgctgaaaaagtgcttgtcctgtaacccaaaagcaggttagttgctcatcgcatgtacagtttaattaataagaaagaggtctgattttaaaaatttaaaaaatgaatttattcagaagctagtttggaggaaggggcacaaagtatcctgtctttaaatgtgcctcgtcacctttggagcagaaaacagttatttttataagataggggaggaaatgagtaaggacaggggtacctcagttagcttggtgtcttgtctatcggacagttgagctggtgctttcctgggcagaagaaagttttaaaattggccaagcaggtggacaaaagttccgagtcaacccaggaaggatggaagtttccaggcaaacctctggaggtgaaagttccatggcaggtatgctttgttctgcaaactgactgtcgacagatcaaggagagatctgcaggagtacataattagaaaaacttgccctggaggtaatgtctggtgaaacagaggtgtaaggttatatttgcatttttgaaaagctaaataggaaacagggagctgggaaaatgagaaagtagagagacagagcaaaaaatgattaaacyacctctaaaaaaatgaggagacttagttagagtcccagacaccaataatttccatgttgctaac

SEQ ID NO: 946475 - DNA, 584 bp, Homo sapiens
tcttacttcttaggcatcctcttctcagcctcttctgyctgattcctcctgatcatcccaaccactgacacttggtgggtcccaagcctcagccctctaaacacgtttcttatcagtctctgtagaccatgccagttgtcccatcttgtcttaaggttttaaacaccatcgcacgctaattgtcaatgactctcaaatttatatctccaagcttgtgccctcagctcaagattcacatacccaactgcctactcaacatctctacttggatgtctcatagtttcttaactatgagtatccatgaactcctttccttgtctttccccacagatcttccctcagtccttcccattccatgaatggtaacttcatccttgcaattgctaagtctgaaaatcacagagttaactttcactgtctctcactccataatcaatacttcaggaaattgtatgcattccaccttcaaaacgtcccctataacccaaccacttaccacctccacatctacttctggggtccaagtcactctcatctcacccatggattattgtaacagcatcttaacttagctccctgtttct

SEQ ID NO: 946476 - DNA, 531 bp, Homo sapiens
gcctacatcaaaaaggaagaaaaacttcaagtgaataacctgatgatgcatcttaaagaattaaaaaggcaagagtaaaccaaacccaaaattagtagaagaaaagaactaataaagatcasagtagaaataaataaaattggacttctgctccaagatggcctaatagaaacagctccagtctgcagctcccagcatgattggcacagaagatgggtgatttctgcatttccaactgaggtaccaggttcatctcattgggactggttggacaatggatgcagcccatggagggtgaggtgaagcagggtgaggagtcacctcaccccggaagcacaagtgattgggggatttccctttcctagccaagggaagccgtgacagactgtacctggaaaatcggttcactcccacccaaatactgtgcttttcccatagtcttagcaaccggcagaccaggagattctctcccaagcctagctcatcaggtcccatgcccacggagcctggctcactgctagcacagcaatc

SEQ ID NO: 946477 - DNA, 572 bp, Homo sapiens
accaagagttaatacaaagcatgaagtcatgtttccctcaaaaaaatgatttgttctgtagtcaaattaatttggaaaacattgcaaactcttcagcagtggttctcaaagtatagcttgygtcagaatcccctggggcccttgctaaaatctggatggctacactccccgcctagagtgggttaaactcagtgcccactggcaggaaactgaaacttggctgaagtcaccgaggaggccttccccgttaaacctctggctggcgacagcttggtttcctcgccgctgcttctgagtaattctggcacgcagttcctcctagccacctgctgtacctggaagggggccagccctcctcagcaggctttgctcctgccctgcacagcacaactgtggcgtaaaaaatggaaaagctggtagcagaaggaaagagcagggagacagaggttaggtgaacctcaatggcctcattaaagcaaattgagaaagagagtttccttcccagtgaggcgggacagtgcagaaatgcggcccgtcctgggagaagtaggggcgaggggtggggggctcac

SEQ ID NO: 946478 - DNA, 657 bp, Homo sapiens
agctatgtgtgggatataatctcctggtgtgctgtttattaagcccattggaaaagcacaatattagggcaggagtgacccaattttccaggtgccatctgtgaatgctttctttgactaggaaagggaattccctgacctcttgcccttcccaggtgaggtgatccctcaccctgctttgggtcacgcatggtgtgctacacccactgtcctgcaaccactgtctggcactccccagttagatgaacccggtacctcagttggaaatgtggaaatcacctgtcttttgcatcgctcatgctgggagctgtagactggaactgttcctattcagccatcttggctccacgtatatccactgccacacttctttagtcataaagtgagtgccttggtcagaggcaatgctgtgtggaataccatgatggtggataaggcattctgtgagtccatgaatggtagtcttggcagagcattgtgttcagtttaggcaaacccatatccagagtaagtgtctgtttcagtgaggacaaacctctgcccttttcaggatggaagaggtccagtataaccaaccttccaccaggtaacagactgatcacccygaggaatggtgccatattgagggctcagtgttagtctctgctgctgtcaaat

SEQ ID NO: 946479 - DNA, 711 bp, Homo sapiens
gagacttacctagtcctgaggacaacagacaatggccttaayaggcctggaaggtgagtggaggcacagaggaggacagtgtggaacagttagcaggcattgggctgttggtcttccttctaccagacctggaaggacctcacatttggcctatgggaaatgcccgccacactttgggaagatttactatctgcttctagaaggctgtgtgtatattatgaaaaagctattctcaactcacccccaaccttttaatagataacatctgtggggaggctgacaagatggctgaatagaaacagctcaggtgtgcagctcacagtgagatcaatgcagaaggtgggtgatttctgcatttccaactgaggtacccggctcatctcatttggactggttagacagtgggtgcagcccatggagggtgaactgaggcagggtggggtgttgcctcacctgggaagtgcaaggggtcagaaaactcccctgttagccaagggaagctgtaaggagctgtgccatgaggagtggtgcattccagcccagatactatgcttttcccatggtctttgcaacccacagaccaggagattccctccagtgcttatgccaccagggtcttgggtttcaagcacaaaactgggtggccatttgggtagacaccaaggtagctgcaggagtcttttttcataccccagggatgcctggaatgtc

SEQ ID NO: 946480 - DNA, 561 bp, Homo sapiens
aactcctaataagagaatcagcttgttctttgaagcttggaagccaggcaytgacttctgttctccagctttaaaagtcctggtgtcgttttcgtccaatagaaggctgttttgtctatattgaaaatctgttgtttagtgtagtcaccttcatcaattatcttaactaggtcttctggataacttgcagcagcttctgcataagcacttgtttctttgctttgccttgtacttttatgttatggagagagctttttcctttaactccatgaactgacctcttccaacttcaaacttttcttctgtggcttcctcactcctcttacccttcatagaattgtggagccttagggccttgttgtgaattaggctttggcttaaggaagagaatgttgtggctgatatgatctatccagatcactaaaactttctttatatgagcaataaagttgttttgcttttttatcatttgtgtattcactgaagtagtatttttaatttccttcaagaacttttccttatacaacttggctaacaggcacaacaggcctacctttcagc

SEQ ID NO: 946481 - DNA, 561 bp, Homo sapiens
aactcctaataagagaatcagcttgttctttgaagcttggaagccaggcactgacttctgttctccagctttaaaagtcctggtgtcgttttcgtccaatagaaggctgttttgtctatattgaaaatctgttgtttagtgtagtcaccttcatcaattatcttaactaggtcttctggataacttgcagcagcttctgcataagcacttgtttctttgctttgccttgtacttttatgttatggagagagctttttcctttaactccatgaactgacctcttccaacttcaaacttttcttctgtggcttcctcactcctcttacccttcatagaattgtggagccttagggccttgttgtgaattaggctttggcttaaggaagagaatgttgtggctgatatgatctatccagatcactaaaactttctttatatkagcaataaagttgttttgcttttttatcatttgtgtattcactgaagtagtatttttaatttccttcaagaacttttccttatacaacttggctaacaggcacaacaggcctacctttcagc

SEQ ID NO: 946482 - DNA, 405 bp, Homo sapiens
agctggcacccatgccggcacctagagttgcctgccctgcagcagtggctggtgtgtctgactgtgcagtggccagaccccatgtttgctcacacatccgtcaccactccacatctgactccagtctcccttggagccatgggatccaggccggcagcatgagctgagcaaagcctgatggaaacaagcccagtgggcctgagcaaacctcaggcaaaggtgccactggccacaggtttccagccagaaaagtgacaccccaaagatctcataatattagtctrtgtacaaatggtccatgaatagcaacatggtggaagagatggacattatcaatgagtgcagtatgtggctgcttctcaccaagtcataggtaacaacccctattgcagatacttttgtcag

SEQ ID NO: 946483 - DNA, 405 bp, Homo sapiens
agctggcacccatgccggcacctagagttgcctgccctgcagcagtggctggtgtgtctgactgtgcagtggccagaccccatgtttgctcacacatccgtcaccactccacatctgactccagtctcccttggagccatgggatccaggccggcagcatgagctgagcaaagcctgatggaaacaagcccagtgggcctgagcaaacctcaggcaaaggtgccactggccacaggtttccagccagaaaagtgacaccccaaagatctcataatattagtctgtgtacaaatggtccatgaatagcaacatggtggaagagatggacattatcaatgagtgcagtatgtggcwgcttctcaccaagtcataggtaacaacccctattgcagatacttttgtcag

SEQ ID NO: 946484 - DNA, 555 bp, Homo sapiens
ggtgggtgagccaaagactacgagatgctgcagcaagtgctaaacgtaggtgtggtgtgcagtcttcagtgggcagagggttcctactcagcctggaggagtcagacaaggttttccagagaagttgatgataaagaggaaacttgtcgaaggaataaacagagggcacccaactgaggttcactaacttgaattgaacgtgaggcatggcagtgatgataatcatgtagaacccaggcttctgcaggccatgctacaaggtcaatgagaatattccatgtctaagagcacctcagagaaagagcacagagggagggatggctagaatagaattaaactaaaaaatgaagagacaagcagggttaatgatgagcaaaatgcaaagaaaaattcatgtagattattaaattaccaaatacctaaggtagatagtgaaccctcacaactaataagcacacatcccagggcccatagtgtatatagcaccgatatctttttgtccaatattctgctctctttaatcatctcagcacrctgtactgggtggataaaact

SEQ ID NO: 946485 - DNA, 869 bp, Homo sapiens
cactgttccaagatggccgaataggaacagctccaatctacagctcccagcgtgattgatgcaaaagatgggtgatttctgcatttccaactgaggtaactggttcatctcactgggactggttggacagtgggtgcagcccatggagggtgagccgaagcgtggcagggcatcacctcacccaggaagtgcaaggggttgggggatttccctttcctagccaagggaagtcacgacagactgtacctggaaaaatgagacactcccgctcaaatactgcacttttgcaaccatcttagcaaatagtacatcaggagattatatcctatgcaaggctcggtgggtcccacacccatggagccttgctcactgctagcgcagtagactgagatcaacctgcgaggcagcagcccagcaggcggaggggtgtccaccattgctgaggcttgagtagataaacaaagcagccgggaagctcgaactgggcagagccaaccacagcacagcaaagcttgctccctctatagactccacctcttgcggcagggcatagctgaacaaaaggcagcagaaacttctgcagacttaaacatcactgtctgacagctctgaagagagcagtggttctcccagcacagtgtttgagctcggagaatggagagaccgcctcctcaagtgggtccctgacccccatgtagcctaactgggagacacctcccagtaggggctgactgacacrtcatacaggtgggagctcctctgggatgaaccttccagaggaaggatcgggcagcaatatttgttgttctgcaacatttccagttctgcagcctccactggtgatacccaggcaaacagggtctggagtg

SEQ ID NO: 946486 - DNA, 869 bp, Homo sapiens
cactgttccaagatggccgaataggaacagctccaatctacagctcccagcgtgattgatgcaaaagatgggtgatttctgcatttccaactgaggtaactggttcatctcactgggactggttggacagtgggtgcagcccatggagggtgagccgaagcgtggcagggcatcacctcacccaggaagtgcaaggggttgggggatttccctttcctagccaagggaagtcacgacagactgtacctggaaaaatgagacactcccgctcaaatactgcacttttgcaaccatcttagcaaatagtacatcaggagattatatcctatgcaaggctcggtgggtcccacacccatggagccttgctcactgctagcgcagtagactgagatcaacctgcgaggcagcagcccagcaggcggaggggtgtccaccattgctgaggcttgagtagataaacaaagcagccgggaagctcgaactgggcagagccaaccacagcacagcaaagcttgctccctctatagactccacctcttgcggcagggcatagctgaacaaaaggcagcagaaacttctgcagacttaaacatcactgtctgacagctctgaagagagcagtggttctcccagcacagtgtttgagctcggagaatggagagaccgcctcctcaagtgggtccctgacccccatgtagcctaactgggagacacctcccagtaggggctgactgacacgtcayacaggtgggagctcctctgggatgaaccttccagaggaaggatcgggcagcaatatttgttgttctgcaacatttccagttctgcagcctccactggtgatacccaggcaaacagggtctggagtg

SEQ ID NO: 946487 - DNA, 761 bp, Homo sapiens
ccctcttggtgctcttctatgctatgatctagctggtatctaaaatgcaagataaattcccctttacttttccctctgcttttctcaagcaggagtctgtcctcatagccaccagagctgtgaatgtgctgggtctcaccagaagcttgcacacctcagagtttcacccaaggcccatggtgtgtaaaatttggatcttgctactggttattcaggaacaaagaccctttggtcaacaggtgatgaatagtgccaggacttggttcttcccttcaaggcagcaggttttcttctgctccagtgtgtttctagaaatgtccaggatctagggcctggaatgggagcctcactactctgcccagtgctatatcagactgtggctgagctggtattcaagttgcaagacaaagtcttctttactctttcctctcctctcctcaaggagaaggaaggcgtcattttcattgctgcaagctgaactgtgaggaatttgtagaggggtagcacaagcactctcttagccaccctgtttatgtctcactaggtcatgtgccacctaagcccactatctccaagtccagctcagcactagggcttgcctagaaattacagtccttgtgacctaaactgccttttatttaagaccccagagaaattttagcccatggtgkcaaggcttgctgaaactcaagttcctatcactaggatgggtgaatctaatctcctctgcctagggctggtctaaatgctccctccatggg

SEQ ID NO: 946488 - DNA, 644 bp, Homo sapiens
tgtcactgaagacccatctctctgctctaccaaacacagcctcagttccaacctgaagcccttgctgagttaaaatgattgccagtagtaaatgggactgttcactttcttgtctatgcctctcttcaaaccatacaaccttctgtatggggctaatgtagatgcacaaccctggcccaataactgttgtcagtgaaaaggcatcaggtgatggatttaaggatgggatcctgcacactcccatctctagaaggggtcggaggtatcaggattgtcttagaccaagcagagttctcagatgagcagcatgaaaacacattgctggtctacagtgggaggacagaatgatgttctggaggcaatagtagccaagaccagattataactaactcttcctgttattttaatccatgttacttgaaattgacatgcacatagtttaacagaaatcaatctgtgtttgcatgcttatgatggcaaaatgaagagccattctccctcccctaactctgggtctcaagtcttagaggcaatccttaaaagtcttttaactatttctcgttggatttagctctttgtctttaagtaacacacttayattgatttttttttctgacgaatatatttacatattatatatgaca

SEQ ID NO: 946489 - DNA, 581 bp, Homo sapiens
ttttttcatattgtaagtcacctgactctccatataatgttaaaattaacttctaaaaagctacaaaagctcacgcctgtaatcycagcactttgggaggctgaggcgggtggatcatgaggtcaggagattgagaccatcctggctaatatcgtgaaaccccgtctctactaaaaatacaaaacaaaattagccaggtgtggtggcgggcatctgtagtcccagctactcaggaggctgaggcaggagaatggtgtgaacccgggaggcggagcttgcagtgagccgggattgcaccactgcactccagcctgggtgacagagggtgactccgtctcaacaaaaaaaaaaaaaaaaaaaaagctataaaaaattttttgttgagtttttcaaagggattgcatggaatctattgatcaaatttctgtgaatcaacaacttaattataacgagtcttccagtctatgaacatggtgtatatctctatttaatcctatttatttctttcattaatattttgtattttttagcagacagatcctgcatttattttacttttacctattttgttatttttcctg

SEQ ID NO: 946490 - DNA, 581 bp, Homo sapiens
ttttttcatattgtaagtcacctgactctccatataatgttaaaattaacttctaaaaagctacaaaagctcacgcctgtaatcccagcactttgggaggctgaggcgggyggatcatgaggtcaggagattgagaccatcctggctaatatcgtgaaaccccgtctctactaaaaatacaaaacaaaattagccaggtgtggtggcgggcatctgtagtcccagctactcaggaggctgaggcaggagaatggtgtgaacccgggaggcggagcttgcagtgagccgggattgcaccactgcactccagcctgggtgacagagggtgactccgtctcaacaaaaaaaaaaaaaaaaaaaaagctataaaaaattttttgttgagtttttcaaagggattgcatggaatctattgatcaaatttctgtgaatcaacaacttaattataacgagtcttccagtctatgaacatggtgtatatctctatttaatcctatttatttctttcattaatattttgtattttttagcagacagatcctgcatttattttacttttacctattttgttatttttcctg

SEQ ID NO: 946491 - DNA, 581 bp, Homo sapiens
ttttttcatattgtaagtcacctgactctccatataatgttaaaattaacttctaaaaagctacaaaagctcacgcctgtaatcccagcactttgggaggctgaggcgggtgkatcatgaggtcaggagattgagaccatcctggctaatatcgtgaaaccccgtctctactaaaaatacaaaacaaaattagccaggtgtggtggcgggcatctgtagtcccagctactcaggaggctgaggcaggagaatggtgtgaacccgggaggcggagcttgcagtgagccgggattgcaccactgcactccagcctgggtgacagagggtgactccgtctcaacaaaaaaaaaaaaaaaaaaaaagctataaaaaattttttgttgagtttttcaaagggattgcatggaatctattgatcaaatttctgtgaatcaacaacttaattataacgagtcttccagtctatgaacatggtgtatatctctatttaatcctatttatttctttcattaatattttgtattttttagcagacagatcctgcatttattttacttttacctattttgttatttttcctg

SEQ ID NO: 946492 - DNA, 716 bp, Homo sapiens
tgacctatgcagccccatggttggtttaatgctctgttaatgtcatcctggaatttaaaaattttgagcaagggcaaggggccctgactttctttttttcttttcttttcctttttttctttttttttttttgagacagagtctcgatcccttgcccaggctggagtgcagtggcgcggtattggctcactgcaacctcagcctcccgggttcaagcaattctcgtgcctcagtctcccaagtagctgggactataggtgtatgccaccatgcctggctaatttttgtatttttggtagagatgggttttcaccatgttggccaagctggtcttgaactcctgacctcaagcgatccgcctgccttggcctcccaaagtgctgggattacaggtgtgagccaccacggggccctgactttccattttagactggactccacaaattatgtatcagccctgccttcttctcctcccatcaaccgttcctcagccctacctcccctccaaaccctcatggaccagggagaaggtctggcgtgggatggccagccctacagtccaaggaaaagaagcagagaccctttgacatcaygggcccaggccatatgtcaccagagaaaatgggcacagaactgccaggggacatggagaacggaaagaaggagagcccctggttctgtcttggaagaagactcggcttccgcccccaggaggc

SEQ ID NO: 946493 - DNA, 542 bp, Homo sapiens
agtactcagcaatagtggaagctggatcaagcttaaagggaaatccaagcccttgtgtaacctccatccctgctattgtggccacgttgttagtgagcccattgagcaaatactggggtgtctgggtaaagaggtcaatggagatccattgaataggccatcttgtctacctgattattggccgcatttgcacttggtaagtgtggtaggcagaataatggccaccccaaagacgtccatgtcctaatctttggaacctgtgaatgtgttaacttacatggcaaaggaactttgcagatgtgattgagttaaggaccctgagatgggaagattatcacaagagtccttgtaagaggcaggtaggagagtaagagtcagagaaggagatgcaatgttagaagccaaggtcagaatgatgcaaatgctggctttgaagatggaagagagccatgaaccaaggaatgcagatagcctttagtaagctgaaaaaggtaagtgtaycaattttctcctagagcctccagaaagaaatgcagccctgc

SEQ ID NO: 946494 - DNA, 603 bp, Homo sapiens
gcttcctgctgaattggggcatagtaggggtcgtgcaattgagatatcctcaggaggggtggctccaatgtcgttaacatcagagcatkggctagcaggctgatccaggggtctgcggtagatcttagtcatggaatgcatctggggttccatttgaggaacaatttgtagttttatagctttgattctggaagagacaaacttaacaaggaggttaaagatacagggattgaaatgtatggcctgtagtgtaggggattagttctttggcatacttcatagtccctgtctatctgcttgatagttttgaaaaggcctggtccagtaaataatactttgaccatctgatgggtgctatcaatgcctaagtgaaaggtttggtgaagggttttaagtaatttccattggttagctgcaggcaaaagtacttttccttctttggtggctagccatcctgaggggaggaaactatgtcctcgtaaggttctccattctatttcttatgctgagtactggggcttggcttcctggaggggattaccccatactaggggtccttctataagcatttctaatggagggtcctgcttgcagctctttttg

SEQ ID NO: 946495 - DNA, 582 bp, Homo sapiens
tccagcttctataaggaacttaaactaatttgcaggagaaaaacaaacaaccccattaaaaagtgggcaaaagacatgaacaaatacttttcaaaagaagacatacatgcagccaacaagcatgtgaaaaaaaaagctcaaaatcactgattattacagaatgcaaataaaaaccgcaatgagacaccatctcacaccagtcagaatggatactattaaaacatcaaaaaataacagatgctggcgaggttgtggagaaaagagaacgtttatacactgtttgtgggaatgtaaattagttcaaccaatgtgaaagacagtgtggcgatccctccaagaactaaaagcaggcttaccattcaacccagcaattccattactaggtataaacccagaggaatataaatcattctactataaagacactggcaagcaaatgttcactgtagcactattcataatagcaaagatatggaattaacctaaatgcctatcagtracagattggataaagaaaatgtggtacatatacaccatggcatactatgcagccataaaaagaatgagatcatgtcttttgca

SEQ ID NO: 946496 - DNA, 542 bp, Homo sapiens
agaatttcatatccagccaaactaagcttcataaaacaaggaaaaataaaatcattttcagacaagcaaatgctaagggaatttgttaccaccatacctgctttacaagaggtccttaagggagtgctaaacayagcaacaaaaaactgttaccagccaccacaaaagtacacttaagtacatagaccattgacactataaagcttgtacacaatcaagtctatacaacaaccagctaacaacatgtcaggatcaaatcttcacatatcgatgttaaccttggacgtaaacaggctaaacgccccacttaaaaagcacgaagtggcaagttggataaagaagcaaggcccaacctgtatgctgtcttcaagagactcatctcacatgtgatgacaaccataggctcaaagtaaagggatggagtaagatctatcaagcaaacagaaaacaaaaaagagcagagactgctattctaattcagacaaaacagaaattaagccaacaatgatcaaaaaggacaaagaagggcattacataatgat

SEQ ID NO: 946497 - DNA, 624 bp, Homo sapiens
ctgtaaattagttcatccactgtagaaagcagtatggtgattctcaaagagmtaaaagcagaactaactttcaacccagcaatcctactactggcgatatacctagaggaatataaatcattctaccctaaagacacatgcacatgaatgttcattgcagcactattcacagtagcaaagacatggaatcacctatatgaccatcaatgacacattggatgaagaaaatgtggtacatatacaccatggaatactgtttagccataagaaagaatgaggtaatatcttttacaggaacatgaatggagctggaggccgttattcttagaaaactaacacaggaacagaaaaccaaataccacatgttcacagttataagtgggagctaagtgatgagaactcatggacacaaagaagagagcaacagacactggggcctacttgagggagaagagtgggaggagggagaggagcaggaaatactaagaattgggtactagggttagtacctaggtgacaaaataatctgcatgacaaaccactgtttacatatacaagaaacttgcacatgtacccctgaacctaaaataaaagttaaaaattaattaattgaaataaaaatgt

SEQ ID NO: 946498 - DNA, 601 bp, Homo sapiens
ttgtaaaattgtttttctttgtatcatttttcaattctcatctgttattagagccccactctagatccagaatgtasaaagtttctgtcccacagagaataatacttctgcagctcctgctagagtctggatcaaaaaactctcaatgtagaataaagtgaaataggagtgttcaaagagattttaaaatttataaaatgtggtaaaagaagatagcagatggctgggtgtggtggcttgcacctgtaatcctagcactttggaggccaaggtgggaggattgcttgagcccaggagtttgagaccagccttggcaacacactgagaccctgtctctatttatttaaaaaaaaaaaaaaagggccaggtgcggtggctcacacctgtaactcactttggaaggccaaggcaggtggattacttgaggtcaggagttctagaccagcctggccaacatggtgaaaccctgtctctactaaaaatacaaaaattagctgggcatggtagcacatgcctgtaatcccagctacttgggaggctgagacagaagaatcacttgaacctggaaggtggaggttgcagtgagccaagaccatgccac

SEQ ID NO: 946499 - DNA, 594 bp, Homo sapiens
ttcaaagccagcagtgtcgcacctctctgacccttctttcacagtcayctcttcctctggccatagctgggaaagagtctctgtttttaaggaatcatatgggtgggcccacctggataatttaggatcatctcttcatgttttttttttttttttttcttaagagggagtctcgctctgtcacccaggctggagtgcagtggtgcaatctcggctcactgcaggctccgcctcctgggttcacgccattctcctgcctcagcctcccgagtagctgggactacaggcacctgccaccatgcctggctatttttttttgtatttttagtagagatggggtttcaccgtgttaaccaggatggtctcgatctcctgacctcgtgatccgcccgcctcggcctcccaaagtgctgggattacaggcgtgagccaccgtgccccgcccatctcttcatgttaagtgccttaatttaatcaaatctgtaaagtcccttttgccacataagagaacatgtgcacagattgtggggattcagggccattattctgcccctacgtgtggtcattggctgcctggcagatgacctgcagcct

SEQ ID NO: 946500 - DNA, 566 bp, Homo sapiens
gaagctggcataacctcacaaagttctgaattgaggcaaggggctggggctgtgtatcttcacagcaatcagtcattgaatgtgggctacctctggggagggggcgaactcaggacaaactgctcctttgccaarggcgatttctggcaaggggttcaactatgacctggcagaagccaacattgctggtatctaggggaatgattatcctggtagaggaggatctgggtggcattaccacatccactacactgggcccacttcaggccagattgaggaagttttgctttatttggtaggccttgggatgccattggagatgtttacacagataaatcatgtgagtcagagctgtatttgagaagattagtctagttgtatgctcagattggattggaggtggtggataaactgcagatagagaggccattgggagactattgaaatagtccagatgaagaaataaaggcctgaacaggggtgttggcagcagaaatggaaaaagcggtggttgcaagagatatgttaatgctaaaattcccaggccctggtgactaattgaatat

SEQ ID NO: 946501 - DNA, 554 bp, Homo sapiens
ggtcaccgtggtgggaggcatagtccaataagtaatctggatagttggttgttataaatgaaagaagggaacttacttcctttggtttgagttgattatgtgacaaatatatggacaatgaggagccatgaggagtccattgctgtgtgccagccttgttcgattccaggctgatgtctagaattccagcctgcggctgattagttcttgatatgtggaaggaggcttgaacctagaagacctctgtcgttcatagagcaagtatctccctgtgtcccatgttccctctctcctgcctgtttacatgtagagagtatggctctttcgccatgttagattagatacttctatttatcaggagttactctcttgttaagaaaaaccaccactttttttcacttcttagtttgcatttttcttttttttcttttcttttttttttgagacagagtctcgctctgtcacccaggctggagwgcagtggcgctgtctcggctcactgcaagctccgcctcccaggttcacgccattctcctcctgcctcagcctcccga

SEQ ID NO: 946502 - DNA, 465 bp, Homo sapiens
actttgaggaattcaggaagtggagaacagctcatggtgagaggaaaggctggggccgacttgggatgtggatgtgcaaaaggaaaggtgaaggctggatgggaggcagggtgggcacagttaaggtgggccctgggccaggatggcctcccaaccagagagtagccttcaacatctcagcctcgtactgcgtgccagacactctaccaagccctccacttaggtaataatcacgtcttccaccctcactctcaccctgtaagggagctcttagaataacgctgctctccacggctgggaaacccaggctctgatgggtgacatcacttgttcaaggtcactcagccagtaagggccaggctgggctgcaaactcaatggcccactgcagagctcacamaggtccatttcctactcgccatgatgttttccagggagagtttagagaagctctggagctgggaaa

SEQ ID NO: 946503 - DNA, 626 bp, Homo sapiens
gaagcttactatcctctgattatagccatcctgaggactgcaggatgtatccctaagaggtggcccattctatttccacaagagaatattgaggttttatttctatcacggggcactcccagatcagtgggacttcaaatgggtcagagacctggggcccacttgctgctgattaaactgcttggtctgccagcctatttccctcaactatttcatctgtccctctttggcagtctttacaatgtattattgccacttcctgtgggaggaaaactgaggataatagtctattaattttctgattatatttaataggagacccattagctatgaggaagttcctctttccagatagtggtatgggcatcgaggaccaggaaagcatacttagaatcaatataaaagttaacgtttttcctttgcttaattcgagcaccctcgtgagggtgattagttcaactagctgaccatttgtgcccaaggagagaggtgcactctcaacaayatcattcagagtaactattgcataccctgctctgtgagttcctttttctacaaaaaaaacttccgtccataaacggaatccagtctgggttatctaagggggtttccttgaggttctctct

SEQ ID NO: 946504 - DNA, 670 bp, Homo sapiens
ctgcagcgaaaacttggggtgtgatggagagaggaagcaagtgtcctttctttttcttccatctttttgtccctgagtctcggcaaccttggcagtcgccacccatggttactgatccggcatgcacccatgaagcagggaaggcctagagaataggaattatttgcccttaactttgcctccatttttcctactgccagcaacccttgggttccctgggcttcatttattccatggagcatggcctccttccatgaggtggggggtttagtcagcaggaattggtcctgcccatttacattgtgcctgttgcctggctttggacccctcagatttggtttttctttctatggcctcagcctcaagcttggagtcaagtttgagactaaaaagtattttagagggttgcatgtatctgtttagattaaacctcaaatgagccctgatgaatttgcagttatcagggggataggaaccctctaatctagaaaaggagaaaagagaaaacagttaaagggtcaaaacggggaggtcctgaggsaagaagcccttgctcactgctaatgggtccttcccccagtttgaactgagctgaactccttggccaggagaagaaaagttccactgatgctgcaggcgggaagcaccagccagccggctgcgcagggtc

SEQ ID NO: 946505 - DNA, 586 bp, Homo sapiens
acatgctggaaaagctttatttccataaagtggcagattctaggaatctcttgtttagggaggactggtggtgagtcactgctgataactacagagagaggcagaactgctgtcttgaatcagaaagcaatcaaagtaacaagatctaacatgtattgagcaaatgctacattacctctaaccatcacaatcgccctgtgtggtgggtgtctttatgcctattttacagataagataatttagagtcacagagagtcactaatttccccaaagccacgaggtagataaatgacagtgacagaatttgaaccaagataggtctgaatgcaaaaccaaccctcttaacacctggcctagaagctagacaaggtcttaagctgattattacacacaactcccagtgcctgacagtgggaaggagtttatgccatgacctcctggagggatgggacaggtyttattaatattggtggccccaagcctatcacagtacttaccatatgataagtgctcccccccaggagggctgacatttggaccctacattcccacaattcaacttggagactctgactatttgggaagg

SEQ ID NO: 946506 - DNA, 596 bp, Homo sapiens
atgaagtttaaaagcatacaaaatacttctataagctacttatgggtcaataaatatggaggaattgtatgagtctgtgagtgtaaataataccaaattagatttggaggtgactccagcaaataggactggagaggggtacaaaaggccccatatgtgtctgcaatgtgcttttatttaaaaaaaaaaaaactcatgtaaaagtggcaaaacctacagtcaagaatgatgaatggtgagttcttgagtacttacatttttatctataactttcttggtgttcgaaatattttattatggttttaaaaaaagaagaaaggggaggaaaaccattggtcactgatagtaatagatcctctgcttttggcaacttggcccactcatcttcctgcttgaccaattctcctccatctctgagcttatccattcatttttcttttcaaactagaacccacatgcagatgactcccaaatctatatccagtccagacaacttstgttatctaacttctggttaggtatctccactaggatgtttctcagacacctcagactcaacacaagcaaaactcaattgataactaccccctccaact

SEQ ID NO: 946507 - DNA, 657 bp, Homo sapiens
gggagaatgcagacttgccctaggtacacctggttaagcattcaggyctctcaggcagtgggcagggtcatagagctcccaaggggttatcacctttgtctttggctaccagggtggatagaaaaagaccaccaggtgggggcaggaataggcctatatgagctcagcctctccttgggcagggcttgctgtggctgctgtgggggatgggcatgtgattcccagtttagtggggttatattctcagggggattatggctgcctctgctgaatcatacaggtcaccaaggaagtaggggaaagctggcagtcacaggcctcaccccactcccatgcagtccacagtcctaaaagccagtctgacttccaccatgctcctccaacagcaccgagtctatttccaggcagccagtgtctatttctcagccagggctgagaacttgccccagaccacgagcctccccattgagaaagcaagcagactcacagtttttcagtgttttagggagcctgcaggggtgatccggtttctttaaagggtctgtggattctcttggctttcctggtatgtttttgtggtagttcttggagcagaagttcacgatgtgagtctccacacactgctctgtctgtctgagtaggagctgcaagctagtc

SEQ ID NO: 946508 - DNA, 452 bp, Homo sapiens
gggcatgcgtacaacttcttaaacacactgcgcatgctcacttcctaagggtaaggagggcactgtgcattcaggcagcccaccctaagggaagaatcatgggaaaggggtgcaagaccctggaagtgggccatyttataaagtcccaggatcaagattaagtggggcacttgtccttcaagtcgcctgcttgggtttttttcaaaggggactttccttttctttcctgctctaagctatttttttttttttttttttttttttttttttttttttttgagatggagtctctctctgtaacccaggctggagtgcaatggcatgacctcgctcattataactaccgcttcctggtttcaagctattcttcagtcgcagcctcccaagtagctgggactacaggtgcctaccaccatgcctggctaatttttctatttttagtagagacgggg

SEQ ID NO: 946509 - DNA, 452 bp, Homo sapiens
gggcatgcgtacaacttcttaaacacactgcgcatgctcacttcctaagggtaaggagggcactgtgcattcaggcagcccaccctaagggaagaatcatgggaaaggggtgcaagaccctggaagtgggccattttataaagtcccaggatcaagattaagtggggcacttgtccttcaagtcgcctgcttgggtttttttcaaaggggactttccttttctttcctgctctaagctatttttttttttttttttttttttttttttttttttttttgagatggagtctctctctgtaacccaggctggagtgcaatggcatgacctcgctcattataaytaccgcttcctggtttcaagctattcttcagtcgcagcctcccaagtagctgggactacaggtgcctaccaccatgcctggctaatttttctatttttagtagagacgggg

SEQ ID NO: 946510 - DNA, 612 bp, Homo sapiens
tgggatagcacgagacagaggtgctgtgcctcatcactgcactgtgaccactggccttgcattcacgggactagggggaatkaaaagacaggcctcacacctgctttggacagacagtgggaagaagtgtgatccctctctccctctccccaggccatcggggagggtggagcacatttcagaagatgaggtttgtcctgggtctcaagggagatgagcagcgaagagagcagaaagcacagcagatgtgaaggcttcggaggtgaggggttgcagcatggaccaatgcaagaggaaatgtgatccggcgctcctcccagctttcccccaagtatgccagaggaaggagaccccggcaggtgtgcagagacctgtctgttgcagacggggccattcctaaggcagacacgtgggtcgatgaccgcagggccttcctccccctatctgaggcagatcgccccatctgtgctctgcccctcaccctccacttcaccttggaagcccccctccttatcttcaacctcctcctctctacggcttcctcccaccagtgtggaacccactcatgctcacatctgttccacttacaaagatgctttctctcctgggcat

SEQ ID NO: 946511 - DNA, 649 bp, Homo sapiens
taatgaagtctccatgagtctcaatagtgggggcaggcatgatgtttctaatttgagagtatctggcttgtgcagaaaaaaggcaaaagacctagaaagactaaactgggattcagtcccagctttgccatgcaatagctgtgtggccttgaacaaatcacttaacctctctgtacctcatttcctcacctgtaaaatgtggataattctgccttgcagcattgtggttgggatttgagaaaacataggcaaaacacataccacagctccaggtatgtggtaaatgatagctgttaatattggttgtactgggcatgttagttttctattgctgacttaagaagttaccacaaacgtagtggcttaaaacaacacaaatatatacttttatagttctgtggatcataggctgatagctgttctcaaagggctaaattaatcaagatattggtaatgttgttttcctttctggaggctctatgggagaatttctctccttcttactcaggttattggcagtattcaattccttgtggttgtaggatgggggtyccccatttctttgaagactgttacctgagggctgttcctagcttctagaggctacccaccttccttggcttgtggccccctgcctccatcttcagtg

SEQ ID NO: 946512 - DNA, 636 bp, Homo sapiens
aataaaaacaaagcaggggtggggcgcagtggctcacacctgtaatcctagcactttaggagcccaggtgggtagatcacctgaggtcaagagttcaagaccagcctggccatcatggtgaaaccctatctctactaaaaatacaaaaattagccaggtgtggtggtgcacacctgtaatcccagctactcaggaggctgagacaggagaaacgcttgaacccgggaggcagaggttgcagtgagccgagatcgctccactgcataccaacctgggcaacaaagaaagactctgtctcaaataaataaataaataacaaagcaggaagaactatacttatataagattaaattgacttttaaaaaaagaccaaaaaggtcattacataatcacgaaggaatcaatgcaggaagaggatataacaattgtaaatatctacacacctacaacaaagcatccaaatgtacaaagcaaatattcagtctaagggaagagactgaatccaatacartaacagttgaggatttcaacatccaattctcagcaatgaacaaacaatctcaacaaaaaaacaacagagaaacatcagacttaaactgtactatagacccaaatggacctaacaaacattaacag

SEQ ID NO: 946513 - DNA, 583 bp, Homo sapiens
aacaaaggtctctggttttcctaggcagagggccctgccgccttctgcagtgtttgtgtccctgggtacttgagattagggagtggtgatgactcttaaagagcatgctgccttcaagcatctgtttaacaaagcacatcttgcactgcccttaatccatttaaccctgagtggacacagcacatgtttcagagagcacggggttgggggtaaggttatagattaacaacatcccaaggcagaagaatttttcttagtacagaacaaaatggagtctcctacgtctacttccctctacacagacacagcaacaatctgatttctctgtcttttccccacatttcccctttttctagtcaacaaaaccgccatcgtcatcatggcccgttctaaatgagctgttgggtacacctcccagacggggtggctgccgtgcagaggggctcctcacctcccagacagggcrgccgggcagaggcgccccccacctcccggatggggcagcggctgggcgggggtgcccccaacctccccccgggacggggcggctggccgggcaggggctgccccccacctccctccc

SEQ ID NO: 946514 - DNA, 598 bp, Homo sapiens
tttttttatttatttccgggctatctattctgttccattgggccgtatatgtgttttaatgccagtaccacactattttgatgactacagctttgcaatacaattttacatcagaaattgtgatgcaacgaactttgtttttctttctcaagatcgttttggctatagcagatgttttgtggttccatatacattttagaattggttttatttttaatttttgtaaaaaatgtcattggaattttgatagggatttcattgaatttgtagattactttgcataaaaatggacatattaacaacattaactcttcaaattcacaacacaggatatctttctatttgtttctgtgttcttcaatttctttcaatgttttaagtgtacatatcttttactttcttggttaaatttattcttgggtatttgactttgatgctattgtaaattgaattgttttctttatttttttaataaatcttgattggcaaataaatgtgactgattttatatgttgatcctstatcgtgtgcctctattgaattaatttattggtactagcagttttgtctgaaattgttgaggtttccttcatataag

SEQ ID NO: 946515 - DNA, 562 bp, Homo sapiens
tggggtttcaccatgttggccaggctggtcttgaactcccgaactcaggtgatctgcctgcctcagtctcctaaagtkctgggactataggtatgagtcaccacgcccagcaagtgccagctaccacttttattccaatgactttccaatctacacagtgctttctcctgacttcaggaagacaccccttccagtccatcttctacccaaacaaccagtgatccaattactttttttttttttttgaggtggagtttcgctcttgttgcccaggctggagtgcagtggcgtgatctcggctcactgcaatctccatcccagattcaagtgattctcctgcctcagcctccagagtagctgggattacaggcatgcgccaccatgcctagctaatttttgtattattagtagagatggggttttaccatgttggccaggctggtcttgaaaacctgacctgaggtgatccgcccgccttggcctcccaaagtgctgggattacaggtgtaagccactgtgcccagcccaattactttttttttaaacaaggcctgaaggaaca

SEQ ID NO: 946516 - DNA, 666 bp, Homo sapiens
tgaaacttacagtcatggtggaagacaaagaggaagcaaygcagtaggaaggagatgaacacaggaggacctagcaaacacttataagaccatcagatcttgtgagaagtcattcactatcacaataacaacatagggaaaactgcctccatgatccaattacctccacttggtttctcccttgagaagtggggattatggaggttataattcacaatgagatttggataggaacacaaagcctaaccaaatcagacctcaaggacttttgttctcttgaagcactgaagttgattataccctgaaccaaataagtataacaaaactacaaatgagttcaatgttacatatagtaaatatatcattaaaatagactacaatcagtgcccaaaaagcaagaatctaagaatgttatgggagtgcagttcaggtggagcttcctggaagaaataaataacagacctccacttgatgatgagcagttattatcctgtcaaatgtgtgtgtgctgtgtggagatctggggaactggagattcactgagatacagaggtggaggtggaagggaaagaaaagacaatgtgaagggtatatgcacaaagggctctggattcagggaataccacttgtaactgcagggctgaaacatgaagttcaagagggaaa

SEQ ID NO: 946517 - DNA, 776 bp, Homo sapiens
cacagcacaggcagcgccgttcccactgtcacttcctgcctcctaggatgtcccctgggtttctcttttcttgccttttgatgacccttcatcatgtcttaagaatcatgcaaactggccaggtgcggtggctcacacctgtaatcccagcactttgggaggcagaggcaggaggatcacctgaggtcaggagttcgagaccagcctggccaacatggagaaaccctgtctctactaaaaatacaaaaaattagccaggcttggtggcaggcgcctgtaatcccagctactcgggaggctgaggcaggagaatcacttgaaccagggaggtggaggttgtagtgagctgagatcccgccactgtactccagcctggcatagcaagactccgtctcaaaaaaaaaaaaacaacaaaaaacaaacaaacaaaaaacatgcaaattctgattacagggaaagaggagagtaaagaggatgcagaattactgggccagcataactgttcatggctcacgaggaactcatgacaggtcttacatgtcagaacacaaagtattatcatccactcgtacagaaaagaaaaagggtttgtgtggtgagaacttggagctggggtctggtctgaaacacgtgtttggaaggttggcaggatctgcacgtttgccacctgaggctctgtttctcagygccaccttgagctttgctctgtggcttgaggtgaagctggtgatgccagcctgaggatggtctggatgacaagtgtaacgtttgatcta

SEQ ID NO: 946518 - DNA, 196 bp, Homo sapiens
acctatagtagaactattcaaatgtcagtggatgcctcatatgaaaccatggagtccagaaagaagtgacacaacattttaagtgttaaaaataaaacagacctatcaactgaaaattcaaatttctatatctagaaaawctatcgttcaagaatgaagacccaaattaaacattctcagatgaaggaaagctaag

SEQ ID NO: 946519 - DNA, 580 bp, Homo sapiens
accaggagattatatcctgcacctggcttggagggtcccatgcccatggagactcgctcattgctagcacagcagtctgagatcgaactgcaaggtggcagcaaggctgggggakgggtccccgccattgctgaggtttgagtaggtaaacaaagtagcctggaagctcgaactgggtggagcccaccacagctcaaggaggcctgcctgcctctgtagactccacctctgggggcagggcatagccaaacaaaaggcagcagaaacctctgaagacttaaatgtccctgtctgacagctttgaagagagtagtggttctcccagcacaaagtttgagatctgagaacggacagactgcctcctcaagtgggtccctggcccctgagtagcctaactgggaggcatccccagtaggggcagactgacaccccacacagccgagtacccctctgagacggagcttccagaggaaaaatcaggcagcaacatttgctgttcagcaatattcactgtactgcagcctctgctgctgatacccaggagaaaaaggtctggagtggacctccagcaagctccaac

SEQ ID NO: 946520 - DNA, 600 bp, Homo sapiens
tgcagctgaatatttctataatcctaccacacagaattcaagaaatctaacagcttttcttcatttcatcccattttttgcccctttcagttcaaattagcagtttttctgcaggggtggtttggtaagcctgtagttcatacccattactaatctccttatcaaactgtcagttggctgcacccttactgttctcttccaaacatgctttctcactttttgcgatacagatgggctgagaattttccaaatatttaagttctagttctttttgcttaataattttaccttcaagtcacttttctcttctctcattttactgtataggaactgagcaaccttcaacaatttgctgagaattttcaccagctaagtatccaatttaattatgctaaatatacatttttattgctttcaagttctaccttccacagaacactagaacatgaacagaattctgccaaattctttgccactttgtaacagagattgcctttcctctagcttccaataataatrtcacttgattctgtctgagacctcatgacaatgaccttgaccatccatgtctttgccaacattctgttcatgattactttt

SEQ ID NO: 946521 - DNA, 495 bp, Homo sapiens
cactatgaaatgaacttctttatccctagtaataatactggctctgaaatctrctttttctaatattcgtgtagtcattccaattttcctttggtgttatcatggtatatcttttttccatccttttacctatttctatctttaaattgtgtttcttatacaaagtatacacttcggctttgcctttatatacaatctgatactctctgctctttaattggattgttttaaaccagttatgttcaatgtaatcgttgacatgattaaatttaagtctatcatcttgttatttgtttttactttggcccatctattctttgttcccttgaaaactctttttctgccttcttttgaattaaatactttttaaattgcattttattttctttgttggcttattaacattgtttagttcatcattttaacaactactttcaaatttatagtatgtttttaaccttatcacactacactttcgagtgatactataccact

SEQ ID NO: 946522 - DNA, 495 bp, Homo sapiens
cactatgaaatgaacttctttatccctagtaataatactggctctgaaatctactttttctaatattcgtgtagtcattccaattttcctttggtgttatcatggtatatcttttttccatccttttacctatttctatctttaaattgtgtttcttatacaaagtatacacttcggctttgcctttatatacaatctgatactctctgctctttaattggattgttttaaaccagttatgttcaatgtaatcgttgacatgattaaatttaagtctatcatcttgttatttgtttttactttggcccatctattctttgttcccttgaaaactctttttctgccttcttttgaattaaatactytttaaattgcattttattttctttgttggcttattaacattgtttagttcatcattttaacaactactttcaaatttatagtatgtttttaaccttatcacactacactttcgagtgatactataccact

SEQ ID NO: 946523 - DNA, 547 bp, Homo sapiens
ttctgaccaattggctataaatcggggttcccatgccccacacctgaggttggatttgctagcatagctcayggaactcaggacggcactcatattgaccagttcgtgggaaaagattttacaaaggattacagatgagcagccgaataaacacgcacaggtgagttgtgtgggaaggtcatggagcttccatgccctctcccgcatgccaccccccagggacctcagatgtgtggaagcttgtcaaatcttgttcaagagttttaccttcccagaggtcagtaggcggggctgaaagttccaaccctctattcactaggtctttctggtgactgaccccatgctgaggctaggtagggcccccacatggtcacctcctcagcataacttcaggtgttatcaaacggactcattatgagatgatcacttgggaaattttttgtttgtttgtttgtttgagacggagtctcgctctgtcacccaggctggagtgcagtggcccgatcttggctcactgcaagctccacctccccggttcacgccattc

SEQ ID NO: 946524 - DNA, 583 bp, Homo sapiens
caaatgcagtctcaagtcctaggttgccacctatacttctgaccaattggctataaatcggggttcccatgccccacacctgaggttggatttgctagcatagctcatggaactcaggacggcactcatattgaccagttcgtgggaaaagattttacaaaggattacagatgagcagccgaataaacacgcacaggtgagttgtgtgggaaggtcatggagcttccatgccctctcccgcatgccaccccccagggacctcagatgtgtggaagcttgtcaaatcttgttcaagagttttaccttcccagaggtcagtaggcggggctgaaagttccaaccctctattcactaggtctttctggtgactgaccccatgctgaggctaggtagggcccccacatggtcacctcctcagcataacttcaggtgttatcaaacggactcattatgagatgatcacttgggaaattttttgtttgtttgtttktttgagacggagtctcgctctgtcacccaggctggagtgcagtggcccgatcttggctcactgcaagctccacctccccggttcacgccattc

SEQ ID NO: 946525 - DNA, 627 bp, Homo sapiens
agatcccacccaggatcccacactacatttagttgtcacgtctgcttaggcgcctcttgactgtggcagttctcagacttcccttttttttgaagagcattggtcaggtatttaaagaatgtccccccacccgttaggatttgtctgatgtcatgagaaaaacatcagacaaatcctaagtgggggaccttctgcaaaatacctgatcagtgctccagtattagcttttgggaggaagaccacagaggcaacatgctattctcatcttaccatatcaaaggtcaacatggcttaggactgcagactgctgatgttgaccttgatcacctggctgaggcggtgtttgtcaggattctccactgaagttacacttgcccccttccatgctatgctctttggaaggaagtctccaggaacagcccacgcttaagggtggggagttaactcttccatctccttgagggcaaagcatctacatgaattatctggaaaccttttgcacaggagatttctcttcccctactaattaacgtattccatcatttatatcactgtgatcttacggctattttatactctgggctaccatccaatattgctttttcttraattgttccagctttgtgt

SEQ ID NO: 946526 - DNA, 634 bp, Homo sapiens
attgtaattattatggattttctttgcatatgtaaataayatttgcaaacgatcatagtttttctattccttatacccttggtttaatttctgttattgttgtaattactaggatttccattagaatactgtgaagaagtggtgattctgggcatacttggcttattcctagtctcagagagaaagcattcaacatttcaccatttattatgatgctggctttttatatggccctgatgaaattaaagaaattatcttcctttcctagttcttagtcttttttcatgaataggtgttgaatttaattaaatattttttaacctattgagatgtcagcgatttttatctttcatggtgttaattcagtgaattaccctgcctggcttttccaatgttaaactagaaattgcatttctagaaattatccaacttggttttgatcaattgcactttttatgtattgctgtattgagtttgctaatattccttttagaatatttgcatctatgtttgtaagtaatattggactgtaattttgttggtatcaagttgatggtgtcaaaattatagaactttataaaacaaattggaaaatttctcctttttccctattctctggaatagtctgtgtaat

SEQ ID NO: 946527 - DNA, 592 bp, Homo sapiens
tcagcactttgggaggctgaggcgggcggatcacaaagtcaggagatcaagaccatcctggttaacacggtgaaaccccgtctctgcttaaaatacaaaaaactagctgggcrtggtggtgggcgcctgtagtcccggctactcaggaggccgaggcaggagaatggcgtgaacccgggaggcggagcttgcagtgagccaagatggcgccactgctctccagcctgggtgacagagaaagaatccgtctcaaaaaaaaaaaagaaagaaaagacagattatacttcctgtgcccttcaaaaactgattcagttcagaaataaggattcttagaattcttgatcaagaagtcatctagcttttctctgtcatcttcaggaaaaccaatggctacagagacatgagcccagggaaatgagaagtttcccagaggaagcgattctaaactgccctcacagtcacaaccctgcattaggactaaataaagctgatcagcatttatcaatccgtacctatgtgatagattcattcatgtcagtctctccattgaaaaacagtttccacaagggcagaatgtgacagggttacaatg

SEQ ID NO: 946528 - DNA, 599 bp, Homo sapiens
ctaagactcatgggctattgaacaggaactatttttatgctcacaccaaagctatttattattccagtgcatctcatgctcctgaccagtacctctttgtggttaaaaaaaaaaagtrtaaaattctattctatttttatatttttgagtcttgagtgagtcttttccttttttcttgggtgttgagatctagtcacagtaaaccacattcactcaggcatttctcccatcctccagtctcttgtgcccatttgaggagctcccctcattcttggtttaattactgctcttgatttccttggctcttctgtcaatcccttatactcagcctcctcatctcttgggtgatttttatcttccttctcagtaatttgttgattaaccttcttcatttctccctaggaagggctcagtcttttttctctaaagctgctatctcactggtaatgacacaggagttttttggtgccactttgccagccagaaatctccacagccagcagtacccttcccaggcatcactcagctctgggctcaccactggactcactcttcccactcagcctggcaggctgcactcaactcacactaccacccca

SEQ ID NO: 946529 - DNA, 630 bp, Homo sapiens
ggggactgacggacttgatcatgtgtgatttggtatactcagggagtcctggaaccaatcctctgcatatactgaaggatgaatagatgagaagatcatatgttatttttaacaagtgtgttaatayggtagattacattaattgattttcaaacgttaacctagacctgcattcataggataggctcctcttagttattgcactagtttcctcgggctgccgttacaaagtaccacaaactgggtggttggaaacaacagaaatttattctctcatagttctggagttttcaagtctgacaagatttccaggttcatgctctccctgaaggctcttggacttatccttccttgtctcttcctagctgctgtggttgccagcaacccttggtgttctggggttcgttgttgcattactccaacctctgcctccgttgccacttgctgtccttcttgtgtctctttatctctgtgttcaaatttctatattcttataaggacaccaggcctaccctaatccactttaacctcacttcaacttggttatatgtgcaaagatctgatttctaaatgaagtcacattcacaagtaccaagggttacaacttaacatatctttctgagagaccca

SEQ ID NO: 946530 - DNA, 630 bp, Homo sapiens
ggggactgacggacttgatcatgtgtgatttggtatactcagggagtcctggaaccaatcctctgcatatactgaaggatgaatagatgagaagatcatatgttatttttaacaagtgtgttaatatggkagattacattaattgattttcaaacgttaacctagacctgcattcataggataggctcctcttagttattgcactagtttcctcgggctgccgttacaaagtaccacaaactgggtggttggaaacaacagaaatttattctctcatagttctggagttttcaagtctgacaagatttccaggttcatgctctccctgaaggctcttggacttatccttccttgtctcttcctagctgctgtggttgccagcaacccttggtgttctggggttcgttgttgcattactccaacctctgcctccgttgccacttgctgtccttcttgtgtctctttatctctgtgttcaaatttctatattcttataaggacaccaggcctaccctaatccactttaacctcacttcaacttggttatatgtgcaaagatctgatttctaaatgaagtcacattcacaagtaccaagggttacaacttaacatatctttctgagagaccca

SEQ ID NO: 946531 - DNA, 802 bp, Homo sapiens
aggcgcccctcccccagcctcgctgctgccttgcagtttgatctcagactgctgtgctagcaatcagcgagactccatgggcatacgaccctctgagccaggtgtggggatataatctcctggtgtgccattttttaagcccgttggaaaagcgcagtattagggtgggagtgacctgattttccaggtgccgcctgtcacccctttctttgactaggaaagggaactccctcaccccttgcgcgtcccgagtgaggcaatgcctcgccctgctttggctcatgcatggtgtgctgcacccactgtctggagctccctagtgagatgaacccagtacctcagatggaaatgcagaaatcacccatcttctgcatcgctcacgctgggaactgtagacaggagctgttcctattcggccatcttggccccaccccctcctttttttttttttttttgtttgtttttagacagagtttcactcttgttgcctggagtgcactcttgtagactggagtgcaatggcatgatctcagctcactgcaacctccacctcccaggttcaagtgattctcctgcttcagcctcccaagtagctgggattataggtgcctgcaaccatgcccagctaattttcgtatttttagtagaggcagtgtttcatcatgttggccagactggtcttgarctcctgacctcacataatctacccacctcagtctcccaaagtgctgggattacaggcatgagccactgcacctggctagaataactttttagaagtaagagattggggtgaccatgg

SEQ ID NO: 946532 - DNA, 626 bp, Homo sapiens
gcttttggagtcttggatccaaatttcagcattgcccttccaagtcccagaaccttggacaagtcactcagtcactcagagccgctgtttcccagctataaaaatgggaaaataccaatgctctccctttgggctgatgattgtggaaatacatgatatttgccctagcctagtgcctatgtcaaggaacaatagatgtcttcttaaaaaagaatgtgctattagcctaaagctgccaatcaagttccagaagcaaacagtgcacaaaatgggcatctcctgaatcacaagtggccgcctttacagcttgacttggggacccaggaaggtgagagacagtaaacagaccggaggagatgctacctgggcctgcaggaggagcaaggggtgcaaatgtagggtgcaggtcccaaaggacccagggaggggaggaggggaaatacccactcctgggcgggccctgcagagggagtctgtgcactcagcacagagaaaggccctggcagtgggtttcccttgggtggggggatccctgatgctcagccctgcagcggtgcagagcaraggggcgctgagggtggcccgatggcaccttcttatctgagtgatgtagctgggggctcagc

SEQ ID NO: 946533 - DNA, 558 bp, Homo sapiens
agtcatatttgggttttctatggaagcaatcatattagcttttatatgaattgttttgtttcatcttctacaatctcttctgtctttttattgtctgrttgtgttgactaataccttgaatacactggtgaatagaaatggtattattgagtatagtctttttcacagtttttagatagaatgtttctaatgcttcaccacagacaacaatgttggcattctattgttattttactaagagattgctttgttatttgaataaatattgcctgttattaaaagtgtattctgcatgttttcagttatatggattttctccattaatcttttaatatgttgagtcacgtttatagattttccaatgctaagccactttgaattcctgggataaaacaaaactggttatgatatacaatcttctttaaacattactgggctgagcatggtggctcacacctgtaatcccagcactttaggaggctgaggtgggtggatcacgaggtcaggagatcaagaccatcctggccaatatggtaaaaccacatctctactaaaaat

SEQ ID NO: 946534 - DNA, 574 bp, Homo sapiens
agttaaataagcaaataattatattgaagataaacrtatctcagcatgagaacattttacttttagttgaatatttaagtactgagttaaatgtttcatattactagtttctggatcatggattgctttgcattggttcttactagaagtgttagcactgtactagtttccagatgttaaaaaactttgatcatatgcatggccttctagagaaaaatgaaggtaaatactatagtttcatgtatttctgaaatatttagagataaagaggaacttctgcggaatatttaagcttgttgtttcccaaaatgcatctccatgaagcctgagaatctgtcagtcttattacgttaggaaaatgtaaactactttaaggatttaaactagaagagatataatatagtgaatgacttataaagtgattaggaaggctgaagaacaaaaaggagaagtaggggatgctagagggatttttttaaaaagggagagaaatgagagtaaaaggtcagaaagcagctagtacccctaactggaacctatgtgttgcacttgatttttgtgctgtgggtagctc

SEQ ID NO: 946535 - DNA, 707 bp, Homo sapiens
gtccaagtcataggcaatcagcaatctcgatagactgatggatcgtggacagaagctctaacgctgtttccattcatttagcaacagcaaatcaatccactttcccagcatcctgcaactttatcgaactcggcatcccattgcaggatacgcccccgaactctccttaattatatatttcgctatttgcaatcaggactcggcgatgcagtcctgacatcagagaatgggcgtcttctcagaaggccgcagtagcggcagcagctttcccgccctactgagcgctcactacaagcgggctctgggctaggcgcgccacccgtgcaagtccccggggagcggcggtgcaccctccgtcccgcgcgctcgcagccattgtagggtgggcgctcgccaggcagggtgccgacacgccctctccgcgctgcgacgggcggccgggggaggagagggtgcgctgtgcgcaccggagggagaggctccggcccagcgccgcctgcccgccagcagaccagcaggctcctctttgcggcgggtgccccacgcgcctctcgggcgcgcgctcccagccccgcccgcgtgcggcggccgcacggccgcgagagcgcgcctccgcttggcgggcacggccgcgagcgcgcgtgcgcccctccgaacgtccccgkgagcccagccagagcgagcgccggggccgggcgcgcaggagt

SEQ ID NO: 946536 - DNA, 516 bp, Homo sapiens
ccagggtggagtttcccaatcctgagggtactgcaggagaccagggtgtatttcagtccttatctcaactgcataagagagacactcccagagcggccgtttatagacctccccctaggaatgcagttcttttcccagagtgttaatatcaatattccttgctaggaaaagaatttagcgatatcttccctacttgcatgtccgtttataggctgtctgcaagaagaaaaatatggctctttttgcccaaccccgcaggcagtcagaccttatggttgtcttcccttgttccctgaaaatcgctgttattctgttctttttcaaggtgcactgatttcatattgttcaaacacacatgttttaaaatcaacttgtacagttaacacaattatcrtagtggccgtaaggtgacatacatccccagcttacgaagataacaggattaagagattaaagtaagacaggtgtaagaaattatgaagtattatttgggaactggtaaatgtccatgaaatc

SEQ ID NO: 946537 - DNA, 454 bp, Homo sapiens
atgctctctcttgccactaccgttcaacatagcatgggygtcctggccacaacaatcaggcaagagaaagaaataaaaggcattcaagcagtaagagaggaagccaaattgtccttacttgcagacaatatgattctacacctaaaactgccaaaaagctccttaatctgataaacaacttcagcaagtttcaggatacaaaatcaatgtacaaaatcactagtattcttgtacaccaacaatatccatgttgagaaccaaatcaagaatgcaatctcatttacaatagccacaaaagaataaaataccaaggaatatagctaaccagtgatatatctttacaataagaattataaaacattgttcatataaatcagacatgacacaaacaagtggaaaaacatttcatactcatggataggaagaatcaatatcattaaaatggtcatacagc

SEQ ID NO: 946538 - DNA, 615 bp, Homo sapiens
ggtccaggctgaggtggtctcagatggagataaggaacttgttgggaactggagtaaaggtgactcttgttatgttttagcaaagaaactggcggcattttgcctctgccctagagatttgtggaactttgaacttgaaagtgatgatttagggtaccaggtggagaaaagttccaagaagcaaagcattcaagaggtgacttgggtgctgtgaaaagcattcagttgcccgggcgcagtggctcacgcctgtagtctcagcactttgggaggctgaggcgggtggatcatgaggtcaggagatagagaccatcctggctaatacagtgaaaccccatctcgactaaaaatacagaaaaattagctgggcgtggtggtgggtgcctgtcgtcccagctactggggaggctgaggtgggagaatggcgtgaacctgggaggcggagcttgcagtgagcccagattgtgccactgcactccagcctgggccacagagcgagactctrtctccaaaagagaaaaaaaaagcattcggttttaaaagggaaacagagcatagaaatttcgaaaatgtgcagcctgacaatgcaatagaaaagaaaaccccattttctgg

SEQ ID NO: 946539 - DNA, 569 bp, Homo sapiens
cagacttgatattgatctgttcagtgtttcaatttcttcctgattcagtcttgagatattacatttccagtaatttacacattttctttagatcttctggtttacctctagagatgttcataatctctaaggycattttggatttctgtgggattggttgtaatgttgagggaagagagagaccctctcatattgttttatattgttttatactcagtacctgttttaagaaaaaaacaaggaagtgaaatcaaagacaagcagtccagcgccaggcccaaaaccaggcctgggcctgcctggcctaaacctagtagttaaaaaccaactcatgacttagaaccccatgttacccatagatttcaggcattgtatggaagaacattgggaaactccctgctctgttctgtttcactctgactaccagtgcatgaaacccctgtcacgtatcccctagattgctcaatcagtcacaaccctttcatgtaaaatctttagtgttgtgagcccttaaaagggacagaaattgtgcactcggggagctcggattttaaggcagtagcttgctg

SEQ ID NO: 946540 - DNA, 498 bp, Homo sapiens
catctgagtggaagcgtggcctgatcacccaccgtgtgcctgcattggcacttttgttctggttttgacttgacttgaattgctggatactttggttttggttttgacttggcttgaattttttggttctaggattttgaatttcatgattttggtttggtataaatggtaaaagtgtgtgtgtgccctctttacccgttctttgtcttgtggtgagtgtgtgtagtgtgagtgtggtattttgtcttgaaaaaaaaaatgggtcaggtgcaaagtaagcccaccccactgggaactatgttaaagaatttcaagaaaagatttaatagagactatggagttactatgacaccaggaaaacttagaactttgtgtgaaatagactgggtagcattagaggtgggttgrccatcagaaagaagcctggacaggtcccttgtttcaaaggtatggcacaaggtaacctgcaagccaaggcacccagaccaggttccatac

SEQ ID NO: 946541 - DNA, 585 bp, Homo sapiens
agacccccttccgcaccacagtagttaagagaacagyagcataagcggctggcagaggcaaggaaagaccagcagagagaaaaagaggccatctgtaccaattctaagttaatttagactaaacaaggccttattaatagcaaaggataattgaaatcccaaacttataaggttttcaacaaaagtgaagtttgctaaaagttaacagtgtaacatgtattatggtaacttctaatcttgtggccttagacagtctagtccaaagacataaaaaaagttcactttaaaaaaggagaaaaaggggggaggcagaatttatataaaaagaatcttatatggtaaattcttgtcctgaaataaattaactggttgttttaagaaaaaatgtagtaagtcaaaaagttgagacatgttgaaaaattgtttgcaaaagtcgtgaaagaaaaaaatattataaaaaattttatgcaaaaaatgttgtataatttaaaaataataaggcctcctgagtactattgaagaaacagtttatgtgcaaggtgtataaaaaaagtaaaatatacctttggtaaaaagattataagg

SEQ ID NO: 946542 - DNA, 620 bp, Homo sapiens
aaggtcagcctcagatgcagagtgctgccttgcctgcattcacaccacttgcagggcagtgtgcacctgctgaatggacacaatggaggtacaaaggcccagccatctcagcctgatgcaggatactctcacaagcaacaatcactccagatctctcccactaggtaactgaggctctgagggacttgcactgcatttcaacttcttcctctgcccaactctgcttccacccacttcctttcaaatgtattgatccaggtaaacatcgaagtgaataaccactcctctatctaccccatcccagaatgtgaccagaaacaggatgctatagcactctaccgtaagcaaggaaatttcttggcatgctcttgtatattctctgaaatccaaacaagttttatactctacttcatctcatacaataaattttataagaaaaatatgtaccttataaatatatacacttatgtatccataaaaataagaaactgaaaaaactaaagaaaaaaagaggccgggcgcggtgggtcaygcctgtaatcccagcactttgggaagccgaggcaggcggatcatgaggtcaggagatcgagaccatcctggctaacatgatgaaaccc

SEQ ID NO: 946543 - DNA, 431 bp, Homo sapiens
ctttactaaaaatacacacacayacacgagatttgatttgtaaataccataggttgggggctgataaggagaaaagttgggggagggtgggcagggaacgctgggttttgacaattcctatttcacctgtttctcttgaagaaagttgtgcttttgaaggatcaggatttcacttaaggcagatgctgcccacaaaagaatcccactggtagcactaaaaaatgacaggcttatctgcactaaaggcaaggcttgtgccacttagaaggcttgaagttcttgtaattacttcaaataaaaccactccagtgttctcttggtaaaacccttcaaaatccaagctaactgagtgcctcttctttctcttttagccatatgttcttagagacaatgttttccatgaccttgagtttattaggttttcaagagag

SEQ ID NO: 946544 - DNA, 622 bp, Homo sapiens
tatagaaacttaaccaccttcaaagggcctttattctatccttctatctaccacctaactgataaggctgtttggcatgcccacggcactgaatcctaccacaccagcttgcctagaatgtttatccaaacactgtgatttacactggactggaatttcagtaattgtggctgatcacataggcatcctctgcctatttctgcaataaaatcccaggactctgagcctccagtcagcttccctagtcagaaatattgtgtatgtgttacttaattttattgctggaagaaaaagtgtgttctgtgtaatccacctcctgcaccagacacaaagctttggaagcctgcacttaaactcctccagactgatgtgactttttcccttgttgatgctgtcttgtatcctttgatcacctataaccatgagcacaactgactctgagtcctgggagtccttctagtgagtcatcaaacatgtgggtggccagaggactcctccccctcccccagacaaggctgatctaagattagactcaattgggacaatgaggctcccctctcatgatttctcwtcctccagcaggctagtccaggcttgcattctcatgagagggttctgaaac

SEQ ID NO: 946545 - DNA, 590 bp, Homo sapiens
aagagatacatattttctttcttgtgcaacatattttcttctggaattaataatggtcattatttattagttatcatttattcctttgttaccagttctttcaaatactcaggcagaactctgaacccttctgaacactacattctacatggtcacacgttaaataaacttttcattccagtttgttgttgttttcgataaagacattcctgctggtcttccaaatatactgctgttttctaggcctgcaactcagctactgacgtgagatctccctgggctcttttatgatgattccagttttctttgctccaacatttaatgtccaagttgttctctttattcactccctcattttggtggaatatatcctgataatagtttccaaagcatgtgtatatggaagacaaattatttgtgaaatgtgagtgcctgaaatgtctttattctcatatgtgtttaataatgtctggctacagatttgaagctcagaaataactttccaacaggattttgaaatcattactctatggcctttaagcttccaacattgatgaggaaccyaaggtcatgctgattctcaatcttat

SEQ ID NO: 946546 - DNA, 617 bp, Homo sapiens
gcagtatgcaccgaacctggatggtagtctttatccctcatcctcttcccaccctttccccctgaatccgcaaagtctgttgtgtcattcttatgcctttgcatcctcatagcttagctcccacttaygagtaagaacatacaatgacagagtctcactctgtcatccaggctggagtgcggtggcacgatcactgctcactgcaacctctgcctacaggattcaagccattctcaagcctcagcctcccgagtagctgggattatgggcacgcaccaccatgcctgggtaatttttgtattttcttacagagacagggtttcactatattagccaggctggcctcaaactcctgacctcaagtgatctgcccaacttggcctcccagagtgctgggattacagatgtgagccatgttgcccagcctcttttttttttttttttttttttttttgagacagagtctctctctgtcacccaggctggagtgcccagcctcattttcaaaataaaagtaaaaagcaaggactctgaagccagaatatgtagatgtgaatttcatctctgcatttacctgttgggctatcttaaccaagataacttagtctccttatacc

SEQ ID NO: 946547 - DNA, 697 bp, Homo sapiens
gatgctctgcaagcagcttctgctgtgggcgcccatatctaaatgaggagamtgcagtagcacctggaagcatgaagatgccaggaactgcagagccccgaagagagtgcctcagccctggttcagggagcccttacatctgtgttcctggaaaggccacaactcttctctcctcattgcccacactgtggcaagcagcagggtgtgtttcagccctgtttgtgttacagctctttcagttctgccattcagtgggtcccaaattcttgtcctgcttcaaggaagagtgaggtacatggacaactggagagtgaacaaggcaaaggaatgctttattgagcaatattacagctctcaggctacctggagtgggtagctcctatctgcaggcagtcatcctgatgacatctctccacccctcagcagagcggagacctggagtgggtagcttctacctgtagtcaggtcatcccaacatctgtgcagccctcagtggagaggagacccagagtgggtagctcctatccatgggcaggtcatcttgtcatctttccaaatctggctaagtccagggtttttatgggcttcagaagggaggaagtgcatgctgactggtccatgagcagccatgggtgggcctggaaaaagcaccataagttttcatgcctggctatggaacaggcagcccaggctccag

SEQ ID NO: 946548 - DNA, 751 bp, Homo sapiens
gagtatgaggtggattccctaggttagacccaaactgaggatcctgaagctcctgctgggggatttggggmtgggggcaccctggggagctgctgccaaggccatccaccgtccatacaggccgcctcccttcccggcctgtgatggaaaggagaaggggtatgtgaacagctgtggaagtcagactctcgggaactgaatcaggccccagcccatgccccccagcccagtccagccaacgtgcccgctgtcttcccacccagccagccgagccctcaggattgttagatggaaccaggctccatcaccacccaggcatggagggaagatgccctggtccttagcaagcaaggcctggtttccaaagtgctctccgaagaggcctcatgtttgtgacatcttagaaggtacctttctgctgttcttgcacccagcatgttggcaagtcaagttcccccactgagttctccacacataaggagggagtcaacaccattgctaagtcggatcagctcaagggtctccagtatcagttttatcagatcccagggacctgcctgctcccagaggtgacagagaaaaatcaaggaacgatctgtatggtcactgacatggatgaaacccttgtgcatagctccattaagccaatcagcaatgctgactgcctagtgactgtaaagattgaggggaccatgaggccttatatggatgagttcctgagatgactggaggaactgtttaaatgtgtttt

SEQ ID NO: 946549 - DNA, 751 bp, Homo sapiens
gagtatgaggtggattccctaggttagacccaaactgaggatcctgaagctcctgctgggggatttggggctgggggcaccctggggagctgctgccaaggmcatccaccgtccatacaggccgcctcccttcccggcctgtgatggaaaggagaaggggtatgtgaacagctgtggaagtcagactctcgggaactgaatcaggccccagcccatgccccccagcccagtccagccaacgtgcccgctgtcttcccacccagccagccgagccctcaggattgttagatggaaccaggctccatcaccacccaggcatggagggaagatgccctggtccttagcaagcaaggcctggtttccaaagtgctctccgaagaggcctcatgtttgtgacatcttagaaggtacctttctgctgttcttgcacccagcatgttggcaagtcaagttcccccactgagttctccacacataaggagggagtcaacaccattgctaagtcggatcagctcaagggtctccagtatcagttttatcagatcccagggacctgcctgctcccagaggtgacagagaaaaatcaaggaacgatctgtatggtcactgacatggatgaaacccttgtgcatagctccattaagccaatcagcaatgctgactgcctagtgactgtaaagattgaggggaccatgaggccttatatggatgagttcctgagatgactggaggaactgtttaaatgtgtttt

SEQ ID NO: 946550 - DNA, 751 bp, Homo sapiens
gagtatgaggtggattccctaggttagacccaaactgaggatcctgaagctcctgctgggggatttggggctgggggcaccctggggagctgctgccaaggccatccaccgtccmtacaggccgcctcccttcccggcctgtgatggaaaggagaaggggtatgtgaacagctgtggaagtcagactctcgggaactgaatcaggccccagcccatgccccccagcccagtccagccaacgtgcccgctgtcttcccacccagccagccgagccctcaggattgttagatggaaccaggctccatcaccacccaggcatggagggaagatgccctggtccttagcaagcaaggcctggtttccaaagtgctctccgaagaggcctcatgtttgtgacatcttagaaggtacctttctgctgttcttgcacccagcatgttggcaagtcaagttcccccactgagttctccacacataaggagggagtcaacaccattgctaagtcggatcagctcaagggtctccagtatcagttttatcagatcccagggacctgcctgctcccagaggtgacagagaaaaatcaaggaacgatctgtatggtcactgacatggatgaaacccttgtgcatagctccattaagccaatcagcaatgctgactgcctagtgactgtaaagattgaggggaccatgaggccttatatggatgagttcctgagatgactggaggaactgtttaaatgtgtttt

SEQ ID NO: 946551 - DNA, 751 bp, Homo sapiens
gagtatgaggtggattccctaggttagacccaaactgaggatcctgaagctcctgctgggggatttggggctgggggcaccctggggagctgctgccaaggccatccaccgtccatacaggccgcctcycttcccggcctgtgatggaaaggagaaggggtatgtgaacagctgtggaagtcagactctcgggaactgaatcaggccccagcccatgccccccagcccagtccagccaacgtgcccgctgtcttcccacccagccagccgagccctcaggattgttagatggaaccaggctccatcaccacccaggcatggagggaagatgccctggtccttagcaagcaaggcctggtttccaaagtgctctccgaagaggcctcatgtttgtgacatcttagaaggtacctttctgctgttcttgcacccagcatgttggcaagtcaagttcccccactgagttctccacacataaggagggagtcaacaccattgctaagtcggatcagctcaagggtctccagtatcagttttatcagatcccagggacctgcctgctcccagaggtgacagagaaaaatcaaggaacgatctgtatggtcactgacatggatgaaacccttgtgcatagctccattaagccaatcagcaatgctgactgcctagtgactgtaaagattgaggggaccatgaggccttatatggatgagttcctgagatgactggaggaactgtttaaatgtgtttt

SEQ ID NO: 946552 - DNA, 719 bp, Homo sapiens
agttgaagatgcacaaaggtcttgtcatgcatatatcaaaggtctgtagcatttctcctgtgtattttgataatccattaacaggcatttccaaagcctacaactaatcagcatcccattcccaaacactttctttcctacatcactaaatttaaaattgtacttaactgagtgatcctatttctaagaaataaaaaaactgtttatattgcatcatttcatttcaatgacctctgagagttgtactccttggtagggaaaataattattttaaagcaaacatgaagtagtatatgcttattttgtgttatctgtgagacagggaggccatgcctttcccagctatgatccatgctgattgggcctcaatttgaaccttacactaatcttatcagtgtaggtcagatttttttttaacagcaattgaatcagagccagtgcacagcatcctgttaatgaaattcatccattcactcaaaaaacattaatgaaccatttctacccttgcaaaagttataaagagatgacaaagacaagatacaatccttgttctcaaagttcttcatcttatgaaagatataaataakttcctgcatgtaaagtgttcagtaggaggtaatgagtggataaaggctcacctagaatggctcccaactcagactgggaactttgaaagaactttctaggaaagaggttggcaaactatgcctgcaggccaa

SEQ ID NO: 946553 - DNA, 850 bp, Homo sapiens
ctctgtctcagggagattggggttttatctctaagcccctgactgggactgctgcctttttttcagagatgccttgcccagagagggggaatctaaagaggcagtctttccacagcagtgttgctccacccagttcgaacttcccggtggctttgtttacactgtgagggtaaaactgcctactcaagtctcagaattgtggacgctcttccccccaccaagtttgagtgtcccggcttgccttctgactgctgtgctggcagtgagaatttcaagccagtggatctgagcttcttgggctccgtgggggtgggaccttccaagccaaccacttggctccctggcttcagccccctttccaggggagtgaacggttttgtctcactggcattccaagcgccactggggtatgaaaaaaaactcccgcagctagcttggtgtctgcccaaacaactgctcagttttgtgcttaaaacccagggccctggtggcataggcactggagggaatctcctggtttgcaggttgcaaagaccatggggaaagcacagtatctaggccagagtgcactgttcacagtccctcatggcttcccttggctagggcagggaattcctcgactccttgcacttcctgggtgaggcaataccccaccctgctttggctcaccctccatgggctgcacccactgtccaaccagccccagtaagatgaactgggtacctcagttggaaatgcagaaatcacctgccttctgcgtcgatctcrctgggagctatagactggagctgttcctactcaattattttgccagcgatctcattcaccggtttttaagttgtctttaaag

SEQ ID NO: 946554 - DNA, 633 bp, Homo sapiens
aactcaatatccatgattaaacatctataaaatcaaggcactgttatttagtggagacttgctggctattctatgagaggaggtattgttattgtaatctcatcctctcataaaagtgtatcatattactcataaccagcccttcatattctattcctattttggtatttaaaaataagatatctttgaaacacttgaattcaaatctgaatagtttttaaaatgtcaatgaaatgccatttcttcatgcttgaacaaatacaaattgactgaagtgcttctcttcaaactttctggaacatgctttatctaaattctaggaacaatcacaataggttttaaccacaaatgtgagaatgttctaaatgttagggtggaaaaatttttaaaataattttatagtaattttttcatcatagtgacagtgtgctaaatttttttcagtcaaatattactgtggacatttaagtcaagattctaagaagctgttctacagtccaaaattgtttcatatacaatattatatatatgtatttgcatawaaaattaatataagtgagccatttcaaatagttgagagattattatatcaaagattcttgattatataaaatgccaattacttatgggcac

SEQ ID NO: 946555 - DNA, 680 bp, Homo sapiens
gaggagggcactgggaattatggatgaagcaacttactgtgaagtcatgaaaacttttattctagtagaaaaaagccaacagctaatgctggtggtaaaastagagagagatttaggaggtcttaagcgtttatagttcttatttataaaattgttgttgggatttaaaaaatggatgttagatatgacattgactcagatctgtgtaacaaaagaaaaaagtggttttgaaactactttagtcaaaatagtacagcagttgtttttgtggaatcataggaaaggtgttaacttgagtaaggacattccccaggaacatgtaattttctatgaaaaatttggttagagaaaagatctgagcctgtataagcatttccgcatttattaacttaggaattagagaagatctcagataaatttcttaacgtctaggacctgctccaacagcctctgaaactagtctttttgctttcattttgattccttatggtccattagtcatactgttgcaagatgggctttatgaaatataaatctatgttctcccttacttaaaatgagtaagttgcctaatctcagcctcgtttgtcatctagaaaatggggataagaggtatatgggattattgggaagaataaattggaaaaatataagtaaaatattttatacattgttaagct

SEQ ID NO: 946556 - DNA, 548 bp, Homo sapiens
agattataatggagcagaagaattcctatcacctagtgacagggtagctgtcataatatggtaacacaatgtgttactcacatktttgtggtgatgctgatgttaacacatctaccacgttgccagttgtataaaagcctagcacatacaatcatgtaaaatacagaatacctgataaagattgtaagcgactatgtcattggtttatgtctttactatactatacttttagtcattattttaaagtatactccttctgtgtgtgtgtgtgtgtgtgtgtgtgtgtgtgtgtgtgtgtgtagatttaaaaagttaactgtaaaacagctttagacaggtcctttaggaggtattccagaagaaagaattgctgtcacaggagatgacagctccatgcatgctaattgcccctgaagaccttccaagtgggacaagatatggaggtggaagacagtgatactgatgatcctgaccctgcataggctgaggccaaatgtttgtttgtgtgctagtttttaaataagtagtccaaaaaatttgaaaaagaa

SEQ ID NO: 946557 - DNA, 754 bp, Homo sapiens
ttctgaccccatgtgcaccttcagggaacccattctgcagcctcagacactgggtgattttctggcaagggagtgagagacaacttccttcttctgtttcaaacctaatttatctccaggtggagtcagggctttctacttaatgataggagtgaaaaggcagaaaaaatgacaaaatcagggcgagggtgaatgttcccatcaaagcagaaatgatgtaaaccttttgtattttcccagagaagcgggggctgtagatagcagcgactgtgctccttaaataaaagaagggtcagcgacttctgagaaatgggaaaatggagtgcctgggggtgcccaggaagaactgaaaagactgtatgttggcttccatccgaggctgatctgtgggcttcgggaccagacaagtgtgagttagaatcccatttctgtgactcaccggttgagtgaaattaggcaagttccttatcctctctgagccatagttttctcatttgtaaaataaggacaatcccaagtgactaaattattttaccataatcatatggattagttttaatccatatgaatatagttaaaattatatgaatatataatcttaatccatgaacattttatctctctstgtgtgtgtgtgtgtgtgtgtgtgtgtgtgtgtgtgtgtgtgtgtgtatagcatctggcttttaaactgttgctcaaaaatattattttcattgtcacttgcaaagctcaaatcaaaactgagcagaag

SEQ ID NO: 946558 - DNA, 754 bp, Homo sapiens
ttctgaccccatgtgcaccttcagggaacccattctgcagcctcagacactgggtgattttctggcaagggagtgagagacaacttccttcttctgtttcaaacctaatttatctccaggtggagtcagggctttctacttaatgataggagtgaaaaggcagaaaaaatgacaaaatcagggcgagggtgaatgttcccatcaaagcagaaatgatgtaaaccttttgtattttcccagagaagcgggggctgtagatagcagcgactgtgctccttaaataaaagaagggtcagcgacttctgagaaatgggaaaatggagtgcctgggggtgcccaggaagaactgaaaagactgtatgttggcttccatccgaggctgatctgtgggcttcgggaccagacaagtgtgagttagaatcccatttctgtgactcaccggttgagtgaaattaggcaagttccttatcctctctgagccatagttttctcatttgtaaaataaggacaatcccaagtgactaaattattttaccataatcatatggattagttttaatccatatgaatatagttaaaattatatgaatatataatcttaatccatgaacattttatctctctgtstgtgtgtgtgtgtgtgtgtgtgtgtgtgtgtgtgtgtgtgtgtgtatagcatctggcttttaaactgttgctcaaaaatattattttcattgtcacttgcaaagctcaaatcaaaactgagcagaag

SEQ ID NO: 946559 - DNA, 620 bp, Homo sapiens
gattcaattaactgattattcagacctgagtattkggcctataacttatcaaaaatgaacccaaagtgcctgtcacggtaaggaaaataactgagagtaattgttgctaataaaattagaactttcaaggaaaactttaaatttttgaaattgtgcgttggccaccatgatatcttgtcaatacttagaattttctaatgagataaatggtgtaattaatgaaagtgttttgttagataatgtacaatgaagtgtgtcagcatttggaaaatctgtataatttagtgacacacattttttccaaatgaccagtgagtgatgcaatatcaagcatggttaaaaagcccattcaaagtgcaagatagaccaacaaattttaatgtaataagagtattaaaaattattgatagggtgtcagcttctacattgcgaccaacccttaagaaaactactacttttgaagtttcggtgtggtattatagaataatctccataattgtctgcaaagattctaaaatacttcttcctctttgagcaatattatctgtgaaaggccaaattttccacatattctcaacctgaaacacatattgctacagattgcatgcagaagcagatat

SEQ ID NO: 946560 - DNA, 594 bp, Homo sapiens
gattagaagacttaatattgttaacacaatctctataaaaataccagatgactttttgcaaaaattgataggccaatatttaaaatcacataacaattcaaggacccagaatccctaaaataattatgtgaaaaaagaacaaagttggagaactcacacaaccctatttcaaaacttacttaaaatctatagtaactaagacattgtgatactggcataggatggaaatatatcaacagaatagagctgagaatccaaaaagaaccccttacatttctggttaactgatttttgcaaagaatgccaagatgattctatgggaaagaatagccttttacaataaacagtactgagacaactggatattcacatgcaaaataatgagttggacctgaactttatgtcatacataaaaattaactcaaaatggatcattgacctaatgtaagagctaaaactataaaactctctttaaaaaatgtaaatctttctgactttggatgaggcaatggtttcttagatatgacaccgaaagataagcaataaaagcaaaaayagataaactaaagattttagtggtttcaaagacagtaa

SEQ ID NO: 946561 - DNA, 559 bp, Homo sapiens
atggagtgcagtggcatgatctcagcacactgcaacctccacttcccaggttcaagcaattctcccacctcagcctcttgagtagctgggactacaggtgcttgccaccatgcccagctaatttttgtatttttttgttagggacaggggttcacgatgttggccaggctggtctttgaactcctgacctcaagtgatccacctgccttagtctcccaaagtgctgacattacaggcgtgaaccaccgcgcctggccgcggtatatgttttccctttttttctttttttgagatggagtctcactctgtcaccaaggctggagtacagtagcatgatctcagctcactgcaacctccacctcccaggttcaagcgattcttctgcctcagcctccctagtatctgggattacaggtgtgtgccactgcaccyggctaatttttgtatttttagtaaagacagggtttcaccatattggccaggctggtctcaaacttctgaccttgtgatccacccacctcagcctcccaaagtgctgggattatatgcatgagccacc

SEQ ID NO: 946562 - DNA, 566 bp, Homo sapiens
atattgtgaaaactaagaaatcatgttcaggacagaacaccagtggtgtgtctatgtaaccatcggatgaggaaattagtatggatcaaccatctcagtggaatctgggtgctattcatcaaggcaatgaaagaatgacccaaagacatttcagatcagggctgccactcctatccgaggtgcggaatacaagggcatgagggacagaatgatttcaaaggaggggctgcaggtacttgtggggcttcagcactcactatcatgggccaccttgaggctctgctctccacattccatcacagggctcctaggctaccccaggtatggctccaacagatcctggtttagtgagtgctgtgctctgaaaagctgtgcgggcatggtaacctccacctagacttcaaaggatgctctggaaagccacagtgcgtaggcagaaagccaccatgtgcagggccaccatggagagaytgcactgcgcaatgcccagtgaagcagtagggtaaggccacccctgaggccctagaccaattgaaccactggtatacaatttcagcctgggagag

SEQ ID NO: 946563 - DNA, 656 bp, Homo sapiens
ggaagaaatgggcaaaaaacaaagggygacaggccccatgcaagtccaaaatccagtggtgcagttattaaatcttgcattagtcaggcttctccaaaggtacagaactaataggatagatgaaagtatgaagcagagtttattaaggagtattgactcacatgatcacaaggtaaagtcccccaataggccgtctgtcaaccgaaaagccaggaagccagtccaagtctcaaaacctcaaaggtaaggaagcagagagtgcagccttcagtctgtggccaaaagccccaagagtccctggcaaaccactggtataggtgtaagagtccaaaagatttttagggcaggaagcatccagcatgggagaaagatggaggccagaagactcagccagtctggtccttccatgttcctctgcctgcttttatcctagctggtcttttagatgattagatgatgcccaccctgattgtaggtgggtctgcctctcccagtccactgactcaaatgttaatctcctttggcaacaccctcacagacacacgcaggaacaatactttgcatctttcagtctaatcaagttgacactcaatattaaccatcacaaatcttaaagctcctaaataatcaactttgactctatgtctcacatccag

SEQ ID NO: 946564 - DNA, 656 bp, Homo sapiens
ggaagaaatgggcaaaaaacaaagggcgacaggccccatgcaagtccaaaatccagtggtgcagttattaaatcttgcattagtcaggcttctccaaaggtacagaactaataggatagrtgaaagtatgaagcagagtttattaaggagtattgactcacatgatcacaaggtaaagtcccccaataggccgtctgtcaaccgaaaagccaggaagccagtccaagtctcaaaacctcaaaggtaaggaagcagagagtgcagccttcagtctgtggccaaaagccccaagagtccctggcaaaccactggtataggtgtaagagtccaaaagatttttagggcaggaagcatccagcatgggagaaagatggaggccagaagactcagccagtctggtccttccatgttcctctgcctgcttttatcctagctggtcttttagatgattagatgatgcccaccctgattgtaggtgggtctgcctctcccagtccactgactcaaatgttaatctcctttggcaacaccctcacagacacacgcaggaacaatactttgcatctttcagtctaatcaagttgacactcaatattaaccatcacaaatcttaaagctcctaaataatcaactttgactctatgtctcacatccag

SEQ ID NO: 946565 - DNA, 638 bp, Homo sapiens
gaaatcaacatttaacaaatatcttttaaagaagaagattctaggcactatagatttaactataaatttattttttgtttagcctcagttttaccaatttgcttttgtttttatcatttattctggttgggagaatagaattaatatatatttggcaaactatgaaaatatattaaaaaagcactgacaacattttgctttaaatattaggagataagaataagaaacataagaagactgcacaagttttaataatgttcaaaaattagatttcctgctcatttccagctccatatattttaaaaaacaagtttgtagccaaattgtgattctgagtcaagcaaatactgcagcagaaaggtcattttgcagaaataatagtattttaactttctcctctctgggtgagttaatgccatgatgcagatgccttccctatttagataagagaagataaagggaattgtattgtaattttaatatttcctttgtcactttgaataaaatccattaatgccagggcttttacagagcagtccgatgtgaacagagaatacagccaggttattaaccaaatgtrattgcctggtgataacagattcgttgagtctctatttgacgcttatttaacttcaaaa

SEQ ID NO: 946566 - DNA, 605 bp, Homo sapiens
tggcttgaattcctccccagaaaatgggctttccttttctatgwtatggcctactatttatggacaggttgcaaatttttcaaacttttatggtctactttccttttaaatataagttccagttttacataacttctttgctcacacatgtgaacttaggttgttagaagcagccaagcaacatcttgaaagctttgctgttcagaaattttttcttccagatactctaaatcatcactctcaagttcaaaattccacagatccttagggcaggggcacaataccaccagattctttgctaatgcataacaaaagttacctttgctccaggtcccaataggctcctgatctccctctgagacctcaacagcttggactttattgtccatatcactttaagcatttcagtcacaactatttaaccagtctctaggaagttccaaattttccctcatattcctgtcttctgagcccttcaaactcttccaacttctgaccattaaccagttccaaagcagctttcacattttcaggtatctttatagtaatgtctcactcctctgtaccaattttccttattagttttttctcacatttctataaag

SEQ ID NO: 946567 - DNA, 765 bp, Homo sapiens
cagcatcccctggaacagtagaatgacaaaggcagacagaaggagtgtgatatggtttggctttgtrtccccacccaaatctcatctcaaattgtaatcttcacgtgttgaaggagggacctgtaatccccacgtcgagggagggaggtgattggatcatgagggcagtttctcccatgctattcttgtgatagaaagagagttctcatgagatctgaagcatctggcattacccccgcttgctcttctctctcctgctgcccagtgaagaagctacttgcttctcctttgccttccgccatgattgcaagtttcctgaggcttccccagccatgtggaactgtgagtcaattaaacctctttccttcacaaattacccagtcttgggtatttctttatagcagtgtgaaaatggactaatgcagagtgcatgaacaagcacaagctgatgctcaaagctgctgctggaagtgacatttccactcacgtgtcatcggccacagcaaaacacatggccacaccccagcataatagcacagggaaggatcatctcccttcacgaagaaagaggcctcaaatactgtgaacagctatacaccatctgcagtgcacacctgtctccagaggctttaatgctacaccagccactcactgcctccaccaccctcttctctcatagcggggtcagatttcacacaaatataagatgtgcttgtctgatggatattttaaggcactgatggagttctttgcctgtcacccaga

SEQ ID NO: 946568 - DNA, 776 bp, Homo sapiens
tctggctcctgctagcaatactaccttcatcttccaccgaatcctagaactmtacacaccagccttagcaaactagttacagtttcccaaacacgatgctttcatctggaggccgtgtacttctctgtcctcccctgggttgctggccaccttacctttgccctggccaattcttctggcccttcagatctctactagtgtttcttttctttttctttttttgagatggagtcttgctctgtcacccaggctagagtgcagtcgcacaatcttggctcactgcaacctccacctccttgattcaagtgattctcctgcctcagcctcccaagtagctggcgttacacgtgcccactaccatgcctggctaaattttgtacttttagtagagacggggtttcaccatcttggcctggctggtgtcgaactcctgacctcgtgatccacccgcctcggcctccgagggtgctgggattacaggtgtgagccaccgcgcccagccatgtttcttatctcttgcagaagcatgtcctagttccgcaagactgggttatatgtggcttctctgtgcttggataacacttatgatcaccactgcctctgcacggaggacactgactggggtgcctttcccatcaaatggaaaatcccttgaagacaaagcaaggtcttattcctcatatctgaatgctaaacctagttcctggcacatactaggtgcttgacaaataattgtcaaatacagaaatgattgaatatgtgaaagatcataacat

SEQ ID NO: 946569 - DNA, 629 bp, Homo sapiens
atatctcttttgatttcttcttttagccatgattgtttaagaatatgttgttaaattcctacatttctgaatagtccaggtttttctcttatttatttctattttatttcattgttgctaagatascttgaactatttaattttttaattgaatgttttaaaatacaagtattgagatttgtcttgtggcctaacatatcctggggcatgttttctgtgcacttgagaaaaatgcatactctgctgtttgaggtgaagtttttcttatatgtctattaggtctattaggtttgtggtgtttgaaaagttctttatttcataattattttttatatagttgcttattccagtattcaaagtgaggtattgaagtctgcaactagaactgcaaatttctgtcttcaatgctgccaaggtcccttcatgtagtttagggctctgagatttggtgcatatatgtttgtaagtattatgtcttcttggtgaattgatccttttaccaatatataatgttcttatttgtcttctgtaacaattttagatgtattgtctactttgtataataatcatacaaccatctcacctctcttttggttattgcttacttacacagaatgttttctcatatt

SEQ ID NO: 946570 - DNA, 629 bp, Homo sapiens
atatctcttttgatttcttcttttagccatgattgtttaagaatatgttgttaaattcctacatttctgaatagtccaggtttttctcttatttatttctattttatttcattgttgctaagataccttgaactatttaattttttaattgaatgttttaaaatacaagtattgagatttgtcttgtggcctaacatatcctggggcatgttttctgtgcacttgagaaaaatgcatactctgctgtttgaggtgaagtttttcttatatgtctattaggtctattaggtttgtggtgtttgaaaagttctttatttcataattattttttatatagttgcttattccagtattcaaagtgaggtattgaagtctgcaactagaactgcaaatttctgtcttcaatgctgccaaggtcccttcatgtagtttagggctctgagatttggtgcatatatgtttgtaagtattatgtcttcttggtgaattgatccttttaccaatatataawgttcttatttgtcttctgtaacaattttagatgtattgtctactttgtataataatcatacaaccatctcacctctcttttggttattgcttacttacacagaatgttttctcatatt

SEQ ID NO: 946571 - DNA, 578 bp, Homo sapiens
agtgtctttataaaagagacctttgccatgtgaggttacagtgagaagacatctgtctatgaagaaagtgggccctcaccaaacrcagtctgctggcactttgcacttcaactccccagcttccagaactgtaaggaatataagtctgttgttggtaagccacccggtctatgatattttgttatagcagcccaaacagactaagacaggtgacaaataaacatgaaaagatgttcaacatcattagccattagggaaatgcagattaaaaccacagcgaaatatcatgatacagttttcagcatggctaaactagaaaatagtgacaccaccaaatgccgacaaggctgtggggaaactgggttgttcagacactgccactggggctgtagcgtactatagccactttcataaacagtttgtcagtttcttaaaaaactaaacctgcaactaccatatgacccagcaattacacccctgggcacctacccaagagaaatgaaaactcaacgtttgcgcaaaaacctgtgtaggaatgttcaagcagctttattcataatatgcccaaacaggaaaca

SEQ ID NO: 946572 - DNA, 615 bp, Homo sapiens
ccatccagtgcagggtctgcaaagtatcccaagcgctgatcttaggagcagtgtagggagggtcagaatcttgtagcctctagctgcatggctataaattatggtttataatttgtaatctggtgcctaatttgttagtcctacaaagacagtctgatccccaggcaagaaggaggtttgttttgggaaagggctgccatctttgttttaaactataaactatagtctgggcgtggtggctcacacctgtaatcccagcactttgggaggctgaggtgggcggaacacctgaggtcaggagttcgagaccagcctggccaacatggcaaaaccctgtctctactgaaaatacaaaacttagccaggcgtggtggtgggtgcctgtaatcccagccacttgggaagctgaagcaggagaattgcttgaacccaggttgcagcgagccaagatcgcgccactgcactctagcctgggtgacaagagtggaactttatctcaaaaaaatataactcatctcaaatataactccatctcaaaaaaacacaactrtaaactaagttcctcccaaagctagctcagcccacagccaggaatgaaaaaggacggcttggagg

SEQ ID NO: 946573 - DNA, 731 bp, Homo sapiens
tctgttggagtttgctagaggtccactccagactctgtttgcctgggtatcagcagcggtggctgcagaacagtggattttggtgarccacaaatgctgctgcctgattgttcctccggaagttttgtctcagaggagtacccggccgtgtgaggtgtcagtccgcccctactgggggttgcctcccagttaggctactcgggggtcaaagacccacttgaggaggcagtctgcccgttctcagatctcaagctgcgtgctgggagaaccactactctcttcaaagctgtcagagagggacatttaagtctgcagaggttactgctgtctttttgtttgtctgtgccctgcccccagaggtggagcctacagaggcaggcaagcctccttgagctgtgatgggctccacccagatggagcttcccagccgctttgtttacctaatcaaacaactaactgggcaatggcgggcgcccctcccccagccttgctgccgccttgcagtttgatctcggactgctgtgctagcaatgagcgagactccatgggcgtaggaccttcggagccatgtgcgggatataatctcctggtgtgctgttttttaagcctgttggaaaagcgcagtattagggtgggagtgacccgattttccagatgctgtctgtcacccctttctttgactacgaaagggaattccctgaccccttgtgcttcctgggtgaggcgatgcc

SEQ ID NO: 946574 - DNA, 447 bp, Homo sapiens
attctcctgcctcagcctcctgagtagctgggattacagatgcctgccaccaygcccagctaatttttgtattttaagtagatacagggtttcaccatgttaggcaggatggtcttgatctcttgacctcgtgatccacccacctcagcctcccaaagtgttgggattacaggcatgagccaccgcacctggccatacattctttactctcaagattattccccaaaacacctggacaggaaggtagacaatcaccacctgtttcatagttgaggcacccaaggcccagggagttaaatgatttgctgacagtcccaggaatagttacagtgcagccaaagcaggtcctgaggcttaggctcctggttcaatgctcctcactcctgtacagcttgcctcctgctcaggctattggactccaagttaattaggcagcaaagaactctg

SEQ ID NO: 946575 - DNA, 584 bp, Homo sapiens
ttatttatttgggagacaggtatygctctctcccccaggctggagtgtagtgacatgctcatagctcactgcagtatcccaggctcaagtgatcctcccacctcagcctcccacatgactgggaccacaggcacacaccaccacgcctggctaatttttgtatttgtagagatgagaccttgctatgttgcccagggtagtcttgaactcctgggctcaagcgatcctcctgcctcggcctcccaaactgctgggattgcaggcaggagcccctgcgcctgcccagctcacttttaattttttttggagagacagggtctcattgcattgcccaggctgatctctcaaacttcctgccctcaaacaatcctcttacctcagctgcttcttttttaagaatagcagttatttacattctacttatatatatatatatatttaaacctcactttagccaatgtgactgccaaaaaacaaacaaacaactaaactaactcactggaagatctttaaagaaaaacccatgcttttttccagcacattttagacatgtcattacatatggactagtcaaaaatcagttt

SEQ ID NO: 946576 - DNA, 584 bp, Homo sapiens
ttatttatttgggagacaggtattgctctctcccccaggctggagtgtagtgacatgctcatagctcactgcagtmtcccaggctcaagtgatcctcccacctcagcctcccacatgactgggaccacaggcacacaccaccacgcctggctaatttttgtatttgtagagatgagaccttgctatgttgcccagggtagtcttgaactcctgggctcaagcgatcctcctgcctcggcctcccaaactgctgggattgcaggcaggagcccctgcgcctgcccagctcacttttaattttttttggagagacagggtctcattgcattgcccaggctgatctctcaaacttcctgccctcaaacaatcctcttacctcagctgcttcttttttaagaatagcagttatttacattctacttatatatatatatatatttaaacctcactttagccaatgtgactgccaaaaaacaaacaaacaactaaactaactcactggaagatctttaaagaaaaacccatgcttttttccagcacattttagacatgtcattacatatggactagtcaaaaatcagttt

SEQ ID NO: 946577 - DNA, 584 bp, Homo sapiens
ttatttatttgggagacaggtattgctctctcccccaggctggagtgtagtgacatgctcatagctcactgcagtatcccaggctcaagtgatcctcccacctcagcctcccacatgactgggaccacaggcacacaccaccacgcctggctaatttttgtatttgtagagatgagaccttgctatgttgcccagggtagtcttgaactcctgggctcaagcgatcctcctgcctcggcctcccaaactgctgggattgcaggcaggagcccctgcgcctgcccagctcacttttaattttttttggagagacagggtctcattgcattgcccaggctgatctctcaaacttcctgccctcaaacaatcctcttacctcagctgcttcttttttaagaatagcagttatttacattctacttatatatatatatatatttaaacctcactttagccaatgtgactgccaaaaaacaaacaaacaactaaactaactcactggragatctttaaagaaaaacccatgcttttttccagcacattttagacatgtcattacatatggactagtcaaaaatcagttt

SEQ ID NO: 946578 - DNA, 630 bp, Homo sapiens
ccaaaccccaggagcctctgcttcattctctgaactttcacttttggaaaggcaaagtgtgactcaaatcacagcaaagatgatatacatgggtcatggtaacatgtatcgccaggagaagacaaagacaatcagctctccactcatattccttgcatgttccatttcctgcatcttctcaatgggagttcaagtattcaggtcatatcataatgatccatgaagagtcaccaaaacacattactgaagtaataagtgaatctgctgtttgagaagagactgtcctttggtcactgtccttttacccaatggcttgtttcaggtcctaaagcatgccaagttctttcctgcctcagaaacttcttacataccattgcctcagccaagaatagttttctttgtgctttgagttcctggtttcttccagcttagatgtcagccccattgagagactttcctcaaccatccaacattctcttattattccccgtgctctgctcttttctttygtgatacttatctcaagttataattccctgctgattttttttctgtgtttattgtctatctgctcctttagactccaagccccacaggacaagaaccacatgtgtctcacatccaccacta

SEQ ID NO: 946579 - DNA, 593 bp, Homo sapiens
catcttaagtatttttaagtgtataattgagaaacattaactgtattcatattgttcaacagcaaatctctagaacttttatatcttgcaaaactgaaactctgtagccatttaacaactccccatttcctgctccccaccagcccgactatcacaattctactttctgtttctatgagttggactcttagatacctcgtataagtggaatcatacagtatttgtctttttgtgacccaagcatttcatttagcacaatgtcttcacagttcctccatgttttagctgatgacaggatttccttgttttttaaggttgaatatggtcccgtgtgtttatgtgtgttgtctgtcacattttctttatccattcatctgctactggacatgtgggttacttctatctctgggttatcgagaatattactatgaacatggatgggcaaatatctccttgtgaccctatttyttgtgtgcaaatacgtctctgtgatcctcttttcaattattttgtatatatcccataagtgagattactggatcacatggaagttctatttttaattttttgaggaacctcatattgttgtccat

SEQ ID NO: 946580 - DNA, 624 bp, Homo sapiens
aggtgaatgtgtgtgtgtgtgtatcttagtttttatcaaaaaagtttaaaaagtaaaaaaaagtgattttaaaatattaaattaaaatattaattttaaaatagaaaagagcttagagaatagggatataaagaaagaaaaggtttttgtatagctatataatgtgtttgtgtgtttaagctaagtgttattataaagtcaaaaagttaagaaccttataaagtaaaaaaggttactgtaataactcactgactcacccagaacaacttccagtcctgcaagctccattcatggtaagtgtcctagataggtataccagttaaaaaatcttttacactgaattttttactataccttttctatgtgtagatacataaatacttaccattgggttacaattgcctacagtattcagtatgataacatgctgtacaggtttatagtctaggagcaataggctgtaccatatcctaggtgtgttgtaggctacaccatctaggtttgtgtgaatatactytgtgatgtttgcacagtgaagaaattgcctaacaatatatttttcagaacttatccctgttgttaagcaatgcatgaccatatatactataccttgtcccaatatca

SEQ ID NO: 946581 - DNA, 587 bp, Homo sapiens
cagctgtgaatgttaaagtgttcattgaatgcaggcatcaagggaagcaactttccaggcatgcgcagkaagagacgaaatggcaaaatatgcccttctagaggcactccaccggaaaggggaagaaagcttcggatgggggtcgggcgcagaggctcacgcctttaatcccagcactttgggaggccaaggcaggcggatcacctgaggtcaggattcgagaccagcctgactaacatggagaaaccccgtctctactaaaaacacaaaattagctgggcacggtggtgcatgcctgtaatcccagctaccggggaggctgaggcaggaggatcacttgagcccaggaggcagaggttgcagtgagccgaaacggcgccattatactccagcctgggtgacagagcaaaactccatctcaaaagaaaaaaaaaaaagccttagatgggcatgcatgcagcttcctacacacactgctcgtgctcacctcccaagggtaaggagggcactgcgcatgcgggcagcccaccctcagggaagaatcatgggaaagaggcaagcctatacagtcctaaaatcaaggttaa

SEQ ID NO: 946582 - DNA, 573 bp, Homo sapiens
caaagtcttatctagagatgggttccttccacctatgaggctgtgatatcaaaagcaaattatttactttcaagatrcaatggtagtataggcattgaggatacagtcccatcccaaaagggagaaatcagccaaagaaaggggtaataggcctcaaacaagtctgaaacccagttgggcagtcatttaatcttaaaattctaaaataatctttgactctatatcccacatcctgggcacaattgtgaaaggggtgggctctcaaagctttgggcagctctgtctctgtggctttgcagggtgcagcccatgtggctgttctcatgggttggaattgagtgcttgtggcttttccagacagaggatgcaagctgccaatgaatcaaccattctcaggtatggagggtggtggcctccttcccaccactccactaggcagtcccttggtaggcactctgcatgaagtctccaaccccacgtttctcctttgcaccaccctagtagagtttctctggtgggggctccacctctgcagaaggcttctgcctgggcacccaggcttttccacccatc

SEQ ID NO: 946583 - DNA, 573 bp, Homo sapiens
caaagtcttatctagagatgggttccttccacctatgaggctgtgatatcaaaagcaaattatttactttcaagatgcaatggtagtataggcattgaggatacagtcccatcccaaaagggagaaatcagccaaagaaaggggtaataggcctcaaacaagtctgaaacccagttgggcagtcatttaatcttaaaattctaaaataatctttgactctatatcccacatcctgggcacaattgtgaaaggggtgggctctcaaagctttgggcagctctgtctctgtggctttgcagggtgcagcccatgtggctgttctcatgggttggaattgagtgcttgtggcttttccagacagaggatgcaagctgccaatgaatcaaccattctcaggtatggagggtggtggcctccttcccaccactccactaggcagtcccttggtaggcactctgcatgaagtctccaaccccacgtttctcctttgcaccaccctagtagagtttctctggtggrggctccacctctgcagaaggcttctgcctgggcacccaggcttttccacccatc

SEQ ID NO: 946584 - DNA, 634 bp, Homo sapiens
gtttcactctgttgctcaggctagagtgtagcagtgcaatcttggctcactgcaaactctgcctcctaggttcaagcaattctcatgtttcagcttytcaagtagctgggattaccatggtgtgctccacgatgcctggctagtttttatatttttagtagagatggggttttgtcatgttggccaggctggtctcaaacacctggcctcaagtgatccactcacctcagcttctcaattgctgggattacaggcatgagccaccacatgcggccctgccataggaaactgttaattaaaaccacatgatgggagtgcttccaagatggctgaataggaacagctccagtctgcagctcccagcgagatcaatgaagaagacgggtgacgtctgcatttccaactgaggtatctgcttcatctcaatgggactggttggacagtgggtgcagcccacagagggcgagctgaagcatggtgaggtgttgcctcactcgggaagagcaaggggtcaggggatttccctttcctagccaagggaagacctgacagactgtacctggagaaacagtacaatcctgaccaaatgctgcacttttcccatggtcttagcatccggcagaccaggagttac

SEQ ID NO: 946585 - DNA, 653 bp, Homo sapiens
gtacaggtgttgggtaaatacagtcattccaaatggcagaaattggccagaatgaaggggctacaagtcccctgcaagtccaaaatccagtggggcagtcaaatcttaaagctccaaaatgatctcctttgactccatgtctcacgaccaggtcacattgatggaagagatgggctcccatggtcttgggcagctctgctcctgtggctttgcagggcacagcttccctcctggtttctttcatggggtgtgttgagtgtatgcagcttttccaggtgcacagtacaagctatcagtgaatctaccattccgggatctggaggacgttggccttcttctcacagctccactaggcagggagtaccccagtagggactctgtctgggggctccaaccccacatttcccttccacactgccctggcagaggttctccatgagggccccacccctgcagcaaacttctgcctggacattcaggcatttctatacattctgtaaaatctaggtggaggttccmaaacctcaattcttgacttctgtgtacccacaggcccaacaccacatgtaagcttctaaggctttggacttgcaccctctgaagcaatggcctcagaagtatgttggccccttttagtcatggctagagctgaa

SEQ ID NO: 946586 - DNA, 632 bp, Homo sapiens
atcaataaggccttctccaaagactctatagaaaatagaatccctctgctctcctatattgtatccctatcacctaccatatttgttcttattagcattcattttcatctgacattgtctatttatttaccaccaccattagaattttcactccataagaacaggatctctgttttgctcactgctcatcttcgacatctagaatagtgcctagcacaccaaagacattcaattgacatgtgttgaactaatgaatgttgagtgaatatattcatataaccctaacccaagtaatcagaaaggtaaccaggagcagtgtaaaagacagacttgagcggggcaaaaatgggggcagggataccagatgtgccaaaattaaagtcaaataaggcagtgagaatgagacagatatgaaattagttagctgaaggcaacagaatgcctaacttgaatgtgggagttaagatcaatgaagtaggaacagaagatacttccagggaataaaamagtgagccaagaagtaaaatcaattttacatatgccaaaattgaggtcgtggagacaaaccgaggccagatttccaatggctactggatataggttaggattttcaacagctgctggatatatgc

SEQ ID NO: 946587 - DNA, 582 bp, Homo sapiens
ataaaattgtacagatcacaagtgctcaacttgatgcrttttcatagactgaataacccatgtaaacagcatccagcaagaaaaagcgtggcagcacaacttcctcatgtctgcttccagtttggggcagtgtttcattttgctgagagattacagagtcctgaaacagtttgacaccaggctccaagtggcagtgggatttcagaaggccaacatggatttgtgtccagcaatgccaacacagtggcagatgcttctctttggggctattagggatgtgttaacaacagcctctgtgggaggggcagggtatgtggaaataggagggttgtcttgttttggctgtgaagaatgtaaggaaacacctatggaggaagaggaattcttgagagcttgggcaaggtgaccttgaccttggatgtgctaagacctcagcatctgtaccttcagagggaagtcagggagggagaggtggggttggtgtttctcatgggtaccaaggcaagaccaagaccctggactcctgaccctcaccaagaaaagctgcatactctcgagtaaatctctgaatgtctcaatttc

SEQ ID NO: 946588 - DNA, 759 bp, Homo sapiens
ctttctttggcttgattgattcagctattgatacttgtgtatgcttcatgaagttctcgtgctgtgttttttagctctatcaggtcatttatgttcctgtctaaattggttattctagttagcagttcctgtagccttttttgaaggttcatagcttccttgcattgggttagaacatgctcctttagctcagaggagtttgttattacccagcttctgaagcctacttctgtcaattcttcggtctcattctctgtccagttttgtgcccttgctagagaggagttgcgatcatttgcaggagaagaggccttctggtgtttggaattttcagcatttttgcacttgtttttcctcatctttgtagatttatctacctttgatctttgaggctgatgaactttggatggggtttttgtgtggggggtcctttatattgatgttgttgctttctgtttgttagtttttctcctaacaggcccctcttctgcaggtctgctgcagtttgctggaggtccactccagaccttgttcgcctgggtatcaccagtggaggctgcagaacagcaaagattgctgcctgctccttcctctggaagctccctcccagagcggcactggcctgatgccagccggagctctcctgtagatgtctgttgactcctgttgggaggtttctcccagtcaggaggccygggggccaggggcccacttaaggaggaagtctgtcccttagcagagctggtgcactgtgctggc

SEQ ID NO: 946589 - DNA, 588 bp, Homo sapiens
ctgatgtttggacgtgtttggagtttcttccttctggtgggttcgtggtctcactggcttcaggagagaagctgcagacctttgtggtgagtgttacagctcttaagaaggcgtgtctggagttgtctgttcctcccgtctggagttgttcattcctcccagtggattcgtggtctcgctagcctcaggagtgaagctgttgaccttcacagtgagcgttacagatcttaagggcagtgcagacccaaagagtgagcagcaacaagatttattgcaaagagccaaaagacaaaacttccacagtgtggaaagggaccccacggggttgccgctgctggctcgggtagcctacttttattgccttatctgatcccacccatatcctgctgattggtccattttacagagagctgattggtctgtttacaatcctttagctagacacaaatgttctccaagtccccactagattagctagacacagagcactgattggtgtgttkacaaacattgagctagacacaaagtgctgattggtgcatttacaatcctccagctagacataaaagttctccaagtccccacccg

SEQ ID NO: 946590 - DNA, 715 bp, Homo sapiens
taacaactgtttccatactgaccgagtggttaagttaaatattgaaagtcaaagcccttatacaaagcctgggatataacaaaagcccaccaagaactttgcctaggcctttcctgggccttaaagcatgacaaaataatgaaggaattcttaacaggacccatttaggattaaacaagttttattgggggcctgaagaaacttcccaggcctccacaaacaagtttactgggggtctgaaggaacttcccaaaccttcatgatctagcaagagacaagataaggctaatcaccccagcaactgagaccatttagatttagtaaatttactgaagctccagaggaaggtcttcaggactcacactttagttacagattaaaagaagttaatcacttatgtctttagatgaatgcacgcttacatgtagacatataggttagaaaactggaaaactttgtaattttgagttggtctggtgataatttccaggccttctccctgtaaccggttgcagaaataaaaactgtcttcctccccagttcatctgcatcttattattgggccacaagaaatagcagcctgaccctcagtttggtctgggaacacaaggactccatcaccatccacctaccaggaggcttcttttgtttccctccctttctccatctcttccttctttctttyctttctccctttctttttccttttcttcca

SEQ ID NO: 946591 - DNA, 636 bp, Homo sapiens
agggaaaatgatggaggatgggttcggcggacaggtaggactggccatctcccatctacccaacctagtgcaggagggaaggatggcttcagccggaggtggaatggctgacctcctctgggcatgcagacctctgggcaacgttacctcggcagagacccctccttgattattccacctaaatcattcccggatctttgtctatttctttatgtctatcttttcacagcagttctcaatggctgacagtgaattattttttattgtgtgttcattgtctgcctgttccgctggaatataagctccattaaggcttggaggctttgtttggtgacagctaatttctcagcacgttgaacaataccagattcatagtaattaataaacaataaaaaaccattgattgaatgaatggatggcatgaaatactgacctaaaaagttaggaggtaaatactggcagataagtttggagaggcggtgagaaggcaggcagagacctccaaccctatttctcaggcatagyggctttagccagtgttgacattttctgagctggagacacagcatgagaacaaagtcctccaagttactcattttctgctattctgctacctcaactctctggaattccaga

SEQ ID NO: 946592 - DNA, 495 bp, Homo sapiens
gcaccatggtgtgccttatacgctctaaccaagcatttggacctgagctttaggccagkggttcaaactgagctccctggaatcctcagagccccactggcacctggaggaaggtgaaccagagggagggaacggacgagatgatgcaggttctgcacccagccccaccccaggtctcagggaagctgcactttcattggttgttcatttagattttcagtgtaagatttcatttgaagggtttgcagcaaatgcattggaaactgctcctgcaagctgggagaagtcttaagccagaagtgacatgaccagcattttatgattcatttgttcttcaaaaaacttggcagaggccgggcacggtgactcatgcctgtaatcccagcactttgggaggctgaagcgggtggatcacctgaggtcaggagtttgagaccagcctggccatgatggtgaaactccatctctactaaaaatacaaaaattagctgggcg

SEQ ID NO: 946593 - DNA, 558 bp, Homo sapiens
acagaattctagttggcagttattcagactttcaaggtgttccattgtcttctggctttttttggatatgttagaagcagttttgttttctgttgagaagttagcagtcttatttttgcttatttgaaggaagttttccttaatatctggctgccttcattcttaaggcagaaagtaatgctctcatacagaactcagaaatgcaggagggaatgtagagcaatagaaaagatgaataggtgggtaaatacaaatgaatattgactacataagaaaaaataatgtcttgtggttttgaaatagatatagaataaaatataggacaacaataggatatagtggtgaaagtagtaaataaagttggagtattccatggttcttacgttgtttcagaagtgttaaaaatattcatttaggccgggcgcgttggctcacgcctgtaatcccagcactttgggaggccgaggcgggtggatcatgargtcaggagatcgagaccatcctggctaacaaggtgaaaccccgtctctactaaaaatacaaaaaattagccgggca

SEQ ID NO: 946594 - DNA, 588 bp, Homo sapiens
gccctggtcagaacttccagtaatacgttgaataggagaagtgagagagggcatccctgtcttgtgccagttttcagggggaatgygtccagcttttgccgattcagtataacattgactgtgggtttgtcatgtatggctcttattattttgaggtatgtttcttcaatatctactttatttaaaatttttaaaatgaagtgatgttgaattttattgaaggcattttctgtgtctgttgaaataatcatgttgtttttgtctttagttcagtttatgtgaacatttttagatttgtgtacattgaaccagctttgcatcctggggaagaagctgacatgtggtggataaggtttttgatgtgctgctgaattcagtttgccagtactttattgaggatttttgcattaatgttcatcagggatattggcctgaagtttttgttgttgttgttgttgttgtatctctgccaggttttggtatcgggatgatcctggcctcatagaaccagttagggaggagtccctactcttcaattttttggaatagttttagtagaaatggtgccagcccttcttcctacctgtg

SEQ ID NO: 946595 - DNA, 562 bp, Homo sapiens
cactataccaagactcctgtgtgtgtgtgtgtgtgtgtgtgtgtgtktgtgcgtgtgtgtgtgtatgggagtgtgtgtgtgcacgcacgcgcataagcaggggatgaattcccttcacaatgcaaggagtagccagtcagcgacagccggtgacggaaccactaagtgaatttcagagttgaaaattcacccagtccagtgcctggttggttccatgatgtggtcagtcaactcttatgtggcaaatctgctgtcagccacattggagagtcaactgtgttagagagacatcattctccctcctctagctgcaatctgcactccaagatcttggctgcctcattaccccatgcccagaccacgcaatgtgatacactactgcttgcgggtagttccaggaaaagttggatgcttccccttgtcacaaaatgaggacagaggagccacacacacacaccccactatgcctcccatccaagaagccatttctgcaaagagcttttcagatgcatctccaactgttatcatgctagagctccttttacagtgactatcgagaaat

SEQ ID NO: 946596 - DNA, 660 bp, Homo sapiens
ctgcagctcacaccctccaatttaaacattttatctttcagttcaagtcacttcaaaatatcactcttcaacatggccccttcaaactgccgtggctggctggccctggtatgggaggcacgtgtggaaggaacaggatgtggacacaggatgggaggacctttgttagtcccaggccggagggcctctcacttctcctggacaattgcctgtctccctgcacctgaccccacctgcttctgcccagaaagtccaggccgtgaccacagatgctgtccctcagggcagtcttctctgttggaacctgtaagccccacactttggatgttgggggagacaaagggagggtcttgatgtgtctgacccaggggactgcaaagctttcaatcctcaaatccttgtctccaggttcatcccctcaaccagaagtatggaatccctccttcctgcctgcctggtccctcaagccaatgagctaagggcacaaggggcgaacccaggactgaactagccaccggcccttaggacgctggtcacccacagagaagaggaggtagggcccygcctgggtttcttctgccagcgtcagctctccacttcagaacacacaaagctggggcctccaatccctccacagccacagcagccatcggggctgtg

SEQ ID NO: 946597 - DNA, 715 bp, Homo sapiens
tggtgggcggtagatccaatgatttgctgtcacggttgtggctctccaggagccaaagaygggagactcaggcccatttgccatctgctctcctgctggatttcatctttgtgtttttgggcatgtcactcccccggcccccgtgcctgggcctcctgggccctgccaggagggtctcttggggccctgccaagggactaggccactcagagggtcctggggagatctggcttgaggtcctggagccctcacgagagctagttggcccagcagagtccttggccttcacccagcctacccctcccttgagacctagtgctgaccaatcaccattgttttctttctctctcctgtcccccacccagcagaaagcgctttcagtcggagagtagaaggcaaagcacaaaaccactttgaagagacgaacagcagttcgcagaactccagcggtgagtgtgccccttgacagccatcctgtgcggtagctgccagcttcgcccgctcccccctggcagccgcggcagcatcctgtgggctggggtctttgtggtgcattatggatcttgttgggaggaggctgggagcagggaattagagggagaccacagaggcaggaggggccttttcttccagggacattcctctgagccttgggcatcagtggacaatgcctcctctctgtctcccccatggagagagcaacacccctccccat

SEQ ID NO: 946598 - DNA, 575 bp, Homo sapiens
ctgcatccgttagtgtcatacatgtattgtaaagtttatcaatttttattttacaatcagttgtattcattcattcattttccaactggtttattccagctctgggtcttggttsgctggagcccatcccagcatctcaggatcccaagcaggaaccaaccctggccagcttgccatcccattgcagggccactcttacctacaatcactcacaatgcgaccatttagacatgtcagctcacctaattcacatccttgagatctgggaggaaactcaaacacagactaagggagaatgggcagactccacacaggcagtggccctggcagggaatctactttttttctcatgaacattgtaataaaacaacactttgaggatctgctgtgccaccccctatctttcatatattgctttacacaacctagtcaacttctactgcagctttcagactcagatcaagcatcccatcctcagaccacatttgatacccactccaatgccacccagtcccccatccaggctgagtgaaatgagtcttgtttttactactttgcatatctgtttttccact

SEQ ID NO: 946599 - DNA, 551 bp, Homo sapiens
actaaaaggggccaagatacaggctgtgccatggcttcasagggtgcaagccccaagccttggcagcttccatgtggtgttggtcctgcaggtatatagaagacagaattgaggtttaggaacctctgcctagatttcagaggatgtatgggaaagcctggatgtccaggcagaggtgtggtataggggcggagctctcatgcataacctctgctagggcagtgcggaaaggaaaggtcgagttggagcccccacacagagtccccactggggcactaccttgtggagctgtgagaagagggctattgtcctccagaccccagaatggtagatccactgacagcttgtactgtgcacctggaaaaggtgcggacactcaatgccagcctgtgaaagcagccaggatggggccgtactctgcaaagccacaggatcagagctgcccaacgtcgtgggagcctacctcttacattggcatgacttggatgtaagtcatagagtaaaaggagattatttcagagctttaagatttaactactgctctgttggat

SEQ ID NO: 946600 - DNA, 609 bp, Homo sapiens
cataagagccaccgagttgtgacgctcctgagccattcatcagccctggcagcaggacgttgatgttgatgaagcagcaagcatggggggaggaatgaaagatgctcccgtgcctccgccttggcgccgtcttccctccacacgccagggcaggggagcatctgcctcctcaggtgacacggacgctgctccctggctgagagatgaattatagacagattgaagacactccctttagggatgatgctcttcctcacccccacccataatgcaaaattaatatgaggaggggtgaatgcaaatctctatccacatgaagcaggaaagaagcttttaaaataacattcacctgggaaggaagcattgcatcatgtggagttgcttaataaacctcaagaaaagctcccaagagcagagaggggcacttggcagggcccctgttgactcacagaatatccaggaacagcctccatcggctgccctttcccgagcactgggggcttaccagcgtggggagggcctggaggacgagcgtgkgctgcttctcccttcatacttttgactccctctgccctttgccaacaccaagaggcctttgtaccatgtggt

SEQ ID NO: 946601 - DNA, 608 bp, Homo sapiens
ctgcaacctctgcttctcaggttcaagcgatcctcctgcttcagcctcctaagtarctgggatgccaggcacatgccacatcgccctgctcatttttgtatttttggtagagatagggttttgccatgttgctcaggttggtgtcaaactcctgggctcaaatgctcctcctgccttggcctcccaaagtgctgggatttatttgcacttagcagaaggaagaggaaatagttcatcttcctgaaaagtcccaatatctatgttttatatgtaaatataaatggtaagtagtggttagtatctccaaagcccactctgccctaatgagctcctaactgtctgggcaggggaggggaaggtggcactccccacagcagtgcctcttgtgatggacttctagaccctggtggctatgacaacacctaggacatggtgactacttgggactatttactgcattgatgtatgagacctgcacaaccatgggaatactgcatttggtgtagcttacaaggtaaaaaggagaaaggagactaaaaccagtgactggaaatgattatattactttaaataaacatttaattttataacaattttagccttaccac

SEQ ID NO: 946602 - DNA, 605 bp, Homo sapiens
aatagaatagactaaatcctaaactcttcatttcctccaatttaattttcttccacagaattaacaaaaatgaaaactgctctgtttctgaagccctrtaagctgaaactagatgcatttttcgaaacaattctcaagcctgatgtccagggtcacacaaatattcacaaacccacccaatgccataaccagagacatcaaactacaaacctggaaaataagttgaagttttcacccattagacagcttttcccaagatgtttcccagcacatgttataatgagactcttaaccatcttagtgcccacttttccacttggcaagctgaaggccctttaatttattcatttggctgcctttcagcctcagttcatatctcaaaactattataaaactaggactgtcatattactattaatttttcttttcatttttccttttaaaactctgtatctgtaacttttaaagtttttgcagacaccaactcctaagagaataatgctggcccagcactttatgaaactatggaacagatataattgaacttaataacagactcccggtagaattagtctccgagtcactcctttcaatcctcccatgtt

SEQ ID NO: 946603 - DNA, 609 bp, Homo sapiens
aagtctaggcctgcaaatcactgccaccaggcratagagaatgtaaacaataattccgaggcctgacatagccaagcgaggttgctgcattgctctgaaaggcacagatactctagggggaaggggttgctttgcattttgagcacaatttggccatgcaagaatctccttaccaaaataagcatcttgagcttgcattttctttctggcaggaaaaaggcctagaacttcccaagtgaacaagctacacccacttttcaaatattgtcacaagtcattgtaaaaatactctctcataaacgctctggctataagaggaaaatagaaccacaccaaacacctcaccccaatatttcagagtcccacattgggagcagtaaataagattagggattatagcctgctctgcgttcatctctgtacagaaatgtactgcagaaaccacacccttgtaaaagggaaaagcaggaggaagtggacccgtaaaagctaagtagtcagaggacatccagctggggataaaaggcattttaggactggctcagtgaagtgctgcaaacacaagttcactgtagaataaatagcctgggctgtctgggctggaaggtg

SEQ ID NO: 946604 - DNA, 565 bp, Homo sapiens
cctcactgggaagatgagagtgccagcctctcaagagctcctttctgttctgatattccaggagcacgtgaattgcctctgcttacrttcaggccctgtcctaaacccagccgtctagcacccagtgatcccatgcctttgggaatcccaggatgctgcccaacggaaatttgtacattgggtgctatcaatgccacatcacagggaccagccatcacagagcaaagtgacctccacgtctgatgctggggtcatcaggacggacccatcatggctgtctttttgccccaccccctgccgtcagttcttcctttctccgtggctggcttcccgcactagggaacgggttgtaaatggggaacatgacttccttccggagtccttgagcacctcagctaaggaccgcagtgccctgtagagttcctagattacctcactgggaatagcattgtgcgtgtccggaaaagggctccatttggttccagcccactcccctctgcaagtgccgcagcttccctcagagcatactctccagtggatccaagtactctctctcctaaagaca

SEQ ID NO: 946605 - DNA, 608 bp, Homo sapiens
tttgcccactcggggagcagatcaygcatgccaatccctgttgccgcatggagctcctcagcccactgacctctccgtgcctggtgcaggccaggcccccgtcttccgcctgcctctgcttccccgtcatgcatggtggtggtgtttctacggtgtctggttctgtgcccgtctctgagacagtctctgtgtggaatttgccttaaactgaagtaaatttggttcttttagtaaagcacgaagtttttctttcttctctgaaaaatagcactgacgttgctgcttgacagggtccagttctcctctgtggcttccttcaattgtttgcttcagtgagatttacaatcaaaggccacgtgccacgctctgtgctaggcattgaggatgcagccatgaacaaagcacagaccctgtccctgcacagggcttacaacacacacacagataatatgggagagacccagcaaacacatcaacaaataggctagtaacatcatttcaggtggtagcaagagttctaaagacacatgagggagaaggagggtgatgttttcgatgaggtggtcagagagggcctctcagaggaggtcatggttgaggtgagcccc

SEQ ID NO: 946606 - DNA, 603 bp, Homo sapiens
cagcagaggccagaaggtattggggcctggagacaaccacagcccagcacccaccasggagcagcatggccacacccagggtgaaggctacaggagtcccacgggtgcctagccatccctggggccaggctgggcttttgaaggagggatgttggttgtcgggggcagaggccagggctcacaggaagtctagggcagtggaccaggagactccagaatggggtgtcctaggggtgggggcatcctggcaaggcagtggaggagggtgggcgtctcatcggcatggaaatgtattccagatcccaaacaaaccaggcgttaattagccagctcttctccgcagctcacgatgctgcaagtatttttagttgcttttaccaaacaaatgtatttaattaacagagagacccacggggctttccagagatgggactcttggggcgtgtctgcccagctctgagtccagggtaggctctcaggctgcgggctgtggcctgcttcccccagcctgacccactcctgctcccgctctacctctccacttccacctcagggcaggggcctaggcccagactcagtacccctcctctgtgtcctcactcc

SEQ ID NO: 946607 - DNA, 634 bp, Homo sapiens
tcaagcgattctcctgcctcagcctcctgagtagctgggattacaggtgtgcaccaccacgcctggctattatttgtawttttagtagatctggggtttcaccatgttggtcaggctggtctcaaactcctgacctcatgatctgcctgcctcggcttcccaaagtgttgggattacaggcgtgagccactgcactcatcccaattaacagatttttaagtgcacaatatagtattgttacctattgttattatgttgtacagcagctctttagaacttattcatcttgtgtaaccgaaatttcatactcattgaacaacgaacttcccatttccctctcctaagcccctggtgagcacctttctattctctgcttctgtgagtttgactattttagatacctcatgaaagtggtatcatgcagtgtttgttcttctgtgactggttcatttcacttagcatactgtcctccaggttcactcatgttattgcatatggcaccgttttcttatttaagaccgaataatattgcattgtatgtatataccacatttccttttcctgtttatccgtcaatggacatttaggttgctatcttctgcttttctgataccatgttgaaactgagtcaagt

SEQ ID NO: 946608 - DNA, 648 bp, Homo sapiens
gtcattttgtaagcctgttttctgcctatcgaattttgggagtccaacaggcttctttccttctatcctctcttgtcctgttcagtgcaagcaggctgtgcttctgctggtgtaacattctcaaaaacctgtgggccattattcagcctgacacagacagcgtggacaggataattaataaagggaagtacacgtgacttctgaaggatggacttgactgtgttataaagcactgtggacacagaacacaatcattcaaagttcttaaatgtgtgtttaaggtacgtcaggtctctaaatctcaagttacctgctaggacatgatattatctgaaagatctttcaactgtgatatatctccttacaggaaaaagttgaatgagtactaaaaagtaaaactgtggtgcccagaggatgctgaagactactaaagaataatcaaagaaaggagggggctgctcaaataacagcaggaggtattagggagaacttcttcataggcaaccaaattagcattagatggtaaatgaagtcatggaacctgcttcctgggagattttttttaacaayaaacaaacaaaacaaaacatggtctcactctgtcacccaggcttgagtgcagtggcaaaatcagctcacctgagcctt

SEQ ID NO: 946609 - DNA, 613 bp, Homo sapiens
acaaaactttatccaggcttttctgagtctttttcttgactaggcctcaaccttgcccctgttctagccaggtctgcataacccagtcttagaaaaaatcctgctgtcagtttagcaagaatactctcgtagaagaggagaaaatatttgcaaaccatatgtctcatgagtttttaatatccaagatatataagtgacccaaataacccaatagtaagaaaataaataaccatattaaaaaatagaccaaggagcggaataggcatttctccaaagaaaataaataaatggcaaacaggtatatgaaaaatgctgaacatcactaattatcaggaaaatgcaaagcaaagccacaatgaagtatcaacacacacctgttagaagggttatcaaaaagacaaaatataacaagtgttggtgaggatgtagagagaagtgaaccctttgtacacagttggtatgtaaatttgtacacttattatggraaacactatggaggcaccacagaaaactagaaattaccatataactcaacaattttacttctggttatatcccaaaaaaattgaaatcagtatgtaaagagacatctgcactcccacgttcattgcag

SEQ ID NO: 946610 - DNA, 613 bp, Homo sapiens
acaaaactttatccaggcttttctgagtctttttcttgactaggcctcaaccttgcccctgttctagccaggtctgcataacccagtcttagaaaaaatcctgctgtcagtttagcaagaatactctcgtagaagaggagaaaatatttgcaaaccatatgtctcatgagtttttaatatccaagatatataagtgacccaaataacccaatagtaagaaaataaataaccatattaaaaaatagaccaaggagcggaataggcatttctccaaagaaaataaataaatggcaaacaggtatatgaaaaatgctgaacatcactaattatcaggaaaatgcaaagcaaagccacaatgaagtatcaacacacacctgttagaagggttatcaaaaagacaaaatataacaagtgttggtgaggatgtagagagaagtgaaccctttgtacacagttggtatgtaaatttgtacacttattatggaaaacactatggaggcaccrcagaaaactagaaattaccatataactcaacaattttacttctggttatatcccaaaaaaattgaaatcagtatgtaaagagacatctgcactcccacgttcattgcag

SEQ ID NO: 946611 - DNA, 613 bp, Homo sapiens
acaaaactttatccaggcttttctgagtctttttcttgactaggcctcaaccttgcccctgttctagccaggtctgcataacccagtcttagaaaaaatcctgctgtcagtttagcaagaatactctcgtagaagaggagaaaatatttgcaaaccatatgtctcatgagtttttaatatccaagatatataagtgacccaaataacccaatagtaagaaaataaataaccatattaaaaaatagaccaaggagcggaataggcatttctccaaagaaaataaataaatggcaaacaggtatatgaaaaatgctgaacatcactaattatcaggaaaatgcaaagcaaagccacaatgaagtatcaacacacacctgttagaagggttatcaaaaagacaaaatataacaagtgttggtgaggatgtagagagaagtgaaccctttgtacacagttggtatgtaaatttgtacacttattatggaaaacactatggaggcaccacagaaaactagaaattaccatataactcaacaattttacttctggytatatcccaaaaaaattgaaatcagtatgtaaagagacatctgcactcccacgttcattgcag

SEQ ID NO: 946612 - DNA, 769 bp, Homo sapiens
cagggcaccacgtcctgaggttgcatagagcaataaggccctgggcccagcccacaaaaccatttttccctcctaggcctccaggcctgtgatagaargggctgctgtgaaggtctctgacataccctggagacattttccccattgtcttggtgattaacatttggctcctcattacttatgcaaatttttgcagccagcttgaatttctccccagaaaatggggttttcttttctatcacattgttggactgcaaattttccaaaattttatgctctgcttcctcttgaacgctttgctgcttagagatttcttctgccagataccctaaattatctctgtcaagttcaaagttctacagatctctaggatagaagaaaaatggtgccggtctttttgcatagcaaaagtgacctttactcctgttcctaacaagttcctcttctccatctgagaccacttcagccaggattttattgtccatatcactattagcattttggtcaaagccattcaacaagtctctaggaagtttcaaactttcccacaccttcctgtcttctgagccctccaggtcttaggaagttccaaactttcccacacttttctatcttcttctgagccttccaaactgcttcaacctctacctgttacccagttccaaagtgacttccagatttttgggtatctctacagcagtgccccacccctagtgccaatttactccattactctattctcacactgctaataaagacatacctgaaa

SEQ ID NO: 946613 - DNA, 777 bp, Homo sapiens
aaacagctgcagatcttatgmaacatagaaaaactatacaacagagcagaagtctaccaactgacaaatatgcctagtaccacctactggatcataccccaaagcttcaacaccaaaaatacctcattaatataccccctctgaaaccaaagacaaaaagtcagcttcaaataaacatcttgcacaaagcctcatacctgtgaaaacatccaaaaaaagcagtctattgactgtactcaatctacactgcagttgaaagaacactcacatgcagagatgagaaacaaccaacgcaagaactgcagtaactcaaatggccagagtgttgtgtgtcctccaaatgattgcaccagttctccaacaagagctgttaaccaagctaagcttactgaaatgacagaaattaaattcagaatatggataggaagaaagatcatcaagattcagtagaatggcaaaacctaatttaaggaaaccaagaatcccaataaaatgatacaggagctgaagaatgaaacagtcagtatattaaaaaaaaaaaaaaaacctgatggacatgacagagctgaataatacaatacaaaatctttacaatgctaccataaatattagtagcataatagaccaactagaggaactaatctcagaacttgaaaactggctctctgaaataaaacaatcagacaaaaagaaaaagaaagaaacacacaaaaactctgagaagtatgagattatgtaaatatgtcatatctatgaattactggcatctctgaaagg

SEQ ID NO: 946614 - DNA, 552 bp, Homo sapiens
gtaaagagcaggatctgtaactacaaagatcatgagaaccacgagatcctcaaatccttctcctgcctctttcatggatatatcaatttgggactctgtcttgaagaaacagccacatggaggcatcagaaataggtttttaatcttccagattgtgcattcaaacaacactatacaatatagatagaagcaaaatcatagattttttagtcagaaaaacttgaaaagagattacttcttaaagtgtcacacccacccacgcaaccacctacacacacatgtgcacacatatacaagtgataaataataattattgccacttgcagggtttttctgagtatagaaatctagaaatctctgagtacctcacacaatgccatgtatatattatgctcttaacaaccattttctctttccacttctccttttaattcataagttttggtagcctctaccatttattgcattgctctctctctctctctyttttttttttttttttttgttgttgttgttgagttggagtttcgctctcgttgcccaggctggagt

SEQ ID NO: 946615 - DNA, 750 bp, Homo sapiens
atgaggtacagggaaaagtggacagttagcaaggcaaagaggagctttattgagtgacagaacagctcagaggagacctgcattgggtagctcctctccacaggcagggcgtcccgatgagtgttcagttctcaacagagaggagaccctggagtggggagctcctctctgcaggcaggttgtcctgtcatctccttgagtctgtctgagtctggggtttttatggacttcagagaggaagaagtgcctactgattggtccgtgggtggccatgggtgggcctggaaaaagtaccgtaagttcccactctggtctgtggggccggcagcctggccgtcaggcttcaggccttccccagctcgaaggtagagcttcactagggacccactcctttccacccaggagcctgtctgcctcctgctgtcacccaggctattcatgctgagggacacctaaaggcccatgcagagccgcccttagcccccactcaggctccctcccatgcttaccagtgcccaaagtccagaggcagccaaggcagcagggggctggagcgtcagtgctgccccaattgtgcacacacccaaccaggttgcaacagctcctgggctcgacctcaactttgctccaagatcagagtaggtgcagggagcagggagaggccaggtagtgggagcaggcacttccaagcctgcaggtgggarggggcctttcccaggcccccaagaggggacgcccaggtccgtagcc

SEQ ID NO: 946616 - DNA, 534 bp, Homo sapiens
aagatcaggaataagacaaggatgttcgttcttgatacttctattcaacattatcctggaggtactagccagagcaagtaggcaagaaaaagaaataaaaggcatccagattggagaggaagcagtaaaattgtttctattcacagatgacctgatcttatatatagaaaatcctaagaggtcctcggagaatattttgtgctaatgaacaagttcagcagtttcaagatgcaagatcagtatgcaaacatcaggtggaatttgtagacacttgcaataactaatgtgaaaattaacaaaaaaatccatttatagtagcatcagaaacaataaaatattaacactaataaattttattaaaaagtaaaaaattatactttctgaaaactacaaaacattgtctaaaktaattaaaggtcaatgtaaatgcaaagacattccatatttacagggatcagaagacttaatattgttaagattgttgacatgacaatattctccaaattgatctacagattttacataatccctgtt

SEQ ID NO: 946617 - DNA, 589 bp, Homo sapiens
aaagtgggcaaaaagcccccacataaacacawcattaattttaggtgttaaaaaaatctttcagaaaacaaaagaaagccgagtagaggaagaggatgagatgagggtgctgcttcacagggtggtcagggaaggccggagacatctgggcagaatgagggaggggttagcacagtgggcagcaggggacgagcattccaggcagagagaatagcgtgtgcaaaggcgctgaggtgcagacaaacttgagaaacagaaaagggattgcgtagctgagctgggacagagggaggtgcgtatagtcccgggtgtcgcaaagtgccaggtgccatgctaacaccacatcgattaacaatcagacctgggaggaagggacctttccttttttcttgagacagagtctcactctgttgcccaggctggagtgcagtggcatgatctcggctcgctgcaacctctgcctcctggcttcaagtgattcttctgcctcagcctcccaagtaactgggattacaggcgtacacgaccacacctggctgatttttttgtattttcagaagagacgaggtttcaccatgttcgctaggct

SEQ ID NO: 946618 - DNA, 577 bp, Homo sapiens
ggggaccactaccaccaagacgcagagaccgatagtggccccaaatgcctggctgcgctgttatttattggataataaggggcagagtaaggagtgtgagtcatctccaatgattgataaggtcatgtgagtcacgtgtccactggacagggagcccttctatgttaggtagccaaggcgtagagagagaggatagcttatgtcattatttcttttatgttcttttcagaaagatcaaagactttaatattttaatactttcactaattctgctactgctatctagagggtgcagccaggtatacagagtggaacaggaaagtgaaacaggagtgtgaccactgaagcacagcatcacagggagatggtcaggcctctggataactgcgggcgggcctgacatcactcaggccctccacaggaggcggtggagcagagtcttccctaactccccyggggaaagggagactccctttcctggtctctaggcactgacgcaaccgctagaccaaggtccgctaggcaatgggcgtcttcccagacgctggcgttaccccaagaccaaggggccctctag

SEQ ID NO: 946619 - DNA, 577 bp, Homo sapiens
ggggaccactaccaccaagacgcagagaccgatagtggccccaaatgcctggctgcgctgttatttattggataataaggggcagagtaaggagtgtgagtcatctccaatgattgataaggtcatgtgagtcacgtgtccactggacagggagcccttctatgttaggtagccaaggcgtagagagagaggatagcttatgtcattatttcttttatgttcttttcagaaagatcaaagactttaatattttaatactttcactaattctgctactgctatctagagggtgcagccaggtatacagagtggaacaggaaagtgaaacaggagtgtgaccactgaagcacagcatcacagggagatggtcaggcctctggataactgcgggcgggcctgacatcactcaggccctccacaggaggcggtggagcagagtcttccctaactcccctggggaaagggagactccctttcctggtctctaggcactgacgcaaccgctagaccaaggtccgctaggcaatgggcrtcttcccagacgctggcgttaccccaagaccaaggggccctctag

SEQ ID NO: 946620 - DNA, 609 bp, Homo sapiens
ttgtttctttttattcttttttctctaaacttctcttctcgcttcatttcattcatttgatattccatcgctgataccctttcttccagttgatcgaattggctactgaagctagtgcattcatcacgtagttctcatgccatgattttcagctccgtcaggtcctttaaggacttctctgcattggtttttctagttagccattcgtctaatcttctttcaaggtttttaacttctttgccatgggtttgaacttccttctttagctcagagaagtttgattgtctgaagacttcttctctcaactcgtcaaagtcattctccgtccagctttgttccattgctggtgaggagctgtgttcctttggaagaggagaggcactctgatttttagagtttccagcttttctgctctgttttttccccatctttgtggttttatctacttttggtctttgatgatggtgatgtacagatgggcttttggtgtggatgtcctttctacttgttagttttccttctgacagcctgsaccctcagctgcaggtctgttggagtttgccagaggtccactccagaccctgtttgcctgggtatcagcagcagaag

SEQ ID NO: 946621 - DNA, 625 bp, Homo sapiens
agactccatcagcaattgctgaccccctattcttacctcggccccttcctgagtcccaccaggagccctgctcctcatctgggacatgcttcttggcccatggaggttgmcagctcaccttggtactttactactatttggtttctgtgaccaccaagctgttgcttaaaccaagccgcctatggtggcaccactttggagaattcttttttattttttgagacaggttctcactctggttaccgagactggagtgcagtggtatgatcttggctcactgcagcctcgacctcccgggttcaggtgattttcccacctcagcctccccagtagctgggactattggtgcatgccactacacccggctcatttttgtatttttagtagagacggggttttgccatgttggccgggctggtcttgaactcctgacctcaggtgatctgcccccctcggcctgtcaaagtgctgaaattacaggcgtgagccaccgcacccggctggataattctttagattttattccaagtgggttgagaagccatgggaagattgtaagcaaaggaataaaagttggttgcattctctttggaggatttccctcttccctggagaccagtcctca

SEQ ID NO: 946622 - DNA, 472 bp, Homo sapiens
cttgccagaaggtacttagatagtgttactgtgtccggaattggtgggttcttggtctcactgacttcaagaatgaagccgcggaccctcgcggtgagtgttacagcccttaaggtggcgcgtctggagkctgtcccttttgatgttcagatgtgttcggagtttcttccttctggtaggtttgtggtctcgctggctcaggagtgaggctgcagaccttcgctgtgagtgttacagctcttaaggcagcacgtctggagttgttcgttcctcctggtgggctcatggtctcgctggcttcaggagagaagctgcagatcttctcggtgagtgttatagctcataaaagcagtgtggacccaaagagtgagcagtagcaagatgtattgcaaagagtgaaagaacaaagcttccacagtgtggaagggtacccgagcgggttgccaatgctggctccggcagcctgctttta

SEQ ID NO: 946623 - DNA, 472 bp, Homo sapiens
cttgccagaaggtacttagatagtgttactgtgtccggaattggtgggttcttggtctcactgacttcaagaatgaagccgcggaccctcgcggtgagtgttacagcccttaaggtggcgcgtctggagtctgtcccttttgatgttcagatgtgttcggagtttcttccttctggtaggtttgtggtctcgctggctcaggagtgaggctgcagaccttcgctgtgagtgttacagctcttaaggcagcacgtctggagttgttcgttcctcctggtgggctcatggtctcgctggcttcaggagagaagctgcagatcttctcggtgagtgttatagctcataaaagcagtgtggacccaaagagtgagcagtagcaagatgtattgcaaagagtgaaagaacaaagcttccacagtgtggaaggstacccgagcgggttgccaatgctggctccggcagcctgctttta

SEQ ID NO: 946624 - DNA, 560 bp, Homo sapiens
tctgtaataatctgttagatccatttggtctasagtgcagtttaactgatatttctttgttgatatttgtctattgccgaaagtgaggtgttgaaatcctctactttattgtgttatattcagtgtctccatttaggtctcttaatatttgttttacatattaagcatcccagtgttgagtatacatatatttaaaattgttatatcctcatgctatactgatttctttatcataagataatggcctagtctttttttaaatactttttttttggcttaatgtctattatgtctaatatactcctattcctttttgttttccatttgcatggaatacctttttcttttccttcactttcagccaatatgtatatttttaggtgaaataaatttcttctagacaacatacagttggatcttggttattttgtttggtcttaaccaattcagctactttatttcttctaattagagaatgtaattcatttgcattaaagattattaaaaggtaatgatttagtactgccattttgttacttgttttctggttgttttgtagg

SEQ ID NO: 946625 - DNA, 551 bp, Homo sapiens
tctgcaaagtaaggaggagctgaatgttaatccccaagacaatagggaaaaggtctccagggcatgtcagaggtcttcatggaagcccctcccataasaggcctggaagcctagaaagaaaacagggtttcctggatcaggcccagggtccccatgctatgtgcagcctagggacttggttccctgtgcctcagccactccagccatggctgaaagggtccaacatagagcttggcctgtggcttctgagagtgcaagctccaagccttggcagcttcgatgccgtgttgagcctgcaagtacacagaataccagaattggggtatgggaacctccaccgagatttcacaagatacatggaaatgcctggatggccaggcagaagtttgctgcagaggcagggcattcatggagaacctctgctagggcattgcagaagggaaatgtggggtcagatcccccctacagagtccctactggggtaccacctagtggagctgtgagtagagggccacaatcctccaggccccagaaaggtagatccactgaca

SEQ ID NO: 946626 - DNA, 606 bp, Homo sapiens
attggtaaatataattaagtattagaattgatggtcatggaatggraaaaaacccttcataacaggatcagatcataacctttgaaaggaacataattacagaggtgaaggatttgggttcaacgtggactttctgttattactatttaggatgatatatctgtgtatatgtatgatatatgcacacaaataactgtatataaaatgatatatataacacatatataactatatgcatgtatatctatataataattgtatatgtactacagttatatatttagttatatattattgtatataataatatatgacatctgtaactacatttagttatatatttagttatatatattatatataataatatatgacatatataactacatatatagttaaatatatagtatatatggttatatatgtgtcatatgtattgttatatacatatacatatttatgtgcatatatattcaataaaacatatacatacccctttactcttagaatcattatttttttaaaaaaactgctttatatactagattttgaatatttcttatcctcaaaaattatgctcaaatacaatttgcagcagaagctgaa

SEQ ID NO: 946627 - DNA, 462 bp, Homo sapiens
tcattaaacttttgttgaatgaatgaatsaatcctggaaggtctggagaaaagaataacacaaaaatgttattagaaagttgctgaatatagaaagactattccaatagtcataaaatattcattaagaatgtcttcagacctctttgtataaaccaatatttttctctccatctgtagaatgatatgtttttcatcagaatgataaatctcaatagcaaaatattttaattttacatgacttcagtgtgtaaatttataaaagcctaaccattctataaaatagacatttacattaatttaatatagacacatctgtagatacaggcccacaaatcttgtcattaaatgtttacctctaacctacttcactatcatctgtttatatctgctcacatatatgaaatcaggccataaactaagtcaaatattctctggaaaagaataaagattcatggtgcta

SEQ ID NO: 946628 - DNA, 462 bp, Homo sapiens
tcattaaacttttgttgaatgaatgaatcaatcctggaaggtctggagaaaagaataacacaaaaatgttattagaaagttgctgaatatagaaagactattcyaatagtcataaaatattcattaagaatgtcttcagacctctttgtataaaccaatatttttctctccatctgtagaatgatatgtttttcatcagaatgataaatctcaatagcaaaatattttaattttacatgacttcagtgtgtaaatttataaaagcctaaccattctataaaatagacatttacattaatttaatatagacacatctgtagatacaggcccacaaatcttgtcattaaatgtttacctctaacctacttcactatcatctgtttatatctgctcacatatatgaaatcaggccataaactaagtcaaatattctctggaaaagaataaagattcatggtgcta

SEQ ID NO: 946629 - DNA, 552 bp, Homo sapiens
ataaagggagcagtatcccaaggctgtacaaggcagcaagagccctgggcctggatcctgaaattattctctcctccgaggcctctggggctgtgatgagagcggctgacttgaagatttctcaaacgccttcaaggccttttcctcattgtcttggctattaacacctggctcccttccaatcctgctaatctctctagcaagtagttgctccataggctgcttggattccttccctaccacaggcccaggctacaaattttccaaatgtttatactctgcctcccttttaggttcaactttaagtctttattttgctcccacatctgatggtaggttgttagatgcgggcatgtcacttcttgaatgctttgctgcttagaagcttcctcaaccacataccctaagtcatcactcctaagttcaaacttccacagatccctagggcacaaacacaaggcagctaagttctctgctaaggtatacatgggcgatcttcactccccttmccaataacttcctcatttccatttgagacctcttcagcctggc

SEQ ID NO: 946630 - DNA, 670 bp, Homo sapiens
cagctggtctcccacactacattttaytgattatggcttagacctggtcatcccttataatgcctggcacagacattacagaaaagtaggagcccacatccagcccactcccagttctgtgagtctctcatttccagggaaggttggaatcctaccctgggtagccctgtggctgctgcctttactctgtaggtcagagtgagtaacagagtgcaatgtagaacctaggaaccagaacctcagagctgttggtctttgttttgcttttacagccaggagctagagattataagtggaagcacaaagttccaaagatacttcaatgagatgaaagcaaatcacacatttaaaagtgtgctttctaatgccagcactttgggaagctgaggcaggtggatcacttgagctcagaagttcaaggccaacctgggcaacataggaagaccccgtctctatttaaaaaaaaatacaaaaattagccaggcatggtggtgtgcacctgtagtcccaggtacttggggggctgaggtgggaggactgcttgagcctgggaggttgaggctgcattgagccatgtttgcaccacttggtgacagagaaagaccctgtctcaaaaaaacaaaaaagaaaatgtgctttgcaaagaaatggaatcaacctaagtgctcat

SEQ ID NO: 946631 - DNA, 598 bp, Homo sapiens
cgggtggggacttggagaacttttatgtctagctggaggattgtaaatgcaccaatcagcactttgtgtctagctcaatgtttgtmaacacaccaatcagtgctctgtgtctagctaatctagtggggacttggagaacatttgtgtctagctaaaggattgtaaacagaccaatcagctctctgtaaaatggaccaatcagcaggatatgggtgggatcagataaggcaataaaagtaggctacccgagccagcagcggcaaccccgtggggtccctttccacactgtggaagttttgtcttttggctctttgcaataaatcttgttgctgctcactctttgggtctgcactgcccttaagatctgtaacgctcactgtgaaggtcaacagcttcactcctgaggctagcgagaccacgaatccactgggaggaatgaacaactccagacgggaggaacagacaactccagacacgccttcttaagagctgtaacactcaccacaaaggtctgcagcttctctcctgaagccagtgagaccacgaacccaccagaaggaagaaactccaaacacgtccaaacatcagaaggaacaaa

SEQ ID NO: 946632 - DNA, 561 bp, Homo sapiens
atcccctaaacctaagaggtggaggttgcagtgagccgagatcacaccactgcactccagcctgggcaacagagcaagaccccgtcttaaataaataaatacataaataacaatgaaatgtccacawcactgatcattacagaaatgaaaatcaaaaccacaatgagtcatcatctcacaccagtcagaatggcaattattaaaaagtcaaaaaacaacagttgctggcaagggtgcagagaaaaaggaacacttttatactgctggtgggaatgtaaattagttcaactcttgtggaagacagtgaggcaattcctcaaagacctggaaccagaaataccacttgactcagcgttcccattactgggtatatacccaaaggaatgcatatgattttattacaaagatacatgcatatgtatgttcactgccgcactgttcataatggcaaaacatggatgttcatcaatgataggctgcctaaagaaaatgtagtacatatacaccatggaataccgtgtagccataaacaggaagaagatcatgtcattttcagggata

SEQ ID NO: 946633 - DNA, 557 bp, Homo sapiens
cctcagcaaattaatgttggaacagaaaaccaaacaccacattttctcatttataaatgggagctgaacgatgagaagacacagacatatgacaaggaacaacacacactgggacctgaaggagaaacaggggaagggagagcatcagaaaaaatagctaatgaatgctaggcttaatacctaggtgatgggttgatctgtgcagcaaaccactatggtacatgtttccctgtgtaacaaacctgcacatcctgcacatgtaccctgtgttttaaattatctccagtaataatgctgttttctttgtttggttcgttggtttttaattttttttaattcttttctcttttcttctttattagtctagctagtggtgtatctattttattagctttttcaaaaaatgagctcctggattcattgaattttgaagtgatttttcacgtctgtatctccttcagttaagttctaatcttggttatttcttgtctttatytagctttggggtttgcttgcttttggttctctagttcttttagttgagatgttaggttatt

SEQ ID NO: 946634 - DNA, 698 bp, Homo sapiens
ggctgctgcagtatgctgggggcccactccagtccctagttgcctcagattttccagtacctgaaggtattaccagtgaaatatgagaaayagcaaagatggcagcctgccctttttccgaatagctctgtaccagggaggtacagacctgttgctggcccaaacacacctctaagaggtgtctgaagaccccagttgggaggtctaacacagtcagaaggactgtgttaatacctcggtgatgggttgatagctgcagcaaaataccatggcacatatttacctatgtaacaaaccttcacatcctggacatgtatcctggaacttaaaataaaacaaatacaatgaacaacaacaaaaataaattattaataaataacaactgaatgaagaaaagaaagaagaaagaaagaaagagaaagaaagaaagaaagaaagaaagaaagaaagaaagaaagaaagaaagaaagaaagagagagaaagaaagaaagaaaagaaggaaggaagggaaagagagacaaggcaggatgatgtcccacccaggagcaatgcagaggcaaatgaacctcccagggaagtgatgagtcaatgtgaagccccaggtaacatgcttctcccacagatctctgcaaccctcgggtcaggaagttccctcatgagcccactccaccagggccttaagtgtgacacacagagc

SEQ ID NO: 946635 - DNA, 663 bp, Homo sapiens
aaattttaaagctgataagcaacttcagcaaagtctcaggatactaaatcaatgtgcgaaaatcacaaacattcctatacaccaataataaacaaagagccaawtcatgagtgaactcccattcacaattgctacaaacagaataaaatacctaggaatacaacttacaagggatgtgaaagacctcttcagggagaactacaaaccactcctcaaggaaataagagaagacacaaacaaatggaaaaacattccatactcatggataggaagaagcaatattgtgaaaatggccatgctgcccaaagtaatatatagattcaatgctattctcatcaagctaccattgattttcttcatagaattagaaaaaaaactactttaaatttcatatgtaatcaaaaagagtccgtatagccaagacaatcccaagcaaaaagaacaaagctggtggcatcgtgctagctaacttcaaactatactacaaggttacagtaaccaaaacagcatggtactggtaccaaaacagatatatagaccaatggaacaaaacagagtcctcagaaataatgccacacatctacaatcatctaatctttgacaaacctgagaaaaacaagcaatgaggaaaggattccctatttaataaatgctgttgggaaa

SEQ ID NO: 946636 - DNA, 602 bp, Homo sapiens
tctaaggtacatatcaagcaattcaaatttttcttgtcatgtcaggacttttctctgcttcttgggagcacttctggcatcactagtggtacttcrtatgggccttatggtgttattcaaagtttatggtattgcactaaatatgatgaaaaatatgcaagaactgtgagagatcactcttcactgcactgtgcaatttacttgagaggcaaactgctcacagagatgattagcataacacagtgttttaaggggacactcacaacctttgagctcacctccaatagtaacaggaggtctgtacaaaattattacagcaacacaagtaggtactaccattaacttcatgcagttatgatttaatattgcatctttgcatttgtttacagttctctaaactatgaatggcaccatatactgtgtttctgcaagttttgataagttttaactttttataatagattcgtgtatatattatagtattaaatgacaaagtagactagattctacatacgctttatgtgtttatgacataccaaactttttttagttttctcgatatttccagtctgtgtggttcatctgcgacttttttcaagttg

SEQ ID NO: 946637 - DNA, 596 bp, Homo sapiens
ggtaattcaggttatctcgagtcatctcccttcatctttactttttttcttaatyacacaaagtacagatatttatagctttctacctataaatctgcatatattttcctaactctatttaccttcaaattcaacaattacaatttgagttttaggtatttgatcaaaatttattccatgtactatctttgggaaatcttatctgagcccctgctatatacactgatgaattctaaataccctatctccatctcttatgtctggactcttgagttccagactggaaatttccacttgactatgcccaggtacctcaattttaattatgtccaaaatgaaacttcatttcccccttaattctgttttcttttcctgtgttttctatgatgcttttcagataaagtccaaagcccttaccgtggcatacaaaatccttcaacatctatcccctgatggctttagcttttgctgaaacactgatcctctcaactctctatcacatttcacaacttcggttattatatttattcatttattcctttattattctttcaacctactgtggtagacactttctggcttcttcagatccattc

SEQ ID NO: 946638 - DNA, 596 bp, Homo sapiens
ggtaattcaggttatctcgagtcatctcccttcatctttactttttttcttaattacacaaagtacagatatttatagctttctacctataaatctgcatatattttcctaactctrtttaccttcaaattcaacaattacaatttgagttttaggtatttgatcaaaatttattccatgtactatctttgggaaatcttatctgagcccctgctatatacactgatgaattctaaataccctatctccatctcttatgtctggactcttgagttccagactggaaatttccacttgactatgcccaggtacctcaattttaattatgtccaaaatgaaacttcatttcccccttaattctgttttcttttcctgtgttttctatgatgcttttcagataaagtccaaagcccttaccgtggcatacaaaatccttcaacatctatcccctgatggctttagcttttgctgaaacactgatcctctcaactctctatcacatttcacaacttcggttattatatttattcatttattcctttattattctttcaacctactgtggtagacactttctggcttcttcagatccattc

SEQ ID NO: 946639 - DNA, 596 bp, Homo sapiens
ggtaattcaggttatctcgagtcatctcccttcatctttactttttttcttaattacacaaagtacagatatttatagctttctacctataaatctgcatatattttcctaactctatttaccttcaaattcaacaattacaatttgagttttaggtatttgatcaaaatttattccatgtactatctttgggaaatcttatctgagcccctgctatatacactgatgaattctaaataccctatctccatctcttatgtctggactcttgagttccagactggaaatttccacttgactatgcccaggtacctcaattttaattatgtccaaaatgaaacttcatttcccccttaattctgttttcttttcctgtgttttctatgatgcttttcagataaagtccaaagcccttaccgtggcatacaaaatccttcaacatctatcccctgatggctttagcttttgctgaaacactgatcctctcaactctctatcacatttcacaacttcgrttattatatttattcatttattcctttattattctttcaacctactgtggtagacactttctggcttcttcagatccattc

SEQ ID NO: 946640 - DNA, 774 bp, Homo sapiens
cagcagctgccactgctttaatacttttagaggacctaaaaatcacaaactatgytcaactcactctacagttccataacttcgaaaatctattttcttcctcatacctgatacatatactttctgcttcccagctccttcagctatactcactctttgttgagtctcccacaactaccattgttcctggcacggacttcattccggcctcccacgttattccggataccacacctgaccctcatgactgcatctctctgatccacctgacgttcaccccatttccccatatttccttctttcctgttcctcaccctgatcacacttagtttattgatggcagttccaccaggcctaatcgcccacacaccagcaaaggcaggctatgctatagtacaagccactagcccgccccttaaaacctctcgtttcctttccatcgtggaaatctatcttcaaggaaataacttctcagtgttccatctgctattctactacttctcaaggattattcaggccccctcctttccctacacatcaagctcgaggatttgccccacccaggactggcaaattagctttactcaacatgccccgagtcagataactaaaatacctcttagtctaggtagacactttcactggataggtagaggcctttcctacagggtctgagaaggccaccgcagtcatttcttcccttctgtcagacataattcctcagtttagccttcccacctctatacagtctgataacagaccagcctttattag

SEQ ID NO: 946641 - DNA, 551 bp, Homo sapiens
attccacaagtttctaggaagttccaaactttcccacatcttgtctttttctgagctttccaaaatgtttcaccctctgcctgttacccagttccaaagttgcttccacattttctgttattgttgtaasagtgccctactcctggtaccaattttttgtattagtccattttcacactgctatgaagaaatacctgagactgtttaatttataaagaaaaaaggtttaattgactcagaattctgcatgactagggaggcctcaggaaatttacattcatggtggaaggtgaaagggaagcaaggcacaacttatatggtggcaaaagagagagagagagagagagagagtgtggggtgggggggaagtaccacacttctaaaccatcagatctgttgagaactcactataattagaacagcattggggaaatctgcccccatgatccaatcacctcccaccacgtccctcccctgacatgtagggattacaatttgacatgagatttggattgggacacagagccaaaccaaatcaataactcttcaaa

SEQ ID NO: 946642 - DNA, 483 bp, Homo sapiens
ttgggcaatagagcaaggccacctcaaaaaaaaaaaaaaaaaaaaaaagacatgatatatactaaaatttatcccatgctacatttgcaggatgtaggccttcagatattgaggtgttttatctaggtagataaaaatctgaaatgtgtattagaatactccgaaaatgtattagcaaaaattgaaaaatggagaaaattgttagatgagggtagcttataacagattaccaaaggcagaagtatttgtattttaaaagtaaaacaatgaacaaaaaaaaaaatcaatgaattatagaaataggtgaaaaaagcagaaacaagagaaggtctgggtaaagatcacttaaatgaattttttattatgatactttaagttctgggatacatgtgcagaacrtgcagatttgttacataggtatacatgtgccatgatggtttgctgcacccatcaacccgtcatctacattaggtatttctccca

SEQ ID NO: 946643 - DNA, 571 bp, Homo sapiens
aataatagccattctgacatgtgagatagtatctcattgtggttttgacttgcatttctctgatgattagtgatgtgggtcatttttcatgtttcttggctacttgtatgccttcttttgagaaatatctgtttatgtcctttgcccactttgtaatgaggttatttggtttttgcttaactatttaagtttcggatagattctggatattagatctttgtcagatgcatagtttgcagatatttccttccattctttagtttgtctgtctactccgttgataatctcttttgctgtgcagaaactctttagtttaataaggtttcacttgtcaatttctatttttgttgcaattgatttttaggagttagtcataaattcttacccaaggctgatgtccacaatggtgttttcattatggtagattttctagaaaatcctatattttcttttagggttcttagagtttgagttcttacatttaaatttttaatccatcttgacttaatttktttgtatagtgaaaagcagagctttagtttcattcttctagcatatagctagccagcta

SEQ ID NO: 946644 - DNA, 612 bp, Homo sapiens
ccctgagggttcttaggatcccttcaagggttccaggaagtcaaatatattttcaaaatatactatgacattatttggctttttctgtatgctgacatggtactgattttatgyaatccatggtagattaaacagcaccaatcaagacagtggcgcagaaatacatacatcattattgtagtcttcacagccaggcacttacagctttttttaaaaaagaaaattttattcaagaatgtctttaatgaggctattaagattataaattttattaaattttgactcaattattgaacttaaaaatatgctgtatgacaaaaggggaaatacaaataaagcacttaggctgggcattaaaaaacagtggttattccaaaaacactgtgcaattgagttgtgatctgatcatcatttttactcaaaggaataactgaaaattgttattcagaattgggagtttggcagacattttctggaaaatgaacaaagtgaccctatcactccaaaaaaacaaattattgatgttatacacaaccaaggataacatttgagctttcacaggaaaatttgaatattgaaaaacttctattttccactgtgagcttgagtgtt

SEQ ID NO: 946645 - DNA, 612 bp, Homo sapiens
ccctgagggttcttaggatcccttcaagggttccaggaagtcaaatatattttcaaaatatactatgacattatttggctttttctgtatgctgacatggtactgattttatgcratccatggtagattaaacagcaccaatcaagacagtggcgcagaaatacatacatcattattgtagtcttcacagccaggcacttacagctttttttaaaaaagaaaattttattcaagaatgtctttaatgaggctattaagattataaattttattaaattttgactcaattattgaacttaaaaatatgctgtatgacaaaaggggaaatacaaataaagcacttaggctgggcattaaaaaacagtggttattccaaaaacactgtgcaattgagttgtgatctgatcatcatttttactcaaaggaataactgaaaattgttattcagaattgggagtttggcagacattttctggaaaatgaacaaagtgaccctatcactccaaaaaaacaaattattgatgttatacacaaccaaggataacatttgagctttcacaggaaaatttgaatattgaaaaacttctattttccactgtgagcttgagtgtt

SEQ ID NO: 946646 - DNA, 577 bp, Homo sapiens
tgtaaatcaaaaccattatgagatttcacctcacacttattaggatggctactataaaaaagatgaaaggtaacaaggttagcaagaatgtggaaaaaaagggaacccttgtacagtatacactttgtagtgtactttgtacactaatttacactggtggaaatgtaacttagtataaccattacaaaaagcaatatgaagattcctcgaaaacttaaaaatagaactactatgtggtccatcaatcctgcttgtgaatatatagccaaagaaaatgaaatcaggatctgtacttccatgttcattgcagtattactcacaatagccaagagagggatggaatcaactaaatgtccatcaatggatgaaccgataaacaaaatgtgatatacatgcatacatatgtatgaaaacatatatgcatacatatatataatagaatattattcagcccttgaaaaaagaaagctctgctgtttttgataacayagctgaatctggaggacattatacaaagtgacataagccagcctcagaaagacaaacataatctcatttatatgtggaacctaaaaag

SEQ ID NO: 946647 - DNA, 703 bp, Homo sapiens
acacaaggcaagtcccttctgcctgtgagcctgtaaaaccaaaagcaaattagttacttccagatacaatggagatacaggcattgggtaaatacaccctctttaaatgggagaaattggccaaaatgaaggggctacaggcccatgcaagtcctaaatccagcaaggcagtcaaatgttaaagctttgaaatgatctgctttgactccatgtctcacatccagtttatactgatgcaagtggtgggttcccacagccttggacaactccacccctgtggcttttcagggtacatcccccatcctggttgcttctatgggctgacattgagtgtctgcagcttttcgaagtgcatggtgcaagcagagtgcaaactgtcagtgaatctaccattctgagatctggaggacatttgccctcttctcacagctccactaggtcgtgccctagtgaggactgtgtgtgggggctctgaccccacatttccctttcacactgctgtagcagaagttctccatgagggttccactcccacagcaaacttctttctgggcatccaggaatttccatmcatcctctgaaatttaggtggaggttttcaaacctcaaatcttgacctctgtgcacccataggcctaacaccacatgtaagtcaccaaggcttgaggattgtgccctctgaagcaacagcctgagttgtacg

SEQ ID NO: 946648 - DNA, 772 bp, Homo sapiens
tgctgtgtctgaaatctctctgcaggcaagaactcaccatttccaaggtcttaaatatcacctacatacaaattgtccccaatattctrtctccggtctgatctttcctttaagctaaagactcgtgtgtttacaaacatctggttaattgttgtcaccagatacttcacgggcatctcaaactgaacaagccccatatccgatctgaatccagttgtcatcatttctgtaaaagattcccccaagggctctaatcagaagcaagaagcttaactccactacatcccaaatccctcttttggccctgtggattctacttttaacctacactttcattcatccacttttctccacgtcatccaccctgtcttcatctgggctgccagtcccccttgccggggcatttgcagaagcttcctacgtattctctccgcttctccttctgccccttactctctattcttcacaaagcagcctggttttcttaaagccaatcagatcatggccttctcctggtataaatccaccccactacacgtggagaaaattcactcgtttccacagacaaaacccagcacaatctagtccctgccgacgtcactttgggccactctcctcggagaatgtaccacacaggccccctttcggccttggaacacaccaggctctctgccacctgagctcctttgcaaacactaaacgcagatgtccagccccatttcttcaagtcgctggctccttccctttcttcaaattttggtataaatattat

SEQ ID NO: 946649 - DNA, 607 bp, Homo sapiens
tctcatctgtttagcatgttttgccctgtctttgtmcgactgccttgatctttccagtttacagcctcctcatggccccagccctaaggtgcacgaatgccctgggtgggacacacaccctgtgactcttcttgacctccaagcacatccctttctccctagggttccttctagacggcagctttccccctcctcctttgtgggggagaaggtaactttgacagtcaagatttccaccaaggccgggcgcggtggctcacgcctgtaatcccagcactttgggaggccgaggcgggtggatcatgaggtcaggagattgagaccatcctggctaacaaggtgaaaccccgtctctactaaaaatacaaaaaattagccgggcgcggtggccggcgcctgtagtcccagctactcgggaggctgaggcaggagaatggtgtgaacccgggaggcggagcttgcagtgagccgagattgcgccactgcagtccgcagtccggcctgggcgacagagcgagactccgtctcaaaaaaaaaaaaaaaaaaagatttccaccaaaacaccctgagataagaccagataagaccaggcttgtcatgagagaga

SEQ ID NO: 946650 - DNA, 708 bp, Homo sapiens
gtctgcctctcatctgtttagcatgttttgccctgtctttgtacgactgccttgatctttccagtttacagyctcctcatggccccagccctaaggtgcacgaatgccctgggtgggacacacaccctgtgactcttcttgacctccaagcacatccctttctccctagggttccttctagacggcagctttccccctcctcctttgtgggggagaaggtaactttgacagtcaagatttccaccaaggccgggcgcggtggctcacgcctgtaatcccagcactttgggaggccgaggcgggtggatcatgaggtcaggagattgagaccatcctggctaacaaggtgaaaccccgtctctactaaaaatacaaaaaattagccgggcgcggtggccggcgcctgtagtcccagctactcgggaggctgaggcaggagaatggtgtgaacccgggaggcggagcttgcagtgagccgagattgcgccactgcagtccgcagtccggcctgggcgacagagcgagactccgtctcaaaaaaaaaaaaaaaaaaagatttccaccaaaacaccctgagataagaccagataagaccaggcttgtcatgagagagagttcccaaggagcatgtatgggttgagtcccactgacccttggctttccacaggggtacaggtgagatgtatcctgcagtgtcaccagaagcag

SEQ ID NO: 946651 - DNA, 584 bp, Homo sapiens
gcagctagaataaagcaggcagaagaatgtggaaggactaaactggctgagtcttctggcctttatctttctcctatgctggaagcttcctgccctcgaatatcagactccaagttctttggactcttggacttacaccagtggtttgccaggggctttcgggcctttggtcacagactgaaggctgcactgtcagcttccatacttttgaggttttgggacttggactggcttccttgctcctcagattgcagatggccatttgatgcagacggcctattggtgaagcctattgtgggacttcaccttgtgatcatgtgagtcaatactccttaataaactccctttcatatatacatctatcctattagtcccgtccctctaaagaacccctgactaatacaacatcataaatcattagggaagaacaaatgaaaaccacagtgagatataacctcacacccttttggatggctactatcaaaarcagaaaataataagagttgacaagaatgtggagaaattggaactcttgtgtacactcctggtgagaacataaaatggtgcagccactgtgaaaaaac

SEQ ID NO: 946652 - DNA, 587 bp, Homo sapiens
taattttcctgtgtttgtatggtttccaaagttcctcttgttattgatttctagttttattccatgtgatcagagatgatacttgatataatttcatcttttaaaatttttaagacttgtggcctaatgtatggkctatctctgagaataatctatgggctgaggaaaagaatatgtatactgtagacattggatgaaatgttctgtaaacatctactaggttcatctggtctgtgccacagattaagtctcatgtttctttgtggattttctgaatggatgatctgtccagtgctaaaagtggagtgttgaagtctccagcccttattgtattgagatctatttctctttttagctctaataatatttgctttgtatatctgggtgctccactgttgggtgcatatatatttacaattgtaatatcctcttgcttaattgacccctttatcattatataatgccatttttgtctctttttacactttttgccttgaaatctattttgtctgatataagtatagctccttctattcttttttggcttacatttgcatggaatatcttttccattcctttattttcag

SEQ ID NO: 946653 - DNA, 617 bp, Homo sapiens
ccctctgcaaaagcactgaattatatcatgatacaatcatcaattgtaccatgaatcaccatcagcggtggtcttttagggatatgaagaaggggttttcacaatacatcgcatgacacaccatcttccaaatctctaaacatttctctccacagcccagtcctctccatagttgtccaaatccctccctcttttctcttgttgtctccaaaactcaaaaccatgctctgactttctatatcccgccctcctcttcttggaccatctgggaagccccctgcttccccagggtgtcccctcctccccttctgggatcagtcatctttcctcaaatggaccagttcggcctctcttagtttctccaactctgcatctcaacctttctcccttcactacacaataatgtccaggaggcaaagagcccacaaacctgggaacctccctttccagaagggaggttctggaatgactacaaatatttggttatgattttcttccctgccacgcctgttttcatgggcagtgctgagccccggtcctggcagagctcagamccaggctctcatgagctggggcaagtggggcctagggaacctctgggttgaggaccttgcacc

SEQ ID NO: 946654 - DNA, 722 bp, Homo sapiens
ttttggccattggggctctccatagtttgcgtttcattctccagctccagctccctttgctgtagcaccttagcttcctatgttcactgcagacttccccatttttttgtttgagacggagtcttgctctgtcgcccaggctggagtgatcttggcttactgcaagctccgcctcctgggttcacgccattctcatgcctcagcttcccgagtagctgggactacaggcgcccgccaccatgcccggctaattttttgtatttttagtagagacggggtttcaccgtgttagccaggatggtctcggtctcctgacctcgtgatccacccgcctcggtctcccaaagtgctgggattacaggcgtgagccaccgcgcccagcccagacttcccttttctaacaatcagttttggacccttgtctccaggtcttagttttcctgggcatgcttgtgagatttgctttcgcccacgcaccatctgtagtaggggatgtccctgcactctaccactctgacagaggagtaaccctttccagaggaggagggagtcagttgcctagtgtgatggaaatttcccagctcctaaaatctgggcagtggatctcaaatttcagagtacctaagaatcacctggggcctttgttaaactttagattgtcagctcctgctgacccytaattctgattcagtaggtctaagagcccaggattgaattctaat

SEQ ID NO: 946655 - DNA, 621 bp, Homo sapiens
gtgttagccaggatggtcttgatctcctgacctcgtgatctgcccacctcggcctcccaaagtgctgggattataggcatgaagcaycacgcccagccctttaaataattctttataatggatatgtttatgatgggcacaatcagttttccactgttactttcattggcatttccttcactgctagtaaggctgagcataccttcactgcaatggcaattttgagttctttttttgtgaattgtcaattcacagcctttgctcattcttgtattgggttgtctttttaaaggtagttttgttaggaccacttctgtattgtagatactttttttttctgtagaggttcatttgattcaaaaacttatgtaaacattaaaaaggatagttgagaacaaacacagtatatagtgaactatttggactttatactgcttattaaatctctaatataagtacatgataaatgttatggactaaatgtctttgtcccccgaaaattcatatgtggaaacttaactttcagaagccccaggggttccagggatgttacccgaggggccagcaaatgagacagggctgagttcccatgtctgtgtctgcccctctactcttcataac

SEQ ID NO: 946656 - DNA, 575 bp, Homo sapiens
ctctttaataggaaataagacaataaaagaggaacrtaagaacaaaaaagacaccagcaatttagaaaacaaatagcaaaaatggcagacacaaatccaaccctatcaataataacattaaatatgaatacattagatactctaatcaaaaggcagaaattgtcagactgcatttaaaatttttaactatatacagtctacaagaggcacactttagattcaaagagacaaataaactaaaaagtttaaaaatggaaaaagatattccatgcaaacaataatcctaagagagctgaagtggctcattaaggatcaaaaatattaccagagcaaaaaaaagcattatatgaaaaggtcaattaatcaagaagatatagcaattctatacatacctaacaacaaagccccaatacacatgaagcaaaaattgacagaattaaagggagaaacagacaactcaacagtagtagttgatacattcaacatccactctcaataatgaataaacagctagacagaaaagtcagcaagagtatagagaattcaaacaccatcatcaaacaatttaagacatc

SEQ ID NO: 946657 - DNA, 532 bp, Homo sapiens
gcatagcttctgtgccagtgaaccttgcctgactggtggagaagtccagtgaggtgtggcctatacagccatgcacatgctccctccccatactgcagcttccccggggcccatggcaatgccctacatcactttgctggcacatgtctgcacagataggttttgctttccttgccctgccagcacactggagtgtagtctgcacccacccagcccccagccaccactgcagatggagctttggtgggcataaagccagcaagccctgcccctgccagcaccctgcccttatactaatactgcacagagaacagcggacacccccacaccctcagggatcactcctgcttgcagggcacagagaaggcacccaaacctgccccagccagcaccctgccccaagccaataccatatccagtacaaccacacacataatctccagcagggrccccccactccacccagctatgctgcctctgtcattgtggtgaacacccacagggaggtaggcacccctgcatctgctagcac

SEQ ID NO: 946658 - DNA, 605 bp, Homo sapiens
aagctctgaaccttcagacttgtcccaggttcgggcaatggcctawgcctttatattcctgtattgactagtgcagtgggctgaatgttcgtgtctctccaaaaattcatgctgaaatcctaacccccaaatgtgatggagatggggcctttgggaagtgattaggtcctgaggatgaaaccctcatgagtgggattaatgcctttataaaagggaccccagaaatctctcttgctctctttctggcacgtgaggataaaatgagaagatgaccaactgcaacccagagagaacctccaccagaactcaatggtgctggcaccctgaccctcaacttccagcctccagaactgtgggaaatgagtttctgttgttcttaggccacccagtccatggcactttgttgtagcagcccaaatggactaagacagccacttaccattgtaggctgcccttgggaaggtggagtgtccttcagtgaggcagctttcttcagggaaaaagaggaatttctggagagagataacagttgagggctctcagccggcaaaagtctcagcagcagaaggaatgaggagaaaaaaatgggcacagtattttgtaga

SEQ ID NO: 946659 - DNA, 668 bp, Homo sapiens
gaaccaattttaaaaatcacctgctttccattatggagtcagattctcccttttattaccatctcttttcttggactcaatgacagtctgttattggatttttaatctgacaaaactgatgtcaaaggaaaggaatgtattatttgaggcctcaaggttatgtcaattttgctggttctcagtgatccacactgtctgttgggttaggctggcgtggacgaggctctttgggggaatctcagatcagacttagggatgtggggatggagaataaggagattattccggactctctcccctctgcctttcttcacttctcactaagggatagagatctaagaacaaacagtcctaggagaaatgctgtatatgcaactctgcctcaacagcgggttcagaaaggaggccagcagggatccaaggatggttcctagaggagagaggacagaagactccccaaggtaggaaagtttcaggagctctgtaccttcgggtatacgctgccctctctctggactgcagtctttaccctcttctttggttgtcacattcctactcttgctttttcttgatgtcttcctcacacttgcccaggaagtgctgaacttcwccctcctctcctttcccatctccataatacacgtatcacactgtattagattttccat

SEQ ID NO: 946660 - DNA, 443 bp, Homo sapiens
tacctctacctctctctacactgggtcttggcttatttatttttgaccaacaaaggagcctcctctgggtagcatgacaggccttttgtagctttsggatcttaggcaggcaccagttaatcatcacataataacaggaagtgggtcctacggctgcctcatgtcgggctgtctcgttttcactcaactgggtgtggttacgacatggaagtgatgaccagaagctcccaccagagtgaggggtccaccctcttgatcccctgacacaaatacttcacccactttctctgtatgttggagtccaaggcttgacataccctttttattaaatatttcagttattttactgagtgttctctaccatcattttaggtggtttatagaggtgaacttgctacaacttcctatttcataatcatcacaatccatattaaaaaatattt

SEQ ID NO: 946661 - DNA, 568 bp, Homo sapiens
gcttacatttgccctctgtttttacacagtgtatactctttacattggagtctttaccattttaatcatggttatttaaattctgtcttataatttcaacgttttcatatctgagttggatcctgatgattgctttatttcttcagattgtatttttgtttcccatttggtatgctttgtaatcttttgttaaaagctgaaaatgttgtgtcaggtaatatggattgaggtaaacaagcctgtatgaggatctggctaggaatttacctgtgttatggcctaaatgtttctgttctcgccaaatgttgaatcctaatccctagtgcaatagtattaacagatggggcttttaggaagtgattaggtcttgaggacggagccctcatgaatgggattggtgcccttataaaagcggcccaatggagttcatttatcccttctgccatgtgaagacgcagtgaaaaggcaccatcttcaaagcaaaaatgrttaatacccaagctcttgccagatgctgaatggtgaactccagcctccagagctgtgaacgaaaaaatttccattgtgt

SEQ ID NO: 946662 - DNA, 384 bp, Homo sapiens
cataaccctgatggctcatcacctacccctcttctctccccccatctcctgataacaatcattrtcagagatgcggctctgtcaagcttgacaggtgtaaggacaagggtgcttgtccttggcttttgagatcttggaaccctgagaagaggttaggcctcccccacctgcccgcctcccacacactcttcccaggacacactgccacctcatctcccggggaagcccctcctgccctctgcactctgagctcccctgcacttgcttctgctgctcctgacaaatcctcaaaatcctacgagcagctcaaactgcacccgtctgtgagttcacagttctgtccatcagaagggcagcacgggctctctgctcacaaggtggaca

SEQ ID NO: 946663 - DNA, 617 bp, Homo sapiens
cacagctgggagacctgaagatggatcacatcacaggactctttgcagacattcaccagcaccagcctggagcccagtagccctgttgggtggcttgacccagaagggcaataacgatcactgcaatctggcttttaggaagccccgtttctagggaaagggggagagcaccacatcaaggaatcaccctgtgggacaaaagaatctgaacagcagaacttgagtttcagatcttttgactgaaacagtctacccaaatgaataagaagagaccaaaaaagtaattctggtaatatgacaaaacagggttctataacacctccagaagatcatcctagctctccagcaatggatccaaaccaagaagaaatctctgaattgccagataaagaattcagaaggttgattattaagctattcaaggaggaaccagagaaaggcgaaaaccaacataaataaattttttaaaaatacagaatattgaygaaaaagtctccaaagaaatagatatcataaagaaaagacaattacaacctctggaaatgaaagacacacttagagaaatgcaaaatacacgagaaagtttcaacaatagactcgaatgagtagaagaagga

SEQ ID NO: 946664 - DNA, 617 bp, Homo sapiens
cacagctgggagacctgaagatggatcacatcacaggactctttgcagacattcaccagcaccagcctggagcccagtagccctgttgggtggcttgacccagaagggcaataacgatcactgcaatctggcttttaggaagccccgtttctagggaaagggggagagcaccacatcaaggaatcaccctgtgggacaaaagaatctgaacagcagaacttgagtttcagatcttttgactgaaacagtctacccaaatgaataagaagagaccaaaaaagtaattctggtaatatgacaaaacagggttctataacacctccagaagatcatcctagctctccagcaatggatccaaaccaagaagaaatctctgaattgccagataaagaattcagaaggttgattattaagctattcaaggaggaaccagagaaaggcgaaaaccaacataaataaattttttaaaaatacagaatattgacgaaaaagtctccaaagaaayagatatcataaagaaaagacaattacaacctctggaaatgaaagacacacttagagaaatgcaaaatacacgagaaagtttcaacaatagactcgaatgagtagaagaagga

SEQ ID NO: 946665 - DNA, 655 bp, Homo sapiens
ttgaggagaacgtggcaaaggagaatgacaagtatacatgtacaattaaatagacattcatcttaaaatgtatttaatttaatttttttatttttttttaaagagatgaggtctatgttgcccaagttggtctcaaactcccgagcgcaagtgatcctcccacctcagcctcccaaagtgctaggattacaggcatgaaccaccaagcctggccttaaaatgtattttagcaagtacatactgtgtgtcaggcatcattacaggtgttggaccacagcagagaacaacagaaaagttcaaagaaccctgacaggtttatagtatttacccattgatagggcttatagtatttacccattgttgcaggttaggctctccaaggaaatgggctctgagattgaggtttagtgcacaggatgtttctctttttaaaatttcttttaaaattattattaattttttttggtagagacaaggcctcactatgttgcccaggttggtcttgaacttctgggcttaagctatcctcctgccttggccttccaaagtgctgggattataagcatgagccaccacaccsggcctgcagaatgtttcttaggcagtgctcttgggaatatctttggagaggaggggaaagccagattgggcagag

SEQ ID NO: 946666 - DNA, 457 bp, Homo sapiens
gtttcttctgtgggacataaaaatgttctaaaattgactgtgatgatgttatacaactatgtgaatatactaaaaaccactgttgaattgtgtacttttttgtttgtttgtcttctgagacagagtgtcactctgtcacccaggctggattgtagtggcacgatctcggctcactgcaacctccgactcccaggttcaagtgattctggtgcctcagcctcctgagtagctgggattacaggcatgcaccaccacgcccggctcattttgtatttttagtagagacgggatttcaccttgttggccaggctggtctcgaactcctgacctcaggtgatctgcccaccaaagtgctaggattataggcgtgaactaccacacccagcctgaactgtatacttaaaattggtgagtttatrtatatgaattctatctcaataaagctggccaaaaaaaa

SEQ ID NO: 946667 - DNA, 605 bp, Homo sapiens
tcaattccaaaaaagagaaattggccaaaagaaagaggtaataggccccatgcaaatctgaaacccagcagggcaggcattaaatcttaaagatccaacataatccttgactccatgttccatattctggtgtgaggagtgggatcccaaggccttgggcagccctgcccctgtggcttctctgggtgcaacccacatgctgctctctggggttggagttgagtgcctgccagtttttataatcatggatcttccagtggatctaacattctgggatctggagggcaggagccccttcccacagatccactaggcagttccccagtggggactctgtgtgggggttccaaccccacatttcttcttggcattgccttagtagagtttctctgtgggggctctgcccctgcagcagacttctgcctgggcacacagacttatctatacatcctctgaaatctaggtggaagctgccaagcttccttcacacttgcactctgagcatctgcagatttaacaccacttgaaaactgccaaggctcatggcttgsaccctccagagctgtgttctaagctgtatctggggccctagttgctgagggtgg

SEQ ID NO: 946668 - DNA, 611 bp, Homo sapiens
aggaggctgaggtaggaggattgcttgagcctgggaggtccaggctgcagtgagcagtgattgcaccgccgtactcagattaagtgacagggtgagactccrtttcaaaagctaaaccaaaaaaagaaaaaaactcaacttcaagatttttatacttctttctctttgttttctatctcattttattttatatttgcatttacttttataattccactctaatcactttgagtttatttgcttgtgctttttccagcttcttaagttgaacacttagttcattttttctcatctcatttacttcttttccaatatcatcattgaaggctataaaattcctcctaagaagcaatttaatgccatcccacattgtgttaaatagcaattttattatcattcagttataagcatttaaaaatttttctttattaattcatctttaattcataagtgattcagaggtttgtttttaaattataaaaatttgtagattttatcatagagtccagggagtcaaattctaactcttaaatttcccctgtcacacctatccctatcatcacaaattgaatccagcatctttcccaccattgccctagccatcttctagg

SEQ ID NO: 946669 - DNA, 463 bp, Homo sapiens
aaaatgtgacttttattatgattggcttggtctgactagattataaggtacatggtggtaaaatatgaggctgaaaaggtgagtgaccagaggccaggtcacaaaaggtcttggagggtatgctagagaatttggaatttctccaaagagttggagatgcactgaaggattttaagcaaatattaatccctcatgttaaatacagtatagagcaaacagtttactacttaccctcacacatgcaatgattgacataaagctggaatatatttagtggatttttctgttttctccagtgtgacaatgcatacactgagtacaatctttagactctgcctttaattaacagcatatgtctctgggaagaaataaagtttcagttctatatgytctccccagacaatgacactgtttctgaactttgtacactgacggctgctctaagatagcataagcagaagac

SEQ ID NO: 946670 - DNA, 610 bp, Homo sapiens
atggtaatagagcttgcactgaatctatagattgctttgagtagtgtagacattttaacaagattgattcttctaatacataaacataggatgcctttacatttatttgtatctcctttaatttctttcattggtgtttaatggctttcagtatataagcctttcacctccttggttaagtttatttcagagtattacattatttttgatgttattgtaaatgagattgttttcttaattttctttttgaataattcattgtttatctatagaaatgcagttgatttttgttagtgtatagaaatatgtgttgattttgtattctacaactgtgccaaattgtttatcgattctaataggttgtgtgtgtgtatgtgtttgtctgtgtaatctttaggtttttctacatataagattatgtcatctgcaaacagttaattttatgctgtctttttcaattagggtatgttttatttctgtttcttgcttaatttctctggctagaacttctaatactatggtaaatakaagtggtgagagtgagcatccttgtcttgttcctgatcttagaggaaaatctttcagtttttcaccattcactataatgtta

SEQ ID NO: 946671 - DNA, 456 bp, Homo sapiens
gaaagctctctctgattaaatatgtccagcaatgtatttaaccaaacagttaagtcttgcatggattattttcatcaagattaagtccataatgaaataatcrttgccatcaaaactgctacctctgtgtaaacaggcataattgagcatttctcaaaatattaatatattctagaaccaagagggttgggggagatgggttatcaaggtcttggctctctctcctaatataacagggtactgacattaattgagaggaaaacacctaatttgccctcctgcaatctccaactgtggagaatgtcaggtaaatgttttaaatgccattctgaacccattctgaacttccttttactaattcagtcttttattcccttatcttgaccttatatcaggaaattatccaactctaacatttacacgtcagagagaacaggcaccacttaaccttatcag

SEQ ID NO: 946672 - DNA, 722 bp, Homo sapiens
gtcagcactaacttcctgagagaagcttctggaaaccataactttggttttcattaaaattttttcttatgcmtcattaattcaactttcatcttcacccttgtctatatctcatagagcccctaacttactttctgaaaccttgacaccacttttaggctataaacccaagtccctgtggtcactcccatttttctacattggtaagagtttataagccagaaaagagaaaagaaatccatgtttaattacaaaggaaagctatatgcagaatgtgacaaaatagtctctattaatgaagctcttagtggagaacagaggcattaaacttacagagtgcaggcctctgatgataggacacaaaatgaaggataggcatgaggtagatgaggatttttacatcattacccttcttcacagatcatccatattttattttaacattttagcatttctaaaactaagaagttccaactagtactagggtaatgggagaattatattgccatcagcagaatctatcctcgctttctattaatacatgcatgcacattcctctcctagcagtgcacctggaagtctgaagctagttcattgacccctgatgctgataaagaaaacttgctgtgccacatttcagctagctttaagtctcctgagactggagaggcaaagagagggtaggcagtccactgtaagccattacaataaagcagatgaaa

SEQ ID NO: 946673 - DNA, 722 bp, Homo sapiens
gtcagcactaacttcctgagagaagcttctggaaaccataactttggttttcattaaaattttttcttatgcctcattaattcaactttcatcttcacccttgtctatatmtcatagagcccctaacttactttctgaaaccttgacaccacttttaggctataaacccaagtccctgtggtcactcccatttttctacattggtaagagtttataagccagaaaagagaaaagaaatccatgtttaattacaaaggaaagctatatgcagaatgtgacaaaatagtctctattaatgaagctcttagtggagaacagaggcattaaacttacagagtgcaggcctctgatgataggacacaaaatgaaggataggcatgaggtagatgaggatttttacatcattacccttcttcacagatcatccatattttattttaacattttagcatttctaaaactaagaagttccaactagtactagggtaatgggagaattatattgccatcagcagaatctatcctcgctttctattaatacatgcatgcacattcctctcctagcagtgcacctggaagtctgaagctagttcattgacccctgatgctgataaagaaaacttgctgtgccacatttcagctagctttaagtctcctgagactggagaggcaaagagagggtaggcagtccactgtaagccattacaataaagcagatgaaa

SEQ ID NO: 946674 - DNA, 588 bp, Homo sapiens
aatccagttctctatgtcttcattgggcatgatttctgggagcacttgctccactccctgctagctgccttagaacgggcacttagtgaggagccagatagtgcctgaatcccagctcccaggcagatgagtcctttataacatgacccaatttcctactccattttcccaccactcaatcctcttcccaaacagctctaccataatccaacatccaacagaatttaagagaataaaccacaacttttaagtgagctctatgtgctaggtcatgttttagaatacaaccttaagtgcctggaagatggaggcaagaaacaaacaaggtctcattctttagaggaagacagttcaccaagactcaaacagaaaaaaagatagttatcttgtgacaaaacaagtcataaaattgggtcaggacctgcagcaatgactttatgctagaatccagagcactagcaggaaactgcttaaattttacttaatcaaagtcaagtttggacatacrtgtcaggtaaaacctagcagagatgagctaccttgattttaaaacttcaagggatagctcaatgtcatcaagatcctttt

SEQ ID NO: 946675 - DNA, 444 bp, Homo sapiens
ttagagcagccgtcagtgtacaaagttcagaaacagtgtcattgtctggggagarcatatagaactgaaactttatttcttcccagagacatatgctgttaattaaaggcagagtctaaagattgtactcagtgtatgcattgtcacactggagaaaacagaaaaatccactaaatatattccagctttatgtcaatcattgcatgtgtgagggtaagtagtaaactgtttgctctatactgtatttaacatgagggattaatatttgcttaaaatccttcagtgcatctccaactctttggagaaattccaaattctctagcataccctccaagaccttttgtgacctggcctctggtcactcaccttttcagcctcatattttaccaccatgtaccttataatctagtcagaccaagccaatcataataaaagtcacatttt

SEQ ID NO: 946676 - DNA, 611 bp, Homo sapiens
gctaacattatagtgaatggtgaaaaactgaaagattttcctctaagatcaggaacaagacaaggatgctcactctcaccacttmtatttaccatagtattagaagttctagccagagaaattaagcaagaaacagaaataaaacataccctaattgaaaaagacagcataaaattaactgtttgcagatgacataatcttatatgtagaaaaacctaaagattacacagacaaacacatacacacacacaacctattagaatcgataaacaatttggcacagttgtagaatacaaaatcaacacatatttctatacactaacaaaaatcaactgcatttctatagataaacaatgaattattcaaaaagaaaattaagaaaacaatctcatttacaataacatcaaaaataatgtaatactctgaaataaacttaaccaaggaggtgaaaggcttatatactgaaagccattaaacaccaatgaaagaaattaaaggagatacaaataaatgtaaaggcatcctatgtttatgtattagaagaatcaatcttgttaaaatgtctacactactcaaagcaatctatagattcagtgcaagctctattacca

SEQ ID NO: 946677 - DNA, 632 bp, Homo sapiens
atgcacctgtagccctagctacctgggaggctgaggcaggagaatcagttgaatccgggaggcagatgctgcagtgagccgagatcatgccactgcactccagcctgggctacagagtgagactccaactcaaaaaaaaaaaaaaagattgctttctagccaaggatctgatctgctgttttaataatttcaaacattctgagcaagactgctgctccttttaaaagactgctgtaacttcaggcacttgtgacaaaacctgggtgaattattagacaatttcacgctggtttgcagagtgattacaacaagtggccttgaatgatagcatatgttataaagagatggagcctttcagttataaaagatgtatcaatcaggggaaagcaaatacaaattaaagtttgatgagcaattggatattaattggtactaactctgctttttatgtcactttgatatggagtggatcataaacatggtaagcgatactaataatgtatattcacttcaatgcaacttaatggctccatttattaaagaaaccaatgctgggattgagttgtgagtgcactagtgagcacttttcctgttgtataccttyatctaactcttgccaggcaggctctccg

SEQ ID NO: 946678 - DNA, 536 bp, Homo sapiens
aacacaagaaaaactgagtttggagtttgaacttaaccaaagtaatgccttgctgaaacaaaaataataacactcttcaaaggaagataactgaatccagaggctctacaaggtactgttcaaaacctccagtataggccaggagtggtggcttatgcctgtaatcccagcactttgggaggccaaggcaggcagatcatgaggtcaggagatcgagaccatcctggctaacacagtgaaaccccgtctctactaaaaatagaagaagttagtcaggcatggttttgggcacctgtagtcccagctactcgggaggctgaggcaggagaatggcatgaacccaggaggtggagcttgcagtgagccaagatcgcgccactgtactccagcctgggtgacagagcaagactccrtctcaaaaaaaaaaccctccagtataaaatgaagcattactaggtatacaaagaaatgggaaagtgtgagttgtaatcaagagaagaaaacaggcaatagaaaccatccccaagacaattcaa

SEQ ID NO: 946679 - DNA, 743 bp, Homo sapiens
atattttaatgctgtgtcatctcttagaaagatgggttgaaaaggataaactggaagcttctattcatttctcttttatttttaagaatgttgtattttggcagggtgtggtggctcacgcctgtaatcccagcactttgggaggccgaggcgggcggatcacgaggtcaggagatcgaaaccatcctggctaatacggtgaaaccccgtttctactaaaaatacaaaaaattagccaggcgtggtagtgggtgcctgtagtcccagctactcgggaggctgaggcgggagaatggcatgaacccgggaggcagagcttgcagcgagctgagatcacactactgcactccagcctgggcaacagagtgagacattgtctcgggaaaaaaaaaaaaaaaaaaaaaaaaaaaagaatgttgtattttaggagaacattgatccgaaaggtgatttgcatgtcttttctgcttgttaaactcagcatagtttgaggtggggaaatcccaatcatctaattggtgtcaaattttgtttagtagtaatttctgcattcccttttctttcctttcctcctctcctcttttttttttctcatcagtttaacatttgccatagtttatgtttagcaacctgtgagatayggctagtgtcactcacttttggtaacacggagtcaccaaggtacagaataactaagtggggtatgcagggtctggccagaaatacaatcttttgattgctag

SEQ ID NO: 946680 - DNA, 558 bp, Homo sapiens
taaggttagaaggatgtttagatttcatcccatttatatttccttatgatttggtaattttatgtgcatcttggtaaagaattattctgggggaaatatatatatatatatatayacacacacacacacacacacacacacacatatactatactcatataagttagataatcttatataaattttagcaataaagtgtagaaatgaagccattggaaaggatcagaaaattcacatgtaataagctatatttgaagatggtggtcaacattttaaaacctggatactttgagacactattaatcccagatgttaaagattgatatggagccatggcctttctaaaaatggtagtatcatgtttgtgatcatacccatacaatgcattgctattccgctaacattcaccctactcgtctttgaaatgagagtcactgaagctggctctgtgatagaacaagcagctaaataccaaatgaggccctgaaatcatcctcttacaattttcatgcagaagatatacagctcccttttctgggcaacaaagcccaaatattt

SEQ ID NO: 946681 - DNA, 552 bp, Homo sapiens
agaccttggcaatgaccttgagcagtaggatataaatcccacaagcttagcgttccaataatggaacactaggcataactgtgttaagggttgaaagtagtggtaatgtatttcttttattccctttkcattaactgggatgcttatagagagatacttccccttatcaccattggtcacttagaggtacaaattgtataggaagggaagggcttagcagttttcagaatagtgagttggtttgagtattattcataggtttaaatatattttctatgtttttaatctattgcagtttttatccttattgatgtttaaaattgtctcatctttggtcaggagaagcctcttgcgctaactttttaggtttttttttgttaaaatcctctgtagcttccctgctttctgctgtgacaagatgttctaggcttatcttgtatatatttcctgtctcagacctagactgagccatttctgcagggggctcttggcacttttgtgggaagtggatagtttgcaactgaattagtcattatttttagacttctttgg

SEQ ID NO: 946682 - DNA, 472 bp, Homo sapiens
ccagtgcatttggtccctggtwggcagggctgcctgcctgcctgagtttcccacatgggaagatgcagcaagacctccccaagcttttggaagaggcaaggacagcagctgggccatctggcactctgggcagggggtggggtccagaaaggggtggcagaccctgctcagaacccagtggctacctttctcgtctcatttgagctcactgagctcctctctaaggtactgtaaatgttaaacaaattcagactctgttaggttggacaacattaaagtatcctggatagatgcttgaaacgcagcaagggacagataataagagtaatactaccatttactgttcactgtgtacatgcatgaattttattatataatcctttaaaattaattcgttatttaatcccatttaattgtttaatccttacaactctctaaaagatatgtgctgttgttatccccattttatagc

SEQ ID NO: 946683 - DNA, 738 bp, Homo sapiens
ctccctctgcctcctccatgccgttgtgtgagcatttgcgcaagttgcctccagttttctcatgtggttcggatatatagtgtcttctactgagtctagctatattttrtcttggaggaggaagaaaaataaatccatattagactccaaaaaatatagcttggcttcaatctcctctgcccaaattttggggataatggtaaattccacactcaccagccacattttttttttctttagcacaccctggtttaaagaaaaaaaaaaagggaacagtaacctccaaagtagggaggtttaggttggacagagcaacctacaatcttaacattaagtaatttggaaaattactttaaaaatctacggtggggctgggcacagtggctcatgcctcccagcacgtttgggaggccgaggtgggcagaccacctgaggccaggagttcaagaccagcccagccaacaagacgaaaccccgtcgctactgaaaatacaaatattagccaggcgtggtggcacatgcctgtaatcccagctacttgggaggctgaggcaagagaatcccttgaacccaggaggcagatgttgcagtggtccgagatcgtgcatcattgcatttcagcctgggtgacagagaaaggctctatctcaacaacacaacaacaaaaattatggtgaagggtactctttaaatataatcctttgggttacacttaaacactctgcaacaacagaaaca

SEQ ID NO: 946684 - DNA, 705 bp, Homo sapiens
atacaaaatgaataatttctgaagatctgatgtacagcaatgtgactatagttaacattattgtattgtagacttgaaatttgctaaaagggcagatattaagtgttcttgccatatatacacagaaaaagaggcaactatgtgaggtgatatatatgttaatttgactgtggctaatattttatgacacatacatcaaatcaagttgtataccttaaatatacacaattttaactgtcaaatatacaataaaactagaaaaagaatagggcccctttataaccttttaagtggagactggagcacagaagatgcccttggatggggaaatcaccatcagtaaatacagttcatgctgagggtgatgggaagatacaggctgtggggtcaggccgcctgcctctgcctcttattggctgtaggaccttaggcacttatgttaaaagactgagctttattcactcacccataaaatggaaatattacaattacctacttaataagggtgctatgagagtgaaagggatgtacaaatgcttagcacagtgcctggtgcagaatccccacttaataaatgctggctattatcakaatcccgttaatacattttattaataacaaattataattgcaataacaacttctccagagctaagcccaaattcgaagatgagttagtgctccaagtggccccacttaaccatg

SEQ ID NO: 946685 - DNA, 705 bp, Homo sapiens
atacaaaatgaataatttctgaagatctgatgtacagcaatgtgactatagttaacattattgtattgtagacttgaaatttgctaaaagggcagatattaagtgttcttgccatatatacacagaaaaagaggcaactatgtgaggtgatatatatgttaatttgactgtggctaatattttatgacacatacatcaaatcaagttgtataccttaaatatacacaattttaactgtcaaatatacaataaaactagaaaaagaatagggcccctttataaccttttaagtggagactggagcacagaagatgcccttggatggggaaatcaccatcagtaaatacagttcatgctgagggtgatgggaagatacaggctgtggggtcaggccgcctgcctctgcctcttattggctgtaggaccttaggcacttatgttaaaagactgagctttattcactcacccataaaatggaaatattacaattacctacttaataagggtgctatgagagtgaaagggatgtacaaatgcttagcacagtgcctggtgcagaatccccacttaataaatgctggctattatcataatcccgktaatacattttattaataacaaattataattgcaataacaacttctccagagctaagcccaaattcgaagatgagttagtgctccaagtggccccacttaaccatg

SEQ ID NO: 946686 - DNA, 705 bp, Homo sapiens
atacaaaatgaataatttctgaagatctgatgtacagcaatgtgactatagttaacattattgtattgtagacttgaaatttgctaaaagggcagatattaagtgttcttgccatatatacacagaaaaagaggcaactatgtgaggtgatatatatgttaatttgactgtggctaatattttatgacacatacatcaaatcaagttgtataccttaaatatacacaattttaactgtcaaatatacaataaaactagaaaaagaatagggcccctttataaccttttaagtggagactggagcacagaagatgcccttggatggggaaatcaccatcagtaaatacagttcatgctgagggtgatgggaagatacaggctgtggggtcaggccgcctgcctctgcctcttattggctgtaggaccttaggcacttatgttaaaagactgagctttattcactcacccataaaatggaaatattacaattacctacttaataagggtgctatgagagtgaaagggatgtacaaatgcttagcacagtgcctggtgcagaatccccacttaataaatgctggctattatcataatcccgttaatacaktttattaataacaaattataattgcaataacaacttctccagagctaagcccaaattcgaagatgagttagtgctccaagtggccccacttaaccatg

SEQ ID NO: 946687 - DNA, 482 bp, Homo sapiens
cccgctgcagaactgattgctcactagtggtggagagaaacccactcccacacatttggtcacagaagccttcttctgtgttcatgactgctgttgtactggtttgagagcagaggaaaaacatggtttgagagtttttcccaaaacaagcagtatctattaaagctaaatatatgcctacccccattacccagtaattctgttgggttctcatacccaagagaaacaagtgctcatgtctaccttagaattgctgtccacagtagcagacaaaaattagaagcaactcacgtattcatcaataacagccaagtactcagcaacccaagcatttcatcaaccaagtaaaacaaacaaactgaatatttacaatggaataatgcatagaaaaaaaaaaactacagcyacacataataaaacggatgaattttacagacataataataatgagtgggggaacaaaaccacaagagtatatactc

SEQ ID NO: 946688 - DNA, 765 bp, Homo sapiens
catactcaagcctttgggatagacccctaaacttccctcaaattattttttattttttattttttgagacggagtcttgctcagttgcccaggctagagtgcagtggcgtgatctcggctcactgcaagctctgcctcctgggttcacgccattctcctgtctcagcctcctgagtagctgggactacaggtgcccaccaccatgtccggctatttttttttttttgtattttttgtgaagatggggtttcaccatgttagccaggatggtctcaatctcctgacctagtgatccacccgcctcggcctcccaaagtgctgggattataggcgtgagccaccatgcccggccaactaccctcaaattctgagcctcaccaggcaagagtgaattaggcagaagcaacttggatagaagccgcccagctattccctaccttgggaatcctagtaggatggaaggtaagagtagccctgagggaggttcagcctgtcctgcagagacttgagctagccctctttgggagccatcactccattctgtttgtcagccttcaaggcttgtgtatttctgattaagtgctttgtgtcctcattgttcctgcttaacttagagaatttagtaattaaagaagactccttaagagttcacccagctcctccgtgtcccatacatcacaggcctggcttcctctgagcatgtagttctatcacacctatcctggctgaggaaggcttacgggracccagagcagggttggaagg

SEQ ID NO: 946689 - DNA, 541 bp, Homo sapiens
aatcctttgcttcccctttcatcaaaacttctcaagagttgtctgtgcttcctgtcttcaatttatcttctgtcagttttctctttttaaaaaaattttgttttcaaaaaatagagatcaggtcttgctctgtcgcccagtctggtcttgaactcctgggctcagtaatcctcctgcctcggcttcccaaagtgttgggattacaggtgtgcgccaccgcatccagtctctcaatctctcttgaacccaattcagtcaagttccttccaaactgctctcatcctgtttactgataacctccacttggctaaagccaatggttaataatcagtcctcatcattctaaacccataagcagcatttgaccaatggatgcctcctttctctttggtaaactttttcattttgttttcaggataacacattctctttaktttcttctgtctcactgcttaatccttcacagtctccttctctggttcctcctcttctctccaagctcttaactgcagtgtcctgggctcagtccctgcacctcttc

SEQ ID NO: 946690 - DNA, 828 bp, Homo sapiens
acctcctgggctcaagcagtactctcacttcagccttccaagtagctgggactacaggtgcatgtcaccacgcctggctaattaaagaaatttttttgtagmggcaaggtctcactatgttgcccaggctgggctcgaactcctgggctcaagtgatcctcctgccttggcctcccaaagtgctgggattacaggcgtgagccacccaccccaacctccctagcacacatacacccattaagactttttaaaaagagcagttttagattcacagcaaaattgagagaaaagcacagagattttccatatacccctgggtctgacacatgcatagcctccctcattatcgacaacccccaccagagtagtacatttgttacaattgacaaacctacactgacacatcattatcattcaaagttcatagttttatgttaggattcactctttgtatggtatatcctttaggtttggacaaatgtataatgacatgtacccaccattatatcatcatacagactattttcactgccctaaaaggcttcggtgctctgtctattcatccctccctccccgcaacccttagcaagcaccaatttttaaactgtcaatatagttttgtcttctccataatgtcatatagttggaattacacagtatgtattattttaagattggcttctttcacttagtaatatggatctaagttttttccatgtcttttgatggcttgatagttcatttgtttttagcactgaataatattccattgtctggatataccacagtttatacattcacctactaaaggacatcttagttgccccc

SEQ ID NO: 946691 - DNA, 435 bp, Homo sapiens
aaactgtgcctctctttcattatcattttgttaaaagtcccttttattattctgaacctcagcttcctcatctgtaagagaggaatgacaggtttttttgtttttgtttttgagacagaggctccctctgtcacccaggctggagtgcagtggcggcgatcactgctcactgcagcctcaacctccttggcccgagcaattctcccatctcagcttcctgagtatctgggactacaggcacgtaccactatgcccggctaattttttttttatttttagtagagacaggatctgactatgttgctcaggctggtcttgaactcctgtgctcaagcaatccttccgcctcrgcctcctaaagtgctgggattacaggcgtgagggaatgacagtttttattgggcagtttcgtgagaaaatgaagtggaaagggaa

SEQ ID NO: 946692 - DNA, 672 bp, Homo sapiens
agtgtccttttcaaggtgcattcagtgctgtgtttcttacattttgtgcttttgttgaygattttgctgtgtataacaccagtgctgaagtactgtctagttttcccaagtaaatgtaagaaggatgtgatggggctgggcatggtggctcacacctgtaatcccagcactttgggagaccaaggcggatgcatcacgaggtcaggagttcaacaccagcctggccaacatggtgaaaccccgtctctactaaaaatacaaaaattaactgggcatggtggcacatgcctgtaatcccagctactcgggaggctgaggcaggagaattgcttgaaacctggaggcataggttacagtgagccgagattgcacaatagcactccagcctgagcgacaagagtgagactatgtcttgaaaaaaaaaaagatataatgtgccttacagaggaaatatgtgcattggaaaagtttcattcaggcatgagctatagtcctgttggccgttcttagttcactgttaatggaccagcaatatatgtgaaatacatgttaaaattaaacagaagcagacacacgggcaagattatatattgatctgttgatgaaaatattgtgaccagaggcttgcaggaacctaaccttgcatgtcccctaggaacaatggtttggtgt

SEQ ID NO: 946693 - DNA, 478 bp, Homo sapiens
atgtctgctgttagcctgatgagattccctttgtagatgatctgccccttctccctagctccctttaatattttttctttcatttcaaccttggagaatctgaygactatgtgtcttagggatggtcatcttgtatagtatctcataggggttatctgcatttcctgaatttgaatgttggcctctctggtgaggttagggaagttttcaaggatgatatcctgaaatatgtttttcaaattgcttgatttctcttcttccctttcagggacatcaatgagtcacagatttggtctatttacataatctcatatttctccaaggttttgttcattcttctttatttgttcattcttctttaattttttctctttatctttgtctgacggagttattttggagaactgatcttcaagctctgagattctctcctcagcttggtcaattctgctgttaatacttgcaattatattatgaa

SEQ ID NO: 946694 - DNA, 612 bp, Homo sapiens
ggaacatgcagagaaggagggatactgggattgggatttgtgttagtctgttttgcattactataaaagaatacctaaggctgagtagtttgtaaagaagagaggtttatttagctcacagttctgcggctgttcaggaagcacggtgtcagcatccgctctgcttctggtgaggcctcagggagcttacagttatggtggaatgcaaagagggagctggcatatcatatggcaagagaggaagtgagagagaggggagaggccccaggctcctttaaacaattagctgtcacgtaaactaatagagcaagaactcactcatcaccaagaggatggctcaagccattcatgagggttccactcccatgacccaaacagctctcatcaggtcccacttccaacattggggatcaaatttcaacatgagatttggagggacaaatatgcaaaccatatcaggtgttgatggtgaaggggtgctgtgtttctttttggggtattgaaaatattccagaatttattgtggtgatgggagcacaactctgtaagtstataaaacctgttgaattagacaccttaaaagagtcacttgtagagtatgtgaactatacc

SEQ ID NO: 946695 - DNA, 569 bp, Homo sapiens
tttatattcagccaaacttttatttccagcaagtgtaaagatgacagacaaaagttttgaacgtgtaaaacttgcagaatagaggaagcacttctaaactggcagagtaagaacctgacaaaatctgttgtatataaaagcaatttaaaaactggccccaaatggccaaaattaaccttttcagaactttggaaattaaccaaagacttgcaacaattagagaagcatttattcaaaaaaaagggctaaactttgataagaatagtacattttgtggtgttttaacttgctccattcctgttttcctctctccaactatgtggtagctttgaaatctgggagcctcacagtcatggtggctgtgaaaaccaaaatcctggcagccactgaacagggctgggtttggatctcctccaaaagccttacacggagagaattaccactgtttgatctgtcagctcccttaaaaaaaattagaaagattttctttatttgacctgactcagagttcactccatgagaaaagctcartacccaaaccatttgttgaaaacagtcagtggcaattg

SEQ ID NO: 946696 - DNA, 608 bp, Homo sapiens
gccaagaatctgcacagctctgtgcttgggacccaaggctctggtggtgtggctcatgrgggggatctcgtgatactcaggatgcacagatccgtgtacagagtgtggtttcctgggtggggtagcaaaatcactcaccacctcctctggctaggggtgagccctgtgcagttccctggtaggctgtcactccatcctgcttttccttactctccatgggtcacaccaactgcctagtcagtcccagtgagagaacctggatacctcagttgctggtgcacaattcacttgccatttaccttcttctctgtgggagcctcccacagctatttctagttggccatcttggcccctctccaagttattttgcccttattttttgtttttatttttgcgttccataatttccttgccttttgtggttttaattaagcactgtatattatttcattttctgtcttttcttaccatataaattacacatttttaaaacttgttttagtggttgccctagaatttgcactatacatttacaactaattcaagttcattaacaaataacaatgtgctacttcatggctagtacaggtaccttgtagtaacaaaat

SEQ ID NO: 946697 - DNA, 604 bp, Homo sapiens
tgggaaagtttggaacttcctagggacttggagggctcagaagaagacaggaagatgtgggaaagtttggagcttcctagaaatttgttgaattgctttgactaaaatgttgatagtgatatggacaataaagtccaggctgaggtggactcaaatggagatgaggaacctcttgggaactggagtaaaggtcactcttgttatgcaaagagactggcagcattttgcccctgccctagagatatgtggaaccttgaacttgagagagatgatttagggtatctggcagaagaaatttctaagcagcaaagtgttcaagagaaagcagagcataaaattttggaaaatttgcagcctgctgacatgatagaaaagaaaaccccattttctggggagacattcaagcctgctgtagaaatttgcataagtaatgagaagccaaatgttaatcaccaagacaatgtggaaaatgtctccaaggcaagtcagagaccttcacagcagcccctcccatcacaggcctggaggccttggagggaaaaatggtttcataggcctgacccagggctcycctgctgtgtgcagtctggggtatatggtgcct

SEQ ID NO: 946698 - DNA, 731 bp, Homo sapiens
gactttatttgccttttttttttttyccccctactagggcatttctcagaagctctggttctgaagccataaaaacacctggtccctaggagaactttttttactaaaggcagatttcaagaagggtgcggaggataaggttagcagccacccacgtgcagccctgcactctggcccccaatcccagcccagaatcctctctgggagattcacaatggactcaggtggacgataaaggcctccagtcgtgactgcatttgttaggttcttccccacttccccgtgacttggttaataactccatgaagggcacccatcagcagcaagtctcagaactggggattgatcttctaaatagagacagcaaaagtgctgctcagcagaggggtggatagagaggtgggagcacctgccttcacatgactcacaaatgaaatgaacaccccattttcttggcccaaaaatatatttcaaaataagggagcaggctttcaacacagtaatcttgcttgcgagatgtctagaaaccaaggaataaattgtccaccactcagcagtgcattattgtaggtatagctatttatcaggacaaattcactcaggtcagggagtatcacactattttctgtttccaaccataggaggggtatctttttcatgtttagtgtagttgtttaaaagccctaggtttctggattgctctcctcagaactggagggcaataagagacc

SEQ ID NO: 946699 - DNA, 603 bp, Homo sapiens
tttacctattctgaatagttcatataaattgaatcatataatgtgtggtcttttgtgcctggcttctttcactcaggatagtgttttctttttcttttatttatttacttatttcattgcttttttttttttttttttttgagatggagtcttgccctgtcacccagactggagtgcactggtgcaatctcagttcactgcagcctccgccacctgggttccagtgattctcctgcctcagcctcctgagtagctgggattacaggcatgagtcaccacatctggctaatttttgtatttttagtaagatgggatttcaccatgttgtctaggctggtctcgaactcctgacctcaggtgatccacccacttcggccttccaaagtgctgggattacagacgtgagtcaccacgcctggcctttcttgctctttttttcttcccccaaatcagaggtcaagcacagagttttcamggttcacctatgttgtagcatacattagtattttgtttgttttagagtcaggatttcattctgttgctcaggctggagtcagaggcaggatcatagctcattgtggcctgaaactcctggactcaagt

SEQ ID NO: 946700 - DNA, 603 bp, Homo sapiens
tttacctattctgaatagttcatataaattgaatcatataatgtgtggtcttttgtgcctggcttctttcactcaggatagtgttttctttttcttttatttatttacttatttcattgcttttttttttttttttttttgagatggagtcttgccctgtcacccagactggagtgcactggtgcaatctcagttcactgcagcctccgccacctgggttccagtgattctcctgcctcagcctcctgagtagctgggattacaggcatgagtcaccacatctggctaatttttgtatttttagtaagatgggatttcaccatgttgtctaggctggtctcgaactcctgacctcaggtgatccacccacttcggccttccaaagtgctgggattacagacgtgagtcaccacgcctggcctttcttgctctttttttcttcccccaaatcagaggtcaagcacagagttttcaaggttcacctatgttgtagcatacattagtattttgtttgttttagagtcaggatttcattctgttgcycaggctggagtcagaggcaggatcatagctcattgtggcctgaaactcctggactcaagt

SEQ ID NO: 946701 - DNA, 603 bp, Homo sapiens
tttacctattctgaatagttcatataaattgaatcatataatgtgtggtcttttgtgcctggcttctttcactcaggatagtgttttctttttcttttatttatttacttatttcattgcttttttttttttttttttttgagatggagtcttgccctgtcacccagactggagtgcactggtgcaatctcagttcactgcagcctccgccacctgggttccagtgattctcctgcctcagcctcctgagtagctgggattacaggcatgagtcaccacatctggctaatttttgtatttttagtaagatgggatttcaccatgttgtctaggctggtctcgaactcctgacctcaggtgatccacccacttcggccttccaaagtgctgggattacagacgtgagtcaccacgcctggcctttcttgctctttttttcttcccccaaatcagaggtcaagcacagagttttcaaggttcacctatgttgtagcatacattagtattttgtttgttttagagtcaggatttcattctgttgctcaggctggagtcagaggcaggatcatagctcaytgtggcctgaaactcctggactcaagt

SEQ ID NO: 946702 - DNA, 796 bp, Homo sapiens
ctttctctgtcgcccaggctggagggaagtggcatgacctcagctcactgaaacctactccttccgggttcaagcgattctcacctctgcctttggagtagctgggactacagacattcaccatcacacccagccaatttatgtatttttagtagagatggggtttccccattttggccaggcttatcttgaactcctgacctcaagtgatccacccgcctcggcctcccaaagtgctgggattacagacgtgagccaccgcgccaggccccataaattttttcttttccttctttcttttttttttgagacagagtctcgctctgttgccaggctggaatgcagtagcacgatcttgtcttactgcaacttccgcctcccaggttcaagcgaattctcctgcctcagcctcctaggtagctgggactacaggcccccgccgctatgtttggctaatttttgtgttttagtagagacagggtttcaccatgttggccaggatggtctcgatctcttgactttgtgatccacccgcctcggcctcccaaagtgctaggattacaggcatgagccaccacacctggccacccgtccccataaatttttaataagagaaaacagaaactgtgaaccccacagaccaaagctcttcccattcatgaacccacaccccgagtcagggttcccccccaaagatcctcctggrgtccccgcacaatctaggagagacgtggcactgtgggtgcagggctgccctgagaaggtttcaggccagggcacagtcaccgcgcaggga

SEQ ID NO: 946703 - DNA, 818 bp, Homo sapiens
gcacagccctgcttacctgagcccccctgacgagtgggggcatgacgacctgtgagctcgcctgtggccccagcttcgaggacgcctgctgcccacctcggaccaggggcgggggtatgacactgccgggcatccgagctgaagaggtctgccaacgataccaagacccagatttacatggaccggacccccccacactttttttaaagcaagcagttttgctgcttttatgaaagtacatactagtttttttttttttttttttttaagtagcagagaagttaaagaaaattatggatgggcacagtggcacatgcctgtaatcccagcactttgtgaggccgaggtaggcagatcatgaggtcagaagtttgagaccagcctggccaacgtggtgaaaccccatctctactaaaaatacaaaaattagccaggcgtggtggcacgtgcctgtagtcccagctactcagaaggctgaggcaggagaattgcttgaacctgggaggcggaggttgcagtgacccaagatcgcgccactgcactccagcctgggcgacagagcaagactccatctcaaaaagaaaaaaagaaaaaaagaaaaaaaagctggctgggtgtggtggctcacgcctgtaattccaacacattgggaggccaaggcgggtggatatcttgagcccaggggtttgagaacagcctgggtaacagtgaaacctcatctctacaaaaaatggaaaaattacccagrcatggtggtgtgtgcctgtaatcctggctacttgggaggctgaggcaggaggatggcttaagcctagaag

SEQ ID NO: 946704 - DNA, 679 bp, Homo sapiens
tggacagaacctctttaccaaacagatgggagagggcataggaatagctccaggccaaatgccatacagtctcactgttctcacctgaaattcagcagttacaggcataaatacttctcagattgttgtatgcccctgctcaatttttccagaatgctgagattgtttcattttgcttttgtcaattctgccaatctcctcattcaacacaaccagaagttgccctccaccctcaatttatgtagaatataaaacactcacacaagttgggagactgagagagaaaaactgctgagttaaagagcgacagggagcggagtaaaagatggaggcagaaagctgattctactactgtatctgcctctgcatgctccaaatcatccaacatagcaatatgtacactatacacacacatgcaaacatatatatttcttgatgattccaattcaccagccactaaagaaaaaggaaattctctctcctagaagccatcagaaactgcctctagctttcaatatgcccagattcggtcataagatggtaataagttagcatgaaagaaaaaaaggtagttttgaaaaayacccaaatagaaactctataaacaaaatactatacagcaatgaaaatggattaactactggtatgcacaacaatatgggtaaatctcacaatgctg

SEQ ID NO: 946705 - DNA, 557 bp, Homo sapiens
ttaaaaccctcccagatgaaatgaaacacttttattccctgtggcttaaggaagaaagaccaggggccaggcatggtggctcatgactataatcccatcrctttggtaggccaaggcaggagggtcacttgagaacaggagtccaagaccaacctgggcaacacagcaagaccccatcgctgcagaaatacttaataattagccccgcacgatggcgcgtgactatagtcccagccactggggagactgaggcaggagaatcgcttgagcctggagttcaaggctgcaagtgagccatgattgagccacttcactccagcctgagacaagatgagatcatatcttaaactaaaagaagagaataaagataacacattttagtctaacattctgaggacagtccataaatgctttccctccaaacatgtctgtggtttctctattttttttttttttttgacggattctcactttgtcgcccaggctggagtgcaatggcgtgatattggcttactgcaacctccacctcctgggttcaagccattctcctgcctcat

SEQ ID NO: 946706 - DNA, 612 bp, Homo sapiens
agctaccttgacaagtactycaggagtatgggaaaatgaaaagaacaaactcacacgcctttttaacatacacaaccatttctgtctacccagccaaggcatattcttcccatgtggaacttcaacctatatctgcctccccaccaactggagacgcacctgcaccttagtcttcctaagtcccaacattgacattgccccaggaaatcagaccctatcagtgcccctcaaagctcaagtttgtcagtgcagggccatacaactaatactccaacttatagggttaggaatggccactgctacaggaactggaatagccagtttatctacttcattatcctattaccacacactctcaaaagatttttcaaacagtttgcaagaaataaaatctatcgttactctacaatcccaaatagactctttagtggcagtgactgtccaaaaccgctgaggcctagacctcctcactgctgagaaaggaggactgtacattcttaagggaagagtgttgcttttacactaaccagtaagggatagtatgagatgccgcttatcgtttacaggaaaaggcttctgaaatcagacaacgcctttcaaactcttatacca

SEQ ID NO: 946707 - DNA, 572 bp, Homo sapiens
aagggaacctaaggccaatcacgctgactttctagaactagatcaaaaggaaaccccactttccatgcccaagtaacaaaaggaccagaggctattgcctttgcaatccctcaccttttttgcatggcagatgaaaaattgaaattacttctgattggccgggcatggtggctcacacctgtaatcccagcactttgggaggtcaaggcaggtggatcacctgaggtcaggagttcgagaccagcctgaccaacatggagaaactccatctctactaaaaatacagaattagccgggtgttgtggcacatgcctgtaatcccagctactcgggaggctgaggcaggaggattgtttgaacccaggaggtgaaggttgcaatgagctgagattgcaccactgcactccggcctgggcgacagagcgagactgagtcaaaaacaaacaaacaataaaaaaacctactgttatgmgtactgtaggaagcagccctactgggtctgtgggtttttctcttcgtgtgtggagacaagagatcatagaaataaagacacaagacaaagagatagacaa

SEQ ID NO: 946708 - DNA, 658 bp, Homo sapiens
ttataggggcaattctgaaactgcccctataaactttataaaattaatcaggaaagaagagagagggataaatgaaaaaccaagcttatagcacattcaacattaatgaagtttaatctctgacctacttcttcatagttcactggtgcctattgtcctagaatcatgtagaccctgtgtattagtctgttctcatgctgctaataaggacatactacctgagactaggtaactaataaaggaaagaggtttaatgaactcacagaccctcatggctggagaggcctcacaatcatggcccaagacgaagagcaaagggatatcttacatggtgacaagcaagacagcgtgtgcaggggaactgcccttttataaaatcatacgttcgtgagacttattcactaccatgagaacagcacagaaaaacccacccccgtgattcagttacctcccactgggtccttcccatgacaggtggggattcttacaattcaaggtgagatttgggtaggaacacaggcaaaccatatcaccctgttacaagattaactactctattgataacttgaccattataaaacattaagtttttcctytgagatactctttcacactttttacatgctgatatacctaccatttcaggtggtctgaagga

SEQ ID NO: 946709 - DNA, 623 bp, Homo sapiens
accgcaagcaggcagtgaggtgcratgattacaagcacaggctctaggcccagctccagactggctgtgagaccttgggctataggtacctcccctctctgggcctcaagccctctctgtaaagtggggatgatgacagcacccacttcataaagttgtcgtaaggactaaatgtgtcaatgatacacatgaagctctgagagcagtgactagggcagagcagagatcactcccatccccgttgggccctctgagctcagcttcgatgccaccccctccaggcagccctcctatcttggcccatacccggcggagaagcttgttgaatgtgaagttgaccaggccgtgctgcaggagggctccagccccgcgcaggtaataggaccggtggccagacacgtgggacaggcgcctgggagacagacagacaggcgggtgcacatgggccaggctggcagggaatgtggggatgaaaacacccgggggaagaggcccggctgctgggtggggctggggcatcaaagattcatggcatttccacatctcacgctgaggccaatgaggcaggagccagctgtcggggtgcaggcagctgggagaggggcgtggggagccaggggagg

SEQ ID NO: 946710 - DNA, 606 bp, Homo sapiens
taggaagaaagagtttggcttcctcagctaaatataattttcttctgacacaaaagctcagagtaggtaggkgccagggtgaatatggccccagaccattctgcatttttttttttttgcccctaagtgatcctactttgattcctctgaactgcgagggcatggagtgacagtcctggaggtcttccatgtggtacaactgccctgtcaatgtcctgatgaggggacagagaagagaagcaatgctgccaagacggctagcccctgcagcttcatgggatgagaggaatggaggtggagcagattggacttataaatagctggcctttgtccttggaagtgggtagactcagagatggcttctcaggcactttggaattgaggtgctgagaatcaactcagcagtggtttttaagactgcacctccctccacttactccttcgtttggggaagggaagaagagtatctaaaccacaccagcagaaatgcaaatacttggctttcctggaggaaagggaattagctgctggtggctgttgccacagcaaacacagtgaggtcacagcccctgggccagcccagcacttctgtggtcgctgggggct

SEQ ID NO: 946711 - DNA, 802 bp, Homo sapiens
aagattctttggaacaaggcagttactgtcctttgattctgaggacatccgcctttctggccctgagtaccgctaaggggggccaggcaggtcygtcgaggacactggcggcctggcagccgtgtggcctgggtcaggtagaagcgaggggcgggaacagagaattcgagtgggaggagggaagaggagatgaggtggaaagggccaggcagtcggagtccctgtgttgggtcccgtcctggttgaagactctgagctggtaagtttcagaccattttaaggagtattcactcgacttttaaaataggccatccccagccgggcgcggtggctcactcctataatcccagcattttgggaggctgaggcgggtggataacctgaggtcaggagttcgagaccagcctggccaacatggtgaaactctttctctactaaaaatacaaaacttagccgggcgtagtggcgcttgcctgtagtcccagctactcaggaggctgaggcacgagaatcgcttgaacccaggaggcagaggttgcagtgagccaacatcatgccgctgtactccagcctgggcgacaaagcaagactctgtctcaaaaaaaaaaaaaaaaaaaaaaaaagccatcccggtttatattgggccaggaaaacccagcctagacagcaggcccacgtgttggtgggctggggcctttctgagtaatgcagtttttctccccaggggttggccggagacctacgacatgaatacctcggagcccaagacggagcaggaaagcatcactcctgggggccggcc

SEQ ID NO: 946712 - DNA, 388 bp, Homo sapiens
tcagttctgatgagagaacctggatacctcaggtgccagtgcaggattcacaggccattatggttcttttcggtgggagtctctgatcaccgctgcttctagttggccatctttgccctgcccctaaaaaatggcttttttttctttttaagctaaacatgtctcagatgaagaactgtgtccactctgcctcctggaatgccatgtgttcagtacttgcaaagctttacttttctacttgtgctttttcttcctaatgagtttaactactttttagttcttataatagtcaaaggtctctgaaaaatatttctttcctrcataccagagtcttctctacattctcaacatcatggcttcttacatgtcatcaagaattctcaccatg

SEQ ID NO: 946713 - DNA, 744 bp, Homo sapiens
gaggtcaggagatcaagaccatcttggccaacatggtgaaaccccgtctctactaaaaatacaaaaattagctgagcatgccggtgcgtgcctgtaatcctagctacttgggaggctgaggcaggagaatcacctaaacccaggaggcggaggttgcagtgagccaagatcatgccattgaactccagcctgggtgagagagtgagactctgtctcaaaaaaaaaaaaaaaaaaaaaaaaaaaaaagaagcaaaactacattattttgtcaaaggaagtggaaaaagaattatcaattacagtaaggaaggaatacttagatgtaatgccaaaaccccacaatccattaaaaaaaaaaaggctgggtgcaatggctcacacctgtaatcccagcactttgggaggccatggtggacagatcacctgaggtcaggagtttgagcccagtttggccaacacggtgaaaccccaatctctacaaaagtacaaaaattagtgggacatgatggcaggtgcctgtaatcccagctactcgggaggctgaggcagaagaatcacttgaacctgggaggcagaggttgcagtgagccgagatcatgccattgcactccagcctgggcaagacagcaagattccatctcaaaaaaaaaagwtggacttcatcataattaaaatctttttctctgagaaaaaaaaagaaagaaccacatctatggaaaaatatttgcaagtgatataaaacct

SEQ ID NO: 946714 - DNA, 611 bp, Homo sapiens
acatttggacacagacagaggggagaaggccacaagatgatggaagaggcagtgattggagtgacgtggccacratccagcgaccaccaggggccaccagaagttggaagaggcaaggaaggaaccttccccagagcttttgggggcagcacggctctgttgacaccttgatttcagacttctggcatccagaacagtgaaagaataaattttagggggctgggcgtggtggctgacgcctgtaattccaacactttgggaggccaaggcgggcggagcacctgaggtcgggagtttgagaccagcctgaccaacatggcaaaaccctgtctctactaaaaatacaaaaattagccgggcatggtgtcacatgcctataatcccagctactcagaaggctgaggcagaagaatcgcttgagcctgggaggcagtggttgcagtgacctaagatcgccccactgctctccagcctgggcgacagagggagactgtgtctcaaaaaataaaagaataaattcttgttgttttaaaccagcaagctggtgatgatttgttatggcagctcccaaaaatctaacacagacaggaagcagtgggtgggtgatgaca

SEQ ID NO: 946715 - DNA, 760 bp, Homo sapiens
catgcacagccttttcttctattttactttttattttttgagacacaggatctcgctctgtcacccaggctggagggcagttgacgtgatcatagctcactgcagccttgaactccaggctcaagtgatcctcctcccttagcctcccaaagtgctaggattacaggcatgaagcactacactgaggcttttaaattattagtttattttttagagataaggtcttgctatgttccccaggttggagtgcagtggtgcaatcatagctcagtgtaaccttgaactctcagcctcaagtgatcctcacactttggtctcccaagtacccatgcccagctcatgtacaggtttttttgcttgtttgttgagacagagtcttgctctgtcacccaggctggagtgcagtggcaccatctcagctcactacaacctccgcctctcgggttcaagctattcttgtgcctcagcctcctgagtagctaggactacaggcacccaccaccatgcccagctaatttttctattgttagtagagacagggtttcaccatgttggccaggctggtctcgaactcctggtctcaagagatccacccactgcagcctcccaaagtgttgggattacaggtgtgagccaccactcctgaccgtatacaggtttttatgtcaatatccattttcatttctcttaggtcactacccaagagtgggtttsctgggtcatacagggcttgcatggtaagcattttaagaaccaccat

SEQ ID NO: 946716 - DNA, 709 bp, Homo sapiens
gtaaaacaaaagacccagcaggcaggccttggcccccagagccagtgatctggacttccagctatagggctgaactaactgggctgttcccactcggaccacatccttagaaaatccaggctcggcgcaatggctcacacctgtaatcctagtgcttttagaggcagaggcaggaggattgcttgagccctggagttcgaggctgcaatgagctaggactgcacccctccactccaacctcggcaacaaagagagaccttatctcttacacccccccaaaaaaaagtaagccttgtttgagcccctcatacccaaagagaggcctttttacaactttggctttcaggtactgaattaatactcttaacgaggccagccatggtggttcacacctttaatgccagcattttgggtggccgaggtgggcggatcacctgaggtcaggagttcaagaccagcctggccaacatggtgaaaccccatctctgctaaaaatacaaaaattagccgggtgtggtaacgcgcgcctgtaatcccagctactcgggaggctgaggtatgagaatcgcttgaacatgggaggtggaggttgcagtaagctgagataacaccactgcactccagcctggggaacakagtgagactcggtgtaaaaatatatatataatgagcaactcctgcattgcaggattctaggaggtcgccacag

SEQ ID NO: 946717 - DNA, 709 bp, Homo sapiens
gtaaaacaaaagacccagcaggcaggccttggcccccagagccagtgatctggacttccagctatagggctgaactaactgggctgttcccactcggaccacatccttagaaaatccaggctcggcgcaatggctcacacctgtaatcctagtgcttttagaggcagaggcaggaggattgcttgagccctggagttcgaggctgcaatgagctaggactgcacccctccactccaacctcggcaacaaagagagaccttatctcttacacccccccaaaaaaaagtaagccttgtttgagcccctcatacccaaagagaggcctttttacaactttggctttcaggtactgaattaatactcttaacgaggccagccatggtggttcacacctttaatgccagcattttgggtggccgaggtgggcggatcacctgaggtcaggagttcaagaccagcctggccaacatggtgaaaccccatctctgctaaaaatacaaaaattagccgggtgtggtaacgcgcgcctgtaatcccagctactcgggaggctgaggtatgagaatcgcttgaacatgggaggtggaggttgcagtaagctgagataacaccactgcactccagcctggggaacagagtgagactcggtgtaaaaatatatatataatgagcaactcctgcattkcaggattctaggaggtcgccacag

SEQ ID NO: 946718 - DNA, 560 bp, Homo sapiens
tgggattacaggcgttagccacmacacccggcacactttcattttctatctgcgtccttctctttcttcagccaatggatgaaaaaggagatgctgagaagacacatttgcttttcatccacacatcacttccactcactattagtcaatgtgggtagagctgagaatgccagtttcctggcagaatagccacttctcagcagtaaaaaacacaccaaaagtataaatctttgataaaaagctaacatactttaagcaaaataagcatatgcatcaataataaaatgctcgtggatattcatttggttgatttcttttgagctcaggtaatattgatctaaagcgagcaaatatacagcagataaatgaatatcactggaaatcagaatattgtcaattaagttttctgtcaatagaagtaaaaatatgacctcacactaatagtctcacctggagttgtacaacatcaaatgctttttattaaaaattgtatttcatataagttttcaatttatattaccctccactatttcaatgctttctccacttttatcagtaga

SEQ ID NO: 946719 - DNA, 571 bp, Homo sapiens
aagatgaacaaagagctagtaccatttccgctaaaagtattccaaaaaaaatgagaagaaaatcttccccaactcattatattagaacagaatcattgtgatactaaaacccagcaaagataaaatggaaaaagraaacttcaggtaagccgggtgcagtggctggccaggagtggaggctcacacctgtaatagctctttggaggccaaggcgggcagctcacctgaggtcgggagttcaagaccagcctgaccaacatggagaaaccccatctctactaaaaatacaaaattatccgggtgtggtggcgcatgcctgtaatcccagctacttgaaaggctgaggcaggagaattgcttgaacccaggaggtggaggttgtggtaagccgagattgcaccattgtactccagcctgggcaacaaggaggaaactctgtctcaaaaaaaaaaaaaaagaaagaaagaaaacttcaggccaatatccttcacaaacattgatgtaaaaatccttagcaaagctgggcgcagtggctcacacctgtaatcccagcactttgggaggccgaggc

SEQ ID NO: 946720 - DNA, 564 bp, Homo sapiens
atacctgtgctcccgtgttcactgcagtagcattattcacagtagccaagataaggaatcaacctacatactcatcaggaattaataaagaaagtgtggtagagataacacaatgcaatgccatccagcctttataaagaaggaaatcctgttattgtgacaacatgggtaaatctggaggacattgtactaagtgaaataagctagacagacaaatcctgcatgatgtcattacatgtggagtgtaaaaaaaatccaactcacagaagaagagaggtggtcgtcagggcctgggagggtgatggggaatgagaagattaaaggagataaagtgggaataatttctggagatttattgtctagcatggtgactaaatataatgaataatattgaatatgccaagagactagatttaaatgttctcattgcaaatatgaytatcagtgagttgagggagggatatgttaatcagcttgatttaatctgcagtataaacacagatcaaagcctctgtagaccataaacatacacaaattgccattgaagacagctgccaacctctg

SEQ ID NO: 946721 - DNA, 597 bp, Homo sapiens
tgagatgccgaggcgagaggatcccttgcagccaggagtttgagaccagcctgagcaatgtagtgagacctcatatctacaaaaactttaaaaattctccaggcatggttctgtgcacctatagtctcagctactcaggaggctgaggagagaagatcgcttgaacccaggagtttgcgtctgcagtgagctatgattgcaccactacaccccagcctgggcagtatagtgaaaccccatctctattaacaaaaaagaaaaagaaaagaaaagaaaggagtaattcacagtcctgtggtggtctggagtgtcagggagttggccacctggcttcaaatcccagttactgtcgacaggctgcatcccctctctgagcctcagtttccctatctatacaatgggcacaaccactcccatctcagagtcattggggggatgaaatgtgtcagttattattaatatcgccagcccctagacgtaaccactactaacgttgtgaagtgygttcttgggatatctttctacgcatagaaaaggtttgggggccaggcgcagtggctcacacctgtaatcccagcactttgggaggccgaggtg

SEQ ID NO: 946722 - DNA, 584 bp, Homo sapiens
gttctgatcgcattactctaaattaaataatttatccattggctctagaataaaaattccttgatggtagggtccatgactgcttcacctgttcttctcatggccaaataaaatggaaacaatttgttaacctatcagtttgggcctccagacctcctacttgttctccacccaaatatcaggaaataggagcaactcctatttggacaccaaataaggagataccttctgtgatgggagaaagaagccctggattactcattcttttatgagatgggaggaagattggacttgtcagcctgacccttgtctgcacagtacatccctaaatgtctcaaggactcctaggtgctagtgagagggtctgcagtggccctgggctgatgcttcaacagttattcaaacagaggagactcaggctgactctgtggagccagaataaaaaatagaacaacccctaattctcgatccagatctgatattacctatatatgttgagctaactgttgggttcaaggamaagaatacccttctccagtaacacaattcacatacaggagatgtagttatctttatctctctgg

SEQ ID NO: 946723 - DNA, 740 bp, Homo sapiens
tactccaggggaggggtccctatgtaaatgtacaacaacaattaaatttttcccccagcctatgcacagagtcagtgcactcacagggcctgggaccaaattctyaaaggtggagttcaacagtgatcttttctaaatgtatgacaagggccccaggagccatttgttgaatttatcaatcatttaacttaggtcatagtgaaacgtgcccattccacccttaagaatacgcttaaaatcaaaaaagggtgaatatgagtagggaccttacaacactactagcacaagccttatttactcttaatttcttaaatttagatgatacatttcaatgagccatagataagcactttgcaaaaacctctcaaaatagaaagccttcagttttatggaaaggtgtaaatagtaatgtacggtgtggtccaaatgatttgctaacgtgggaaaggggatatgcttgtgttcacagccccttaggtcctctttggattccagcatgatgcatcaaaccttaccacggcatgactagggcccaacctgctaccagaaataaaggaaatgacgatgcagaacccacaaccctggatgatgtggcttccttggatgacacaggccccagacattacctggggaatgctgaagaacacaactcaggaggctgaacaaatctgcttcagacacagataccattcaatccatataatttgttctttgctatgctttttattccacattgcaac

SEQ ID NO: 946724 - DNA, 622 bp, Homo sapiens
gtcacagctggttttagactccccccacccctcccacagtggttgagagaacagcagcataagcggctggcagaggcaaggaaagaccagcagagagagagagagagagaraaaaaagagacagagaggaaaagaggcaaagagagagaggaagagacagagagacaaagttggagtcaaggagagagagaaaaaaagagaggcagagagaaagagacagaggtgaaaggaaagtcaaagagagagaaaatcaaagagagaaagagagatatacaagtagttaagaaaaaaagtgtactctattccaggataaatttaaaacctataattgataattgaaggtcttctccatgaccctacaactctccaataccaccttgttgtgactgtaaacaagggcatagcctgaaagcactgaggccactgacaagctgtagccttcctatcaaaaatccttaacctagtaatctgcagatggcctacatgcatttaatctgtagtggcaactgctttgctaacagaagaaagtagaaaaataacttttagagaaaacctcattgtgagcactccccactggttcagaagtaccctaaggaaaaaaaaaaaaagcaagaaggtagct

SEQ ID NO: 946725 - DNA, 648 bp, Homo sapiens
ctgtgaaaattcccgcataaccattgaagattgcaacactctgaaccccgccactttgctcccagtatcagagagcgcagttgaacataactgtgtagaggtgttggactcagtttattctagcaggcccaacctccaagaccatccttaaacatcagtagactgggtacatggatgggagcagcttcaccaacccttgcaaagtgattcagaagactacaagccctgatccagtcatacccagaagctgactgatccacacatggccaaagcatgaggaaactcattttgggactcattttccttaaaatttggacttgtacagtaaggacttcaactgaccttcctcagactgaggactgttccctacatatacatcaagtcactgaggtaagacaaaaggttactacagccctattattttatggttattgtaagtgtaccgggactctaagaggaacttatttgtataatgctatacagggtatgtagcccaggaagtgaccagcctgatgtgtgctataacccatctaagccccctatgactaccatttttaaaataagattaaagactgkcaacttctgggttctgaaaaacctcaattattagacaatactgtatagcacgggtgaggaaggacttcaccc

SEQ ID NO: 946726 - DNA, 568 bp, Homo sapiens
atgttataggggaaggaactgaaggggaagatggagctcaggttgttgatgagttgaccttgagatggggagacagcctggactgtcccgctgggctcagtgtaatcacaagggtccacatgaaaggaggaggaagaggggagtggggattagagcagcgcaatgggagactccaccagctttgaaggtggaggaaggccaggagccatgaatgcaggtggcctgtagaggttggaaaagtcaaggaaatgattctccagagtctccagagggaacgaagccctgcagatgccttgattttagcccaggaaaaacagggtcctatttctgtctccagtagtgaaatgggtcagtgtgctctctcctgctgccatgcttctgataattttctacagcagcaacaggaaaccaacactggaacccaggtcaaggacaaggtaagaaacaacacaaggatagccgggtgtggtggcaggcrcatgtaatcctagcgacttgggaggctgagggcaggagaatcacttgaacccaggagacagaggttgcagtgaccctagaccacaccact

SEQ ID NO: 946727 - DNA, 458 bp, Homo sapiens
aaaaatattttttaaataatagtaaatatataccagaccacccacagcgtgatcaaacacctttctttggcagcatttgtgtagtttctaatacagctttaaaatatgytcataaagaattattaaatatcctttgtatttatattttatttagagcctggagaaggctctaaataaaaggtgagaggtgaatattttgagttaacttgatataagcaaggtttcacagattaactttgaaatataggatgacatggggctgggtgccatggcttatgcctgtaatcccagcatttgggaggttgaggcaggatgactatgacagcttgagcccaggagattgagggaaaaaaaaatggataacatggaatagttgagaaacgtgacatcatgaaaataaaggtgatttttctaaattttattgcaaacaaatttaaaggtatgaaagtgttgaaaaa

SEQ ID NO: 946728 - DNA, 603 bp, Homo sapiens
catttttaaaggactgaagagaagaagagaaaagagaacaggccacagaacccgtctgcggcccgcaaagcttgcaggatttaccatcgggctttctacagaaaagtcagccaacctctactctattttatttacgtatatatttttttgagacagggtcttgctctgttgcccaggctggaatgcagtggcgcgatcacagctcactgcagccttgacctcccagctcaagtgatcctcctgcctcagcctcccgggtagctgggacgacaggcgtgcggcaccatgcccaactaatttttaaattttgtattctgtaaagaagggggtctcgctttgtcgcccaggctggtcttgaactcctggactcaagtgatcctcctgcctcagcctcccaaagtgctgggattacaggcgtgggccactttttcccactggcaacctctactctacagccatcactgccaacccaggacaattctgcccctgatcccagtatgtttagcaatgtctggagactttctgaggtgttacgactrtggggctggaggtgtcactgacatccatcgggaagaggctagggtggcctctgagcatcctata

SEQ ID NO: 946729 - DNA, 606 bp, Homo sapiens
  misc_feature 599, 600, 601, 602, 603, 604, 605, 606: n = A,T,C or G
taggaagaaagagtttggcttcctcagctaaatataattttcttctgacacaaaagctcagagtaggtaggkgccagggtgaatatggccccagaccattctgcatttttttttttttgcccctaagtgatcctactttgattcctctgaactgcgagggcatggagtgacagtcctggaggtcttccatgtggtacaactgccctgtcaatgtcctgatgaggggacagagaagagaagcaatgctgccaagacggctagcccctgcagcttcatgggatgagaggaatggaggtggagcagattggacttataaatagctggcctttgtccttggaagtgggtagactcagagatggcttctcaggcactttggaattgaggtgctgagaatcaactcagcagtggtttttaagactgcacctccctccacttactccttcgtttggggaagggaagaagagtatctaaaccacaccagcagaaatgcaaatacttggctttcctggaggaaagggaattagctgctggtggctgtttccacagcaaacacagtgaggtcacagcccctggccagcccagcacttctgtggtcgctnnnnnnnn

SEQ ID NO: 946730 - DNA, 599 bp, Homo sapiens
ctgagcatagttcatcaggttatctctaggcatataatgaaaataataatcatagtaaaaaatagcccacattattgaatgactgctaagarcatggtagaatttcactttgtacatcacatgtattaactatgtagttccccaccaaaaccatgtaaggtagatactagcactatactaagtttatatatgacacaatagcaatgtgggtaactttccctaactcacgaagttaaaaggggcagagctgtgatcaaatctcaggcttcctggctccagagtcttccctgttagttcaactgattgcttcctatgagaggtagaatataataatctctgattgtcaacccaccaaatatccttacaaagaagacatttttattattgcaattttatagaaaagcaaagtgagcctcagagaggcaaagtgacttccccaaggagacagagatagcaaaaggcagatgtaggttttgaaagtactgtgatgtaactccaagcctgttgcttttttttttttttttgagaccgagtcttactctgttgcccaggctggagtgcagtcacgtgatctcagctctctgcaagctctgcttcct

SEQ ID NO: 946731 - DNA, 579 bp, Homo sapiens
aggtcacgtctctgtatctcctggatcggtctctggtgacttatttagttcctttggtgaggtcatgttttcctggatggtcttgatgcttctagatattcatctgtgtccggtcattgaagaattaggtgtttattgtaatcttctcagtctgggtttgtttgtacccatctttcttaggaaggcttccaggtattcagacttaggtggtataaaatacgctgtatctgcattagggggcaccccaagcccaataacactgtggttcttgcagactcataaaggtaccaccttgatggtcttagatgacatttaagagaattctctggattaccaggcagagacacttattttttcccccttactttctcagaaacaaacatagttgctctcactctgttctaagcctccaggagttggggaagcactgacacaagcacctctgtggccatcagcactggarctgtgctgggttagacctaaaaccagcagagcactggatcccacacaaaacctcctatgaccactacctggctactgcctaagttcactcaaggccctgggactccgcagtcagca

SEQ ID NO: 946732 - DNA, 467 bp, Homo sapiens
cacccccagactacccacccagtctcacattgtgccaccctcaccaccgggctgtgctccttcacgtctataaatgggcgtttcagcagcacccgcctcacaaggtcatggtaataactaaaacagacaatgcatgcaaaatacacaaggcagactaagggctcagcaagtgcaactcactgttcctgctgttactgcgattgctgtgtaagctggatatggggtctgatctggatcccacagggggcagaaacatggccttgcgctgtctgagagaagggccctaaaggtccagcctgtcctcaccacctgctctctttggctgtgggtaatggctaggagagcaacctcctggacacagggagccttggcctgaatctagaagagttttccatggagaacaacagraaaccttgaactcctgccagatgttaaggcagactcataggtggattttggggaaggac

SEQ ID NO: 946733 - DNA, 623 bp, Homo sapiens
accagggtcagggtgacggggctgccggccaatgcgaggcagggracaagatgactggaaagaccggggcacaggggtaatggagtgacctagctgatgggggtgaccagggtcagggtgacagggccgccggtcaggacgaggcaggggacaaggtgactggaatgaccagggcatgggggtaatggggtgacctagctggtgggggtgaccagggtcagggtgatggggccaccagccagggcgatgggggcggtgtcacagtcctggtggctgagggtcaggtgtgtgccgtgtcttccaggatcagtctctggggaactggagaatcaagaggcaggtcttggagggggaggagatcgcctacaagttcacgcccaagtacatcctgcgcgccggccagatggtcacggtaggtggtggggcaggagggcgagggtggccacggatggggtgtgaggtggggtcaggggactggaggcacaggacttggcgggggtgggtggggatgatggtggcaccaggcaccgtctcagagcggctgccgcagtcatagaacctccatgtgctggtgtcaccccactgggcctccctggagcctgagtggtgtgccctgggtctga

SEQ ID NO: 946734 - DNA, 623 bp, Homo sapiens
accagggtcagggtgacggggctgccggccaatgcgaggcaggggacaagatgactggaaagaccggggcacaggggtaatggagtgacctagctgatgggggtgaccagggtcagggtgacrgggccgccggtcaggacgaggcaggggacaaggtgactggaatgaccagggcatgggggtaatggggtgacctagctggtgggggtgaccagggtcagggtgatggggccaccagccagggcgatgggggcggtgtcacagtcctggtggctgagggtcaggtgtgtgccgtgtcttccaggatcagtctctggggaactggagaatcaagaggcaggtcttggagggggaggagatcgcctacaagttcacgcccaagtacatcctgcgcgccggccagatggtcacggtaggtggtggggcaggagggcgagggtggccacggatggggtgtgaggtggggtcaggggactggaggcacaggacttggcgggggtgggtggggatgatggtggcaccaggcaccgtctcagagcggctgccgcagtcatagaacctccatgtgctggtgtcaccccactgggcctccctggagcctgagtggtgtgccctgggtctga

SEQ ID NO: 946735 - DNA, 541 bp, Homo sapiens
cggtcctgggcctcgctgtacctgcacggtaggtgctttcacggggcctgcggcacygtgtgtcggtgcagactcccaccaggaccccaggccggccccaccgtctggaaccacctagaggtgtcccgccatcctcagtcctggggccttctccttacccagccgtctctgggttggtcacctcgtgccacgtgtgccgcctgggcctcgtccccaggtacaagcactgggccgtgttgcccgtgtgtcctggagtgtagtctaggcaggacgtgcgggtgtgagggcagccccgggtctgacggaggggtctgcaccttgctgccctccctggtcttggcgtgggagggaggagactgatgcaggtccagcccctgctgttctgggggcctgagacagaagcagaggccatgaggccaggtgaaggtcacctgctgggtgggtccaggcgtccccgtgaccctcagggccagagaagagccggaaggctggggtgccccgggccgccccactccgacccactctccccacaggaccattc

SEQ ID NO: 946736 - DNA, 541 bp, Homo sapiens
cggtcctgggcctcgctgtacctgcacggtaggtgctttcacggggcctgcggcaccgtgtgtcggtgcagactcccaccaggaccccaggccggccccaccgtctggaaccacctagaggtgtcccgccmtcctcagtcctggggccttctccttacccagccgtctctgggttggtcacctcgtgccacgtgtgccgcctgggcctcgtccccaggtacaagcactgggccgtgttgcccgtgtgtcctggagtgtagtctaggcaggacgtgcgggtgtgagggcagccccgggtctgacggaggggtctgcaccttgctgccctccctggtcttggcgtgggagggaggagactgatgcaggtccagcccctgctgttctgggggcctgagacagaagcagaggccatgaggccaggtgaaggtcacctgctgggtgggtccaggcgtccccgtgaccctcagggccagagaagagccggaaggctggggtgccccgggccgccccactccgacccactctccccacaggaccattc

SEQ ID NO: 946737 - DNA, 721 bp, Homo sapiens
accttctcgcccgcaaacgtggacgcctccgtgatgtacaggaagtggaaagagagcaaggggaaggatcgggagtacacagacatcatccggtgagggcgggcgggggcgtcacgggaggagagactcagatccggcctgcaccccggcccctggtcccacggccgcccagccccaccttcctggtgagggtggcggagcttcctggtgcccatttacagggtgccagtcacagatggaggccgggccgagtggcggagggtccagccaggttcaagcccagcttcttgccccttttcctctttttttttgtttgagacagagtctctctctgtcacccaggctggagtgcagtggcgcgatctcggctcactgcaagctccgcctcccgggttcacgccattctcctgcctcagcctcccaagtagctgggactacaggcgcccgtcaccacgcccggctaattttttgtatttttagtagagacggggtttcagcgtgttagccaggatggtctcgatctcctgacctcgtgatccatctgcctcggcctcccaaagtgcagggattacaggcgtgagccaccgcggccggcctttttttttttttttttttttggagacagagttatactctctygcctaggctgcagtgcagtggtgcgatctcggctcactgcagcctccactactcgggttggagcagttctcccccttcatcc

SEQ ID NO: 946738 - DNA, 599 bp, Homo sapiens
taggaaaagggactaactgsggacggcgcatgtttaaaatggtgacaccctcttcccatttccttgttaaccacatgtacagtaagaagcaggcaacagggtgctggcaaatgctccatttgcataatagaagattagggtggagcagccagattccttgtgtgctgtgtaaactttctttattttattttattttattattatacattaacgtttagggtacatgtgcacaatgtgcaggttagttacatatgtatacatgtgccatgctggtgtgctgcacccattaactcgttatttagcattaggtatatctcctaatgctatcccttccccctcccccaagccacaacagtccccagagtttgatgttccccttcttgtgtccatgtgttctcattgttcgatttccacctatgaatgagaacatgtggtgtttggttttttgtccttacgatagtttactgagaatgatgatttccaatttcatccgtgtccctacaaaggacatgaactcatcatttttgatggctgcatagtattccatggtgtatatgtgccacattttcttaatccagtctatcactgttggacatttg

SEQ ID NO: 946739 - DNA, 604 bp, Homo sapiens
ctcattacagtgggaacaacaaaaacatgaagaaaakgtaaagaatcactcaactacgttgacattgtccattgtgaattccatactgagagcagacaagtccattatgatggtgacagaagtaatgttgatgcccaaggttttggtcaatctcaaaattttgaggctgaccaaaaggggagaattgtttaattaaattaaatttgacctaaagctctctctgtagagtgaactgcaacctaacttgggagtatattcttttttttttttttttttttgagaaggagtctcactctgtcacccaggatggagtgcagtggtaagattttggctcactgcaacctctgcctcctggattcaagtgattctccttcctcagcctcctgggtagctgagattacaggcacgcatcactatgcccagctaatatttgtatttttagtagagacaaggtttcaccatgttggccaggctggtctcgaactcctgacctcaggtgatccaccacctcggcctccaaaagcactgggattacaggcatgagccactgcacctggcccaaatgaatatattcttgtgacaagtagccaagtgttggctaatc

SEQ ID NO: 946740 - DNA, 500 bp, Homo sapiens
acaattcataagggatgggtgatagggatttgaccatatgcattgcataagctggttgagccatctatgtaagggtgatctctctgcatctgctggtacagcctgaagtcagcagggcaggtattgggaagggaagatgggatacaaagtggggaagccagggaagacgaactgagaggatcagtgggaagccatgtagacagacgggaccctcacagtctccaggactccaattttcatgagcggatgtcttccaggagaagtcactgctctttgatttggagttaaatgtgtacctgcaggaggatcctgtgggagctgggagaggtaggggcctggctgctgcctcacatccccagggagagcctcaaggtgcaaacaacgtgcatgacagccacagtgcctgggcctgcacccacctgcccaacacaaaagcatgtggcttctgcttcccttctgccttccacattyatgcacgttgtctcctggggcccatgcta

SEQ ID NO: 946741 - DNA, 581 bp, Homo sapiens
tcatcttgttccctgttgacaagagacccagagccccaggaacaaggtgaaaagactcaggaatatggcaaatgatggtgccaaggtctaaaaactccagaagaccctttccctctccccctaactcctggtccagcatttggagccagatgtactgactggcaggacactgagaagccaccccccaccctgcttcccttggggcctcagagaatgctttgaggagtgggatacacaggactgtttaggtcccaagtacagaaacccaagttagccatgtttaagcaggttagtgaaaaaggaattcattggctcatattactataaagaccagggttggctgggcacggtggctcacgcctgtaatcccaggactttgggaggccgaagtaggcggatcacgaggtcaggagattgagaccatcctggccaacacggtgaaaccccgtctctactaaaaaaaaaaaaaaaaatacaaaaaattagccaggcmtggtggcaggcgcctgtagtcccagctactcgggaggctgcgtcaggagaatggcgtgaacccaggaggcggagcttgcagtgagctg

SEQ ID NO: 946742 - DNA, 541 bp, Homo sapiens; identical to SEQ ID NO: 946735

SEQ ID NO: 946743 - DNA, 541 bp, Homo sapiens; identical to SEQ ID NO: 946736

SEQ ID NO: 946744 - DNA, 721 bp, Homo sapiens; identical to SEQ ID NO: 946737

SEQ ID NO: 946745 - DNA, 723 bp, Homo sapiens
ctagggaggcctcaggaaacttacaatcatggcagaaggggaagcaaacacatccttttccacaaggtgacaggagagagaagaagaagaatcaaatgaagggggaagccctttataaaaccaccagatctcatgagaacttactcactatcccatgaatagcataggagaaattgcccccatgattgaattacatgcccactgggtctctcccatgacatgtagggattatgggaattacaattcaagatgagatttgggtgggaacacagccaaaccatatcattctgcccttggctcctcccaaatctgatgtcctcacatttcaaaacacaatcatgcctttccaacaatcccctaaattcttaactcattccatcattaactcagaagtccaagtccaaagtctcatttgggacaaggcaagcctcatctgcttatgagcctgtaaaatcagaagcaagttagttacttactagatacaatggaggtacagacattgggtaaatacacccaaatgggagaaactggccaaaacaaaggggctacagaccccaggtaagtctaaaattcaatacgggagtccttaaaccttgaagttccaaaatgatctcctttgagtccatgtctcatatacaggtcacgctgaygcaagaggtgggctcccatggccttgggcagttctgcccctgaggctttgcagggtgtagcccccctcctggc

SEQ ID NO: 946746 - DNA, 615 bp, Homo sapiens
tgttgctttagggattaaatttcarcatgaattttggaagggccacaaacattcaaaccatagcaaggaataagataatggcttaattttatatcactccccttctcttaccctgggaacaatttgttatttaacatgattatagaaagggtgtatttaatgagaaagacatgccttttgaggtcaaattgcttagtaaaagcaagggtcctgttaaccattttatcttaagcaagtcactgagccacttgagcttttgtaaaatgggaatgacgatacttgtacctccaattctctgagaatcaatgagtttatatctgtgcaagaacttcgcagattgcagggttgtatatttttcttccttttccaagagttaaagagttatagtcttccaaaacactgtctaccaggctgtatcactctaagatgggtgttactcactaattctgttttagagaggaggactgtgagaaagggaagaattgaaacttacatttatctaaatagatatcctgtctctggaaaggattcatagcccaaagaaggaggtctactttccttgaaactttttgttaaatacgctgaagtgcctagaacttctgaagcaaacccaga

SEQ ID NO: 946747 - DNA, 614 bp, Homo sapiens
atttggggaacccagaatatagcagttaaactccttgtattttagtgtcctgtttattcttatcaaccttggccatgagctcttagaaggattaatgaactaactattaggggttatttgagaagatggtgttcacttaggttttaagtccttagagtaaaagtactattggatgttcagtagttatattgtgtgcttttcttctagagcagaagtttatgagtacaaatcttgtctgatcagtctcttatatctggtgttgcataaagctagcatttactctgagaggtctaaaaaaggaaaaccctagggactagaggcatagactttaatcatctggctgacaggctatgagtgatactttcaaagctggggaagtaagtggtagttaaaatatgtctagaatagaccttaagtgaccttgttggccatttcttgactaaagactacaaagtatagaattttgatccaataaatggtcgcactgtaaaggcagggagttctgtgtgtaaaaataaagtaaggtttttatttawaccttgggaaacttatttaatttaaaaaacgcaagagtggcttgaaaatgtttattgattcctcagtgtagaatcaca

SEQ ID NO: 946748 - DNA, 567 bp, Homo sapiens
tggctagctatatgctagaagaatgaaactaaagctctgcttttcactatacaaamaaattaagtcaagatggattaaaaatttaaatgtaagaactcaaactctaagaaccctaaaagaaaatataggattttctagaaaatctaccataatgaaaacaccattgtggacatcagccttgggtaagaatttatgactaactcctaaaaatcaattgcaacaaaaatagaaattgacaagtgaaaccttattaaactaaagagtttctgcacagcaaaagagattatcaacggagtagacagacaaactaaagaatggaaggaaatatctgcaaactatgcatctgacaaagatctaatatccagaatctatccgaaacttaaatagttaagcaaaaaccaaataacctcattacaaagtgggcaaaggacataaacagatatttctcaaaagaaggcatacaagtagccaagaaacatgaaaaatgacccacatcactaatcatcagagaaatgcaagtcaaaaccacaatgagatactatctcacatgtcagaatggctattatt

SEQ ID NO: 946749 - DNA, 521 bp, Homo sapiens
aattcaaattgcatgaaaagactctttatagtgaaaaagcagaagttcctcttccccacaatgtccattcccactcactacaggtaaccattgttaataactttcctggccattcttctagaacttttgtatgtatctataagaaacattctcacctacacatgagcatacacacacacttctgtgttttttctgacttctgtttcattgtaagagggataatatacatactgttatataatttgctttctttgcttaatgtatcctaggcatttttccacagtgaaacatatcttcttaagtgaatctttttcaacttaataaagtaattctgaagtatatgtaagaataaagagtcaagaatgacaaagaacattctggaaaaaactactgaagaaggacttgcaataccagatacragaatgcattattaaaatattgtgataaacgtggaagaatagagaaatcagtggagcagaaattaatctcaggagaaaactacagaacataaaagcttcagc

SEQ ID NO: 946750 - DNA, 610 bp, Homo sapiens
tactgagtatatgtttctccctgactcgaacacatgtttaccaaggagggattaggtgtagttttgtactggataaaattaaatgtttggtatcaagtggaaggccgcttccccatgggaatctgaacgtgctcttctgtaagataaaagatgcaactagattccaccagctctgatctgtgcatatcaaagcctaagggcaatgccaactggctaaagacaggtgtgcagccctaatcttgcattttgattcattttcattgcctacctattagtgtgtctgaaaataacaagctatcctgcaacacagttggtaatgatttctcttcatggactgagatagtattagagagaccacagtgagaaacagagacttctaacccacatgtactcagtggcgctttccttggactccatacattcgagtgaaaactgacattttacgtggttttaaagtcttgacattaagttttatctgaggagttctgaaatagggcctagtgaaccagggagtatgttttaatactacatgtacagacttgaggcagtttgacttstgaatctgcattttgaaggctgtatataactacctctctctcccaagtaatat

SEQ ID NO: 946751 - DNA, 600 bp, Homo sapiens
tgcaagtgacacatactctaagatcattaacatgcttggccataaagcaagtctcaaaaaatttaaaaaaatcaaaatcgtaccaaatacactcatggaccacagtgcagtaaaaatagaaataagtaccaagaaaatccatcaaaaccatacaataatgtggaagttgaacaagctacttctgaatgacttttggataaagaatgaaattaagaaagacatcaaacaattctttgaaactaatgaaaacagagacacaatataccagaatctttgggacacaatgaaaccagtgttaaaaggaaagtttatagtgctaaatacccacatcaagaagttagaaagatctcaaattaacagcctaatgtcacacctagagaaactagcagaacaaaagcaaaccaacctctaggttagcagaagaaaataaaaaaatattggcctgaagtcttctttttttgttgtatctctgccagattttggtrtcaggattatgctggcctcataaaatgaatcagtggagagtccctctttttcattttttggaatagtttcagtagaaatggtaccagctcttctttgtacctctggtagaattca

SEQ ID NO: 946752 - DNA, 589 bp, Homo sapiens
tcccagttgcttcatcagcagatatgagattataatttttttatcattttaattgacacaaaataattgagcatatctatggggtacagagtgatattttaatacatgtattcaatgtgtaatgatcaaatcaaggtccttagcatatccatcacctcaaatatttattattttgttgtgttgggaacattcagaatcctctttgaaaatatacaatatttgaaaatatacaataatatacaataagtagacaataaataatcattaactgtagtcacctaccctgctttagaacactggaattcactcttcccatctttctagctgtaatttgtatccgttaactctcttttccctatgacccttgcccctctacccttcccagcctctagtagcctctattttactctctacttctatgagagtaactttttaaattttcccatatatgaaagaggacatgtggcatttgtgtttcygttcctgacttttttcacttaacgtaatgtcctccaggctcatccatgctgccatgaatgacaagatttcattcttttttttttttatggctgtatagtattgtgttgcg

SEQ ID NO: 946753 - DNA, 752 bp, Homo sapiens
gtttgcagactcatagacgtaccaccttggtagccttggataagatctggaagaattctctggattaccaggcagagactcttgttcttttccctaactttcccccaaacatatgagtctctctttctgtgctgagtcacctggaactgaagctatggtgattcaagcatgctgttgccacaactgggactgtgcctattcagacccaaagacagcacagcagtgggctttgtgcaaggtccttttctttatggtggtgagtttccccacgctgtgggcgtgtctagcaatgctgtttgggagccaggaattggagtgaaaaaaatcttagtaatttacctgatgttctattcttctgcagcaaaattggaactcaaaccacaatacaaagccctttccactcttttctctcctttccacaggcagaggtgtctcttcctgtggccaccatcaccgctagtctacagggatttctcctaggccacctcccatgtttgcttaaagcccaagagttcttccatcagcttgtggtgaataccgccaagccctaggtctcattcttcaaggcaatgggctcccctctggcccagacaggtccagaaatgctgtccaagagccaggcctggacttggggaccccaagaccctgcttgttrgtctatccctctatggctgagctggtcctagaatgcaagatgaaggcctatttacttttccccctgctttcctcaagagaaggagtccttcatcttt

SEQ ID NO: 946754 - DNA, 634 bp, Homo sapiens
aatataatcgttataagtatagttgaccctggaacaacgtgggggttgggagcactggcccatcttgcagttgaaaatctatgtataacttttgactaccccaaaacttaactattaatagcctactgttaaccagaagccttactgataatatcaacagtcatttaacgcataattttgtatgttatatgtattacatactgtattcttacagtaaagtaagcttgaaaatataaaatgttagtaagaaaatcacagggaagagaaaacatatttactattcattaagtggaagtggatcgtcataaaggtctccatcctcattcagttaatgcatattttgtatgctatatgtattatatactgtattcttacagtaaagtaagcttgaaaatataaaatgttgttaagaaaatcacaaggaagagaaaacgtatttactattcattggaagagaaaacatatttactattcattaagtgcaagtggatcgtcataaaagtctccatcctcatcttcccgttgagtagcctgaggaggaggaagaggaggggttggtcttgctgtctcagggytggcaaaggcagaagaaactctgaggataattggccccaaggagttcaaacccgtgttg

SEQ ID NO: 946755 - DNA, 676 bp, Homo sapiens
tcgggtggtgtctgcacatcatgcagaaccatctgtgaaccatgcccttgtcttctcttcttctgtcaactgatcataggaaatwccccatgaggccaccagtgcaggctggggagagaaggtagggtgtcaggagtgcagaccatgggtgtttgagccacttcctaatgtaacttacttgtgccttcaggacctgctagagtcagatcacgtatatactacttccatttgatgatggaatactgatgtgcataacccactttatggctagatgggtctgaaagcacccagttcatgataggcagttcaggttgcatggtgagttgatgacccgtaggcaaacattcagtttccaccaaagcccagtaacaggcaaagaactgtctctcaaaaggagaatagttatctgcagaagatggcagggccttgctccaaaatcctagaggcttctgctgtaattcacctatgggggcctgccaaaggctccaaccagcacacctatcagccattgacacctcaagcaccattggatctgctaggtcttatggtccaagtggcagagcagcttgcacagaaggctggatctgttgcagagccttctcctattctggaccccactcaaaactggcagccttttgggtcactcgataaatgggccacagtaacccacccaaat

SEQ ID NO: 946756 - DNA, 676 bp, Homo sapiens
tcgggtggtgtctgcacatcatgcagaaccatctgtgaaccatgcccttgtcttctcttcttctgtcaactgatcataggaaataccccatgaggccaccagtgcaggctggggagagaaggyagggtgtcaggagtgcagaccatgggtgtttgagccacttcctaatgtaacttacttgtgccttcaggacctgctagagtcagatcacgtatatactacttccatttgatgatggaatactgatgtgcataacccactttatggctagatgggtctgaaagcacccagttcatgataggcagttcaggttgcatggtgagttgatgacccgtaggcaaacattcagtttccaccaaagcccagtaacaggcaaagaactgtctctcaaaaggagaatagttatctgcagaagatggcagggccttgctccaaaatcctagaggcttctgctgtaattcacctatgggggcctgccaaaggctccaaccagcacacctatcagccattgacacctcaagcaccattggatctgctaggtcttatggtccaagtggcagagcagcttgcacagaaggctggatctgttgcagagccttctcctattctggaccccactcaaaactggcagccttttgggtcactcgataaatgggccacagtaacccacccaaat

SEQ ID NO: 946757 - DNA, 614 bp, Homo sapiens
tgccagtcattgtaaattagaaatgattgtgatcccactctgtctgaccttctgttttccactgacatagaggcagaatttattaatctgtttggaaagttcacactgactcaatttatggatttctgcgcaataccaatcaaattatagcttagtgtatacaaggtcaggaactataattttacttaattaaagtagcaggacataaggtcacaaagctattcaaaaggttagtaaaggtacgtttttcttttagaaatgtttccatacagaaaaatatttggctcttccattggtagacattacagatctaatacatctcactttcatgccttcactctatatacattgattcatatgtcaattttgttttactgtctgatgatggatgccaagcaactgtctgggaaatggcttataaatgtatggtttcacttgtaacacaattatcctaattcaattacacttttctgtttttttctacctttaaccatttcctttcccaaattgcatctccagttatgattttagtgaggttcttgctaagctttctatgatagcracaggacctttgcagagaaatcaggtcagaggaactgatgtacacacgaagt

SEQ ID NO: 946758 - DNA, 598 bp, Homo sapiens
gctgtttgggtactgtcttttaggaactataaagtgatcctctgtggttgtttattatgtccttctatttgctatgtacttaacaatattaacaataactatatattaacaataacccaaggktttttttttttatttttctatttggtgttttcaataatattttaaaaggaaaattgcggacatgtaacagttgcttttatgtatttatgtttaaaccagcaaaaactaagcagttctaatttttattcttcacaatttatcttagtatgcatactggcctgctagcttattttctttttgttaaaaacttggaaaagttattaaggaaatttaaaaatgacaaatcatttgttaacatggtgtgagaaaaatcatggaaagtaaaaagtaaagttgagcatttcttcccttcatcatataatttaaactgaagagtctgtcttttttttttttttttttcggttgcccaggctagagtacactggtgtgatcacagctcatttcagcctcaagctgctgggctccagcaatcttcccacctcagcctctcaagtagctgagactacaggcgtgtgcaccctgcccagttaattgt

SEQ ID NO: 946759 - DNA, 586 bp, Homo sapiens
attaattggcctaatttcaatattgttttgtttcaggaatagagaggccccagaagaggtagagagacaggggaacaggtggttggtggagcacttagaacactcacacattcattgattaactttgtcctcatatgggcatggtttgtggcatccccaaagcaattataatagtaacatcaaagattactgatcacagatcaccataacagatataataatcatgaaaagtttgaaatactgtgaaaattaccaaaatgtggcacagagacatgaagtaagtgcatgctgttggaaaaaatggtgccaatggacttgttctcagggttgccacaaaccttccatctgtaaaagaatgcaatatctgcaaaacacaataaagcaagcaataaaacgaagtgtgcctgtacaacaaagctacagtactcaggactgtgtgatactgaataaggatggacctaccaacctatggaatagaactgagagtccaaaaaaaaaaaaaaacctatacatcgtgcayggttgatttttgacaagagtgtcaagagcattcaatagggaaagaacagtcttttcaatcagtggt

SEQ ID NO: 946760 - DNA, 742 bp, Homo sapiens
accctggctgcatattagactcgcctggaagctttcaaaagtccccatgctgaggccaggactcaaaccaatgaaatcagaatctctagaggygggatcagaggcggggtctggacatcaataagccacaaggtgaatcccgtgagcagctaacatgaaacatcattgatttaccagacttgaggccaccataactgtatagtgaccacaatctttgtcatccaaggaagaaaaggagaaggaaggagtcatttatagcccatgatctttagttcattctgagatcctctctgtgcttttgggggttcatcagatgtagggtcaaactgagaaggtctacactggtgatctcaccctggaacagggccactcttccataccacatctgtgaggatagaggcctatgggctgtacctggaagcaaaaggagacggagcaaacaatccagcccagtactcctagggtggctctcccaagttctcaagatacttttcttttttaaaaaaggagtctgttaccgtatgacccatcaattccaattctgggaaagtaccccaaagaacagaaagcagaggctcaaacaggtatttgtataactgtgttcatggcagtactattcacaatagtcaaaaggtggaaacaacccatgtccatccacggagggatggatggatgaacaaaacatggtatatccgtacaatggaatattattcactcctgaaaaggaaggaaattctgatac

SEQ ID NO: 946761 - DNA, 619 bp, Homo sapiens
cagattcctcaagtgttctccaccaaaatgctccacgacccaagattgctgtccatcctctgtcatgagcaatccacccaccaaggcaccawccactggactcaacaaacataaacacaaagctctaggtaaataaacagcaaagctgtgccttattttttttaagtgacgtacactgtattcccacagtaattatgagggggaaaaggagccaaacatttgggaaacaactgcagagccagtgactgaggctaacagtggatcacaaagaattaaagaggtttgagtttcatggaacagaagactcagatgaatattttctttttcaaaactcaaaagatcaatatcaagaatataaaaaatcatataaaaaacatggctcacgcctgtaatctcagcactttagaaggtcaaggagggcagattgcttgagcccaggagtttgagaccagcctggccaacacggtgaaacctcgtctctactaaaaatgtaaaaattagcatagtgtggtggcatgcacctataatcccagctacttgggaggctgaggcaggagagtcgcttgaaccctggaggcagaggttcagtgagccaagatcacaccactgcactccagcc

SEQ ID NO: 946762 - DNA, 598 bp, Homo sapiens
gactatcctgctatggtttgcatatggctagtttgtccccatcaaagttcatgctgaaatttaatctccaatgctgcagtgttgaaaggtggggcctcatgggaggtgtttgggttgtgggtaggtagattttaaaatcttctgattggcaattggttgaaagaactattatcaatagaaaggaatgtctgggttgtgataaggggttgtagagaccaaattttatcatgcagatgaagcctccaggtagcaggccttagagagaatagattgtaaatgtttcttaacagaattaaggtctgtgttgatgtgaaaggctttgcggcttttcctgaattccaaaaggaaggagggtataataaggcacatccgacctcccactgccctccacaatctgaaccagtctttcaggttaaatttggagtgtcctggttgagaggagggagtccatttagatggctgaagggcgacctttgcattttrcttttggtttgcaaagtagaatgggcatcataatagaagctacctcagaaggctgttgtgagggttacacgggtcaggacttgttctggcacacagtaagtgctgtgagtctgtg

SEQ ID NO: 946763 - DNA, 515 bp, Homo sapiens
gtgtaaaccggcagtgtaaacaagagcagggcatttatgagtagttgagaatggtgaataggagtatgactagacagaagatagtagggatggcaagttgtttttttttttttggcgggggggcggcaggggcacagtccaagttggtctggtgtctggaatgagactgagacttaataaaaaggagcatccattacaggagctcaaatgggctgtaccttgtagcattccgatgacaggcccgaattctgagaaggacaagtggtagaagtattgtccagtcctttttatgttggtggctgagcttggtgaggtgtgtttttaaaagaccattagttcactgaatactaagagcctgagcaattgcttgggtgctttgactaataaagtccttctaggactgtatagaggtgggaaggccaaaccraggaattatgtctgacagagggaagaaatgaccgcggtggccttcttagaccctgtgggaaaggcctctacctatccagtgaaagtgt

SEQ ID NO: 946764 - DNA, 559 bp, Homo sapiens
gggatttcaatatagagttaaaaaaatctggcccgtggagaatacaatctagtaaaagagatttrctatatactcaagcattctcaaaatcctaaatttaaggaagaagaattgctgatttagctttttggagttttaattcaataagaataaacacaaactatgctcaaggtatcttaccaaaccatatattacagggaataggagatgagattcacagaagcaggaaagattgtttacctttatatctcttctctccttcaactctctacttcacacctatcttcttcatagcagggctcaaaacatggctattaaatgcgtaagtaaatatttaataactacttcctgcattaaaattatattacatttggcaaggcacagcggctcacacctgtaggggtcgcagcattctgggaggccgaggcaggcaggttacctgaggtcaggaatttgagacaaacctggccaacatgacaaaacccggtctctactaaaaaacaaacaaacaaaaacaaacaaacaaaaaacaacaaaaattagccgggcatggtggtgg

SEQ ID NO: 946765 - DNA, 610 bp, Homo sapiens
aagggagcaaagagaaagcaaatgaatgtttatgtttgaattatttcataatattaataacaatttctatagtaaaacagcaaatgttctctggtctacagaaacctgccattgtaccctttgtttaaatcyaggcatgagtcatttaggggtttgcatatgccatttatttcctttttttgttgtgctttcttttgtccccagaagagcccaccaaagcaccctgcaaggaaaagcatcagcacttgagtatctgtcacacagaaagcctcaagctaagtaactacagcactaagtgagaccttccccttactctttctttttcctgtcacaatcctgaaaaaatccagaggcccagagcaatggaaaagggagcaggacagatgtgaggccctgatctagaggagggggaagttgtaggagaaattgaaatgttgatgtaatactagacaggacttcttaagatgagacttttagatgtcaggaagtggtaaaaatagctagaacatttgcctgaaccattattggggggtgggaaaaggagtttcagcacatcagatttaaaaggcaatactgagaaaaaatagttgcttcctacttgcaccctact

SEQ ID NO: 946766 - DNA, 658 bp, Homo sapiens
ggcaccataatgctgattccctcaaatgccctcaccaagctctgtgggcccagctcctctgggttttcctcttatttctggcccttatctctcagctactgtctcagctccactttctctctgtcccttaggcagtgctattctccaagggtctcatttttacttttcttatgctcacatccactggatgagctgattcccttccatggcttcaactaccatatgggtaccatagctcatacggatacacagctcagtcatacatcttcaatccagaactctcaatcctgttgcctactattgaccttcacttaaatataccacagtcactacaaaaacatctacatagttgatgtttctcaacatctttctccccaaacctgcttccccaggatgccccatttcagtgaaacctcagaattaaaccgttaggaacccagcagctatcctagactcacctcctctcttgggcccatgtccagtcagtccccaagtcctgtcagtcctgccctgtgcacctttctcacatctgcacctgatygccaccccctgtggcactgctgtagatctgttactcttcctcctggagatcacctcacctgcctcctagctgatccctcttgtctcactctcatcctatccagtctgctgccacttg

SEQ ID NO: 946767 - DNA, 752 bp, Homo sapiens
atttctgtggtgcaaatactcccaccatgagagattccaaactgccatcttgacactggagttagaatgcactgcatacaatcagtcctcataaaccggtatgggccagttccaatacaccactggtgagaggggagggagatccaggagcgtcttccttacttcctcccaccctcagttcaggcagggctgcatccctcgaggattacagctctatccagaagagcctcttccatcatccacttgcaactagatgcacatacaccattcccttctcctacccctccagcccaggattgggaatggcttctcaatgacgctggtccctgggagcctcagtgtccctagttagttcccttttcctgcttccaccttttcctgaatgctcttcaaaatccctatggaacgtactttctgtttcctgtgggaccatgactcaggcagcacggtggtcattttttatcaagtgcacaagatggcctttcttgtactgtaacattgaggcagagaactgagggagtgagacatggtttgtgcgggtcttgcttcccctccccacattccccacgccccatgcctaataacaatctttcctgtgtttgatttcctgcagtgccaatcccagtgcctcacayggcaacatttgttgcattgtatagaatcaagaacatctactgcttttcttctgctctctaaaaagtgttccttgttcctatgaatttcgctaatgctctttcatgcttcctttgaat

SEQ ID NO: 946768 - DNA, 621 bp, Homo sapiens
gcttacgtgaaactggattttttttctatgagtgcattatgatgaagaatacaataattactagtatagttaggtgctagtgcttttatttctactacagtgccatcagttttattcaccattgcttttgcaaccactgaaaatatcatcaaggtaaaaaagtaagagaaactttttttttataattataaatattgttttgacctcacagaaagggacttgaagactttcaggggtctgcataccatttgtgttagttttctattgctgccataacaaattaccccaaacatagtggtttaaacaatacaaatttgtaatcttacatttatataggtcagaaatctgacatgagtctcaatggactaaagtcaaggtatgggcagagatgtattccttttagtaggcactgggtagcaattgtttccttgccttttccagtttctggtggccacccacatttcttggcttatggccccttcctccrtcttctaagctttctcatatagcaacgccctgactctgcttctgtcaccacttctctttctctgactccctcttatgcccctcttgtccactttcaagtcctcttgtgattgcactgggccaagctcgatcatc

SEQ ID NO: 946769 - DNA, 557 bp, Homo sapiens
gtctggtggggccttggagaacctttatgtctagctcagggattgtaaaaacaccagtcagcaccctgtgtctaactcagggtttgtgaatgcaccaatggacactctgtatctagctaatctggtggggaggtggcgaacatttgtgtctagctcagggattgtaaacgtaccaatcagcgccctgtcaaaacagacgactgggctgtaccaatcagcaggatgtgggtggggccagataagagaataaaagcaggctgcaggcgccagcagcggcaaccctctccggtccctttgcacattgtggaagctttgttctttcgctgtttgcaacaaaccttgctgctgctcactctttgggtccacactgcctttatgagctgtaacagtcaccacgaaggtctgcagcttcactcctgaagccaacgagaccacgaacctacraggaggaacgaacgactccagacgcgccgccttaagagctgtaacactcaccgcgaaggtccgcagcttcactcttgagccagcgagaccacgaacccactagaaagaagaaa

SEQ ID NO: 946770 - DNA, 731 bp, Homo sapiens
cagccaggaggggggctacaccctgcaaagcctcaggggcagaactgcccaaggccatgggagcccacctcttgcrtcagcgtgacctgtatatgagacatggactcaaaggagatcattttggaacttcaaggtttaaggactcccgtattgaattttagacttacctggggtctgtagcccctttgttttggccagtttctcccatttgggtgtatttacccaatgtctgtacctccattgtatctagtaagtaactaacttgcttctgattttacaggctcataagcagatgaggcttgccttgtcccaaatgagactttggacttggacttctgagttaatgatggaatgagttaagaatttaggggattgttggaaaggcatgattgtgttttgaaatgtgaggacatcagatttgggaggagccaagggcagaatgatatggtttggctgtgttcccacccaaatctcatcttgaattgtaattcccatagtccctacatgtcatgggagagacccagtgggcatgtaattcaatcatgggggcaatttctcctatgctattcatgggatagtgagtaagttctcatgagatctggtggttttataaagggcttcccccttcatttgattcttcttcttctctctcctgtcaccttgtggaaaaggatgtgtttgcttccccttctgccatgattgtaagtttcctgaggcctccctagtcctgt

SEQ ID NO: 946771 - DNA, 331 bp, Homo sapiens
tgtaatcgagaacatttacaccacagagatcatcctgcaccrcatataagggcttgatatattgctttgttgattggatttaggaaagtcatggagaaactgtcaataacggtgattccatttaaaactgtgtgatttgtgtggccactaaaatataaatagcaccaaaaaaatgagaaaatatgcttcctgttcaaaaactgttatgtattgtagcaaaaaaaaattcacatcactgatgaatggtcaaatttagacatatacttcatcatttaatttgtatcttatataaacaaaatatatcaaccaacattgttattgggactaaacc

SEQ ID NO: 946772 - DNA, 331 bp, Homo sapiens
tgtaatcgagaacatttacaccacagagatcatcctgcaccgcatataagggcttgatatattgctttgttgattggatttaggaaagtcatggagaaactgtcaataacggtgattccatttaaaactgtgtgatttgtgtggccactaaaatataaatagcaccaaaaaaatgagaaaatatgcttcctgttcaaaaactrttatgtattgtagcaaaaaaaaattcacatcactgatgaatggtcaaatttagacatatacttcatcatttaatttgtatcttatataaacaaaatatatcaaccaacattgttattgggactaaacc

SEQ ID NO: 946773 - DNA, 495 bp, Homo sapiens
gtttgagactggtgtagacctcctcctctgaggacttccttgttcttctttcrtctgtcttcattttctcccctgtttcacataatatttccccttctggaaaatttatccgaaagaaataactgaaaggaaaataaatcttggggccccagaaccactaaggtaaagggaaaaagtcaaggtgggaactgcttagagcaaacctgcctcccattctattcaaagtcttccctctgctcactgagatagatacatatctgattgccttctttggaaaggctaatcagaaactcaaaagaatgcaaccatttttctctcacctacctgtgacctggaagcctccctccctgcttcaagttgtcctacctttctggagagaaccaatgtacttcttacacatattgaatgatgtctcgtgtctccctaaaatgtataaaaccaagctgtggcctgaccacagtgggcacatgtcatcagtgtcaggcctctgagccc

SEQ ID NO: 946774 - DNA, 495 bp, Homo sapiens
gtttgagactggtgtagacctcctcctctgaggacttccttgttcttctttcgtctgtcttcattttctcccctgtttcacataatatttccccttctggaaaatttatccgaaagaaataactgaaaggaaaataaatcttggggccccagaaccactaaggtaaagggaaaaagtcaaggtgggaactgcttagagcaaacctgcctcccattctattcaaagtcttccctctgctcactgagatagatacatatctgattgccttctttggaaaggctaatcagaaactcaaaagaatgcaaccatttttctctcacctacctgtgacctggaagcctccctccctgcttcaagttgtcctacctttctggagagaaccaatgtacttcttacacatattgawtgatgtctcgtgtctccctaaaatgtataaaaccaagctgtggcctgaccacagtgggcacatgtcatcagtgtcaggcctctgagccc

SEQ ID NO: 946775 - DNA, 622 bp, Homo sapiens
aaggaagtttgagtttagagtctgaggcaggactaattaacttcctgwtaaaacaatcaagactatttgatagaatagaacagaatctgaaatctctacaatgtataatttacaatgtcatgaataaaatcaaaaattactagacttaggaagaaaaagaaattgtaactcataagcaatcattgcaggctgaccagaagatttcacctatactgagttagcaaagatttttaagatggctattaaaactatgttcaagagcataaaggacaatatcctataattaataaacaaataggacatatcaacacagaaatcacaagtatttttaaaaatcaaacagaaattctagagctgaggctaggcatggtggctcatgcctataatcccagcccagcactttgggaggtgaaggaggaaagatcacttctatgaaagaaggaaaggaaggggaaggggaaggggaaggagaaggaaattctagagctaaaaaatgaagaaccaaaacaaaatatttaatggatggtcttaatagaagactagagaggttataagaataagtgaacataaagacagatcattagaaattatcaaatttcaagaacagagagaaaaaagattg

SEQ ID NO: 946776 - DNA, 613 bp, Homo sapiens
ctttttggaaaatacaatttatctctctcttcatggattcctctttccccattatatcctttttctccatcttttatcaggtagttagcaccactattttaaaccttaaaaatattttattcttatccagcttcctatttttctttttatgcaaaattcctcattcaagcggacctctgttctgacccttgtttaaaaggaggtattgctgattcacttcatagtggatcaaacaatgtaaatattgcattgactaaaatccgaacataagtttaaaaatcaactttcataggcttttcgtccttctaaaataaatacttttgatcttagtaatcatatgacaatatggctattgagaaaccagagccaaaagaaaaaaaaaatctatcacgttagtttgtggaataagccactgaagccttatttctcttattcttttcccttttctcaccccttctttgtcaccccaggggataaattattattggcattccaacttttaaatagttttaaatggctttttcttgtggttcagatgtgatgttacatctgtcacagctactgaaatatatctccttycttgctttataatttaccagctggttagtgctag

SEQ ID NO: 946777 - DNA, 556 bp, Homo sapiens
ctggtatgtctttatcagcagcatgaaaatggactaatagagtaaattgacaccactagagaggggcgttgctgaaaagatacctgmaaatgtggaagcgactttggaactaggtaacaggcagaggttggaaccatttggagggctcagaagaagaagggaaaatgtggaagcgtttggaaattcctagagaattgttgaatggctttgcccaaaatgctgatagcaatatggacaataaagtctaggctgagctggtctcagatgtagatgaggaacttgttgggaactggagcaaaggtgactcttgctatgttttagcaaagagactggtggcattttgctcctgtcctagagatttgtggacctttgaacttgagagagatgatttagggtatctgacagaagaagtttctaagcagcaaagcattcaagaggtgatttgggtgctgtttaaagcatttagttttaaaatggaaacagagcataaaagtttgaaaaatttgcagcctggcaatgtgatagaaaagaaaatcccattttctgaggagaaatt

SEQ ID NO: 946778 - DNA, 665 bp, Homo sapiens
cataagcttccatttctccctgagtttctaccaaggtattctaattgtctatgatgaattggcatcttatattgctggtttgtagttggaatctaaaagaaaattaggttaagccacaagacactattttamtatgagttatatatagtttaatgtaagccttataaatatcatagattcatattttgtccattcttagagagttggcaggagatttataaaaagaaattttataagtaaaataaacagaaaatacatcaatataaagaactgatagcatcataaaattagaaaggaaaagaaataatgaagagagaaagatcgaaaaaaaccctgaatgacttgattgcctataaaactatgtgtaaactcttctatctggcattgaaattacctcaaaaatttgttccttactccccaaactaattttctccttactctactatgggaagattttgttccagccaaaactgctaattagctagccacaaaaatgtgtcatgctttccttctctgcctccattatcttctttgtgtatccaaagccaaatcttaacactccactccaatgctatttctttaacaagctttgtgtgatcctcctgcttcagaataaaaacctactcctcagagcacctgaggcatctacttttaacgtgctgtca

SEQ ID NO: 946779 - DNA, 576 bp, Homo sapiens
tcagcctccccagtaactgggactacaggtgcatgccaccacacatggctgattattattattattttttctgtagagatgggatctccctttgttactcaggctggtcttaaactcctgggctcaattgatyctcttggctccatctcccaaaacactgggatgacaggcatgagacatatttttgaaatttaaaatacaaaggaatagaccttcagattcatttatttatgtgcttaaaattgatagaaaatagcaagtcatttcagtctattcattaattaaatatcagttgctatttcatatctatgtgcaaaagaatcttgtctatttcacatgttccataggaaaattatcttcctttaaactatgacctctgagcaccaaattcagtctactgcctgtttggtaaataaaggtttattggaacacaaccacatccatttactttaggctgcattacaacagcaaagctgagtagatcttacagctctaaagcctaaaatatttaatctctggctctttacagaacatttgcctactcctgcattaaaacatttttccattctaacttca

SEQ ID NO: 946780 - DNA, 645 bp, Homo sapiens
ctctctctctctctgttaggtattctttataatatgatgtatgtatttaaaatgcccacatgcacacaaacatatgcatttacactttatttcctttcctctgcattaggtcactttattattattattattatactttaagttttagggtacatgtgcacaatgtgcaggtttgttacatatgtatacatgtgccatgttggtgtgctgcacccattaactcgtcatttagcattaggtgtatctcttaatgctatccctcccccctccccccaccccacaacagtccccggagtgtgatgttccccttcctgtgtccatgtgttctcattgttcaatttccacctaggtcacattttgatatgatttatttcgacatatgaataatgattctccaaaattcatatataaatcaagaattttctaaatattggttgatttagacacgataatgtaattcaatattttattatgccatccattttaaaggtaaaaactatatttcattgtgccatgtakctgaatataaataaaggtatattttaaaagttgtcatactcttttaaacaaactcttgtagtcagttctattcctaataagctccagaaaaaaaaatggcgttgacaagagtaatatttgtacttt

SEQ ID NO: 946781 - DNA, 596 bp, Homo sapiens
ctcacaacagaagtaattgtcctcactgccagaaagagagtaagagagtttatttatttttatttttattttttattttgagacggagtctttctctcttgcccaggctggagtgcaatgrcacaatctcagctcactgcaacctccacctcctgggttcaagagaatctcctgcttcagcctcccaggtagctacaggcaagcaccaccatgcctggctaatttttgtatttttagtagagatgggtttttttgccatgttggccaggctggtttttaactccttacctcaggtgatccgcctgcctcggcctcccaaagtgctgggattacaggtgtgagccaccactcctggcagagggattatttcaacagttgtttgtgcatggtctggggattcacacttcctggtgagcccaatcttatgtttcactgtggttcccaccacctatctttgctcacatacaatagcatcacttttccatccctaccagactccagattatcataatctcaggaaatttggattataggccacagcaataacctcacaatagcaaagccattttttttctctcttttctctcaatgggcca

SEQ ID NO: 946782 - DNA, 661 bp, Homo sapiens
aattgcttgaaccagggaggaggaggttgcagtgagccgagatcgtgccactgcactccagcctgggcagcagagtgagactccatmtcaaaaaaaaaaaaaaaaaaaaagaagtcttcaaccattgcctcagcatacaggtataaatacccctgctcactcactcctcaggtggtcccattctgaggcttgatggtttcccagggggattaggctccagttgccaccagggataggtggcttgaaaacctgccctttgtgggctgccttcctgcttgtctcaccatccatttgtgttttctgggcccagctcccaaataaattacttagactcaaactctggtctcagagcctgcttctaggggaacccagactaagaaaccccttcaggctgggtgacctgggagcagtgactcagcacagtctaagcctcagtcttcccaatcattaaagaagggacatgaccccagctcccctccgttctgtttagggttccagatatcccaacagatgccaaataaacactgagactttgttattctctgcaacaaaatcatttataccaagtcaggtctggacgggtcaccaagcagacttcacagcagaccatgacatccacaaggaaacaggaatgaggatgctgggggagagaaaggatgca

SEQ ID NO: 946783 - DNA, 602 bp, Homo sapiens
accagacctaggaggaatttccttcaggacaggacaataratggttcctcctgggtaattatagggaaaaaaaaggccatctataccaattctaagttaatttggactaaacaagttcatattaatagcaaaggataattgaaatcccaaacttacaaggttttcaacaaaagtaaagtttgctaaaagttaacagtgtaacatgtattatagtaacttctaatcttgtggccttagacagtctagtccacagacataaagaaaattcactttggaaaagaatggttgccatctttgaattcttgtcctgaaataaattaactggttgtttaaagaaagaaatgtttgtaataagccagaaagttgagacatgtcaaagaattgtctgtgaaagcatgaaagaaaaaaaaagttataaaaaaaattatgcaagaaatgctgtataatttaaaagtaattaggcttcctgaatgtaaaactattgaaaaaacagtttatgtgcaaggtgtgtaaagaaagtaaaatatacctctggtaaaaggattataaggaggcataagaatgtgaatttttacctacattaaaaggttaaattttttttg

SEQ ID NO: 946784 - DNA, 433 bp, Homo sapiens
taccaatctgctaagattacagcaagagccactgcatccaaccgattttgattcattctatctcatatatcaccaaagactgtttttggaagttgatgttagcataatcccattatgcatacttcagggctggggagacctgaagcacacagtcattttcatatggtcacagaaatgaaaaggaaaagaagattttaacccaactctgttctctcaaacctggggccctggctgcatttagaactttttgggaagtaagggacataattgtgtttgcataactgtttacaggtaaagagttgacatgggagaggagggtgagcaatcagcagcccagcagggmctttgcatagatttatggaggaaaagggctcaggggataaaaccttgaagaagttaacagacttcccttgtgagaaaacctaacagaatt

SEQ ID NO: 946785 - DNA, 433 bp, Homo sapiens
taccaatctgctaagattacagcaagagccactgcatccaaccgattttgattcattctatctcatatatcaccaaagactgtttttggaagttgatgttagcataatcccattatgcatacttcagggctggggagacctgaagcacacagtcattttcatatggtcacagaaatgaaaaggaaaagaagattttaacccaactctgttctctcaaacctggggccctggctgcatttagaactttttgggaagtaagggacataattgtgtttgcataactgtttacaggtaaagagttgacatgggagaggagggtgagcaatcagcagcccagcagggacttygcatagatttatggaggaaaagggctcaggggataaaaccttgaagaagttaacagacttcccttgtgagaaaacctaacagaatt

SEQ ID NO: 946786 - DNA, 433 bp, Homo sapiens
taccaatctgctaagattacagcaagagccactgcatccaaccgattttgattcattctatctcatatatcaccaaagactgtttttggaagttgatgttagcataatcccattatgcatacttcagggctggggagacctgaagcacacagtcattttcatatggtcacagaaatgaaaaggaaaagaagattttaacccaactctgttctctcaaacctggggccctggctgcatttagaactttttgggaagtaagggacataattgtgtttgcataactgtttacaggtaaagagttgacatgggagaggagggtgagcaatcagcagcccagcagggactttgcatagatttatggaggaaaaggkctcaggggataaaaccttgaagaagttaacagacttcccttgtgagaaaacctaacagaatt

SEQ ID NO: 946787 - DNA, 622 bp, Homo sapiens
caggggttgtgactcccacctctatgggcacctggaaytaaaatgagctatgccctcccccaaccaccccatgtgatataaagtgaggctacgggaaagaaaaccttcgttttctctctcataaataggggtactcaaaaggaataataccaagaattctagatactcataagtgtctgctccccttggctcttcattggtaactcactgtgctttgagactctgggaagaggcttttcaggttctagaggtccttcagagaagagagaggcctagagatgtgggcagatgaggacttggaataaagcagaatgtgacaatgcactgggctctggagtgtggggcccagaaaaaatactagttttttgggctgtccttgagttcctcattcagaagtggaagaaaatactgtctctgaatgctgttaaaatgtttaatgagtgcacagcacactcaaagaggctgaggaaaataggaatcaagggaggtttccgaggttacttttatggcccttggagtcttcagatactgctccttttcccaggggtccctgaagagccactgccttgagaattccccagtgcaggtgcctgttttgtgatgcttccacctgggacttcag

SEQ ID NO: 946788 - DNA, 594 bp, Homo sapiens
agtaaatggttctaacatatgtgtaattggaatcccgaaaggataggagagagacaatgaggaagcarcaaatttggagataactgttgaatactttctaaaaactgacgaaagacattacgattcaagaggctcagcaaattccaagcaaagtaaatataaagaaaatcacacttaggtacatcatagtggaactgctaaaaaccagagatacagtgctcacagactgagcgctgaaaacactatgaaattgaaacactgaaaacgctgaaaaacaatagaatttgctccagaaaattgtttctcgatgaaaagtttttcatgttgctgttaactctgattgaaatgtttacattcactaacacaaagtcaacatgttcttgaggtcaaattggaggagttaaaacaaaccaaaccaaaacaacagccatggttaaaacatcattttttttttccctcacatgagtggttgaatttgttccttgcgagaaaagaacctaactgaaatcttcctccaagcatttctaccttaccaagactcttcttcccttacctgatcattctacctttttggcggaagatggggcttttaat

SEQ ID NO: 946789 - DNA, 602 bp, Homo sapiens
tttcactcacttgatggtgtcttatgatgtgtcaaagatttaaattttgatggaatccacttkattttttcatttgttgcctatattttagtgtcatatctaagaaatcattgccaaacccaatgtcattaaagttttcccctgcgattttttttaagagttttatgctttcagctcttaggtttaggtctttcatccattttgagttaatttttatatatagtgtaagtcatttgttcacatatggatatccattttcccagaaccatttgttggcaagactgtcctttccccattgaatggtcttagcaaccttgtcaaaaatcatttgactacatatttaaaagtctgtttccggtctctattctgttcttttgttctctgtgtctgttttatgccagtacagtactgttttgattactatcactttgtattaagttttgaaatcaggaactatgaatcctctttgttcttctttttcaaggttgtttagttattctgggtttttgatattccatataaattttagcatgagattctctatttgcaaaatatatcattgggatttgatggggattgcattcaatctgtagatcactatg

SEQ ID NO: 946790 - DNA, 615 bp, Homo sapiens
ctggattctagagcaaataatcttatcattgagaccttattataaaatttccttgacctatgtgtcctaaggttggtaggttttatttagaaaccatagaatatayttaacagaaatgtcaaggagattgtaggttattgctaatcattggcagtaatttaaatatagagcaattatgtgtcttgacatagttgataactagattttgaaactgaaatatattcactttctcactctgtacctcctaaagctgaaacccaaggcatgttcaaataaagctttgaataacttttctgccactgaaagaaattacatctatagcctacggtttgaatcatatcagaaggaagacttgcagcccttggtggtattatatgtcttatactagggcattcttcagcaaaagctccagtattctgtgatagctaggggtatcccaggggcactttagggtatctgcatatggatcaacctagaaactttgctgatatactcttctaaatatgttctcttcagagtagaggggctagatagataggtcatctacatatatatagtttctatattaacatatagatatgtgtgtatatatatatgtgtgtatgtgtgttcata

SEQ ID NO: 946791 - DNA, 615 bp, Homo sapiens
ctggattctagagcaaataatcttatcattgagaccttattataaaatttccttgacctatgtgtcctaaggttggtaggttttatttagaaaccatagaatatacttaacagawatgtcaaggagattgtaggttattgctaatcattggcagtaatttaaatatagagcaattatgtgtcttgacatagttgataactagattttgaaactgaaatatattcactttctcactctgtacctcctaaagctgaaacccaaggcatgttcaaataaagctttgaataacttttctgccactgaaagaaattacatctatagcctacggtttgaatcatatcagaaggaagacttgcagcccttggtggtattatatgtcttatactagggcattcttcagcaaaagctccagtattctgtgatagctaggggtatcccaggggcactttagggtatctgcatatggatcaacctagaaactttgctgatatactcttctaaatatgttctcttcagagtagaggggctagatagataggtcatctacatatatatagtttctatattaacatatagatatgtgtgtatatatatatgtgtgtatgtgtgttcata

SEQ ID NO: 946792 - DNA, 595 bp, Homo sapiens
cattctaaatgggataaattggccaaaacaaaggggctatatgccctgtgcaagtctgaaatcctattgagcagtcattaaaccttaaagttccaaaatgatctcctttgactccatgtctcacaaccacgtcacactgatgcaagaagtggtctcctacagccttgggaagctccacccctaggtttgcagcccctctcctggctgctttcatgggctggcattgagggccgcttttccaagggcacagtgcaagctgttcgtggatctaccattttggagtctggaggatggtggccctcttctcacagctccactaggcagtgtcccagtggggactttgtgtgggggctcgtatcccacatttccctcccacactgccctaggagaggttctccatgagggcttgtccctgcagcaaacttctgcctggacatgcaggcgtttccatacatcctctgaaatgtgggtggacgttcccaaacctcaattcttgtcttctagtacccacargaccaacaagtggaaactgccaaggctctggggcttgcaccctctgaagcaatgtcctgagctgtatgttggttccttttag

SEQ ID NO: 946793 - DNA, 744 bp, Homo sapiens
tgctctcattctgccacttccatcatctgatgcttccagtggcttctcttcccttctgcatcagactcctctgcctggcctagaagatccttcataaatgattcctttttggcaacctcatctcctatgacagataattccttactgaaggaattgtggttcacccagtaggcaaatcagattgcattttctcatagaaagaatattttacagagttctgagatgccagaaccagccttcaagatgccaactaacctacaatgtatttgcagtattcatactattttcacacataatcccctgcccctgccctcgccgtgagtaaatgtcagcaagagtgctcacttgggttactaaattaatttttttactcactaggattacttcttggggatggggataaaattaaaagcaacgctatgattcaattcagaatcttctaactaaaacggaaattgcaaatacatccctcctgcctcattaacactatctaggtggccaccatgctcctcgtaactgtaaactgtagaaagggttccactggagtttagttggggttaggcaagggcctcatttaggcaagggtaacttattatcacacaaaaacacacaaataaaaacactattctataactttatggttgcatagaagaagctgtcacttaattctaataayttactgcatgattaagaaataaagaactgttgatttgagctccctcccacactgtgtcagtgagtctg

SEQ ID NO: 946794 - DNA, 606 bp, Homo sapiens
atcaagcagaagaaaggatattagagattgaagatgaccttgctgaaataaagtgtgcagactagattacagaaaaaagaatgaaaaggaacaaacaaagcctccaagaaatatgggactaggtgaaaagaccaagcctgtgtttgattggattacctgaaagtgatggggagaatggagccaagttgagaaacacacttcaggatattatccaggagaatgtccccagcctaacaagacaggccaacatttgatttcaggaaatacacacaacacgactaagatactctatgagaagatcaacctcaagacacataatcatcagattctccaaggttgaaatgaaggaaaaaattttaagctcagccagagagaaaggttgggtcacttatgaaagaaagcccatcagactaacagtgtatctcgctgaagaaaccctgtaagccagaagagagtgggggccaatattcaacattcttaaaggaaagaattttcaacccagaatttcatatccagccaaactaagtttcataagtgaaggaggaataaattsctttccagacaagcaaatgctgagggattttgtcaacatcaggcctgccttac

SEQ ID NO: 946795 - DNA, 466 bp, Homo sapiens
ttctccctgattatgctagactccgtgttccacaatattaatgttttgaataagagaaaacaattcagaagggtctcctgaaatattttgcctatctttctaaaayagtttctagaaagttttttttttttttagtttttagcaagttttttttttttttttctgtgactccagagatgtttcaaagtaaattgatcaactttcaggtacactttcatgcctgtagtatctttcactttatactactttacacctaatctgaccaccactcagttttcactgaaacactctgttcatgcattcaaactctattccatgtaccctcctcctgcttagtctgagagtactttcattgacatgttttccctcgaagtattttttctaatatttatgctaatgtcccaatattttatattaaccttccacctctccagtctgtctctgcacctggcttattcattactga

SEQ ID NO: 946796 - DNA, 571 bp, Homo sapiens
cccaacttccgaggaatcaactatttcaggtgtatttgtcttaaagctacaatgacatattttcatagaaatgaaaaattttttattgaactaaaaaggacttcaaatagccaaagcaatcttgagcaaaaagaacaaagctggaaacatcgcaatacctgacttcaaaaggtaccataaatctatgataagcaagacagcctggtactagcataaaaagagacacacagaccagtggaacagaatagaggtcccagaagtaagtttatgcatttactgtccatttattttttttgacaaagatgccaagaatatacaagtgggaaagaacaatctcttgcacaaacggtgttgggaaaactgcatgtctacatacagaagaatagaaatataccccatctcacatcatatataaaatttaactcaacattgattaaatactacaaatataacctacastgtaaagctcctaggagaaaataaaaaggaaaaattttataaaactggtttgggcaataaatttttggacattactgcaaaagcacaagcaacaaaaacaaaatacacaaat

SEQ ID NO: 946797 - DNA, 630 bp, Homo sapiens
ccagcagccactctcagctccagaccatatacgtttccttagagcaccactctcactcccgctgtcttcccccaacatgaaggtgccacttccacctagaatccgtttatctgcacctgtctgctaggtgagctcttcctcatcctgcatctctcttccccagggagagttagaatgcccctgcagcctcaccatctccatcacggcactgaccaagctgggtagtcactgtcctcacagttgccacccccatcagatagatgcttccacgggacagggacacgtgcctggcacagatttggggctaaataaatgcccatggaagagagaaaggaaaagactaatggtctgagagctgagactcacagtgggaggaaggtctgaggtacagagaggccataaggaacagcaaaaaggagaaacagaacggctgtggttcaggtgacaggaatgtcagggcaaagggttcaggtgatgtgaacactggggcaaatgagagcaggtgggaaaatgctctacatacctggatgggtggagacagaggaagaggggctkgggggccaggccaagaagtccccagaaacgatggaagacttctggagaaggtatgacctaaagtgataagccagc

SEQ ID NO: 946798 - DNA, 664 bp, Homo sapiens
caggctaagatcaagtaagaggttttaatcccatgagttcatctgagttggcccggccccacgtggctggacttaatgaacaaggaccatcagtgtgcagagggcaaaagctacattgcaaaggattagctgtgagagggtggtaagaaatgggagctgctgaccacttgttcagtgagattagttcaaaggcacagaagagctaaggggcagttgtcagaagccagagctgagtgtgtgtgtgtgtgtgtgtgtgtgtgtgtgtgtgagataggacaagcttagctgtgcgttgatgtgtgttcacgtgcacctcccagcccaagtgtgcacagcaccagtcttgggcgttcaagctgaagcctggctccttgtaagtgttggctgactccctgaggccaggaggcttcattacttgaggcctgggcaggctgaggaccctcaaaagtaagtgtgagtaaatcccacttccataagcccagctcccgcaggtcctggaagaaggacagacaggtgtacacatgggagacaaggactcctgactcccgattggggctttagctggggaaggacaagcgtctgtgaccagaggaggcaccacaccaccaccagcacctsgcccacccggcaccgactcctggcagataactcagccctgctgtgc

SEQ ID NO: 946799 - DNA, 661 bp, Homo sapiens
ggcacagtggctcatgcctgtaattccagtgctttgggaggctgaggtgggaggatcacgtgagcccaggggtttgagaccagtgtgggcaacatggtaagaccttgtctctacaaaaagaaytttttttttaattagctgggcatggtggtgcatgactgtagtcccagctactcgagaggctgacgtggaaagattgcttgagcccagaagttcggggcttcagtgagttatgatcataccactgcactttaacctgggcaacagagcaagaccctgtctcaaaaagaaacaaacaaacaaaaaagtgccaagataaaagtgacaacagacttttcatcagaaattatgcaagccaaacacaatggagacatttataaagtaccaaaagaaaaacattagccggccaggtgtggtggctcatgtaatcccagcactttgggagtccgcggtgggcagatcacttgaggtcaggagttcaagaccagcctggccaacatggagaaactctattaaaagtacaaaaattaaccaggtgtggtagtgggtgactgtaattccagctatccaggaggctgagataggagaatcatttgaacccgggaggtggaagtttcagtgagctgagattgtgccactgcactccagcctgggcaaaagg

SEQ ID NO: 946800 - DNA, 749 bp, Homo sapiens
ggattacagccatgcaccatcatgcctggctaatttttgtatttttagtagaaatggggttttaccatgttggccaggctggttgccaactcctgaccacaaatgatccacccgccttagcctcccaaagtgcctgggattacaggcgtaagccaccacacccggtcttacttttttttttttttgaggcagcgtctccctctgtcgcccaggctggagtgcagtggcatgatctcagctcactgcaacctccgcctcccaggtttaagccattttctgcctcagtctcctgagtagttgggattacaggcatgtgccaccacggccggctaatttttgtatttttagtagacatgaggtttcaccatcttgtccaggctggtcttgaactcctgacctcgtaatccacctgcctcggtctcccaaagtgctgggattacaggtgtgagccactgcacccgggctttttttttttttgagatggaaccttgctctgtcgtccaggatggagtgcagtggcatgatcttggctcactgcagcctctgtctcccgggttccagtgattctcctgcctcagcctcctgagtagctgggattacaggtgcacactaccacacctggctacttyttgtattttttagtagaggcagggtttcaccatgttggccaggctggacttgaactcctgacctcaggtgatccgcccgcctcggcctccctaagtgctgggattacaggcagagccact

SEQ ID NO: 946801 - DNA, 562 bp, Homo sapiens
caccccacccatacttggctgtggccttggtcaaatcctaggtggagttgagggtacttgtaccatgaaggtacagaagagtatctttagtatgttaccatttgtgtagagagagggaacacatgtacgtgggkgtgtgtgtgtgtgtgtgtgtgtacgtacgtattatggtaatatacataaaacatgtttgtaaggattcataaaaaactcaggagagaggaacagtgttgggggaagatatttcccttctgtaccttctgaggtttggactatgccaatgtatcattctttcaaaaatcaacaaaggattaatttcctcctccttatctgtgcccctacccccaaccaaaagaatgggtttagagaatcagatatacctgggtgttgaaatcccagctctaagtgatcttaggcaagcacttaacctttaataccccatgttcttcatctacacaatagaggtgataatgataactgtctcctgtggtggctgtgaggattaaatgggattgttagcatagtgcctggtgaagcactcaagaaaggttccaacagtggt

SEQ ID NO: 946802 - DNA, 715 bp, Homo sapiens
ggctcacacctgtaatccttgcactttgggaggctgaggtgggtgaatcacctggggtcaggggttcgasaccagcctggccaacatgatgaaaccccgtctctactaaaaatttaaaaaattagctggatgtggtggttcatgcctgtaatcccagctactcaggacgctgacgcaggagaatcgctcgaactagggaggcagaggttgcagtgagccaagatcacgccactgcattccagcctgggcaacagagtgagaccctgtctcaaaaaaacaaaaacaaggccgggcacggtggctcacgcctgtgatcccagcactttcggaggccgaggcgggcagatcacaaggtcaggagctcgagatcattctggctaacacagtgaaaccccgtctctactaaaaatacaaaaaattagccgggcgtggtggcgggtgcctgtagtcccagctactcgggagcgtgaggcaggagaatggcatgaacttgggaggcagagtctgcagtgagctgagatcacgccactacactccagcctgggcgacagagcaagactctgtctcaaaaaaaaaaaaaaaaaaaaaattagccgggcccggtagcaggtgcctgtaatcccagctactcaggaggctgaggcaggagaatcacttgaaccaggggggcagaggttgcagtgagccaagatcacgccactgcactccagcctac

SEQ ID NO: 946803 - DNA, 604 bp, Homo sapiens
tctgcagggggtgaaaactgggtcgagttgtttccagtggctgccttcttggcccctgcaatggtggctgagggggagaaatgtcagtgggactccggggatgtggagatgcaggggctgttggkcccgggactggttgcagtctggtgggagctgggctttcaaagtggcactgtgctgtaggtgcttaagacttggggtttgtgggacccagcatgagttccccgtctggagcaatgtctctggttgcacagtctccaggcagtgccttaggttagtctctgggccccccagagtggaggggctctcttgtggctaagattgcaggagtccgtggtgggaatgtggcacttaccctttctctccattgggaagcctgtcctggatgccggcccaccctggcagagtaggctgccttgcttctgtctccttccctgctttagatgtttcctgtcatttctctgttgaattccagtggtctgtcttagatgatctatttgaagtgtgactatctactcgctattttggttcttcttgtggaagaagctgtaggagatgcctcttgtcaaccatctggaagacccttgggttgatgcttaagtgc

SEQ ID NO: 946804 - DNA, 621 bp, Homo sapiens
atctaggatattttgttgcagtagctcaaagagactaagatgttatgcttgttagtagtactctaaggcaggcagaaccccaaattatgagttgctgctgaattgataccaggttctgtagcagttgaagaactagttatcaaaaagtgagaaggtaactgagagtactattatctacgcatctctaaaaaacatatataataaattgttaagtccatgttttttctggattcattataaagctttaactttgcaacagaataacattaaatactccctataaaatttgtgaaattctcctctccatgtaaactcagacaattcaagccatggcagatttgttattattttaaaataacttagggtgcgttcatcttcacagcatatgtggacaacagtgttccataaaatgcagtacttgaaaaagaaacacatattcttggaaatactctatcacactgtgccagcaatgccatctatcatatgcatccattttaaatttactgttgasagctttccaaattaaatagataatcactactaatgtttccttaattgtccatgtaaattattttatttttataattgaagtatagcttatataagtgaattgcccgggtt

SEQ ID NO: 946805 - DNA, 621 bp, Homo sapiens
atctaggatattttgttgcagtagctcaaagagactaagatgttatgcttgttagtagtactctaaggcaggcagaaccccaaattatgagttgctgctgaattgataccaggttctgtagcagttgaagaactagttatcaaaaagtgagaaggtaactgagagtactattatctacgcatctctaaaaaacatatataataaattgttaagtccatgttttttctggattcattataaagctttaactttgcaacagaataacattaaatactccctataaaatttgtgaaattctcctctccatgtaaactcagacaattcaagccatggcagatttgttattattttaaaataacttagggtgcgttcatcttcacagcatatgtggacaacagtgttccataaaatgcagtacttgaaaaagaaacacatattcttggaaatactctatcacactgtgccagcaatgccatctatcatatgcatccattttaaatttactgttgagagctttccaaattaaatagataatcactactaatgtttccttaattgtccatgtaaattattttatttttataattgaagtatarcttatataagtgaattgcccgggtt

SEQ ID NO: 946806 - DNA, 428 bp, Homo sapiens
gaagatattatagaactcttgggcactgttggagggagtgtcmactagaaccagtaccaccacttaggaaagcaatctggctttgttgagatgaagcatgcacatatcctatgacctgtgaataactctggaatatatattttttccgaggaagttctcccacaagttcataaggatgctcatcatgaaattgattggcgtagctggatgttgaaggcagcttaggtgcttatcactagagaaagggattaataaaatatggcagatgtagactgttgaatactaagtaacagtaagaaataaccaactggaagtatactgcagcactatagatctttaaaatccaggggtagctgggaacagtggcccatgcctgcaattccagcaccttgagaggcttggatgggaggattgcatgagcccaggag

SEQ ID NO: 946807 - DNA, 546 bp, Homo sapiens
tattaatgttgtcacgaaaaaaatttttaatcacactttttcctccataataaatttgttaattatgcaggggctrgggaagagaacagaaaaatgacataaaagtctgaagaactgccactggggtaaaatgagagaggggtacatgggacctctgtactagttttagaacttcctatgatgccatatttcaaaataaaaaggttttttttaggtcaaaggaattggtgtgagaatacattaaggggctatagtgaaactaaatttggccacttttgccaacttcagagcacaaccatcaatggcaataataatttgaatggctaacattaaaagtactgtaaccatctgaacctctgacaaaagcaaaagaagtatcctgaagtatttatagaacacttgttcttcaaactagtcattcatccatttgattagcttacagtacagggaaaaacaggcattgaaatgattatgatgtaattttgaaaatggctataataaagatatgtataatacacaaaaaaaagggaggaggctgtaagtgtg

SEQ ID NO: 946808 - DNA, 464 bp, Homo sapiens
agatcatcatggcggatgggaggcagaactagactgcagctctgactctgatggacagagcagtgtgtggaggctcacgtcatgaattttagcttcagatcaactgcaataacagaccaccaatcctgagaggacccacagaccctctgagggaagcagactgctcctgcaggaccttggagacaccccaaatattgtgagagccccaattgcggaagtgggaaagcgagatcctcctctcccgaacacacaccccctctggagaaactgaaggactgtttgcaggagaagtttttgatcttacctggagctgattcaatttagacagcccaacaaaatacaggygtagaggaagcagtaggaaaggccctgggaacttgctgggtccccagcaggccattcctgcctggcaccacagggatctatcaggagagtgggcagaagagtgagggaaaacaccacag

SEQ ID NO: 946809 - DNA, 485 bp, Homo sapiens
tggacaagcaatgccgaggagatagtttgtatggyctattgcatatgtaagccgatatgtattagcaatgatttcaggtttttaggtattagtaagactttatttggaaagggaaaagtccattctcagttctgtagcgtgaggaccaaacatgcgcaactaaagaactgagacccactttctgaaaattgaccattgccatggtgaccacttagttgtccactaaaactatttttgcttttataccgagcccatggctggactacatttcctagtcctccttgcaattaggtgcatccacatgactaagatctcgcagtggaatgtgagtgcaagtgaaggtgcctccttcacctgggcccaaacacagtgggtgattcttctctagtgttctcctctatgcattcctccatgttcctttctcctctgtgatggtcggttctatgtgccaacttggctaggctatagtccctagttaattcaat

SEQ ID NO: 946810 - DNA, 426 bp, Homo sapiens
taagacaattgaacttccacatctgtgatgcccctcccccattctgcccctgcccaaagaacgcagaaaattgttctctaactcastggttctaaaactggaaaaagcgaggttgaggtggacaaccagcatcgccatcatcttgaaatctgaggcaggagacatgtctctgttttaaatcacggaaagcatcacacgttccccaaaggagaaataacccttaggataggcagagaaaaagagggaaggtgggacaaccatcctcaggaccggaagcgctgtactgtaactcaatcaaagaaaacacaaaatcagagtgaccatctgcggtaccacacagaaggatgtttgtcccacaagtcccctgggcatgaaccctgagctagcctttccacactactaagatatccctgtaggaatgtcctc

SEQ ID NO: 946811 - DNA, 426 bp, Homo sapiens
taagacaattgaacttccacatctgtgatgcccctcccccattctgcccctgcccaaagaacgcagaaaattgttctctaactcactggttctaaaactggaaaaagcgaggttgaggtggacaaccagcatcsccatcatcttgaaatctgaggcaggagacatgtctctgttttaaatcacggaaagcatcacacgttccccaaaggagaaataacccttaggataggcagagaaaaagagggaaggtgggacaaccatcctcaggaccggaagcgctgtactgtaactcaatcaaagaaaacacaaaatcagagtgaccatctgcggtaccacacagaaggatgtttgtcccacaagtcccctgggcatgaaccctgagctagcctttccacactactaagatatccctgtaggaatgtcctc

SEQ ID NO: 946812 - DNA, 644 bp, Homo sapiens
ttggcatccttgtcaaaaatgagctcaccgtagatgtatgaatttatctctgggttttctatttttgttccactgattgttgtgtctgttctgatgccagtaccatgcctttttggttaccataactctgcagtgcaatttaaagtcaggtaatgttattctcccagttttgttctttttttttgcttgggatagctttggctatcctgggtctttagtgcttccatataaattttaggatttttaaaatttttgtctagtcattggtattttgatagggtttgcattaaatctgtaaattactttggatagtatggactttctaacaattttgattctttaaatccatgaatatgaaatatctcttatatttttgtgtcctcttccatttcttgcatcaatgttctatagttttcattgtagaggtctttcacttcttttgttaatccttatatattttatcttagttgtaactattgtaaataagattactttcttgatttcttcttcaggttttttgttttggcatatagaaatgctactgatttttgcatgttgattttatagccttcaactgtaytgaatttgtttatcagttccaatagtttattggtggaggctttaggtttctccaaatatataat

SEQ ID NO: 946813 - DNA, 566 bp, Homo sapiens
ttaaaatataaatactattgtttgcattaaaactaattttataaaaatatttagtaataaattggtctgacatattttacttcaaataaactcagcatatactatgaaaaaattttaaaagacttaaggatttttaaaatgtcacttaataaattttactgtgaaaggatttgtgactcaataaattttagaaagtgctgagtgagatgccctgcagccctttctaatgtgagctaaaccctaataggatgggatgaaaccccaatagttctattattttaaaattatattttaacatttacatatttctttcagtgcattttgaatgtgagatattttaaacttcttccatttagcaagtatttactgaacagtatctcccaggaactcttctaggcagtgggatataacagtaaacaaacagataaggtcgttcatgaagattaagttttcagagtgaggkgtagcgatagcagcaaataaacaaacacataaacagaataagggtgatgaaaacatatgaaggaaataaagaaatatgatagatgttatctggctaatggaat

SEQ ID NO: 946814 - DNA, 564 bp, Homo sapiens
ttgcttcagtgggtggaagccccatgccttggcagcttccatgtggtgttgagcctgcaggtgcacggaagtcaagaattaaggtttgggaacctccacctagatttcagaagatgtatgtaaatgcctggatgaccaggcaaaaatttgttgcatgggtggagccctcatgaaggacctctgctagggcagtgcagaagagaaatgtggggtcagagtccccatagagtccccactggggctccaccgggagctgtgagaagagggccacagtcctccagaccccagaatggtagatccactgacagcttgcaccatgcacctggaaaggccacagacacacaacaccagcccatgaaagcagccaagaggagggctataccctgcagtcacacgggtggagctgcccaagaccagaggaacccacatcttgcatcagcatgacctggatgtgagacatagattcaaaggagatcattatggagctttaggatttgactgccctggcarggtgcggtggctcatgcctgtaatcccagcactttgggaggctgaggagggcgg

SEQ ID NO: 946815 - DNA, 588 bp, Homo sapiens
atggtagcatgatgttatggaaagagagacactaggtagtcaggaaagacacctctgaagatataattttttttttttttttctggagtctcgctctgtcttccagtctggagtacggtggcwtgatcttttctcactgcagcttccgcctcccgggttcaaatgattctcctgccccaggctcctgagtagctgggattacaggcgtgcaccaccacgcccggctaatttttgtgtttttagtagagacggggtttcaccatgttggtcaggctggtctcgaactccttacctcgtgatctgcccacccccacctcccaaagtgctgggattacaggcgtgagccaccactcccagcctgaaggtataatctttaagttgagatcagaatatcaacaaagagtcagtcatgcaaaaatgaattgcttagttcttttgttaaaaactagaatgttagagctatgtccaactttcatagtggcaggcttttgtccaagtaatatatatgtattagtccattttcacaatgccagaaagatactacctgagactggttaatttataaacaaaggaggtttaattgactca

SEQ ID NO: 946816 - DNA, 618 bp, Homo sapiens
cgaggagaaaaaggagtcagaaaggaatacagaagaaggagaaagggaagtggagggggcagtggggcagggaagacaagcagcctcagatgagggagagatttaaagcaaagaaacaagttggtgaaaatcaggagggaggagcagagagcagacaagaataaaaggtaaggagggacacaaatggagaagcgggggatagaaatgcacacatctatcagttaatttccagagcatacaaaatagaaataatcctccttcaaagcatgcatttgagggtgaagtgggagacagtatgacatgaaatgaaagccggaagcatttttcaatgcggacacataagcaaggctttaattattaactgattgcttgtgtatgtgcgtgcatgtgcacacacacgtgcaagtaacaggccattgtgtccaggcattgtgaaacaagccacggaatccactggtcagagtcaatatttcctcaaaatggcagtcatttaaccattgtgcctgtctctgctctcagaatgtaactaacatcttaagtcaatagctttatggaatccctgcaaatcccttctctcttgctgccaccctggagagrcacagttgtgtgttttacctg

SEQ ID NO: 946817 - DNA, 615 bp, Homo sapiens
ttggccactgttgagacagcctctattgggaagattctgtaagtctccaaaagctgagctgaagaacttcccccttaaccagtagaaaacaaattggtaggaaaagccttaaagaattaggtcaacagagacattctttcctggagcctgagcagtagtttgattttgttgcaggaaagagtgatttatgcttcccttttcttatatcttagaacctcttctttgctcctgcttagcctcaaaagagccgtttccttccacttctcttaccccgccaccttgaaccatctgtgcctgcctttgagagtacttgcttttatgccagaattcactcagtctacacattgtgccagccgtggatggctctgtgcctggtactgggcaccctgcaaggagcgcagccctgcaagccagttggctatggggcactgtggtcagagctgtaattgaagcgccaggagtcttgaggaggcactgatgaattcttccaggagtcaggaaggcttcacttgaaaatgtagaagcttggccttctakgtgaagagaacaggtgagatttatggagtgtaactttcattcttctcgccagcgctttttatcttgcttggcatgggt

SEQ ID NO: 946818 - DNA, 582 bp, Homo sapiens
tgaactctaccaactcattgccagtagaccccactcccggtcatgacacacaaaaacatcaccagacattgccaaatgtccactgcggggstgaggggcgtgtaaaagcgcctcccattgagaaccactgctgtaacctgaattagaagatttggaaaagaaatggttgaaaacccagaccaggatccctgttgtatgtttcctatgaatgattttcatttttagaaatgaaataacatctaggacatagagcaaaacactcaaaacacatcataaatggataacataaatagataaaaatccaatgcagttcagaattacaatcaaatgttattttctcttgtgttttagaattcctcattttcatagtcaaaatatcaactaaagcatcaaaagttcctgttgatatttttgaaaatgtgttactacttagcaaatttggatttctggtttgtacagtgctgagcccttgaggaataccagaagaatgcacaccttaaggaggctgtggttttcagggagagaacagccatgcatgaggatggccatagcagaaggcggaggggtggggaagtgccagct

SEQ ID NO: 946819 - DNA, 598 bp, Homo sapiens
ccaagaataccactaaaaaagaayaggcaaatcacactctgaaataaaatattcatcagacacatgtctgatgaaaggctggcatccagaatatatacccactcctacaactcaataagatgacaaacaaccaaattaaaatgggactgtaaggcctacataccatttgatttcatttgtatgacattctggaaaaggcacaactttagggacagaaaatagatcagtggttacaagtggaaaggggtgagtatagactatatagggtgcaaggacactgttgcagtgacagaaatgtcctatatcttgattgtggtaattgtatgactatagatatttgcaaaattcttagaaaatatacctacaagagatgattttttactgtatgtaaattatgcctcattaaaactgactttcaaaaataggcaaaatatttcaacagagacttcacaaaagaaggtataccaatggctaataagcacgtgaagaaattctcaacatcatttggtcatcagggaaacaaattaaagccacaatatgatactacttatatactcaccagaatagttagaattagagactgacaacaccaaatgtt

SEQ ID NO: 946820 - DNA, 609 bp, Homo sapiens
ggcagaaggatttcttttcctttgggtatatacacagtaataggattgctgggttgaatggtagttctattttcagttatttgagaaatctctgaactactttccacaggggctgaactgttttacattcccaccaacagtgtataagcattcccttttctctgtagcctcactagcatctgttgctttttgactatttaatagtagccattctgaatgtgtatgagatggtatctcattgtggttttgatttgcatttctctgacgattagtgatgttgggcattttttcatatgtttgctgggcccttgtatgtctttttttgggaagtgtctgttcatgtcttctgttcactttttaatggagtttgtttttgcttcttgaattgtttaagttccttacagattctggatattaggcctctgtcagatacatagtttgtgaatattttctcccattttgtaggttgtctgtttactctgttgatagtttcttttgctgtgcagaaagytctttagtttaattaggtccagcttgtcaatttttatttttgttgcaattgcttttgaggacttagtcagaaattatttcccaaggctgaggtacaga

SEQ ID NO: 946821 - DNA, 646 bp, Homo sapiens
ctcctgggcctcagcctccccagtagctggggctacaggtgcacaccaccatgcccagctaatttttgttttattttttgtagagacagggtcatactacgttgcccaggctggtcttgaactcctgggctcaagcgatcctcccaccttggccttttaaagttctgggattacaggcatgagccaccatgcccagtccctcattcaacgtttttaatatccctcctgggtatgagagagtgctggaaagcttagtattgaagccagacagggttcaaatcccagattcagctcttattaatagtgtggctttgagtaagtcgcttattctctgtgaggctcagcatgcctgtgtgtaaactgagtatactagtagaaccgtacctacccagaggtgatgggtgatgagaaggatgctatgcgcccttttctgcccataagcagtcactaaatgttagctgataacccctggagaagcacagacacgaccgactgagccttcctctccaaacatcttcttaatgtaggcattttttttttttttttttgagatagagtttcgcccttgttgcccaggctggartgcgatggtgcgatctcggctcaccacaacctccgcctcccggggttcaagcgatactcctgc

SEQ ID NO: 946822 - DNA, 488 bp, Homo sapiens
ttttgtccaagtagcctaagtgacacaagaccagtatccacgttcatttccayacagccctaattcatcacaaatgtacttattttctgccatatagcctctttcctaattaagacaaccacatcctattcctaacttattactattaatgacagcacaggcatcaaatttcaaggtgacttgtttgggcacccctttttcttctgttttggctaacattttactcatatcatgtatgagcccccacaagtcctcagttcttaaccttatttcaaaaactatggtcatgggaggctcagatgggtcataacacacatcaggttggtcatttcctgggctacataccttgtatagaataacattatacaaacaatttctttttagagttccagtacacttataataaccataagataataggaccgtagcaaccttttgtcctacctcagtgacttgatgtatacactgcgaacagtcctcagtctggg

SEQ ID NO: 946823 - DNA, 544 bp, Homo sapiens
gttgagatcacaggtacgagccaccacgccccacttatttttgtatgcttagcagagatggctttttgccacgttggcccggctggtctcaaactcctggcctcaagcgatcctcggtcwcccaaagtgctgggattacaggcgtgaaccactgtgcccagctacaacctgacttttaaagactaaactgtattatacataaaatcatcctaattagaaagtgaatcttctgtcatacattcaggagattctaaagattctgccataaggcttctttgttatacacaattctgtaataaacactcttacacatacatctttgcacatgctaatgattatttccttaataagattcccagaagtaggtgtgttagttcataagatatatattttaagtcttttcatacatattgtcaaatattctttttaaaaggtaacagtaatttctattttaccatcaatgtgaacaaagattttaattattttgaaataatttcacccttacagaaaaaaaataagaaaaaagaattccaatgtgcccttc

SEQ ID NO: 946824 - DNA, 611 bp, Homo sapiens
gtcggctcactgcaaccaccacctcctgggttcaagcgattctcctgcctcaggctaccgagtagctgggactacaggcacgcgctgccacgcccggctaatttttgtatttttagtaragacggggtttcaccgtattggccaggctggtttggaactccggaactcgtgatccgcctgtctcggcctcccaaagtgttgggattacaggcgtgagccaccgcgcacggacgggaattacaatttgagattagatttgggtggagccacggagtcaaaccatatcactgcaaaggatccgcagcaaggaaggtcataaaatccgaaattttaaaataattgtcattatattatttcaatttgtgaataactatattatatatcatttataaatgcatatgacgttatacacaaggttaaatgcaaatatcctctggtgttggcctggctcagatcagggaagaagccctgcctgtaaagggtgcagcttaggctgttatttttgcttcattcagcctagcgtctgatcaaatattccgtcactcagggcgtgaagggtggggcctgaaaccttatcccatcaggggccatatattagaaactgtataatc

SEQ ID NO: 946825 - DNA, 611 bp, Homo sapiens
gtcggctcactgcaaccaccacctcctgggttcaagcgattctcctgcctcaggctaccgagtagctgggactacaggcacgcgctgccacgcccggctaatttttgtatttttagtagagacggggtttcaccrtattggccaggctggtttggaactccggaactcgtgatccgcctgtctcggcctcccaaagtgttgggattacaggcgtgagccaccgcgcacggacgggaattacaatttgagattagatttgggtggagccacggagtcaaaccatatcactgcaaaggatccgcagcaaggaaggtcataaaatccgaaattttaaaataattgtcattatattatttcaatttgtgaataactatattatatatcatttataaatgcatatgacgttatacacaaggttaaatgcaaatatcctctggtgttggcctggctcagatcagggaagaagccctgcctgtaaagggtgcagcttaggctgttatttttgcttcattcagcctagcgtctgatcaaatattccgtcactcagggcgtgaagggtggggcctgaaaccttatcccatcaggggccatatattagaaactgtataatc

SEQ ID NO: 946826 - DNA, 611 bp, Homo sapiens
gtcggctcactgcaaccaccacctcctgggttcaagcgattctcctgcctcaggctaccgagtagctgggactacaggcacgcgctgccacgcccggctaatttttgtatttttagtagagacggggtttcaccgtattggccaggctggtttggaactccggaactcgtgatccgcctgtctcggcctcccaaagtgttgggattacaggcgtgagccaccgcgcacggacgggaattacaatttgagattagatttgggtggagccacggagtcaaaccatatcactgcaaaggatccgcagcaaggaaggtcataaaatccgaaattttaaaataattgtcattatattatttcaatttgtgaataactatattatatatcatttataaatgcatatgacgttatacacaaggttaaatgcaaatatcctctggtgttggcctggctcagatcagggaagaagccctgcctgtaaagggtgcagcttaggctgttatttttgcttcattcagcckagcgtctgatcaaatattccgtcactcagggcgtgaagggtggggcctgaaaccttatcccatcaggggccatatattagaaactgtataatc

SEQ ID NO: 946827 - DNA, 432 bp, Homo sapiens
tctttttctaggatctgcaaagagatatttctgagtggtttcactcaaacagtgaaaaaagaaatttcttcacctaaaaagtggacagaatctttctgagaaacttcttygatatgtgtgcattattctcagagagtttgaacctttcttttgattgggtaatttggaaacagtctttttacagaatctgcaaagggatatttctgtacggatttaggcctatgatgaaaaaataattatcttcacataaaaagtagacagaatctttctgagaagcttctttgtgatgtgggcattcatctcatagagttaaaactttcttttgattcagcagtttggaaacagtctttttatagaatctgcaaagggatatttcttagcggattgaggcccatggtgaaaaaggtaatattttcatataaaaactagaca

SEQ ID NO: 946828 - DNA, 433 bp, Homo sapiens
gaggctgaaacaggagaatcacttgaacccaggagacagaggttgcagttagccgagattgcgtcactgcactttagcctgggcaacagcgcgagactctgcctcaaaaaaaaaaaaaagggatctttcacagtctcatgttcccattcccttaactgccagaatctccatgatttatgtacatgttatcagtgacctgagaagagatttcttactggctcttattcttctaaaacgtaatctttttttttttttttttttttttttttggcggggatttaggatcttgttgggataaaattgttcccttataccttaaaaatttacctccactgccagtcaataaatacctaatcaaggtctaaaaaggggcggcataaggaataacaaacactgasctaattttgttgaaaatgtaaactaggatggtaat

SEQ ID NO: 946829 - DNA, 569 bp, Homo sapiens
ttgggaggctgaaacaggagaatcacttgaacccaggagacagaggttgcagttagccgagattgcgtcactgcactttagcctgggcaacagcgcgagactctgcctcaaaaaaaaaaaaaagggatctttcacagtctcatgttcccattcccttaactgccagaatctccatgatttatgtacatgttatcagtgacctgagaagagatttcttactggctcttattcttctaaaacgtaatctttttttttttttttttttttttttttggcggggatttaggatcttgttgggataaaattgttcccttataccttaaaaatttacctccactgccagtcaataaatacctaatcaaggtctaaaaaggggcggcataaggaataacaaacactgacctaattttgttgaaaatgtaaactaggatggtaatgaaatgtcctaaactggcwttcacctttgaaagcctgctcaacaaaaattatctgaggagtcagtgacaacacccaacatttgatggggacttcctatgtcccaaacactactttaaagcctaaaaatacta

SEQ ID NO: 946830 - DNA, 698 bp, Homo sapiens
agggcataaaaagcatagtaaaaatcaaatatttcctggaaaaaagtgtacttaaaagatcactgtggctcacacagtctatcttttgtacctgtgcttcactttaatgcaattaaaatttctataaaaacatggagcttttcccaggccaaagacatccagagaattaactcttttggtgctgattattctgacattattcagcagccatggttgttgatcatgtaaggattgggaaactcagcaactccaagaatttctgccaaatttttagtgtacctagaagataagaacccaaagcatttggctcggagagatgtaagtttgagaggagagaggcagctttgccacttcttgcctatgaggtatcttgatgggttactcaactctttaggattcagttgcaggcaaacagatccactttactgagatgttgtgaggatctgatgggataacacatgaaggttttctagcacagggcctggcgcacagttcatgctcatttattatcctcatggcttttaccagctctttttagcttgctcctaaaatacagaaaatggatgtccaccaagggcaagggaccctggacacttcagaaacacaagatcctggagccataattctgttcagtctttccaatctcaaaatggtaaactctataagaaraaacattaaagcttttcaacatcaagcat

SEQ ID NO: 946831 - DNA, 787 bp, Homo sapiens
cagatcactactgctgtggtctgaatgtttgtcctttacataggatttcacaacactgctamgagggtctgaatgtttgtcccttaaataggataccagaaaactcctgctgtgctgtgaatgtttattcctcacataggattccagaacactgctgctttggtctgaaaggttgtccctcacagaggattccaaaactctggtacgaggttctgaatgtgagttcctaacataggattccagaacactgctgctgggttctgagtgtttgtacctgcaataagattccagaacacttctgctggggtctgaatgtttctccctcatgtaggattccaaaacagtcctgctgtcttctgagtgtttgtccctcaaatggggttcgagaacactgctatgagggtctgaattattctccctcacataggattccagaacacggctatgagggtctgaatgtttgtccctcacatatgattcctgaatactcctgctgtggtctgaaagtttccctcaaataggattccagaacagtgctgctgggttctgagtgtttttgcctcacatatgattccagaacactgctacgagtgtcctaatgtttgttcctcacataggattacagaacactgctgctgggttctgtgtatttctcactcacataggattccagaacactgctacgagggtctgaatatttgttcctcacataatattccagaacactgccaagagagtctgaatgtttatccctcagataagattacagaacaatgctacgaggctc

SEQ ID NO: 946832 - DNA, 597 bp, Homo sapiens
caaaagaaaggatattactgtgtcaaaaagatatttgcattcccatgttcattacagaactatttataatagcttatatatggaatcaattcaaatgtacagcaacagataaatggataaggaaaatgtactatatatacacagcgaaatactattcagccataagaaagcataaaattctgtcagttaaaagagcatggatgaaccttgagcataccatgttaagtaaaataagccacatagagaaacacaaatactttatgatcttattatctcactcatttgaggaacctgaaaaaaagggttgatagaagcaaagagtacaacaggggttaccagagactgaagcaggaggatgggaaaaggctgcttcacaggtattgtgttatgattagataggggaaataagtttttgttttttattacacagtagaataataataattaatgaaaagttatctcatattacaaaatagctaaaagagaccagtttcggtggcatattctygcaatccatacattttgggagattgaggtaggagaatcacttgacgtcagaagttcaagatgagcctggacaacatagtgtgaccccgt

SEQ ID NO: 946833 - DNA, 669 bp, Homo sapiens
ctggacatatacatcccccacaagactaaacaaggaagaagttgaatctctgaatagaccaataacaggttctgaaattgaggcaataattaatagcctaccaaccaaaacaagtcgaggaccagacggattcacagctacattctaccagaggtacaaaggggagctggtaccaacccttctgaaactattccaatcaatggaaaaagagggaatcctctctaactcattttatgagaccagcatcatcctgataccaaagtctggcaaagacacaacaaaaagagaaaattttaagccaatattcctcatgaacatcgatgcaaacattctcaataaaatactggcaaaccgaatcaggcagcacttcaaaaagcttaaccaccaagatcaagtgtgcttaatccctgggatgcaggttcaacatatgcatatcagtaaacataatccatcacataaacagaacaaatgacgaaaaccacatgattatctcaatagatgcagaaaaggccttcgaaaaaattcaacagcctttcatgctaaaaaatgctcaataaactagatattgrcagaatgtacctcaaaataataggaactatttatgacaaactcacaaccaatatcatgcagaatgggcaaaaactggaagcactccctttgaaaaccggc

SEQ ID NO: 946834 - DNA, 669 bp, Homo sapiens
ctggacatatacatcccccacaagactaaacaaggaagaagttgaatctctgaatagaccaataacaggttctgaaattgaggcaataattaatagcctaccaaccaaaacaagtcgaggaccagacggattcacagctacattctaccagaggtacaaaggggagctggtaccaacccttctgaaactattccaatcaatggaaaaagagggaatcctctctaactcattttatgagaccagcatcatcctgataccaaagtctggcaaagacacaacaaaaagagaaaattttaagccaatattcctcatgaacatcgatgcaaacattctcaataaaatactggcaaaccgaatcaggcagcacttcaaaaagcttaaccaccaagatcaagtgtgcttaatccctgggatgcaggttcaacatatgcatatcagtaaacataatccatcacataaacagaacaaatgacgaaaaccacatgattatctcaatagatgcagaaaaggccttcgaaaaaattcaacagcctttcatgctaaaaaatgctcaataaactagatattgayagaatgtacctcaaaataataggaactatttatgacaaactcacaaccaatatcatgcagaatgggcaaaaactggaagcactccctttgaaaaccggc

SEQ ID NO: 946835 - DNA, 669 bp, Homo sapiens
ctggacatatacatcccccacaagactaaacaaggaagaagttgaatctctgaatagaccaataacaggttctgaaattgaggcaataattaatagcctaccaaccaaaacaagtcgaggaccagacggattcacagctacattctaccagaggtacaaaggggagctggtaccaacccttctgaaactattccaatcaatggaaaaagagggaatcctctctaactcattttatgagaccagcatcatcctgataccaaagtctggcaaagacacaacaaaaagagaaaattttaagccaatattcctcatgaacatcgatgcaaacattctcaataaaatactggcaaaccgaatcaggcagcacttcaaaaagcttaaccaccaagatcaagtgtgcttaatccctgggatgcaggttcaacatatgcatatcagtaaacataatccatcacataaacagaacaaatgacgaaaaccacatgattatctcaatagatgcagaaaaggccttcgaaaaaattcaacagcctttcatgctaaaaaatgctcaataaactagatattgacagaatgtayctcaaaataataggaactatttatgacaaactcacaaccaatatcatgcagaatgggcaaaaactggaagcactccctttgaaaaccggc

SEQ ID NO: 946836 - DNA, 631 bp, Homo sapiens
taagtggagatagggatgctatgtagcaagattgctgacctgcatgcatggcttaacacttgccttgcactgmcttaaattgtgacaataatttggtattatattgccacagagtcagttttgtcagtcttatgatctctattttaacattagtgctgatgatttgttgtacctaaagagcaaacagaggtacaacagcaaacaggtgtgtaacaaggcctgtctgtctcctcctgttctgtgtgggagatgctgatgggagaagaaaagacacacacacaatacctttaagggtaaacaacttttttatcccatgtaaatggtattgcagatatctatatctatatctatatttttatctatctatatatatgtatgtatgtatctatctatctatatctatatctatgtatatgtactcaccagactatacagcattcatggccagatggggaagcaacagcctaggctccagagttggctactacacccaccagactatggaggattcacttttcagcttcaagatcaccgctggaagctcagggacttcccatattccaggatagaaactcctccagttctccctcttggcaattgaatggtcggggggaactgaccttagtgaaaa

SEQ ID NO: 946837 - DNA, 553 bp, Homo sapiens
tatctctttttctccaggatttgtccctggtaccttatttagttcacttggtgaggtcatgttttcctggacagtgttgatgctagtagatgttcttcagtgtctggacattaaaatcttgggcatgtagcaccatatgagaggtttaaaaaaataaaatttaaaaagagtataggtgagtatttattgtagtcttcactgtctgtgcttatttgtagctgtctttcttgggaaggcttttcacatatttgaaaaaaacttgggtgttgtgatctaagccatatctgctttatggggcaccttatacccaataatgcggtaattcttccagactcagagaagtaccaccttgacagccttcaacaagatccaggagaattttctggattactagccagagactttttccttacccttattttctctcaaagatacagagtctttctctctattctaagccacctaaagcttagaaagagagaagaaagacacaagcaccgctggccaccaccactatgactgcyctggatcagacctgaaactagcacagcac

SEQ ID NO: 946838 - DNA, 627 bp, Homo sapiens
gggcaaaccaggtgtggagtggcgagcggtgtgtaagcatgggttccagccactgtgcacaatcaggcatgctggctgcagcagggtgggcagctccagacactggcacaggcactggctttgtgtgaggctgtgactggaccagatataccatcagcagtttccactggcaccagggaatgtggtggtgaccagaagcttggagatgctaggaaccacaaagccccaaagagggtgttacagccctggttcagggaacccctcagtctggactaccccaagggccacagttcttctttcctcatcacctgaaatgtggccagtgggggcaggtgggtatttcagccctgtttttcttacagctctttcagccctgccatttggcaggtcccaaattcttcttccacatccaggaagaatgaggtatgtggacaatcagaggatgggcaaggtggagaggaatatcactgagtgtcttaacagttctctggagacccagggtagctcctttccgcaggcaggtcatcctgatgagtgtccagctctcagcagtgaggasacctgtggtgggtagcccctctccgcaggcaggtcatcctgaaaagtcaaggagaccaaagtgggtag

SEQ ID NO: 946839 - DNA, 592 bp, Homo sapiens
aagtccaataaacctctttattttatgaattgtccagtctcgggtatgtctttatcagcaacatgaaaacagatgactagagtaaatttgtgctgggagtgcgrcactgctgaaaagatacccaaaagtatggaagcaactttggaattgggtaacaggcagaggttggaacagtttggagggctcagaagaagaaaggaaaatgtgggaatgtttggaacttcctagagacttgttgaatggctttgacaaaaatgctgatagtgatatgaacaataagatccaggctgaggtagtctcagatagagatgaggaactttttgggaactggaacaaaggtgattctctttatgttttagcaaagagactggtggcattttgcccctgccttagagatttctggagctttgaacttgagagagatgatttaggctatcttgtggaagaaatttctaagcaacgaagcattcaagaggtgacttgagtgctgttaaaagcattcagttttataagattagcagaggataaaagtttggaaaatttgcagcctaacaatgcaatagaaattaaatctcattttctgaggagaaat

SEQ ID NO: 946840 - DNA, 622 bp, Homo sapiens
gcagaactaatagccctcactagggcactagaattaggagaaggaaaaagggtaaatatatatacaggctctaagtatgcttacctagttctccatgcccaygcagcaatatggagagaaagggaattcctaacttccaagggaacacctatcaaacatcaagaagccattaggatattattattggctgtacagaaacctaaagaggtggcagtcttacactgccggggtcataaaaaaaaaaaaaaaaaaggaaagggaagtagaagggaactgccaagcagatgttgaagccaaaagagccacaagacaggaccctccattagaaatgcttatagaaggacccctagtgtggggtaaccccctccaggaaaccaagccccagtactcagcagaagaaatagaatggagaacctcaagaggacatactttcctcccctcaggatggctagccaccaaagaagaaaaaatacttttgcctgcagctaaccaattgaaattacttaaaaccctttaccaaacctttcacttaggcattgatagcaactatcagatggctaaattattatttactggaccaggccttttcaaaactatcaaatagatagtcagggcctgtaaa

SEQ ID NO: 946841 - DNA, 636 bp, Homo sapiens
gaaggagagagcccacctacatggcacccagctttgcagaggctcctgaagacacaaggttgaaggccctggactcaaaaatttccttgactctgccaggcaagagggttagctgtttcagcagagggtatagccaagcgaaagctggagagtgaataagaaatgctaggagcaattgcgtcaggtggggcaaccaggactgtgtttgccttcggaccagggctgccgagtacagatagcaggtggtttatgtgaggcctggagcaggggtcattgcaggagaaggggttgctgtgtgcctataaatggagtgaaaaagtgagtgcaaagaaatggaaaagttaggagatgcagcataacctgtgaatcatgatccctgacaaagtggggaggctcatgggtgcaggtgtaggtgtgtgtgtgtgtgtgtgtgtgtgtgagatcacatggctgtggacagaggtgggctggaacccctaacttccaggaaactccaggttcttttcttcttctacycataggtctgcattgtgtttttctagggtcactcatctattcatccaacaaatattcaacaagcacctgttacataccagattattacatacatgtggcagtgcacgtaactgtgaagct

SEQ ID NO: 946842 - DNA, 747 bp, Homo sapiens
atgatccagagcaggcagggtccacaatgactcagaaacatcttgagsacctgctcagagaatgacaacacacgggccagtgggaacagcttccaaaccccagcaaaggtgaacagtaagataagtaatgataattccaggttataatccaataaataagatagaaaactacacatccatactgacataaatacaacataaatgaataaattaaacgttgaatgaagagcagagtatttacacagttttaagctagtcctccatgtaatactaattaattacaaaggaagaaaggagtgaagaaaccacagacaccacctccatcaggtcaccagtgtgaacatcgtcagtaaccgggcaaattgcagtcctgccgacctgagagcacggagtgaggcggtcccagggtcgctcctgggttctcctgccaaggacgctaaacctgaatctgctcatgaggaagcatcaggcagccccgtgctgggggaaatcctgcaatgtaactggcctagagccattagagtgtcaaggccacgaaagtcacagaaagactgaggaacttttccaggtgaatggagcctaataaaacacaacagccaaatgcagcatgtagctctgagatggttccttttgtttttaaggatgtctgggggcaaatatgaacagggtctgagaattaggcattaggaatatatcaacgttgattatctgattctgttaactctactgtggttgtgtaggagcata

SEQ ID NO: 946843 - DNA, 451 bp, Homo sapiens
cccagcactttggctaggcctaagtgggtggatcacctgaggtcaggagttcaagactagcctggccagcatggtgaaaccccgtctctactaaaaatacaaaaattagccaggcatggtggcacgtacctgtaatcccagctacttgggaggttgagacacgagaattgctcaaacctgggaggtgaaggttgcagtgaaccaagatcatgccactgcactccagcatgggtgacagaataagactccatcttaaaaaagattaataataataataaataaaatagataaaacagcctcagaatgtcgcgttgtagggaattttaaaatgtccactttgtatattgacaagtattttttctgtaaagcttttggggtttttggggggctatagcrtgtagtgcctcgagttcataaggagatgtggttttgagggactcactctcagctt

SEQ ID NO: 946844 - DNA, 579 bp, Homo sapiens
tgagcatctattctgtttaatgccaggcctttgaaggcacagaaaccaatacatattatgaactttaccattgaacaaaagggtttcttaagccctaaggagccactgatgaactttagaactccatcaagttcaggaaattatttggttggtgcaaaagtaattgtgatttttgctattaaaagtaatggcatacataaagtgttataaattccatatttttctgagaaatggttccatagttctcattaacttttataatgttctatgaccaaaataacataaagaaccatagatataagacaaaaatatactaaaaacttgagcttctaatgactcttatgttaactgactgccatatataagtctgttaaattcttggcatagagatggacagtccaattgtaatatcaaatattctttctaaagacttcttatatttgaaaagtcatataatcttaaagtggcatcccaaattttattgtttacaggwtttattggttatatgtttctttttacaaaatgacagcttatcatagtttcaatttttttgaagttgatgtaagaaatagttatatg

SEQ ID NO: 946845 - DNA, 647 bp, Homo sapiens
gggatataatctcctggtgtgctgtttattaagcccattggaaaagcacaatattagggcaggagtgacccaattttccaggtgccatctgtgaatgctttctttgactaggaaagggaattccctgacctcttgcccttcccaggtgaggtgatccctcaccctgctttgggtcacgcatggtgtgctacacccactgtcctgcaaccactgtctggcactccccagttagatgaacccggtacctcagttggaaatgtggaaatcacctgtcttttgcatcgctcatgctgggagctgtagactggaactgttcctattcagccatcttggctccacgtatatccactgccacacttctttagtcataaagtgagtgccttggtcagaggcaatgctgtgtggaataccatgatggtggataaggcattctgtgagtccatgaatggtagtcttggcagagcattgtgttcagtttaggcaaacccatatccagagtaagtgtctgtttcagtgaggacaaacctctgcccttttcaggatggaagaggtccagtataaccaaccttccaccaggtaacagactgatcacccygaggaatggtgccatattgagggctcagtgttagtctctgctgctgtcaaat

SEQ ID NO: 946846 - DNA, 709 bp, Homo sapiens
gagacttacctagtcctgaggacaacagacaatggccttaayaggcctggaaggtgagtggaggcacagaggaggacagtgtggaacagttagcaggcattgggctgttggtcttccttctaccagacctggaaggacctcacatttggcctatgggaaatgcccgccacactttgggaagatttactatctgcttctagaaggctgtgtgtatattatgaaaaagctattctcaactcacccccaaccttttaatagataacatctgtggggaggctgacaagatggctgaatagaaacagctcaggtgtgcagctcacagtgagatcaatgcagaaggtgggtgatttctgcatttccaactgaggtacccggctcatctcatttggactggttagacagtgggtgcagcccatggagggtgaactgaggcagggtggggtgttgcctcacctgggaagtgcaaggggtcagaaaactcccctgttagccaagggaagctgtaaggagctgtgccatgaggagtggtgcattccagcccagatactatgcttttcccatggtctttgcaacccacagaccaggagattccctccagtgcttatgccaccagggtcttgggtttcaagcacaaaactgggtggccatttgggtagacaccaaggtagctgcaggagtcttttttcataccccagggatgcctggaatg

SEQ ID NO: 946847 - DNA, 528 bp, Homo sapiens
tacatcaaaaaggaagaaaaacttcaagtgaataacctgatgatgcatcttaaagaattaaaaaggcaagagtaaaccaaacccaaaattagtagaagaaaagaactaataaagatcasagtagaaataaataaaattggacttctgctccaagatggcctaatagaaacagctccagtctgcagctcccagcatgattggcacagaagatgggtgatttctgcatttccaactgaggtaccaggttcatctcattgggactggttggacaatggatgcagcccatggagggtgaggtgaagcagggtgaggagtcacctcaccccggaagcacaagtgattgggggatttccctttcctagccaagggaagccgtgacagactgtacctggaaaatcggttcactcccacccaaatactgtgcttttcccatagtcttagcaaccggcagaccaggagattctctcccaagcctagctcatcaggtcccatgcccacggagcctggctcactgctagcacagcaatc

SEQ ID NO: 946848 - DNA, 643 bp, Homo sapiens
acttaggttggtgggtttttttctgtcaatatttggaatttttcatttcactgtcttcttgctttcacagtttctgcaatgttgaatgcagttcttatctttgtgtctctgtaggtaaggtgttttctgccccacctctggtttctttcagagttttcctttatcttttatttcatagagtttgaaaattatatgtccaagtgtaggttgttggcatttattctgcctggtgttctcggagcttcctggatctttggtttggtgtctgacattaatactggaagttctcagaaatggttgttgcagaactttcttctatttcttctcctcctggtattctcattactctctttcaccttttgtagttgtcccacagtcttggatatcatcttctgttcttttcagtgtttcttttctttagttttcgaagtttctgatgataaatcctcaagctcagagattctttactcagctgagtccagtctactaataagccatcagaggtattcttcagttatttacattttttatsactacattatgttgaaggttcttacgatgtctgtctttctgattaccttacccatctacacttgaatgctgtctacttcattcattaggcccttagcatattctccagggg

SEQ ID NO: 946849 - DNA, 689 bp, Homo sapiens
acaaacattcagaccctcgtagcagtgttctggaatcctatgtgaggraaaaacattcagaccacagcaggagtgctcgggaatcctatgtgagggacaaacattcagaacctcgtagcagtgtgctgtaatcttatgtgagggacagacatttagaccctcgcagcagtgttctgaaatcccatgtgagggacaaacattcagaccctcccagcagtcttctggaattctatgtgagggacagacattcaaaccccagcagcagtgttctggaatcctttttgagggacagacattgagaccccagcagcagtggtctggaatcttatgttagggacaaacattcacaccccagcaacagtgttctgtaatcttatgtgagggacaagcattcagaccccagcagcagtgttctggaatcttatgtgagggacaaacattgagaccctcgtagcagtgttctggaatcctacatgagacacaaacatttgtaccacagcggaagtgttctggaatcctatgtgaaggacaaccattcagaccacagcaggagtgttctggaatcctatgtgagggacaaatattcagaccctcatagtagtgttctggaatcctttgtgagagacaaacattcagaccccagcaggagggttctggaatcctgtgtgagggaccaacattcagaccct

SEQ ID NO: 946850 - DNA, 757 bp, Homo sapiens
actagtaatgctaaaaaccaaccacatacacaagtctgcaaaataactagctgacagcatgatgacaggatctaatccacacataccattactaaccttaaatggaaatgggttaaatgctccgattgaaagacacaggggggcaagctggataaagaaccaagacccatttgactatgccgtctccaagaaacccatctcacatgcagtgccatacataggctcaaaatgaaggaatggtgaaaaatctttcaagcaaatggaaaacagaagaaatcaggtgttgcactcctattttcgacaaaacgtatataccaataaagataaaaaaagacagagaaggacattacaaaggtggtcctgacctttgataaatctcattattgattgataccaacctgggctatctttattgcccaaaccaacaggataatttgctgaggttgtggagcttctcccctgcaaagagtccctgatctcccaaaatctggttgagatctaagtttgattttgctgtacaactccttttctgaagttttactcatttccaacaaggaagacaagttttcctgcttctttgatgatggagagcaggcacctcctttcctgagtttcagcttgcttctgacagggaaggtgagtgtaagttgtttccagcttctaagatggcaragaacgatcaccaacctgagccttgtttccaggtaagtagctgaattagagttttgttttaaaatttttccttaatgactaaaat

SEQ ID NO: 946851 - DNA, 523 bp, Homo sapiens
gaattgtgctgcaataaatgtgcagttgtcttttcgatacagtgacttcttttcctttgggtagatagtagtgggattgctggatcaamcggtagatctacttgtagttctttgagaaatctccatagtgttttccacagaggttgtactaatttacattcccaccagcagtgtataagtgttcccttttcatcacatccatgcattatctattgctttttgactttttagtaataaccattgtagctggggtaaggtggtatctcattgtggctttaatttgcatttccctaatgaatattttttcatgtttggccgtttgtttatcttctttagagaaatgtctgtcatttgcccactttttaatgggattttttttcttgttgatttgtttgagttccttgtagattctggatattagtcctttgtcagatacatggtttgcaaatattttctcccgttttgtgggttgtctgtttactctgatgatgatttctttgactgtgcggatgcttcttaatct

SEQ ID NO: 946852 - DNA, 583 bp, Homo sapiens
tgttgaattttagaaatgctttttctaaattgatttaattatggtaatttattgaaaagagtatatttgttctgtaagttctgtaacttcaataagtaatgttgaagttactttttttttttttttgccttcaagcatctgtttaacaaagcacatcttgcaccacccttaatccatttaaccctgagtggacacagcacatgtttcagagagcacggggctgggggtaaggttatagattaacagcatcccaaggcagaagaatttttcttagtacagaacaaaatgtagtctcctatgtctacttctttccacacagacagcaacaatccgattcctttatcttttccccacatttcccccttttctattcgacaaaaccgccatcgtcatcatggcccgttctcagtgagctgttgggtacacctgccacacggggtggcggccaggcagagggagtcctcacttcccagaaggggcggccgggcagaggcacccccccacctcccagaygggaccgcggccgggcggaggtgccccccacctcccggacggggcggctggccgggcgggggctgccccc

SEQ ID NO: 946853 - DNA, 583 bp, Homo sapiens
tgttgaattttagaaatgctttttctaaattgatttaattatggtaatttattgaaaagagtatatttgttctgtaagttctgtaacttcaataagtaatgttgaagttactttttttttttttttgccttcaagcatctgtttaacaaagcacatcttgcaccacccttaatccatttaaccctgagtggacacagcacatgtttcagagagcacggggctgggggtaaggttatagattaacagcatcccaaggcagaagaatttttcttagtacagaacaaaatgtagtctcctatgtctacttctttccacacagacagcaacaatccgattcctttatcttttccccacatttcccccttttctattcgacaaaaccgccatcgtcatcatggcccgttctcagtgagctgttgggtacacctgccacacggggtggcggccaggcagagggagtcctcacttcccagaaggggcggccgggcagaggcacccccccacctcccagatgggaccgcggccgggcggaggygccccccacctcccggacggggcggctggccgggcgggggctgccccc

SEQ ID NO: 946854 - DNA, 638 bp, Homo sapiens
cctggctgcttctaaaagcctatcctcatttgcataaacaaagaaatgacttgaaactagaacttatatttaaaaagaaagcagagcataaaagtttggaaaatttgcagcctgaccatgcagcagaaaagaaagccccattttctgaggaggaatttaaggctgcagaaatttgcataagtaaagaagagccaaatgtgaatagccaagacaaggcagaaagcatcccagccactccagctccagccatggctaaaaggggccaaggtgcagctcaggccattgcttcagagggtgtaagccccaagttttggtggcttccatgtggtgttgggcctgtgggtgcacagaaggcaagaatcaaggtttgggagtctctgcatagatttcagaggatgcacggaaatgtctggatgtccaggcagaagtctgctgtggaaatagagccctcattgagaacctctactagggtagtgtgggggggaaatgtggagttggagcccccacacaaagtccccactagrgcactgactaatggagctgtaagaaaagggccactgtcctccagatcccagaatgatagatccactgatagcttgcactatgccctggaaaagccacagccattcaacaccagc

SEQ ID NO: 946855 - DNA, 552 bp, Homo sapiens
  misc_feature 519, 520, 521, 522, 523, 524, 525, 526, 527, 528, 529, 530,531, 532, 533, 534, 535, 536, 537, 538, 539, 540, 541, 542,543, 544, 545, 546, 547, 548, 549, 550, 551, 552: n = A,T,C or G
gggtgatctacccacctctgcctctgcctcccaaagtgctgggattacaggtgtgagccactgcgcctggccagaacacatgaacattttggtccttgttatttcttttargcaaaatattttttcttttaaaattggagcacaaggtacaccttaataaatatgtttatttgaagcatcatttcattattcacggtttttaaatttttcataaaaaattttaaaaataaaccagccgtaacacctctgaagtggaagttacactgaaccaggcatttcatttccaggtgccttggtctctttcatgcataatttgtaaaatgataatagcccttactagtatttacattgtaaaagtgttgttactgtaaattagatagtctaaaatgggttatgatgccttctttgaaagacaagcattacacacaaatgaggtattattatttagttttgccttttcaagctcgttaaatgagaattagatgaaaactctgctttaagcaatattcagcgggtaannnnnnnnnnnnnnnnnnnnnnnnnnnnnnnnnn

SEQ ID NO: 946856 - DNA, 608 bp, Homo sapiens
tacaatttaggggacaaagattttttcaaatgacagaattactctcgccatgtgtattaktttgttctcacattgctagaaagaactacctaagactgggtgatttatgaagaaaagaggtttgattaactcacagttgcacaggctgtaaaggaagcatggttggggaggcctcaggaaacttacaatcatgatggacgggtgaaggggcagcaagcagcttcttcacatggtggagtgggagagacagagtgaagggggcagtgctacacacttttaacaactagatctcctgagaattcactcactatcacaagaacaacaaggaagaaatccacccccatgatccagtcacctcccaccaggtgcctcccccaacactgggaattacaattcaacatgagatttgggtgggcacacgcagccaaaccttatcactctgtgtctttggacagtttattcaacttctctgtacctcaatgtacccatcgaaaatgggcaaaatcatacttatctcaaagaacattttaataagtgatataataataagtattttaaacactatgtgccagccactattttacatgttttatacacattattttatt

SEQ ID NO: 946857 - DNA, 240 bp, Homo sapiens
tggcaggaatgatgaccataagggatgtggtatgaaatggatttcttttcgcgtccttgagcacttacagagagaaaatgacaagctcaggtccattaattcccaccttgagtcatgatctgaggatcacacagcctccatgacagccctcaaagaatgtctcatttttgtagccacagggctgatgttgctgaaaatcaaacaaaaaawttaatggtgcaagttactgaattaaaatgg

SEQ ID NO: 946858 - DNA, 604 bp, Homo sapiens
actgttctcttaggcaggtcttagaagaattaacttatgcaatcctcacaaaaattttattaggtaaatgatattatccccattttatacatgggcaaattgaggcctaggaaggttaagtaatttatccaaggtcacagttaagtagtggagccaggatttgaatagtctagcttcagagactgtgctcttagccactaaattttgaagatattcatcccagaatactggaaaaaaaaaaaagaccccaaaatatgcaacttgctctcaaatggttcaggaaaaaagtgtgcagatatatacagacagtaagcaataaagcaaacagggtaaaatgttattatgtgaatcacgtaaagggtatatgggtgttctatgcactattccatttcttgcaacttttctgtaagcttgaaattatttctaattaagaagttgtctgggcggaacacagtggctcatgcctgtaatcctagcactttgagaggccaaggctggtggatagcttgagctcaggagttcaagaccagtccaggcaacacggcaaaactyggtctctacaaaaaatacaaaagttagctgggcatgggggcctgcacctgta

SEQ ID NO: 946859 - DNA, 791 bp, Homo sapiens
ttccaaactggctagaacagtttagagccctgtcagcagggtgcaagtgttcttgtttctctgcttccttgccaacacttggtgttatcagctttttaaatcaggctttctgtgtctaatctgctgcagacatagcaaagcctggctataatttattttttaaatgctaataaaaattagatcctgagggccaggtgcagtggctcacgcctgtaatcccagcactttaggaggccgaggtgggctgatcacaaggtcaggagattaagaccatcctggctaacacagtaaacccagtctctactaacaatacaaaaaaaattagccgggtgtggtggcgggcgcctgtagtcccagctacttgggaggctgaggcaggagaatggtgtgaacctgggaggtggagcttgcagtgagctgagatagcgccactgcactccagcctggatgacagagcaagactccgtctcaaaataataataataataataataacaataataataattagatcctgaaaattttttcacttgctattaactctcatattttacatgcatctttgttagtatttcctacatcatactcatgtctggaaacaattttatttctttctttccaattttatacctcttatctctctttctgccttactgcactgacwagaactttattttttaattttttgtagggacgggggtctcactatgttgcccaggccaagtctcaaactcttggcctcaggggatcctcctgcctcagcctcccaatagagctttacatacaaaact

SEQ ID NO: 946860 - DNA, 579 bp, Homo sapiens
tgctcttattctggacatattttgaaagtagagtcaatgggatttcctaaacaactgaacaagtctaagatgaagamgggagttaaggatgactccaaggtttctaaggatgaaactgccatgaatggagatggagaaggcagattacatgtagaacaagtttggaaagtgggggaaatcttgtcctggagacattgtctgagaatattcaatatcaaaatgggaagatgtcaagtaggcaactgtatacacgaacctagagtccagagaagaacaggcgagagatgcaaatctgacagtcctcagcacaaaaatagtatttaaagtcatgagacaggatacaataacaaagaaagtgaggacaaagaacaaaggccctgtgttgagctctgggccacacctccacgtacaggtcaggaagaagagaaaagccaggccgggtgcggtggctcatgcctgtaatcccagcactttgggaggccaaggctggcagatcaccctgaggtcaggagttcgagaccagcctggccaacatggcaaaaccccgtctctactaaaaatacaaaaattagctgggtg

SEQ ID NO: 946861 - DNA, 704 bp, Homo sapiens
cgcacagtggctcacgcctgtaatcccagcactttggaaggctgaagagggcagattgcttgaggtcaggaatttgagaccagcttggccaacgtggttaaaaccgtctctactaaaaatacaaaaattrgctgggtgtggtggtgcacacctgtaatcctggctacttggaggctgaggcatgagaatcacttgaacccaggaggtggaggttgcagtgagccgaaatcatgccatttcattccagcctgggcaacagagtgagactccgtctcaaaaaaaaaaaaaaaaaaaaaaaaaaggtcattaaattggtggaacagtattcccttcccttctttttaaattacgacataatgtcaggcgtggtagctcatgtctgtaatcccagcactttgggaggaccaggcaggtggattacctgagctcaggagctcaagaccagcctgggcaacgtggcagaaccctgtctttaccaaaaacacagaaaacagccaggcatggtggtgcacgcctgtggtcccagctacttgggaggctgaggtgggaggactggttgggcctgggaggcagaggttgtgcagtgagccgagatcatgcaactacactccaatctgggtgacagagggagaccccgtttcggggtaaaaaaaaaaggacataacatcttgtatatacatgcaaatgcaaagccacgaactcac

SEQ ID NO: 946862 - DNA, 635 bp, Homo sapiens
tttttaacaatcttctttctacgctttgtgaattttggaaatkcttccatacagatttgttactccttactttaaaatgttcttctgtggcttactaaacactatggattttttctttgaaatatttgccgtctgagtgatgtaagcttgctggagtcagtctcaccgtgatgtggtgtgtaaagccagcgtcgtgtcatctatgtatcagcccccggcagttcccccttcattccctaaccttttacctattcacgcactcactgagcagattgttttaaacatctgcttccgaaaggcacgtgtcagacactaagaacagtgcacaaagatgtgtggttcttgcccccaacacgtgggactctctcagccaaggagtgggagggagcagttatccaacaatttcaggacgaatggctctcctacaaactcgggatcggggcagcttcatccacattcagaaaaggatgctcttctcacccaagttgattctgaagtctttggtgagttatggaatatttgatctcttattgttgtagtttttcaaccaaaaaaagaaagaaaccatgatttgaccaagaaagaactgtggggaaaaagcacctcagtgtaaaataacaatctatgaccaacta

SEQ ID NO: 946863 - DNA, 606 bp, Homo sapiens
aagtcctgatttaagactatattcyatagctacaataatcaaaacagcatgatactgatatagaagttaaaaaggaattatttaggcagttagtaagggtaaaagaattctcagtggaatttccttttaataaaaagcagcccccacatcatttcttttctaacaaaaatcaacctgaaaaatcaagctgcaagcattgatacacaagctggaagcttgcataggtgaatactggcagccgtgccgataccaaagagatacctggaagccaggtacatccaacatggaggttttctcctcccttctctttgttgccaaatgtgcagatgtcatggtgctggccaggtggagatcccacctgtataataaaagattagggtgggatggccagcctaatcacgggctatgtaaatggcacacctggtccaaccaatcccatgggccctatgaaaatcagacactgcctttctaagcccctctataaagtcaactgcatctcaccccaaacctggaaacccactttggttcccttcctctgcatgaggaagctctgtcttctttctttcactttaattaaagttctgctcttaaacccactccttgtat

SEQ ID NO: 946864 - DNA, 710 bp, Homo sapiens
ttttagtgtattttatgtgtggcccaagacaattcttcttccagtgcggcctggggaagccraaagattggacgtccacccatggtctaaacagtcttacagaagaattccttgaaacagttttcttttttttttttgagatggagtcttgctctgttgcccaggctggagtgcagtgatgcgatctccactcactgcaagctacgcctcctgggttcatgctattctcctgcctcagcctcccgattagctgggactacaggcacccgccaccatgcctggctaattttttgtatttttagtacagacagggtttcaccatgttagccaggatggtctcgatctcctgacctcgtgatccgcccgcctcggcctcccaaagtgctgggattacaggcgtgagcctccgtgcccggccgaaacagttttctttacttgttatttccactttttctgcttccattttctcctgagctcacttcagttggcttttgtcatcatcaatctatggaaaccattagtatgattgtcacaaatggcctccttgtggccacatttaatggccaattttcacttgctcttagccaaaaggccaagaagcgatcaatgaccaattttcaatgtacccaacagcctttgacaaagttgattatgccttccttttttgaaacactttcttcactgaacgctacactcactttaactcctac

SEQ ID NO: 946865 - DNA, 240 bp, Homo sapiens
taccaaacagttgatgttggagaagcatgtccagctgacgcatggcatcaaggaccctgacctgaaagaaatgayagacgccatcaatgaggaggaaacagaaataaaagaagaccccaaggtccccagtcccaagtggaagttgaaagaaccggttctggagttcaggcctcccagaggagcaatcactcaaccaaagctgaaaatcaatgtttttaaggttcacaagtgtgccgtgtg

SEQ ID NO: 946866 - DNA, 622 bp, Homo sapiens
tgatccgcctgccttgacctcccaaagtgctgggattacaggcgtgagccaccatgcccgactggcttcccagtactcttaaaatacagacaaaaatcccatagtagtgctcacagtcctgcatggccagccccttcctgcctcacctggtgccatatttctttgggcttctatactctcactggtctccatgtcccttcctaccacagggcttttgcacttgttgccataccacggaaagccttcttcccttcagatctcatgtcctcagagaaacctcctctaactaggtccatgtccattatagcttctcaacaccccgtggacctctccttcaaaccatttacctgagctgccattttatacaattttggaggatgatttattactatctattttctttacaagtgtagatgcttgatgaagtttgagaccacgcctgtttctgctcaccccagcaaagcagttagcaaattgtgagcctgcaactgtttgaagagaaatggggactttatgacccttctgtcccttctagctttcacactcggtcatttttccygccaaccctcacatacaagttgtctactgctgcctcagttcctttctatccctagcctcctta

SEQ ID NO: 946867 - DNA, 680 bp, Homo sapiens
caaacgactgcaccagttctccaacaagagttcttaaccagactgaactggctggcatgacagaaatagaattcagaacatggataggaaaaaagatcactgagatttaagaggatggcaaaacccaatcccaggaaaatatgaatcacaatgaagcaatacaggagctgaaggatgaaatagccaagataaaaaagaacctaacggttctgacagagctgaataacacaatataagattttcacaatgtagtcacaagtattaacagcagaataaatcaagctgaaggaagactctcacaacctgaagactggttctctgaaatcagacagccaaaaataaagaaaaaagaataaaaaggaatgaacaaaatctctagaagtatggcattatgtaaaggggccaaatctatgaatcactggtatcccagaaagggagggggagaaagcaaacaacttggaaaacatatttcaggatattgtccatgaaaacttccacaaccttgctaaagaggccaacgatcaaattcagaaaatacagagaactcctgcaggatactacacaagaagatcacccccargacacataatcatcagattttccaaggtcaaaatgaaagaaagaatgttaaaggcagctagagagaaagggcaggtcacctacaaagggaacctgatcaa

SEQ ID NO: 946868 - DNA, 637 bp, Homo sapiens
caattctgctctctgcttccatgagtwagacatttttctattccacatatgtattaggccatacttgcactgctacaaagaaatacctgaagctgggtaattttttttttttttgagatggagttttgctcttgttgtccaggctgcagtgcaatggcacgatctcagctcactgcaatctccgcctcccgggttcaagtgattctcctgcctcagcctcccaagtagctgggattacaggcatgcaccaccacgcctggctaattttgtacttttagtaaagacggggtttctccatgttggtcaggctggccttgaactcctgacttaaggtgatctgcctgcttgccttcccaaagtactgggattacaggcatgagtcaccgtgcctggtgaggctgggaaagttattaaaaaaagaaaaaagaagtttaattgtctcacagttctctaggctgtacagggagcatggtgccaggcatccacttggcttctgatgaggtctcaggaagcttacaattatagcaaaaggagaagggggagccaccacttcacattggtatagcaggagggagagagtaggctgggaggtgctacacacttttaaacaaccaggtatcgcaagaactcattcatt

SEQ ID NO: 946869 - DNA, 585 bp, Homo sapiens
gttgaagccaatgctcatttaccacttcaaaaatttcagggctattaagaattgtgctaaatatactctacctgtgttttataaattcaacaacaaagcctggatgcacatttgtttacagcatggtgtactaaatattttaagcccacagttgtgacctactgatcagaaaaaaatgtttcttttaaaatattactactcattgacaatccacctggttacccaagagctctgacagcaatgtacaaggagattaatgttgttttcatgcctgctaatataatatttattctacagcccatggatcaaggaataatgttaactttcaagtcaatactaagacatacacttcataaggctaaaactgccacagatgctgattcctgtgatggatttggtccaagtaaattgaaaaccttctggaaagggtccaccattctagatgccaatatggacattcatgatwcatgggaggaggtcaaaatatcaacattaataggagcttggaagaagttgattccagccctcatggatcactttgaggggttcaagatttcagtggaggaagtcactggcaatgtggta

SEQ ID NO: 946870 - DNA, 543 bp, Homo sapiens
ggactactggatactggctctgagctgacattgagttcaggggacccaaaatgtcattgtggtcttccacttaaaatagggacttatgaagggtcaggtaattaatggagttttgctcaggtacaacttacagtgggtccagtataagactggtagggtgagggctactatggtgggaaaggccaaacagaagccattagaactgcctctacctagaaaaataccaaataaaagacacgatcacaaccctggagggattgtggagattagtgccgccatcaaggacttgaaagatgcagtagtggtgattcccaccacatccccattcaactctcccatttggcctgtgcagaagacagatggatcttggagaatgacagtagattatcataagcttaacaaagtggtgactccaattgcagttactgtaccwgatgtggtttattgcttgagcaaattatcacatttcccagtacctggtatgcagccattgacttggcaaatgccttttttgtaattcctgtccataaggcccaccagaag

SEQ ID NO: 946871 - DNA, 522 bp, Homo sapiens
aagcaagggggaggagaaggaagagaaattgtagtcgagggcggggtctgggggccggctctggtgctygacctcaggggagctggctcctgtccccgatccgccccagacaggtctaagctacctctttgcacctgggaactctgtgccttttgagagttgaaggcttaaaacaacaacaaccaccacaacaaaactattcacctttttatccaatagaaactaaggtaggtgtggctattcctttattatttaaaagaaaaaaagggaggtaacaaaaccttttacactcaggtgtttcaggaaaaggtttcacgccactagtttgataattgagaaacatcactcacacaaaggcccccctcttcacgcggacagggtgtcccctgggcaagggggaggggagggagagcccgccaacctgatgaatcatctagaaggccacgccttcagcggtcttgcctttggcgaagggcaggatccaacttgggaggggatcacaggcttcggttcaaggccttg

SEQ ID NO: 946872 - DNA, 637 bp, Homo sapiens
gtcatctttctcctgaagacctcacagagttccaacagycacctgctagcccttccccttccccacatcccttctggcttcaccctcagatccacacaccatcttctccctatttttagaaaaactctcagaccccaaacagtcctggatgaggggatgaggaggagtggctgggttttcactttctccccagaggatgactccagtgctgtcttctgtctccccactcttactcctggggtgggcagaataattattccccagagatgtccagctcctaatcctcagaacctctgagtatgtcacttcatatggcaaaagggactttgcagatgtaattaagaatcttttggggaggagccaagatggccgaataggaacagctctggtctacagctcccagcctgagcgacacagaagacgggtgatttctgcatttccatctgaggtaccgggttcatctcactagggagtgccagacagtgggcgcaggtcagtgggtgcgcgcaccctgcgccagccgaagcagggcgaggcattgcctcacttgggaagcgcaaggagtcagggagttagttccctttcctaatcaaagaaaggggtgacagacagcaccgggaaaatcaggtcactccca

SEQ ID NO: 946873 - DNA, 676 bp, Homo sapiens
agccccagtatttagggaggccaaggtggacttgagcccaggtgtttgagaccaggctgagtatcatggagaaacctatcactacaacaaatagaaaaactagaaaaattagctgggtgtggtggtgcatgcctgtagtcccagctacttgagaggctgaggagggaaaatcacttgaactcaggaggtggaggttgccaggagccaagatcatgccactgcactccagcccctgggtgacaaagcgagagcctgtcttaaaaaaaaaaaaaaaaaagtttttcaattatccacttcagcttactgatggactctgaaagtatatatttttgcatatgtaaggaaatcagacatcatttttttccacttgacctccagaattcttaaagtcaccaccttatttgtcatcactgaacacacaggccaaaggttttgccaggcatgcacaactgtctttagtcactgcattctaagccctggcaacagcttatacagcattctttatgccaaatttattttggaaacctcccacatccacacctcagttcaatgctgctggagtkcttttcaagatagtgttctcatatttactcttcattgatctaagaataccctgatccacatgactgaattagtaaagccacatttgggagaaagtacacagcataaacgttct

SEQ ID NO: 946874 - DNA, 633 bp, Homo sapiens
gagccgagatcgcacaactgcactccagcctaagtgacagagtgagactttgtctcaaaaaataaagaaaaagaaaaaaaaactaaataaaaaacttatcagaggcatgaagttaaaattctcacaacttgaaaacaagcactttttaaatattatttttgtagctggataagttaattccagtcacttcctgttagatgagagatttggaatcagaaagattgtaactggctcctgacgcctcattattcactgttaattgaatgaattttgtgacttaacccagggttaggagggaatcaagagctcttaacctgacagtagtggggttgatgcagaaactgcagagctgacttcatgttaacaaccaagatgtgcttttcttatatgagactagaatgtgttatcagatgtaacatcctctttggggaggtatttgaacctaaattatcttcttcaggccagaggctatgctccattagcatttagcaggagaccaagtaatttttctacctttaaawctaatttttctccttgttggtggtgatagtagcttttctttaattcttaagacaaaatttcagaaaagctagaattttaaacatgacagcttcaaaaatggtcatctcagaa

SEQ ID NO: 946875 - DNA, 598 bp, Homo sapiens
gcctctatacggtaacagctcaatgaatagtgcccagttctaagacctgccatcttkccactgcgtgagattataccatggcgacttttagagaagccccaccagtctcagtctgtgagtctttcaggtatctgagatgatcactaaaatgtttccaatccttgtaatgccattctcagttccattcctagatacaggtgagaagtcttcagcttcagtatttcagtggtttattcggaaagcaagtataggcagataagttgatgtcagctccctgccaaattcttggaacagcttgggaaaacataaaatgattagcaaacagccctcccacccaggctggagtgtaggaatgcagtggtgcaaacatagctcactgcagccttgaactcctaggctcaagcaatcctcctccctcagcttcctgagtagctgaaactgtaggcatacatcaccatgctcagctaattttgaaactttttgttgtagagtcagagtcttgctatgttgtttaggctggtctccaactcctgggctcaagtgatcctcctgcctcagcctcccaatgtgctgggattacagatgcacatcaccacac

SEQ ID NO: 946876 - DNA, 795 bp, Homo sapiens
ctgccttgctaaggtctctggtttttataggcccatgatgggggcayggcaggccagggtggtcttggaaaatgctacatttcggcatgaaagcagaagtgcctgtccttacctaggtccgtgggggtggagccctagccagggaccacgtcctcctctacccaacacttcccttctccccttccctatcatttaaagggaccacgctcttcccttcccagcacttccatatcagtttggtacacaggtaaacttgtgtcatggaggtttgttgtacagattgtttcatcatccaggtattaagcctaatgcccatttgttatttttcccgttcttctctctcctcctatcctccaccctaatgtttccctctgtgtgtccgtatgctctcatcgtttagctcccactataagtgagaacatgctgtatttggttttctgttcctgtattagtttgctaaggataatggcctccagctccattaatgtttgcgcaaaggacatgatcttattcttttttatagctgcatagttttccatggtgtatatgtactacattttctttatccagtctatcattgttgggcatttagggtgattccatgtccttgctgttatgaatagtgctgcagtgaacatatgtgtgtatgtggctttataataaaatgatttatgttcttttgggtatatgcccagtaatgggattgctgggctgaatgacatttctgtctttaggtctttgaggaatcatcacactgtcttccaaaatagtagaactaatttacactcccaccaa

SEQ ID NO: 946877 - DNA, 791 bp, Homo sapiens
ataggaatgctagtaatttttgcacattgattttgtatcccgagattttcctgaagttgcttatcagcttaataagcttttgggttgagactatggggttttctaaaaatatgatcatgtcatctgcaaacagggataattgacttcttctcttactatctgaaagttctttatttctttatcttgcctgattgccctggccagaacttccaatactatatttaataggagtagtgagagagggcaaccttgtcttgtgccagtttccaaggggaatgcttccagcttttgcccattaagtatgatattagctgtgggcttatcatatatggtgcttattcttttgaggtatgtttcttcaatacctagtttattgagagtttttaacatgaatgaatgttgaattttattgaaagccttttctgtatcttttgagataatcatatggttttggcctttagttctgtttatgtgatgaataacatttattggtttgtgtaggttgaaccaaccttgtatcccggggatgaagtctacttgaccgtggtggatacgccttttgatctgctgctcaattcggtttgccagtattttgttgaggatttttgcatcaacattcatcaagaatattggcctgaagttttttgttgttgttgttgttgtatatctgccaggttttggtatctggatgatgctggcctcatagaaggagtttgggaggaatccctcctcctcaayttttttgaatagttttggtatgagtaataccagctcttctttgtacatctggt

SEQ ID NO: 946878 - DNA, 628 bp, Homo sapiens
gatgaaaaggatgaagaagccccagaggaagtgatgccggcaaagacagcaacaaacttcatattaaaggaactcttgtagatattgcatgacgttgacaatgttagatgctgttccgaaaacagcacgacagttcaccaaggcatagaaacactgctggctccttatcataagctatacgacaagagggaggcaagcactgttcaaactgggcttgatacacgtctataaataaataaagcactttaattggctgttgtttaatgttttaaattacagtgtaaaaatgaagtactcccaaccaggcacggtggctcactcctgtaatcccagcactttgggaggctgaggcggataatgaggtcaggagatcaagatcatcctggctaacacagtgaaaccctgtctgtactaaaaatagaaaaaatcagcctggtgtggtggcatgccacaactacttgggaggctgaggcagaagaatcgcttgaacccaagaagtggagcttgcagtgagccgagatcgtgccaytgcactccattctgggcgacagagcgagactccatctcaaaaaaaaaaaagtactaatttcactatgtttcatttccttatacatttataaccaacagt

SEQ ID NO: 946879 - DNA, 628 bp, Homo sapiens
gatgaaaaggatgaagaagccccagaggaagtgatgccggcaaagacagcaacaaacttcatattaaaggaactcttgtagatattgcatgacgttgacaatgttagatgctgttccgaaaacagcacgacagttcaccaaggcatagaaacactgctggctccttatcataagctatacgacaagagggaggcaagcactgttcaaactgggcttgatacacgtctataaataaataaagcactttaattggctgttgtttaatgttttaaattacagtgtaaaaatgaagtactcccaaccaggcacggtggctcactcctgtaatcccagcactttgggaggctgaggcggataatgaggtcaggagatcaagatcatcctggctaacacagtgaaaccctgtctgtactaaaaatagaaaaaatcagcctggtgtggtggcatgccacaactacttgggaggctgaggcagaagaatcgcttgaacccaagaagtggagcttgcagtgagccgagatcgtgccactgcactccaktctgggcgacagagcgagactccatctcaaaaaaaaaaaagtactaatttcactatgtttcatttccttatacatttataaccaacagt

SEQ ID NO: 946880 - DNA, 628 bp, Homo sapiens
gatgaaaaggatgaagaagccccagaggaagtgatgccggcaaagacagcaacaaacttcatattaaaggaactcttgtagatattgcatgacgttgacaatgttagatgctgttccgaaaacagcacgacagttcaccaaggcatagaaacactgctggctccttatcataagctatacgacaagagggaggcaagcactgttcaaactgggcttgatacacgtctataaataaataaagcactttaattggctgttgtttaatgttttaaattacagtgtaaaaatgaagtactcccaaccaggcacggtggctcactcctgtaatcccagcactttgggaggctgaggcggataatgaggtcaggagatcaagatcatcctggctaacacagtgaaaccctgtctgtactaaaaatagaaaaaatcagcctggtgtggtggcatgccacaactacttgggaggctgaggcagaagaatcgcttgaacccaagaagtggagcttgcagtgagccgagatcgtgccactgcactccattctgggcgacagagygagactccatctcaaaaaaaaaaaagtactaatttcactatgtttcatttccttatacatttataaccaacagt

SEQ ID NO: 946881 - DNA, 642 bp, Homo sapiens
tggaatagactaagatacttgcctaccaagaagtataaggaaaagtttcacaaaggagatatttgaactgtgccttgaaagacgcagagaactgttgtgtggaacartccagtttgaggaagtgtcagaagggaaggcactaaaatataaaagtagaccatacctaatggggtggaggaggactcaaagtgtcttggtctattgggagataagtttcagatatacaatatactaatttcccaattttgaaaatttataatttatacttgcctacgaattctttgtacagttaagaaacctatttcactttattagatgaaataaggtgaaatagatttcttaactgtacaaagacaaacttcccagaatacatacacacacacatgcacacacgcatgcacataaatacatacatgcgtgcacaagcatacatacatgtttctttttcctttgggaatcactagggtttgggtagtggaacaaatggggaagacaggctggggccagaaggagaggaatgtgggcagtgtaatgaggaggttaccctgtaaactgcttgggctggaggctgcaacccccagcggacaaggtttccagcggagtcaggcatagaaaggcccaaggctccacatgacacttctt
